United States Patent Application Publication US 2024/0327476 A1 - sequence listing, part 5

SEQ ID NO: 4363 - DNA, 4572 bp, Homo sapiens
  source 1..4572: mol_type = unassigned DNA
ggcccatcggggctaggggaaccccggcgcagacctggggtggggtcggaaaagctgtttcatcgcccgctcccgggccctccgctccctccctccctccctctctccctggcaggactccccgccaggcctccccgccactctccgcggcgcattccgggaggcagcggccgcagcggcctcgccatgtcccagcccggccagaagcccgccgcctccccgcggccccggcgagcagccgccgcccgccgcacccatgagcatgtcagtgaaaaaaccagtgaatcgccttccaaaccaggagaaaagaaaggatcagatgagaaaaaagcagcaagcctcggcagcagtcaatcctccagaacctatgctggtggaacagcctcggccaccaaggtgtcagcttcctctggtgcaaccagcaagtcttccagtatgaatcccacagaaaccaaggccattccagtcagccaacagatggaaggaccacatcttcctaacaagaaaaaacacaaaaaacaggctgtaaaaacagaacctgagaagaagtcacagtcaaccaagccaaaaagcctacccaagcaggcatcagatacaggaagtaacgatgctcacaataaaaaagcagtttccagatcagctgaacagcagccatcagagaaatcaacagaaccaaagactaaaccacaagacatgatttctgctggtggagagagtgttgctggtatcactgcaatatctggcaagccgggtgacaagaaaaaagaaaagaaatcattaaccccagctgtgccagttgaatctaaaccggataaaccatcgggaaagtcaggcatggatgctgctttggatgacttaatagatactttaggaggacctgaagaaactgaagaagaaaatacaacgtatactggaccagaagtttcagatccaatgagttccacctacatagaggaattgggtaaaagagaagtcacaattcctccaaaatatagggaactattggctaaaaaggaagggatcacagggcctcctgcagactcttcgaaacccatagggccagatgatgctatagacgccttgtcatctgacttcacctgtgggtcgcctacagctgctggaaagaaaactgaaaaagaggaatctacagaagttttaaaagctcagtcagcagggacagtcagaagtgctgctccaccccaagagaagaaaagaaaggtggagaaggatacaatgagtgatcaagcactcgaggctctgtcggcttcactgggcacccggcaagcagaacctgagctcgacctccgctcaattaaggaagtcgatgaggcaaaagctaaagaagaaaaactagagaagtgtggtgaggatgatgaaacaatcccatctgagtacagattaaaaccagccacggataaagatggaaaaccactattgccagagcctgaagaaaaacccaagcctcggagtgaatcagaactcattgatgaactttcagaagattttgaccggtctgaatgtaaagagaaaccatctaagccaactgaaaagacagaagaatctaaggccgctgctccagctcctgtgtcggaggctgtgtgtcggacctccatgtgtagtatacagtcagcaccccctgagccggctaccttgaagggcacagtgccagatgatgctgtagaagccttggctgatagcctggggaaaaaggaagcagatccagaagatggaaaacctgtgatggataaagtcaaggagaaggccaaagaagaagaccgtgaaaagcttggtgaaaaagaagaaacaattcctcctgattatagattagaagaggtcaaggataaagatggaaagccactcctgccaaaagagtctaaggaacagcttccacccatgagtgaagacttccttctggatgctttgtctgaggacttctctggtccacaaaatgcttcatctcttaaatttgaagatgctaaacttgctgctgccatctctgaagtggtttcccaaaccccagcttcaacgacccaagctggagccccaccccgtgatacctcgcagagtgacaaagacctcgatgatgccttggataaactctctgacagtctaggacaaaggcagcctgacccagatgagaacaaaccaatggaagataaagtaaaggaaaaagctaaagctgaacatagagacaagcttggagaaagagatgacactatcccacctgaatacagacatctcctggatgataatggacaggacaaaccagtgaagccacctacaaagaaatcagaggattcaaagaaacctgcagatgaccaagaccccattgatgctctctcaggagatctggacagctgtccctccactacagaaacctcacagaacacagcaaaggataagtgcaagaaggctgcttccagctccaaagcacctaagaatggaggtaaagcgaaggattcagcaaagacaacagaggaaacttccaagccaaaagatgactaaagaaatacaagttaaggtatctggtatctgcatgtaaaatcttcagctggtggatggtgacttttgaagaacaaaaggctttggcaacagaaaacaattgttctgggtgatttctagaatggtttttgttgagtctctgaacatcctaaatattggtttgttattcttttccagaaagaaaatgaatttgactggttcacctgtgtactgagtattgataaactttgaatttttttaattgccttcaattgggagagaaagctttatatttgtaagaaatatatttgataaagtttcttaaagcaacaccaaaaaaacaaaagaaaagctaagtgaatttttgcacattctacacacagtgcctgtaaatctcatttgtattttcagtttgcccttaattttttttgttagtgtttagaaaacaatgttttaaacattcttcagtgttctgatttcttattaccccctttcctcttgggcttttgaactgtatttgatgttgctttgggataatgtttataagtcaaacataagatattgtacattgggcacatatctcctcttgggctgctaataataaattaataacaggtaacctggacaaaccaggaagcaccaaaccccttttcagtttgaactcttctttgccaggtgtgaggacttctgcatcttacagtcagcacagaacacactgagacttgaatcaagtcagcaacagagcaaaataaaggttagataagtccttgtgtagcaaatttcgagcataagaaataaaatctaattaattcttagggtactcatctgacttgaactctgttggtttactgtgttagtaaactgtgctttctattatctatacataaaacctgagcagcaactgtgtctttagagctattgccacattagcctttgcactgtatagcgtctggctttatggaacttaagtttaccaaatataaaaagaaacttctgcttttaaaaaaattatatatatatattaaatttgaaacctgcatttctcccacagcaatgtaagaagtaggctctgatgtcctaccactttgaatggttttctaatatcttaatgaatagttcctgaacattgcactgatatcatcgattagaattttgatatttaatttcatctttatttcctggtagagaatgcaggaaaagatgtcaggtacataacataaaacagattgggaatttattgtttccaaagggcatggccttccttagcatcagtttgaagcttttgttatgacttagctgacttgtggcagcggggcaagcaaaaacaataacactgcttataaatggcaccacatcttgttaacctcccccccaaatactctctgaaagtcatgcacatacctatgggattttacacaccaccagcttaaaatgctatgtctctatccatcagaaatagtcattattctatttttaaggcagcaacaagaaaagaaaaaacacttttcctgagggatttctaaccatgtatctaatcctcccatttgggcagtataggtgtttgcttttttgttttctttttttaagaaaaaccttgaaacctttgacactgacagatgtgtttgcaaggatacggcttcagtattactaatttccatgtgtatctggaagtatttttaaatggcataccaaaatccagaagtttaaagatgcctataaaagtaaacaacatttatttaaaaagaactctgaatatgccttcttttttaattagaaatatcttcgagacttgggtgtttgttaataactaataactggagtaagctacaggatctaaagcagccctttttacagtctagttaggagagagaaaataattgcaaatatccacttagaggcaaagaacaattttttattatcaaaaaggtttctgcacattgttgtggcaatattgtatctgtttagaaaatgggcttttccaaaagcaaacaaagataggttcctcaggtgaccaaaactgaaaatcaatatttccatgtttcattaatcaaggcataaaatacaattaaagcaaaatattttacattaaaa

SEQ ID NO: 4364 - DNA, 4629 bp, Homo sapiens
  source 1..4629: mol_type = unassigned DNA
ggcccatcggggctaggggaaccccggcgcagacctggggtggggtcggaaaagctgtttcatcgcccgctcccgggccctccgctccctccctccctccctctctccctggcaggactccccgccaggcctccccgccactctccgcggcgcattccgggaggcagcggccgcagcggcctcgccatgtcccagcccggccagaagcccgccgcctccccgcggccccggcgagcagccgccgcccgccgcacccatgagcatgtcagtgaaaaaaccagtgaatcgccttccaaaccaggagaaaagaaaggatcagatgagaaaaaagcagcaagcctcggcagcagtcaatcctccagaacctatgctggtggaacagcctcggccaccaaggtgtcagcttcctctggtgcaaccagcaagtcttccagtatgaatcccacagaaaccaaggccattccagtcagccaacagatggaaggaccacatcttcctaacaagaaaaaacacaaaaaacaggctgtaaaaacagaacctgagaagaagtcacagtcaaccaagctgtctgtggttcatgagaaaaaatcccaagaaggaaagccaaaagaacacacagagccaaaaagcctacccaagcaggcatcagatacaggaagtaacgatgctcacaataaaaaagcagtttccagatcagctgaacagcagccatcagagaaatcaacagaaccaaagactaaaccacaagacatgatttctgctggtggagagagtgttgctggtatcactgcaatatctggcaagccgggtgacaagaaaaaagaaaagaaatcattaaccccagctgtgccagttgaatctaaaccggataaaccatcgggaaagtcaggcatggatgctgctttggatgacttaatagatactttaggaggacctgaagaaactgaagaagaaaatacaacgtatactggaccagaagtttcagatccaatgagttccacctacatagaggaattgggtaaaagagaagtcacaattcctccaaaatatagggaactattggctaaaaaggaagggatcacagggcctcctgcagactcttcgaaacccatagggccagatgatgctatagacgccttgtcatctgacttcacctgtgggtcgcctacagctgctggaaagaaaactgaaaaagaggaatctacagaagttttaaaagctcagtcagcagggacagtcagaagtgctgctccaccccaagagaagaaaagaaaggtggagaaggatacaatgagtgatcaagcactcgaggctctgtcggcttcactgggcacccggcaagcagaacctgagctcgacctccgctcaattaaggaagtcgatgaggcaaaagctaaagaagaaaaactagagaagtgtggtgaggatgatgaaacaatcccatctgagtacagattaaaaccagccacggataaagatggaaaaccactattgccagagcctgaagaaaaacccaagcctcggagtgaatcagaactcattgatgaactttcagaagattttgaccggtctgaatgtaaagagaaaccatctaagccaactgaaaagacagaagaatctaaggccgctgctccagctcctgtgtcggaggctgtgtgtcggacctccatgtgtagtatacagtcagcaccccctgagccggctaccttgaagggcacagtgccagatgatgctgtagaagccttggctgatagcctggggaaaaaggaagcagatccagaagatggaaaacctgtgatggataaagtcaaggagaaggccaaagaagaagaccgtgaaaagcttggtgaaaaagaagaaacaattcctcctgattatagattagaagaggtcaaggataaagatggaaagccactcctgccaaaagagtctaaggaacagcttccacccatgagtgaagacttccttctggatgctttgtctgaggacttctctggtccacaaaatgcttcatctcttaaatttgaagatgctaaacttgctgctgccatctctgaagtggtttcccaaaccccagcttcaacgacccaagctggagccccaccccgtgatacctcgcagagtgacaaagacctcgatgatgccttggataaactctctgacagtctaggacaaaggcagcctgacccagatgagaacaaaccaatggaagataaagtaaaggaaaaagctaaagctgaacatagagacaagcttggagaaagagatgacactatcccacctgaatacagacatctcctggatgataatggacaggacaaaccagtgaagccacctacaaagaaatcagaggattcaaagaaacctgcagatgaccaagaccccattgatgctctctcaggagatctggacagctgtccctccactacagaaacctcacagaacacagcaaaggataagtgcaagaaggctgcttccagctccaaagcacctaagaatggaggtaaagcgaaggattcagcaaagacaacagaggaaacttccaagccaaaagatgactaaagaaatacaagttaaggtatctggtatctgcatgtaaaatcttcagctggtggatggtgacttttgaagaacaaaaggctttggcaacagaaaacaattgttctgggtgatttctagaatggtttttgttgagtctctgaacatcctaaatattggtttgttattcttttccagaaagaaaatgaatttgactggttcacctgtgtactgagtattgataaactttgaatttttttaattgccttcaattgggagagaaagctttatatttgtaagaaatatatttgataaagtttcttaaagcaacaccaaaaaaacaaaagaaaagctaagtgaatttttgcacattctacacacagtgcctgtaaatctcatttgtattttcagtttgcccttaattttttttgttagtgtttagaaaacaatgttttaaacattcttcagtgttctgatttcttattaccccctttcctcttgggcttttgaactgtatttgatgttgctttgggataatgtttataagtcaaacataagatattgtacattgggcacatatctcctcttgggctgctaataataaattaataacaggtaacctggacaaaccaggaagcaccaaaccccttttcagtttgaactcttctttgccaggtgtgaggacttctgcatcttacagtcagcacagaacacactgagacttgaatcaagtcagcaacagagcaaaataaaggttagataagtccttgtgtagcaaatttcgagcataagaaataaaatctaattaattcttagggtactcatctgacttgaactctgttggtttactgtgttagtaaactgtgctttctattatctatacataaaacctgagcagcaactgtgtctttagagctattgccacattagcctttgcactgtatagcgtctggctttatggaacttaagtttaccaaatataaaaagaaacttctgcttttaaaaaaattatatatatatattaaatttgaaacctgcatttctcccacagcaatgtaagaagtaggctctgatgtcctaccactttgaatggttttctaatatcttaatgaatagttcctgaacattgcactgatatcatcgattagaattttgatatttaatttcatctttatttcctggtagagaatgcaggaaaagatgtcaggtacataacataaaacagattgggaatttattgtttccaaagggcatggccttccttagcatcagtttgaagcttttgttatgacttagctgacttgtggcagcggggcaagcaaaaacaataacactgcttataaatggcaccacatcttgttaacctcccccccaaatactctctgaaagtcatgcacatacctatgggattttacacaccaccagcttaaaatgctatgtctctatccatcagaaatagtcattattctatttttaaggcagcaacaagaaaagaaaaaacacttttcctgagggatttctaaccatgtatctaatcctcccatttgggcagtataggtgtttgcttttttgttttctttttttaagaaaaaccttgaaacctttgacactgacagatgtgtttgcaaggatacggcttcagtattactaatttccatgtgtatctggaagtatttttaaatggcataccaaaatccagaagtttaaagatgcctataaaagtaaacaacatttatttaaaaagaactctgaatatgccttcttttttaattagaaatatcttcgagacttgggtgtttgttaataactaataactggagtaagctacaggatctaaagcagccctttttacagtctagttaggagagagaaaataattgcaaatatccacttagaggcaaagaacaattttttattatcaaaaaggtttctgcacattgttgtggcaatattgtatctgtttagaaaatgggcttttccaaaagcaaacaaagataggttcctcaggtgaccaaaactgaaaatcaatatttccatgtttcattaatcaaggcataaaatacaattaaagcaaaatattttacattaaaa

SEQ ID NO: 4365 - DNA, 2425 bp, Homo sapiens
  source 1..2425: mol_type = unassigned DNA
gtgtgagcccggcgcctccaacgcaacaccccgcgccctcgccggctcccccgccgtgcggatcggagccagccggttgttgccatggcattcgccagctggtggtacaagacgcatgtcagtgaaaaaaccagtgaatcgccttccaaaccaggagaaaagaaaggatcagatgagaaaaaagcagcaagcctcggcagcagtcaatcctccagaacctatgctggtggaacagcctcggccaccaaggtgtcagcttcctctggtgcaaccagcaagtcttccagtatgaatcccacagaaaccaaggctgtaaaaacagaacctgagaagaagtcacagtcaaccaagctgtctgtggttcatgagaaaaaatcccaagaaggaaagccaaaagaacacacagagccaaaaagcctacccaagcaggcatcagatacaggaagtaacgatgctcacaataaaaaagcagtttccagatcagctgaacagcagccatcagagaaatcaacagaaccaaagactaaaccacaagacatgatttctgctggtggagagagtgttgctggtatcactgcaatatctggcaagccgggtgacaagaaaaaagaaaagaaatcattaaccccagctgtgccagttgaatctaaaccggataaaccatcgggaaagtcaggcatggatgctgctttggatgacttaatagatactttaggaggacctgaagaaactgaagaagaaaatacaacgtatactggaccagaagtttcagatccaatgagttccacctacatagaggaattgggtaaaagagaagtcacaattcctccaaaatatagggaactattggctaaaaaggaagggatcacagggcctcctgcagactcttcgaaacccatagggccagatgatgctatagacgccttgtcatctgacttcacctgtgggtcgcctacagctgctggaaagaaaactgaaaaagaggaatctacagaagttttaaaagctcagtcagcagggacagtcagaagtgctgctccaccccaagagaagaaaagaaaggtggagaaggatacaatgagtgatcaagcactcgaggctctgtcggcttcactgggcacccggcaagcagaacctgagctcgacctccgctcaattaaggaagtcgatgaggcaaaagctaaagaagaaaaactagagaagtgtggtgaggatgatgaaacaatcccatctgagtacagattaaaaccagccacggataaagatggaaaaccactattgccagagcctgaagaaaaacccaagcctcggagtgaatcagaactcattgatgaactttcagaagattttgaccggtctgaatgtaaagagaaaccatctaagccaactgaaaagacagaagaatctaaggccgctgctccagctcctgtgtcggaggctgtgtgtcggacctccatgtgtagtatacagtcagcaccccctgagccggctaccttgaagggcacagtgccagatgatgctgtagaagccttggctgatagcctggggaaaaaggaagcagatccagaagatggaaaacctgtgatggataaagtcaaggagaaggccaaagaagaagaccgtgaaaagcttggtgaaaaagaagaaacaattcctcctgattatagattagaagaggtcaaggataaagatggaaagccactcctgccaaaagagtctaaggaacagcttccacccatgagtgaagacttccttctggatgctttgtctgaggacttctctggtccacaaaatgcttcatctcttaaatttgaagatgctaaacttgctgctgccatctctgaagtggtttcccaaaccccagcttcaacgacccaagctggagccccaccccgtgatacctcgcagagtgacaaagacctcgatgatgccttggataaactctctgacagtctaggacaaaggcagcctgacccagatgagaacaaaccaatggaagataaagtaaaggaaaaagctaaagctgaacatagagacaagcttggagaaagagatgacactatcccacctgaatacagacatctcctggatgataatggacaggacaaaccagtgaagccacctacaaagaaatcagaggattcaaagaaacctgcagatgaccaagaccccattgatgctctctcaggagatctggacagctgtccctccactacagaaacctcacagaacacagcaaaggataagtgcaagaaggctgcttccagctccaaagcacctaagaatggaggtaaagcgaaggattcagcaaagacaacagaggaaacttccaagccaaaagatgactaaagaaatacaagttaaggtatctggtatctgcatgtaaaatcttcagctggtggatggtgacttttgaagaacaaaa

SEQ ID NO: 4366 - DNA, 2539 bp, Homo sapiens
  source 1..2539: mol_type = unassigned DNA
ctgggcatcgaaggaggaacgctgcaacctccaaccccttctttctgaccaaccgggaccagagcagtgctggggccggggcgggtcaccgggactccccgccaggcctccccgccactctccgcggcgcattccgggaggcagcggccgcagcggcctcgccatgtcccagcccggccagaagcccgccgcctccccgcggccccggcgagcagccgccgcccgccgcacccatgagcatgtcagtgaaaaaaccagtgaatcgccttccaaaccaggagaaaagaaaggatcagatgagaaaaaagcagcaagcctcggcagcagtcaatcctccagaacctatgctggtggaacagcctcggccaccaaggtgtcagcttcctctggtgcaaccagcaagtcttccagtatgaatcccacagaaaccaaggccattccagtcagccaacagatggaaggaccacatcttcctaacaagaaaaaacacaaaaaacaggctgtaaaaacagaacctgagaagaagtcacagtcaaccaagctgtctgtggttcatgagaaaaaatcccaagaaggaaagccaaaagaacacacagagccaaaaagcctacccaagcaggcatcagatacaggaagtaacgatgctcacaataaaaaagcagtttccagatcagctgaacagcagccatcagagaaatcaacagaaccaaagactaaaccacaagacatgatttctgctggtggagagagtgttgctggtatcactgcaatatctggcaagccgggtgacaagaaaaaagaaaagaaatcattaaccccagctgtgccagttgaatctaaaccggataaaccatcgggaaagtcaggcatggatgctgctttggatgacttaatagatactttaggaggacctgaagaaactgaagaagaaaatacaacgtatactggaccagaagtttcagatccaatgagttccacctacatagaggaattgggtaaaagagaagtcacaattcctccaaaatatagggaactattggctaaaaaggaagggatcacagggcctcctgcagactcttcgaaacccatagggccagatgatgctatagacgccttgtcatctgacttcacctgtgggtcgcctacagctgctggaaagaaaactgaaaaagaggaatctacagaagttttaaaagctcagtcagcagggacagtcagaagtgctgctccaccccaagagaagaaaagaaaggtggagaaggatacaatgagtgatcaagcactcgaggctctgtcggcttcactgggcacccggcaagcagaacctgagctcgacctccgctcaattaaggaagtcgatgaggcaaaagctaaagaagaaaaactagagaagtgtggtgaggatgatgaaacaatcccatctgagtacagattaaaaccagccacggataaagatggaaaaccactattgccagagcctgaagaaaaacccaagcctcggagtgaatcagaactcattgatgaactttcagaagattttgaccggtctgaatgtaaagagaaaccatctaagccaactgaaaagacagaagaatctaaggccgctgctccagctcctgtgtcggaggctgtgtgtcggacctccatgtgtagtatacagtcagcaccccctgagccggctaccttgaagggcacagtgccagatgatgctgtagaagccttggctgatagcctggggaaaaaggaagcagatccagaagatggaaaacctgtgatggataaagtcaaggagaaggccaaagaagaagaccgtgaaaagcttggtgaaaaagaagaaacaattcctcctgattatagattagaagaggtcaaggataaagatggaaagccactcctgccaaaagagtctaaggaacagcttccacccatgagtgaagacttccttctggatgctttgtctgaggacttctctggtccacaaaatgcttcatctcttaaatttgaagatgctaaacttgctgctgccatctctgaagtggtttcccaaaccccagcttcaacgacccaagctggagccccaccccgtgatacctcgcagagtgacaaagacctcgatgatgccttggataaactctctgacagtctaggacaaaggcagcctgacccagatgagaacaaaccaatggaagataaagtaaaggaaaaagctaaagctgaacatagagacaagcttggagaaagagatgacactatcccacctgaatacagacatctcctggatgataatggacaggacaaaccagtgaagccacctacaaagaaatcagaggattcaaagaaacctgcagatgaccaagaccccattgatgctctctcaggagatctggacagctgtccctccactacagaaacctcacagaacacagcaaaggataagtgcaagaaggctgcttccagctccaaagcacctaagaatggaggtaaagcgaaggattcagcaaagacaacagaggaaacttccaagccaaaagatgactaa

SEQ ID NO: 4367 - DNA, 2079 bp, Homo sapiens
  source 1..2079: mol_type = unassigned DNA
actcagagagctgggctggagctccaagcggaaaccgcgggagccgagcccagctaggaatgcagacctcctgaaaaccaagccgaggactgcggggtccggtgtccacgcagagtgtcagcttcctctggtgcaaccagcaagtcttccagtatgaatcccacagaaaccaaggccattccagtcagccaacagatggaaggaccacatcttcctaacaagaaaaaacacaaaaaacaggctgtaaaaacagaacctgagaagaagtcacagtcaaccaagctgtctgtggttcatgagaaaaaatcccaagaaggaaagccaaaagaacacacagagccaaaaagcctacccaagcaggcatcagatacaggaagtaacgatgctcacaataaaaaagcagtttccagatcagctgaacagcagccatcagagaaatcaacagaaccaaagactaaaccacaagacatgatttctgctggtggagagagtgttgctggtatcactgcaatatctggcaagccgggtgacaagaaaaaagaaaagaaatcattaaccccagctgtgccagttgaatctaaaccggataaaccatcgggaaagtcaggcatggatgctgctttggatgacttaatagatactttaggaggacctgaagaaactgaagaagaaaatacaacgtatactggaccagaagtttcagatccaatgagttccacctacatagaggaattgggtaaaagagaagtcacaattcctccaaaatatagggaactattggctaaaaaggaagggatcacagggcctcctgcagactcttcgaaacccatagggccagatgatgctatagacgccttgtcatctgacttcacctgtgggtcgcctacagctgctggaaagaaaactgaaaaagaggaatctacagaagttttaaaagctcagtcagcagggacagtcagaagtgctgctccaccccaagagaagaaaagaaaggtggagaaggatacaatgagtgatcaagcactcgaggctctgtcggcttcactgggcacccggcaagcagaacctgagctcgacctccgctcaattaaggaagtcgatgaggcaaaagctaaagaagaaaaactagagaagtgtggtgaggatgatgaaacaatcccatctgagtacagattaaaaccagccacggataaagatggaaaaccactattgccagagcctgaagaaaaacccaagcctcggagtgaatcagaactcattgatgaactttcagaagattttgaccggtctgaatgtaaagagaaaccatctaagccaactgaaaagacagaagaatctaaggccgctgctccagctcctgtgtcggaggctgtgtgtcggacctccatgtgtagtatacagtcagcaccccctgagccggctaccttgaagggcacagtgccagatgatgctgtagaagccttggctgatagcctggggaaaaaggaagcagatccagaagatggaaaacctgtgatggataaagtcaaggagaaggccaaagaagaagaccgtgaaaagcttggtgaaaaagaagaaacaattcctcctgattatagattagaagaggtcaaggataaagatggaaagccactcctgccaaaagagtctaaggaacagcttccacccatgagtgaagacttccttctggatgctttgtctgaggacttctctggtccacaaaatgcttcatctcttaaatttgaagatgctaaacttgctgctgccatctctgaagtggtttcccaaaccccagcttcaacgacccaagctggagccccaccccgtgatacctcgcagagtgacaaagacctcgatgatgccttggataaactctctgacagtctaggacaaaggcagcctgacccagatgagaacaaaccaatggaagataaagtaaaggaaaaagctaaagctgaacatagagacaagcttggagaaagagatgacactatcccacctgaatacagacatctcctggatgataatggacaggacaaaccagtgaagccacctacaaagaaatcagaggattcaaag

SEQ ID NO: 4368 - DNA, 2466 bp, Homo sapiens
  source 1..2466: mol_type = unassigned DNA
agagagctgggctggagctccaagcggaaaccgcgggagccgagcccagctaggaatgcagacctcctgaaaaccaagccgaggactgcggggtccggtgtccacgcagagtgtcagcttcctctggtgcaaccagcaagtcttccagtatgaatcccacagaaaccaaggtatgaagaatgctaattgagccattccagtcagccaacagatggaaggaccacatcttcctaacaagaaaaaacacaaaaaacaggctgtaaaaacagaacctgagaagaagtcacagtcaaccaagctgtctgtggttcatgagaaaaaatcccaagaaggaaagccaaaagaacacacagagccaaaaagcctacccaagcaggcatcagatacaggaagtaacgatgctcacaataaaaaagcagtttccagatcagctgaacagcagccatcagagaaatcaacagaaccaaagactaaaccacaagacatgatttctgctggtggagagagtgttgctggtatcactgcaatatctggcaagccgggtgacaagaaaaaagaaaagaaatcattaaccccagctgtgccagttgaatctaaaccggataaaccatcgggaaagtcaggcatggatgctgctttggatgacttaatagatactttaggaggacctgaagaaactgaagaagaaaatacaacgtatactggaccagaagtttcagatccaatgagttccacctacatagaggaattgggtaaaagagaagtcacaattcctccaaaatatagggaactattggctaaaaaggaagggatcacagggcctcctgcagactcttcgaaacccatagggccagatgatgctatagacgccttgtcatctgacttcacctgtgggtcgcctacagctgctggaaagaaaactgaaaaagaggaatctacagaagttttaaaagctcagtcagcagggacagtcagaagtgctgctccaccccaagagaagaaaagaaaggtggagaaggatacaatgagtgatcaagcactcgaggctctgtcggcttcactgggcacccggcaagcagaacctgagctcgacctccgctcaattaaggaagtcgatgaggcaaaagctaaagaagaaaaactagagaagtgtggtgaggatgatgaaacaatcccatctgagtacagattaaaaccagccacggataaagatggaaaaccactattgccagagcctgaagaaaaacccaagcctcggagtgaatcagaactcattgatgaactttcagaagattttgaccggtctgaatgtaaagagaaaccatctaagccaactgaaaagacagaagaatctaaggccgctgctccagctcctgtgtcggaggctgtgtgtcggacctccatgtgtagtatacagtcagcaccccctgagccggctaccttgaagggcacagtgccagatgatgctgtagaagccttggctgatagcctggggaaaaaggaagcagatccagaagatggaaaacctgtgatggataaagtcaaggagaaggccaaagaagaagaccgtgaaaagcttggtgaaaaagaagaaacaattcctcctgattatagattagaagaggtcaaggataaagatggaaagccactcctgccaaaagagtctaaggaacagcttccacccatgagtgaagacttccttctggatgctttgtctgaggacttctctggtccacaaaatgcttcatctcttaaatttgaagatgctaaacttgctgctgccatctctgaagtggtttcccaaaccccagcttcaacgacccaagctggagccccaccccgtgatacctcgcagagtgacaaagacctcgatgatgccttggataaactctctgacagtctaggacaaaggcagcctgacccagatgagaacaaaccaatggaagataaagtaaaggaaaaagctaaagctgaacatagagacaagcttggagaaagagatgacactatcccacctgaatacagacatctcctggatgataatggacaggacaaaccagtgaagccacctacaaagaaatcagaggattcaaagaaacctgcagatgaccaagaccccattgatgctctctcaggagatctggacagctgtccctccactacagaaacctcacagaacacagcaaaggataagtgcaagaaggctgcttccagctccaaagcacctaagaatggaggtaaagcgaaggattcagcaaagacaacagaggaaacttccaagccaaaagatgactaaagaaatacaagttaaggtatctggtatctgcatgtaaaatcttcagctggtggatggtgacttttgaagaacaaaaggctttggcaacagaaaacaattgttctgggtgatttctagaatggtttttgttgagtctctgaacatcctaaatattggtttgttattctttt

SEQ ID NO: 4369 - DNA, 4506 bp, Homo sapiens
  source 1..4506: mol_type = unassigned DNA
ggcccatcggggctaggggaaccccggcgcagacctggggtggggtcggaaaagctgtttcatcgcccgctcccgggccctccgctccctccctccctccctctctccctggcaggactccccgccaggcctccccgccactctccgcggcgcattccgggaggcagcggccgcagcggcctcgccatgtcccagcccggccagaagcccgccgcctccccgcggccccggcgagcagccgccgcccgccgcacccatgagcatgtcagtgaaaaaaccagtgaatcgccttccaaaccaggagaaaagaaaggatcagatgagaaaaaagcagcaagcctcggcagcagtcaatcctccagaacctatgctggtggaacagcctcggccaccaaggtgtcagcttcctctggtgcaaccagcaagtcttccagtatgaatcccacagaaaccaaggctgtaaaaacagaacctgagaagaagtcacagtcaaccaagccaaaaagcctacccaagcaggcatcagatacaggaagtaacgatgctcacaataaaaaagcagtttccagatcagctgaacagcagccatcagagaaatcaacagaaccaaagactaaaccacaagacatgatttctgctggtggagagagtgttgctggtatcactgcaatatctggcaagccgggtgacaagaaaaaagaaaagaaatcattaaccccagctgtgccagttgaatctaaaccggataaaccatcgggaaagtcaggcatggatgctgctttggatgacttaatagatactttaggaggacctgaagaaactgaagaagaaaatacaacgtatactggaccagaagtttcagatccaatgagttccacctacatagaggaattgggtaaaagagaagtcacaattcctccaaaatatagggaactattggctaaaaaggaagggatcacagggcctcctgcagactcttcgaaacccatagggccagatgatgctatagacgccttgtcatctgacttcacctgtgggtcgcctacagctgctggaaagaaaactgaaaaagaggaatctacagaagttttaaaagctcagtcagcagggacagtcagaagtgctgctccaccccaagagaagaaaagaaaggtggagaaggatacaatgagtgatcaagcactcgaggctctgtcggcttcactgggcacccggcaagcagaacctgagctcgacctccgctcaattaaggaagtcgatgaggcaaaagctaaagaagaaaaactagagaagtgtggtgaggatgatgaaacaatcccatctgagtacagattaaaaccagccacggataaagatggaaaaccactattgccagagcctgaagaaaaacccaagcctcggagtgaatcagaactcattgatgaactttcagaagattttgaccggtctgaatgtaaagagaaaccatctaagccaactgaaaagacagaagaatctaaggccgctgctccagctcctgtgtcggaggctgtgtgtcggacctccatgtgtagtatacagtcagcaccccctgagccggctaccttgaagggcacagtgccagatgatgctgtagaagccttggctgatagcctggggaaaaaggaagcagatccagaagatggaaaacctgtgatggataaagtcaaggagaaggccaaagaagaagaccgtgaaaagcttggtgaaaaagaagaaacaattcctcctgattatagattagaagaggtcaaggataaagatggaaagccactcctgccaaaagagtctaaggaacagcttccacccatgagtgaagacttccttctggatgctttgtctgaggacttctctggtccacaaaatgcttcatctcttaaatttgaagatgctaaacttgctgctgccatctctgaagtggtttcccaaaccccagcttcaacgacccaagctggagccccaccccgtgatacctcgcagagtgacaaagacctcgatgatgccttggataaactctctgacagtctaggacaaaggcagcctgacccagatgagaacaaaccaatggaagataaagtaaaggaaaaagctaaagctgaacatagagacaagcttggagaaagagatgacactatcccacctgaatacagacatctcctggatgataatggacaggacaaaccagtgaagccacctacaaagaaatcagaggattcaaagaaacctgcagatgaccaagaccccattgatgctctctcaggagatctggacagctgtccctccactacagaaacctcacagaacacagcaaaggataagtgcaagaaggctgcttccagctccaaagcacctaagaatggaggtaaagcgaaggattcagcaaagacaacagaggaaacttccaagccaaaagatgactaaagaaatacaagttaaggtatctggtatctgcatgtaaaatcttcagctggtggatggtgacttttgaagaacaaaaggctttggcaacagaaaacaattgttctgggtgatttctagaatggtttttgttgagtctctgaacatcctaaatattggtttgttattcttttccagaaagaaaatgaatttgactggttcacctgtgtactgagtattgataaactttgaatttttttaattgccttcaattgggagagaaagctttatatttgtaagaaatatatttgataaagtttcttaaagcaacaccaaaaaaacaaaagaaaagctaagtgaatttttgcacattctacacacagtgcctgtaaatctcatttgtattttcagtttgcccttaattttttttgttagtgtttagaaaacaatgttttaaacattcttcagtgttctgatttcttattaccccctttcctcttgggcttttgaactgtatttgatgttgctttgggataatgtttataagtcaaacataagatattgtacattgggcacatatctcctcttgggctgctaataataaattaataacaggtaacctggacaaaccaggaagcaccaaaccccttttcagtttgaactcttctttgccaggtgtgaggacttctgcatcttacagtcagcacagaacacactgagacttgaatcaagtcagcaacagagcaaaataaaggttagataagtccttgtgtagcaaatttcgagcataagaaataaaatctaattaattcttagggtactcatctgacttgaactctgttggtttactgtgttagtaaactgtgctttctattatctatacataaaacctgagcagcaactgtgtctttagagctattgccacattagcctttgcactgtatagcgtctggctttatggaacttaagtttaccaaatataaaaagaaacttctgcttttaaaaaaattatatatatatattaaatttgaaacctgcatttctcccacagcaatgtaagaagtaggctctgatgtcctaccactttgaatggttttctaatatcttaatgaatagttcctgaacattgcactgatatcatcgattagaattttgatatttaatttcatctttatttcctggtagagaatgcaggaaaagatgtcaggtacataacataaaacagattgggaatttattgtttccaaagggcatggccttccttagcatcagtttgaagcttttgttatgacttagctgacttgtggcagcggggcaagcaaaaacaataacactgcttataaatggcaccacatcttgttaacctcccccccaaatactctctgaaagtcatgcacatacctatgggattttacacaccaccagcttaaaatgctatgtctctatccatcagaaatagtcattattctatttttaaggcagcaacaagaaaagaaaaaacacttttcctgagggatttctaaccatgtatctaatcctcccatttgggcagtataggtgtttgcttttttgttttctttttttaagaaaaaccttgaaacctttgacactgacagatgtgtttgcaaggatacggcttcagtattactaatttccatgtgtatctggaagtatttttaaatggcataccaaaatccagaagtttaaagatgcctataaaagtaaacaacatttatttaaaaagaactctgaatatgccttcttttttaattagaaatatcttcgagacttgggtgtttgttaataactaataactggagtaagctacaggatctaaagcagccctttttacagtctagttaggagagagaaaataattgcaaatatccacttagaggcaaagaacaattttttattatcaaaaaggtttctgcacattgttgtggcaatattgtatctgtttagaaaatgggcttttccaaaagcaaacaaagataggttcctcaggtgaccaaaactgaaaatcaatatttccatgtttcattaatcaaggcataaaatacaattaaagcaaaatattttacattaaaa

SEQ ID NO: 4370 - DNA, 1911 bp, Homo sapiens
  source 1..1911: mol_type = unassigned DNA
gcggcgtccgtccgtactgcagagccgctgccggagggtcgttttaaagggcccgcgcgttgccgccccctcggcccgccatgctgctatccgtgccgctgctgctcggcctcctcggcctggccgtcgccgagcctgccgtctacttcaaggagcagtttctggacggagacgggtggacttcccgctggatcgaatccaaacacaagtcagattttggcaaattcgttctcagttccggcaagttctacggtgacgaggagaaagataaaggtttgcagacaagccaggatgcacgcttttatgctctgtcggccagtttcgagcctttcagcaacaaaggccagacgctggtggtgcagttcacggtgaaacatgagcagaacatcgactgtgggggcggctatgtgaagctgtttcctaatagtttggaccagacagacatgcacggagactcagaatacaacatcatgtttggtcccgacatctgtggccctggcaccaagaaggttcatgtcatcttcaactacaagggcaagaacgtgctgatcaacaaggacatccgttgcaaggatgatgagtttacacacctgtacacactgattgtgcggccagacaacacctatgaggtgaagattgacaacagccaggtggagtccggctccttggaagacgattgggacttcctgccacccaagaagataaaggatcctgatgcttcaaaaccggaagactgggatgagcgggccaagatcgatgatcccacagactccaagcctgaggactgggacaagcccgagcatatccctgaccctgatgctaagaagcccgaggactgggatgaagagatggacggagagtgggaacccccagtgattcagaaccctgagtacaagggtgagtggaagccccggcagatcgacaacccagattacaagggcacttggatccacccagaaattgacaaccccgagtattctcccgatcccagtatctatgcctatgataactttggcgtgctgggcctggacctctggcaggtcaagtctggcaccatctttgacaacttcctcatcaccaacgatgaggcatacgctgaggagtttggcaacgagacgtggggcgtaacaaaggcagcagagaaacaaatgaaggacaaacaggacgaggagcagaggcttaaggaggaggaagaagacaagaaacgcaaagaggaggaggaggcagaggacaaggaggatgatgaggacaaagatgaggatgaggaggatgaggaggacaaggaggaagatgaggaggaagatgtccccggccaggccaaggacgagctgtagagaggcctgcctccagggctggactgaggcctgagcgctcctgccgcagagctggccgcgccaaataatgtctctgtgagactcgagaactttcatttttttccaggctggttcggatttggggtggattttggttttgttcccctcctccactctcccccaccccctccccgcccttttttttttttttttttaaactggtattttatctttgattctccttcagccctcacccctggttctcatctttcttgatcaacatcttttcttgcctctgtccccttctctcatctcttagctcccctccaacctggggggcagtggtgtggagaagccacaggcctgagatttcatctgctctccttcctggagcccagaggagggcagcagaagggggtggtgtctccaaccccccagcactgaggaagaacggggctcttctcatttcacccctccctttctcccctgcccccaggactgggccacttctgggtggggcagtgggtcccagattggctcacactgagaatgtaagaactacaaacaaaatttctattaaattaaattttgtgtctcc

SEQ ID NO: 4371 - DNA, 1763 bp, Homo sapiens
  source 1..1763: mol_type = unassigned DNA
gtccgtactgcagagccgctgccggagggtcgttttaaagggcccgcgcgttgccgccccctcggcctggccgtcgccgagcctgccgtctacttcaaggagcagtttctggacggagacgggtggacttcccgctggatcgaatccaaacacaagtcagattttggcaaattcgttctcagttccggcaagttctacggtgacgaggagaaagataaaggtttgcagacaagccaggatgcacgcttttatgctctgtcggccagtttcgagcctttcagcaacaaaggccagacgctggtggtgcagttcacggtgaaacatgagcagaacatcgactgtgggggcggctatgtgaagctgtttcctaatagtttggaccagacagacatgcacggagactcagaatacaacatcatgtttggtcccgacatctgtggccctggcaccaagaaggttcatgtcatcttcaactacaagggcaagaacgtgctgatcaacaaggacatccgttgcaaggatgatgagtttacacacctgtacacactgattgtgcggccagacaacacctatgaggtgaagattgacaacagccaggtggagtccggctccttggaagacgattgggacttcctgccacccaagaagataaaggatcctgatgcttcaaaaccggaagactgggatgagcgggccaagatcgatgatcccacagactccaagcctgaggactgggacaagcccgagcatatccctgaccctgatgctaagaagcccgaggactgggatgaagagatggacggagagtgggaacccccagtgattcagaaccctgagtacaagggtgagtggaagccccggcagatcgacaacccagattacaagggcacttggatccacccagaaattgacaaccccgagtattctcccgatcccagtatctatgcctatgataactttggcgtgctgggcctggacctctggcaggtcaagtctggcaccatctttgacaacttcctcatcaccaacgatgaggcatacgctgaggagtttggcaacgagacgtggggcgtaacaaaggcagcagagaaacaaatgaaggacaaacaggacgaggagcagaggcttaaggaggaggaagaagacaagaaacgcaaagaggaggaggaggcagaggacaaggaggatgatgaggacaaagatgaggatgaggaggatgaggaggacaaggaggaagatgaggaggaagatgtccccggccaggccaaggacgagctgtagagaggcctgcctccagggctggactgaggcctgagcgctcctgccgcagagctggccgcgccaaataatgtctctgtgagactcgagaactttcatttttttccaggctggttcggatttggggtggattttggttttgttcccctcctccactctcccccaccccctccccgcccttttttttttttttttttaaactggtattttatctttgattctccttcagccctcacccctggttctcatctttcttgatcaacatcttttcttgcctctgtccccttctctcatctcttagctcccctccaacctggggggcagtggtgtggagaagccacaggcctgagatttcatctgctctccttcctggagcccagaggagggcagcagaagggggtggtgtctccaaccccccagcactgaggaagaacggggctcttctcatttcacccctccctttctcccctgcccccaggactggg

SEQ ID NO: 4372 - DNA, 1285 bp, Homo sapiens
  source 1..1285: mol_type = unassigned DNA
agagccgcagagagagctgggagctaaggggtggcggcgaccggaagcgcagtgcacacccccatggcccgggctttggtccagctctgggccatatgcatgctgcgagtggcgctggctaccgtctatttccaagaggaatttctagacggagagcattggagaaaccgatggttgcagtccaccaatgactcccgatttgggcattttagactttcgtcgggcaagttttatggtcataaagagaaagataaaggtctgcaaaccactcagaatggccgattctatgccatctctgcacgcttcaaaccgttcagcaataaagggaaaactctggttattcagtacacagtaaaacatgagcagaagatggactgtggagggggctacattaaggtctttcctgcagacattgaccagaagaacctgaatggaaaatcgcagtactatattatgtttggacccgatatttgtggatttgatatcaagaaagttcatgttattttacatttcaagaataagtatcacgaaaacaagaaactgatcaggtgtaaggttgatggcttcacacacctgtacactctaattttaagaccagatctttcttatgatgtgaaaattgatggtcagtcaattgaatccggcagcatagagtacgactggaacttaacatcactcaagaaggaaacgtccccggcagaatcgaaggattgggaacagactaaagacaacaaagcccaggactgggagaagcattttctggacgccagcaccagcaagcagagcgactggaacggtgacctggatggggactggccagcgccgatgctccagaagcccccgtaccaggatggcctgaaaccagaaggtattcataaagacgtctggctccaccgtaagatgaagaataccgactatttgacgcagtatgacctctcagaatttgagaacattggtgccattggcctggagctttggcaggtgagatctggaaccatttttgataactttctgatcacagatgatgaagagtacgcagataattttggcaaggccacctggggcgaaaccaagggtccagaaagggagatggatgccatacaggccaaggaggaaatgaagaaggcccgcgaggaagaggaggaagagctgctgtcgggaaaaattaacaggcacgaacattacttcaatcaatttcacagaaggaatgaactttagtgatccccattggatataaggatgactggtaaaatctcattgctactttaatctatgtttcaaactc

SEQ ID NO: 4373 - DNA, 1897 bp, Homo sapiens
  source 1..1897: mol_type = unassigned DNA
acctgaccctttttcccttggctctgtcggcagtttctccaggacccagcagtgccctctgtccactgctctgggccattccccaatcccccctcccacttgagcccctaactcagaatctgggacccaggggcccctccctaccccagctaacctcttctggaccaggagagccaacccagatcccactacctccatgagtgctacagacaggatggggcccagagctgtgccgggtctgcggctggcactgctgttgctgctggtgctagggacacccaagtcaggggtacaggggcaggaagggctggacttccctgagtacgatggtgtggaccgtgtgatcaatgtcaatgcaaagaactacaagaatgtgttcaagaagtatgaggtgctggcactcctctaccatgaaccccccgaggatgacaaggcctcacaaagacaatttgagatggaggagctgatcctggagttagcagcccaagtcctagaagacaagggtgttggcttcgggctggtagactctgagaaggatgcagctgtggccaagaaactaggcctaactgaagtggacagcatgtatgtattcaagggagatgaagtcattgagtacgatggcgagttttctgctgacaccatcgtggagtttctgcttgatgtcctagaggaccctgtggaattgattgaaggtgaacgagagctgcaggcgtttgagaatattgaggatgagatcaaactcattggctacttcaagagcaaagactcagagcattacaaagccttcgaggatgcagctgaggagtttcatccctacatccccttcttcgccaccttcgacagcaaggtggcaaagaagctgaccctgaagctgaatgagattgatttctacgaggccttcatggaagagcctgtgaccatcccagacaagcccaatagcgaagaggagattgtcaacttcgtggaggagcacaggagatcaaccctgaggaaactgaagccggagagtatgtatgagacctgggaggatgatatggatggaatccacattgtggccttcgcagaggaagctgatcctgatggtttcgagttcttagagactctcaaggctgtggcccaagataacactgaaaacccagatcttagcatcatctggattgaccctgatgacttccccctgctggtcccatactgggagaagacgtttgacatcgacttgtcagccccacaaataggagtcgtcaatgttactgatgcggatagcgtatggatggaaatggacgatgaggaggacctgccttctgctgaggagctggaggactggctggaggatgtcctggagggcgagatcaacacagaggacgatgacgatgatgatgatgactagttgctatggcaaccatctttcagccccactggtcttttcatgctctctcctgccttcccttgtccttccctgagttcctccagggagactaggttattctctgccatagagctaactggggtctatatgctgggtgctgagacactgatccccctcatttgatgagcaaatgagctacttttccctagacaccaggccagctctctcttatctgacttctgtttcttatcccataacttacttgtatctattatgtgtctcttccatcactctccatactctttcttgtgattctcctctagccatatatatgggccccatctctgttctgttccctccatctatgcacagctttcccccactctctctaatcctgtatctttctgactgtcctgtccttggccagaaggaagggagaatactgtgtttgggactgtatctcagcaatcacttgttaatgtatttgggtcaaatgagaggcctcaataaagacatctggggcagcatgaa

SEQ ID NO: 4374 - DNA, 1956 bp, Homo sapiens
  source 1..1956: mol_type = unassigned DNA
aggggtgccaatttcagggggcagctccggttccctccccgccccctgctcctattcctccacctgaccctttttcccttggctctgtcggcagtttctccaggacccagcagtgccctctgtccactgctctgggccattccccaatcccccctcccacttgagcccctaactcagaatctgggacccaggggcccctccctaccccagctaacctcttctggaccaggagagccaacccagatcccactacctccatgagtgctacagacaggatggggcccagagctgtgccgggtctgcggctggcactgctgttgctgctggtgctagggacacccaagtcaggggtacaggggcaggaagggctggacttccctgagtacgatggtgtggaccgtgtgatcaatgtcaatgcaaagaactacaagaatgtgttcaagaagtatgaggtgctggcactcctctaccatgaaccccccgaggatgacaaggcctcacaaagacaatttgagatggaggagctgatcctggagttagcagcccaagtcctagaagacaagggtgttggcttcgggctggtagactctgagaaggatgcagctgtggccaagaaactaggcctaactgaagtggacagcatgtatgtattcaagggagatgaagtcattgagtacgatggcgagttttctgctgacaccatcgtggagtttctgcttgatgtcctagaggaccctgtggaattgattgaaggtgaacgagagctgcaggcgtttgagaatattgaggatgagatcaaactcattggctacttcaagagcaaagactcagagcattacaaagccttcgaggatgcagctgaggagtttcatccctacatccccttcttcgccaccttcgacagcaaggtggcaaagaagctgaccctgaagctgaatgagattgatttctacgaggccttcatggaagagcctgtgaccatcccagacaagcccaatagcgaagaggagattgtcaacttcgtggaggagcacaggagatcaaccctgaggaaactgaagccggagagtatgtatgagacctgggaggatgatatggatggaatccacattgtggccttcgcagaggaagctgatcctgatggtttcgagttcttagagactctcaaggctgtggcccaagataacactgaaaacccagatcttagcatcatctggattgaccctgatgacttccccctgctggtcccatactgggagaagacgtttgacatcgacttgtcagccccacaaataggagtcgtcaatgttactgatgcggatagcgtatggatggaaatggacgatgaggaggacctgccttctgctgaggagctggaggactggctggaggatgtcctggagggcgagatcaacacagaggacgatgacgatgatgatgatgactagttgctatggcaaccatctttcagccccactggtcttttcatgctctctcctgccttcccttgtccttccctgagttcctccagggagactaggttattctctgccatagagctaactggggtctatatgctgggtgctgagacactgatccccctcatttgatgagcaaatgagctacttttccctagacaccaggccagctctctcttatctgacttctgtttcttatcccataacttacttgtatctattatgtgtctcttccatcactctccatactctttcttgtgattctcctctagccatatatatgggccccatctctgttctgttccctccatctatgcacagctttcccccactctctctaatcctgtatctttctgactgtcctgtccttggccagaaggaagggagaatactgtgtttgggactgtatctcagcaatcacttgttaatgtatttgggtcaaatgagaggcctcaataaagacatctggggcagcatg

SEQ ID NO: 4375 - DNA, 1444 bp, Homo sapiens
  source 1..1444: mol_type = unassigned DNA
atgtcaatgcaaagaactacaagaatgtgttcaagaagtatgaggtgctggcactcctctaccatgaaccccccgaggatgacaaggcctcacaaagacaattccctaggcctaactgaagtggacagcatgtatgtattcaagggagatgaagtcattgagtacgatggcgagttttctgctgacaccatcgtggagtttctgcttgatgtcctagaggaccctgtggaattgattgaaggtgaacgagagctgcaggcgtttgagaatattgaggatgagatcaaactcattggctacttcaagagcaaagactcagagcattacaaagccttcgaggatgcagctgaggagtttcatccctacatccccttcttcgccaccttcgacagcaaggtggcaaagaagctgaccctgaagctgaatgagattgatttctacgaggccttcatggaagagcctgtgaccatcccagacaagcccaatagcgaagaggagattgtcaacttcgtggaggagcacaggagatcaaccctgaggaaactgaagccggagagtatgtatgagacctgggaggatgatatggatggaatccacattgtggccttcgcagaggaagctgatcctgatggtttcgagttcttagagactctcaaggctgtggcccaagataacactgaaaacccagatcttagcatcatctggattgaccctgatgacttccccctgctggtcccatactgggagaagacgtttgacatcgacttgtcagccccacaaataggagtcgtcaatgttactgatgcggatagcgtatggatggaaatggacgatgaggaggacctgccttctgctgaggagctggaggactggctggaggatgtcctggagggcgagatcaacacagaggacgatgacgatgatgatgatgactagttgctatggcaaccatctttcagccccactggtcttttcatgctctctcctgccttcccttgtccttccctgagttcctccagggagactaggttattctctgccatagagctaactggggtctatatgctgggtgctgagacactgatccccctcatttgatgagcaaatgagctacttttccctagacaccaggccagctctctcttatctgacttctgtttcttatcccataacttacttgtatctattatgtgtctcttccatcactctccatactctttcttgtgattctcctctagccatatatatgggccccatctctgttctgttccctccatctatgcacagctttcccccactctctctaatcctgtatctttctgactgtcctgtccttggccagaaggaagggagaatactgtgtttgggactgtatctcagcaatcacttgttaatgtatttgggtcaaatgagaggcctcaataaagacatctggggcagcatg

SEQ ID NO: 4376 - DNA, 2674 bp, Homo sapiens
  source 1..2674: mol_type = unassigned DNA
tgcgtgcgtgcgtgcgtgcgtgtgtgtgtgtgtgtgcctctgctctttgtcctgagcccacgattccagagctggctggacccaaggaggtgaagagtcacttttcagccccaggaagggcaaagaagagagaaaatcagcctgtctgctctctccttggctcaacaaggcctctaacagtcttctgtcctctattctgcacacagcatatttgggaacgagaaacaaaagttttcccaaatgaagagaactcacttgtttattgtggggatttattttctgtcctcttgcagggcagaagaggggcttaatttccccacatatgatgggaaggaccgagtggtaagtctttccgagaagaacttcaagcaggttttaaagaaatatgacttgctttgcctctactaccatgagccggtgtcttcagataaggtcacgcaaaaacagttccaactgaaagaaatcgtgcttgagcttgtggcccaggtccttgaacataaagctataggctttgtgatggtggatgccaagaaagaagccaagcttgccaagaaactgggttttgatgaagaaggaagcctgtatattcttaagggtgatcgcacaatagagtttgatggcgagtttgcagctgatgtcttggtggagttcctcttggatctaattgaagacccagtggagatcatcagcagcaaactggaagtccaagccttcgaacgcattgaagactacatcaaactcattggctttttcaagagtgaggactcagaatactacaaggcttttgaagaagcagctgaacacttccagccttacatcaaattctttgccacctttgacaaaggggttgcaaagaaattatctttgaagatgaatgaggttgacttctatgagccatttatggatgagcccattgccatccccaacaaaccttacacagaagaggagctggtggagtttgtgaaggaacaccaaagacccactctacgtcgcctgcgcccagaagaaatgtttgaaacatgggaagatgatttgaatgggatccacattgtggcctttgcagagaagagtgatccagatggctacgaattcctggagatcctgaaacaggttgcccgggacaatactgacaaccccgatctgagcatcctgtggatcgacccggacgactttcctctgctcgttgcctactgggagaagactttcaagattgacctattcaggccacagattggggtggtgaatgtcacagatgctgacagtgtctggatggagattccagatgatgacgatcttccaactgctgaggagctggaggactggattgaggatgtgctttctggaaagataaacactgaagatgatgatgaagatgatgatgatgatgataattctgatgaagaggataatgatgacagtgatgacgatgatgatgaatagcccaactccaaacaattctgatgaaaacaaaatcacagcacccactaccatacagacagcacaaggtggcagcaagcaattctgccccacacccagccagctcctttcccttttccatcatctcttttcccactccctttgcgtcaggagcagcatcattcagcaaatgccttttcaaatgcagcaatcccacttagcagggacaggagaaaaattattcccatgttgactgtcttgactgtcacggaacagatcttgttctttgctggaccatcaagggtcatggcagtgcctgaacatggcagtctagggtgaacaatcccctaacacaagtttacttgtctttgattatgacagtaacaaaattgacagctttctaactcacaggcatagagtgaccttttaatcagagcccagggaagacacatgattaatgatttagctccctccatacctcgaacatcagttgggatccctcctccagccaagatgatccttcttagagaaggctcagccttggaagcaaacttataaatcatattctcatggctttgttaaacttatttcaagtgatggtcattcatatcactatgaacttggatattcaagcctttggatggctatggagagggcttgaaatgtgtacaggtgtcaccatcatttctagtatattaggaaactgggatgggaggttgatttgctctctaaacttccctctagttggcaagtctcacatattcatcagcaggagtggagggtgggggaaaactagaaagatgaaaacttttacatttttctgatgggttcatgtctctgattgggtcagctggcttcctagcctaagctgggatctgaataccccttctctgtagctgctagtgagccttcccatttagattaaagattgctttatccagcagtcaattaactctccagttatcagtactcccacaattggccagggcaacaataattggagttcatactgatgccctgaggcactgaaaaaaaaaaaaatcccaaagtgccttctgagctgtctaaaagttacattgtgcttggtagatttagtgttaagtgtgcagtataattttctaatttattttctcaatcttttagcacatgtgtaagacactgtgcaaattttttgaaaatagagcaatactttttgtggaatactagctaactaattctgtcattaaactcatattttgaaaatattcagacaatgttg

SEQ ID NO: 4377 - DNA, 1459 bp, Homo sapiens
  source 1..1459: mol_type = unassigned DNA
agcctccctagcttggctgtttttctactctcatgcgtgcgtgcgtgcgtgcgtgtgtgtgtgtgtgtgcctctgctctttgtcctgagcccacgattccagagctggctggacccaaggaggtgaagagtcacttttcagccccaggaagggcaaagaagagagaaaatcagcctgtctgctctctccttggctcaacaaggcctctaacagtcttctgtcctctattctgcacacagcatatttgggaacgagaaacaaaagttttcccaaatgaagagaactcacttgtttattgtggggatttattttctgtcctcttgcagggcagaagaggggcttaatttccccacatatgatgggaaggaccgagtggtaagtctttccgagaagaacttcaagcaggttttaaagaaatatgacttgctttgcctctactaccatgagccggtgtcttcagataaggtcacgcaaaaacagttccaactgaaagaaatcgtgcttgagcttgtggcccaggtccttgaacataaagctataggctttgtgatggtggatgccaagaaagaagccaagcttgccaagaaactgggttttgatgaagaaggaagcctgtatattcttaagggtgatcgcacaatagagtttgatggcgagtttgcagctgatgtcttggtggagttcctcttggatctaattgaagacccagtggagatcatcagcagcaaactggaagtccaagccttcgaacgcattgaagactacatcaaactcattggctttttcaagagtgaggactcagaatactacaaggcttttgaagaagcagctgaacacttccagccttacatcaaattctttgccacctttgacaaaggggttgcaaagaaattatctttgaagatgaatgaggttgacttctatgagccatttatggatgagcccattgccatccccaacaaaccttacacagatggctacgaattcctggagatcctgaaacaggttgcccgggacaatactgacaaccccgatctgagcatcctgtggatcgacccggacgactttcctctgctcgttgcctactgggagaagactttcaagattgacctattcaggccacagattggggtggtgaatgtcacagatgctgacagtgtctggatggagattccagatgatgacgatcttccaactgctgaggagctggaggactggattgaggatgtgctttctggaaagataaacactgaagatgatgatgaagatgatgatgatgatgataattctgatgaagaggataatgatgacagtgatgacgatgatgatgaatagcccaactccaaacaattctgatgaaaacaaaatcacagcacccactaccatacagacagcacaaggtggcagcaagcaattctgccccacacccagccagctcctttcccttttccatcatctc

SEQ ID NO: 4378 - DNA, 1369 bp, Homo sapiens
  source 1..1369: mol_type = unassigned DNA
agagctggctggacccaaggaggtgaagagtcacttttcagccccaggaagggcaaagaagagagaaaatcagcctgtctgctctctccttggctcaacaaggcctctaacagtcttctgtcctctattctgcacacagcatatttgggaacgagaaacaaaagttttcccaaatgaagagaactcacttgtttattgtggggatttattttctgtcctcttgcagggcagaagaggggcttaatttccccacatatgatgggaaggaccgagtggtaagtctttccgagaagaacttcaagcaggttttaaagaaatatgacttgctttgcctctactaccatgagccggtgtcttcagataaggtcacgcaaaaacagttccaactgaaagaaatcgtgcttgagcttgtggcccaggtccttgaacataaagctataggctttgtgatggtggatgccaagaaagaagccaagcttgccaagaaactggactacaaggcttttgaagaagcagctgaacacttccagccttacatcaaattctttgccacctttgacaaaggggttgcaaagaaattatctttgaagatgaatgaggttgacttctatgagccatttatggatgagcccattgccatccccaacaaaccttacacagaagaggagctggtggagtttgtgaaggaacaccaaagacccactctacgtcgcctgcgcccagaagaaatgtttgaaacatgggaagatgatttgaatgggatccacattgtggcctttgcagagaagagtgatccagatggctacgaattcctggagatcctgaaacaggttgcccgggacaatactgacaaccccgatctgagcatcctgtggatcgacccggacgactttcctctgctcgttgcctactgggagaagactttcaagattgacctattcaggccacagattggggtggtgaatgtcacagatgctgacagtgtctggatggagattccagatgatgacgatcttccaactgctgaggagctggaggactggattgaggatgtgctttctggaaagataaacactgaagatgatgatgaagatgatgatgatgatgataattctgatgaagaggataatgatgacagtgatgacgatgatgatgaatagcccaactccaaacaattctgatgaaaacaaaatcacagcacccactaccatacagacagcacaaggtggcagcaagcaattctgccccacacccagccagctcctttcccttttccatcatctcttttcccactccctttgcgtcaggagcagcatcattcagcaaatgccttttcaaatgcagcaatcccacttagcagggacaggag

SEQ ID NO: 4379 - DNA, 3357 bp, Homo sapiens
  source 1..3357: mol_type = unassigned DNA
gcttccggttgggcggtgcttgcgcgcgtgagctgagccggtgggtgagcggcggccacggcatcctgtgctgtgggggctacgaggaaagatctaattatcatggacctgcgacagtttcttatgtgcctgtccctgtgcacagcctttgccttgagcaaacccacagaaaagaaggaccgtgtacatcatgagcctcagctcagtgacaaggttcacaatgatgctcagagttttgattatgaccatgatgccttcttgggtgctgaagaagcaaagacctttgatcagctgacaccagaagagagcaaggaaaggcttggaaagattgtaagtaaaatagatggcgacaaggacgggtttgtcactgtggatgagctcaaagactggattaaatttgcacaaaagcgctggatttacgaggatgtagagcgacagtggaaggggcatgacctcaatgaggacggcctcgtttcctgggaggagtataaaaatgccacctacggctacgttttagatgatccagatcctgatgatggatttaactataaacagatgatggttagagatgagcggaggtttaaaatggcagacaaggatggagacctcattgccaccaaggaggagttcacagctttcctgcaccctgaggagtatgactacatgaaagatatagtagtacaggaaacaatggaagatatagataagaatgctgatggtttcattgatctagaagagtatattggtgacatgtacagccatgatgggaatactgatgagccagaatgggtaaagacagagcgagagcagtttgttgagtttcgggataagaaccgtgatgggaagatggacaaggaagagaccaaagactggatccttccctcagactatgatcatgcagaggcagaagccaggcacctggtctatgaatcagaccaaaacaaggatggcaagcttaccaaggaggagatcgttgacaagtatgacttatttgttggcagccaggccacagattttggggaggccttagtacggcatgatgagttctgagctacggaggaaccctcatttcctcaaaagtaatttatttttacagcttctggtttcacatgaaattgtttgcgctactgagactgttactacaaactttttaagacatgaaaaggcgtaatgaaaaccatcccgtccccattcctcctcctctctgagggactggagggaagccgtgcttctgaggaacaactctaattagtacacttgtgtttgtagatttacactttgtattatgtattaacatggcgtgtttatttttgtatttttctctggttgggagtatgatatgaaggatcaagatcctcaactcacacatgtagacaaacattagctctttactctttctcaaccccttttatgattttaataattctcacttaactaattttgtaagcctgagatcaataagaaatgttcaggagagaggaaagaaaaaaaatatatgctccacaatttatatttagagagagaacacttagtcttgcctgtcaaaaagtccaacatttcataggtagtaggggccacatattacattcagttgctataggtccagcaactgaacctgccattacctgggcaaggaaagatccctttgctctaggaaagcttggcccaaattgattttcttctttttccccctgtaggactgactgttggctaattttgtcaagcacagctgtggtgggaagagttagggccagtgtcttgaaaatcaatcaagtagtgaatgtgatctctttgcagagctatagatagaaacagctggaaaactaaaggaaaaatacaagtgttttcggggcatacattttttttctgggtgtgcatctgttgaaatgctcaagacttaattatttgccttttgaaatcactgtaaatgcccccatccggttcctcttcttcccaggtgtgccaaggaattaatcttggtttcactacaattaaaattcactcctttccaatcatgtcattgaaagtgcctttaacgaaagaaatggtcactgaatgggaattctcttaagaaaccctgagattaaaaaaagactatttggataacttataggaaagcctagaacctcccagtagagtggggatttttttcttcttccctttctcttttggacaatagttaaattagcagtattagttatgagtttggttgcagtgttcttatcttgtgggctgatttccaaaaaccacatgctgctgaatttaccagggatcctcatacctcacaatgcaaaccacttactaccaggcctttttctgtgtccactggagagcttgagctcacactcaaagatcagaggacctacagagagggctctttggtttgaggaccatggcttacctttcctgcctttgacccatcacaccccatttcctcctctttccctctccccgctgccaaaaaaaaaaaaaaaggaaacgtttatcatgaatcaacagggtttcagtccttatcaaagagagatgtggaaagagctaaagaaaccaccctttgttcccaactccactttacccatattttatgcaacacaaacactgtccttttgggtccctttcttacagatggacctcttgagaagaattatcgtattccacgtttttagccctcaggttaccaagataaatatatgtatatataacctttattattgctatatctttgtggataatacattcaggtggtgctgggtgatttattataatctgaacctaggtatatcctttggtcttccacagtcatgttgaggtgggctccctggtatggtaaaaagccaggtataatgtaacttcaccccagcctttgtactaagctcttgatagtggatatactcttttaagtttagccccaatatagggtaatggaaatttcctgccctctgggttccccatttttactattaagaagaccagtgataatttaataatgccaccaactctggcttagttaagtgagagtgtgaactgtgtggcaagagagcctcacacctcactaggtgcagagagcccaggccttatgttaaaatcatgcacttgaaaagcaaaccttaatctgcaaagacagcagcaagcattatacggtcatcttgaatgatccctttgaaattttttttttgtttgtttgtttaaatcaagcctgaggctggtgaacagtagctacacacccatattgtgtgttctgtgaatgctagctctcttgaatttggatattggttattttttatagagtgtaaaccaagttttatattctgcaatgcgaacaggtacctatctgtttctaaataaaactgtttacattca

SEQ ID NO: 4380 - DNA, 1955 bp, Homo sapiens
  source 1..1955: mol_type = unassigned DNA
gcgcgcgtgagctgagccggtgggtgagcggcggccacggcatcctgtgctgtgggggctacgaggaaagatctaattatcatggacctgcgacagtttcttatgtgcctgtccctgtgcacagcctttgccttgagcaaacccacagaaaagaaggaccgtgtacatcatgagcctcagctcagtgacaaggttcacaatgatgctcagagttttgattatgaccatgatgccttcttgggtgctgaagaagcaaagacctttgatcagctgacaccagaagagagcaaggaaaggcttggaaagattgtaagtaaaatagatggcgacaaggacgggtttgtcactgtggatgagctcaaagactggatccttccctcagactatgatcatgcagaggcagaagccaggcacctggtctatgaatcagaccaaaacaaggatggcaagcttaccaaggaggagatcgttgacaagtatgacttatttgttggcagccaggccacagattttggggaggccttagtacggcatgatgagttctgagctacggaggaaccctcatttcctcaaaagtaatttatttttacagcttctggtttcacatgaaattgtttgcgctactgagactgttactacaaactttttaagacatgaaaaggcgtaatgaaaaccatcccgtccccattcctcctcctctctgagggactggagggaagccgtgcttctgaggaacaactctaattagtacacttgtgtttgtagatttacactttgtattatgtattaacatggcgtgtttatttttgtatttttctctggttgggagtatgatatgaaggatcaagatcctcaactcacacatgtagacaaacattagctctttactctttctcaaccccttttatgattttaataattctcacttaactaattttgtaagcctgagatcaataagaaatgttcaggagagaggaaagaaaaaaaatatatgctccacaatttatatttagagagagaacacttagtcttgcctgtcaaaaagtccaacatttcataggtagtaggggccacatattacattcagttgctataggtccagcaactgaacctgccattacctgggcaaggaaagatccctttgctctaggaaagcttggcccaaattgattttcttctttttccccctgtaggactgactgttggctaattttgtcaagcacagctgtggtgggaagagttagggccagtgtcttgaaaatcaatcaagtagtgaatgtgatctctttgcagagctatagatagaaacagctggaaaactaaaggaaaaatacaagtgttttcggggcatacattttttttctgggtgtgcatctgttgaaatgctcaagacttaattatttgccttttgaaatcactgtaaatgcccccatccggttcctcttcttcccaggtgtgccaaggaattaatcttggtttcactacaattaaaattcactcctttccaatcatgtcattgaaagtgcctttaacgaaagaaatggtcactgaatgggaattctcttaagaaaccctgagattaaaaaaagactatttggataacttataggaaagcctagaacctcccagtagagtggggatttttttcttcttccctttctcttttggacaatagttaaattagcagtattagttatgagtttggttgcagtgttcttatcttgtgggctgatttccaaaaaccacatgctgctgaatttaccagggatcctcatacctcacaatgcaaaccacttactaccaggcctttttctgtgtccactggagagcttgagctcacactcaaagatcagaggacctacagagagggctctttggtttgaggaccatggcttacctttcctgcctttgacccatcacaccccatttcctcctctttccctctccccgctgcc

SEQ ID NO: 4381 - DNA, 2438 bp, Homo sapiens
  source 1..2438: mol_type = unassigned DNA
gcgcgcgtgagctgagccggtgggtgagcggcggccacggcatcctgtgctgtgggggctacgaggaaagatctaattatcatggacctgcgacagtttcttatgtgcctgtccctgtgcacagcctttgccttgagcaaacccacagaaaagaaggaccgtgtacatcatgagcctcagctcagtgacaaggttcacaatgatgctcagagttttgattatgaccatgatgccttcttgggtgctgaagaagcaaagacctttgatcagctgacaccagaagagagcaaggaaaggcttggaatgattgtagataaaatagacgcggataaagatgggtttgtgacggagggggagctgaaatcctggattaagcacgcccagaagaaatacatatatgacaatgttgaaaaccaatggcaggagtttgatatgaatcaagacggcttaatctcctgggatgagtacagaaacgtgacttatggcacttacctggatgatccagatcctgatgatggatttaactataaacagatgatggttagagatgagcggaggtttaaaatggcagacaaggatggagacctcattgccaccaaggaggagttcacagctttcctgcaccctgaggagtatgactacatgaaagatatagtagtacaggaaacaatggaagatatagataagaatgctgatggtttcattgatctagaagagtatattggtgacatgtacagccatgatgggaatactgatgagccagaatgggtaaagacagagcgagagcagtttgttgagtttcgggataagaaccgtgatgggaagatggacaaggaagagaccaaagactggatccttccctcagactatgatcatgcagaggcagaagccaggcacctggtctatgaatcagaccaaaacaaggatggcaagcttaccaaggaggagatcgttgacaagtatgacttatttgttggcagccaggccacagattttggggaggccttagtacggcatgatgagttctgagctacggaggaaccctcatttcctcaaaagtaatttatttttacagcttctggtttcacatgaaattgtttgcgctactgagactgttactacaaactttttaagacatgaaaaggcgtaatgaaaaccatcccgtccccattcctcctcctctctgagggactggagggaagccgtgcttctgaggaacaactctaattagtacacttgtgtttgtagatttacactttgtattatgtattaacatggcgtgtttatttttgtatttttctctggttgggagtatgatatgaaggatcaagatcctcaactcacacatgtagacaaacattagctctttactctttctcaaccccttttatgattttaataattctcacttaactaattttgtaagcctgagatcaataagaaatgttcaggagagaggaaagaaaaaaaatatatgctccacaatttatatttagagagagaacacttagtcttgcctgtcaaaaagtccaacatttcataggtagtaggggccacatattacattcagttgctataggtccagcaactgaacctgccattacctgggcaaggaaagatccctttgctctaggaaagcttggcccaaattgattttcttctttttccccctgtaggactgactgttggctaattttgtcaagcacagctgtggtgggaagagttagggccagtgtcttgaaaatcaatcaagtagtgaatgtgatctctttgcagagctatagatagaaacagctggaaaactaaaggaaaaatacaagtgttttcggggcatacattttttttctgggtgtgcatctgttgaaatgctcaagacttaattatttgccttttgaaatcactgtaaatgcccccatccggttcctcttcttcccaggtgtgccaaggaattaatcttggtttcactacaattaaaattcactcctttccaatcatgtcattgaaagtgcctttaacgaaagaaatggtcactgaatgggaattctcttaagaaaccctgagattaaaaaaagactatttggataacttataggaaagcctagaacctcccagtagagtggggatttttttcttcttccctttctcttttggacaatagttaaattagcagtattagttatgagtttggttgcagtgttcttatcttgtgggctgatttccaaaaaccacatgctgctgaatttaccagggatcctcatacctcacaatgcaaaccacttactaccaggcctttttctgtgtccactggagagcttgagctcacactcaaagatcagaggacctacagagagggctctttggtttgaggaccatggcttacctttcctgcctttgacccatcacaccccatttcctcctctttccctctccccgctgcc

SEQ ID NO: 4382 - DNA, 2572 bp, Homo sapiens
  source 1..2572: mol_type = unassigned DNA
atcctgtgctgtgggggctacgaggaaaggacctcccaccctcccccactgagctgccttcccagtgatgaaagaaaaaatgtaaaagcctgaaaacccttcttcttgatttttaatttttttttttccctctaagaccttaaccactctggatagtatcacggggtatcagtagagtgtgctaaacagatgtgtactctgcagcttctttgcaggttttttgtcacatttttcagtcaagtgttccagctttgtgcttgttcattagagtcacctgtgactacagagattctgaaagtttgaatcagggcctgggaatctgtactttgaacagtactacaggtggtatttatgcctaggcaagtatgggaaacaactgtgcagaaggataaagacgttcttatctatgactagaccatctgaatgatttggcctttgaaggtgactcaaggttgagcctggatgttggagacttggtgctatagaccaaggaagctgccaagtatttcgctggttcctaatctcatgaacatcagaatcacctgaaaaacatttaaagctacgaatgtctgaattcagcttcagagactctaaatcaataggagaaacttaaagcttcctagatgattctaataaccagccatgtttgaagaccagaccaccaatgcgtacaagaagtaaaggatttggagtcaacatttaaaccttggttctttcacttttaattcttatgaacttgggcaaaaggattaaaattctactttggtatcttttgaaagaaaacagaaagtggacattttaactataagtttcttatcagcctacaatcagatgaaggaaactgatctaattatcatggacctgcgacagtttcttatgtgcctgtccctgtgcacagcctttgccttgagcaaacccacagaaaagaaggaccgtgtacatcatgagcctcagctcagtgacaaggttcacaatgatgctcagagttttgattatgaccatgatgccttcttgggtgctgaagaagcaaagacctttgatcagctgacaccagaagagagcaaggaaaggcttggaaagattgtaagtaaaatagatggcgacaaggacgggtttgtcactgtggatgagctcaaagactggattaaatttgcacaaaagcgctggatttacgaggatgtagagcgacagtggaaggggcatgacctcaatgaggacggcctcgtttcctgggaggagtataaaaatgccacctacggctacgttttagatgatccagatcctgatgatggatttaactataaacagatgatggttagagatgagcggaggtttaaaatggcagacaaggatggagacctcattgccaccaaggaggagttcacagctttcctgcaccctgaggagtatgactacatgaaagatatagtagtacaggaaacaatggaagatatagataagaatgctgatggtttcattgatctagaagagtatattggtgacatgtacagccatgatgggaatactgatgagccagaatgggtaaagacagagcgagagcagtttgttgagtttcgggataagaaccgtgatgggaagatggacaaggaagagaccaaagactggatccttccctcagactatgatcatgcagaggcagaagccaggcacctggtctatgaatcagaccaaaacaaggatggcaagcttaccaaggaggagatcgttgacaagtatgacttatttgttggcagccaggccacagattttggggaggccttagtacggcatgatgagttctgagctacggaggaaccctcatttcctcaaaagtaatttatttttacagcttctggtttcacatgaaattgtttgcgctactgagactgttactacaaactttttaagacatgaaaaggcgtaatgaaaaccatcccgtccccattcctcctcctctctgagggactggagggaagccgtgcttctgaggaacaactctaattagtacacttgtgtttgtagatttacactttgtattatgtattaacatggcgtgtttatttttgtatttttctctggttgggagtatgatatgaaggatcaagatcctcaactcacacatgtagacaaacattagctctttactctttctcaaccccttttatgattttaataattctcacttaactaattttgtaagcctgagatcaataagaaatgttcaggagagaggaaagaaaaaaaatatatgctccacaatttatatttagagagagaacacttagtcttgcctgtcaaaaagtccaacatttcataggtagtaggggccacatattacattcagttgctataggtccagcaactgaacctgccattacctgggcaaggaaagatccctttgctctaggaaagcttggcccaaattgattttcttctttttccccctgtaggactgactgttggctaattttgtcaagcacagctgtggtgggaagagttagggccagtgtcttgaaaatcaatcaagtagtgaatgtgatctctttgcagagctatagatagaaacagctgg

SEQ ID NO: 4383 - DNA, 589 bp, Homo sapiens
  source 1..589: mol_type = unassigned DNA
cattgccaccaaggaggagttcacagctttcctgcaccctgaggagtatgactacatgaaagatatagtagtacaggaaacaatggaagatatagataagaatgctgatggtttcattgatctagaagagtatattggtgacatgtacagccatgatgggaatactgatgagccagaatgggtaaagacagagcgagagcagtttgttgagtttcgggataagaaccgtgatgggaagatggacaaggaagagaccaaagactggatccttccctcagactatgatcatgcagaggcagaagccaggcacctggtctatgaatcagaccaaaacaaggatggcaagcttaccaaggaggagatcgttgacaagtatgacttatttgttggcagccaggccacagattttggggaggccttagtacggcatgatgagttctgagctacggaggaaccctcatttcctcaaaagccgtataactggagagacctgctgctcgttatataattatctgataccaaacacaagcgattctgaatgtacacacacgtttatctatagagcataaggtaaaacaattttgtttaa

SEQ ID NO: 4384 - DNA, 3209 bp, Homo sapiens
  source 1..3209: mol_type = unassigned DNA
gattggtcgggaggccgccggcgaggcggatgagggcggggtgcggacccgcttccggttgggcggtgcttgcgcgcgtgagctgagccggtgggtgagcggcggccacggcatcctgtgctgtgggggctacgaggaaagatctaattatcatggacctgcgacagtttcttatgtgcctgtccctgtgcacagcctttgccttgagcaaacccacagaaaagaaggaccgtgtacatcatgagcctcagctcagtgacaaggttcacaatgatgctcagagttttgattatgaccatgatgccttcttgggtgctgaagaagcaaagacctttgatcagctgacaccagaagagagcaaggaaaggcttggaaagattgtaagtaaaatagatggcgacaaggacgggtttgtcactgtggatgagctcaaagactggattaaatttgcacaaaagcgctggatttacgaggatgtagagcgacagtggaaggggcatgacctcaatgaggacggcctcgtttcctgggaggagtataaaaatgccacctacggctacgttttagatgatccagatcctgatgatggatttaactataaacagatgatggttagagatgagcggaggtttaaaatggcagacaaggatggagacctcattgccaccaaggaggagttcacagctttcctgcaccctgaggagtatgactacatgaaagatatagtagtacaggaaacaatggaagatatagataagaatgctgatggtttcattgatctagaagagtatattggatggcaagcttaccaaggaggagatcgttgacaagtatgacttatttgttggcagccaggccacagattttggggaggccttagtacggcatgatgagttctgagctacggaggaaccctcatttcctcaaaagtaatttatttttacagcttctggtttcacatgaaattgtttgcgctactgagactgttactacaaactttttaagacatgaaaaggcgtaatgaaaaccatcccgtccccattcctcctcctctctgagggactggagggaagccgtgcttctgaggaacaactctaattagtacacttgtgtttgtagatttacactttgtattatgtattaacatggcgtgtttatttttgtatttttctctggttgggagtatgatatgaaggatcaagatcctcaactcacacatgtagacaaacattagctctttactctttctcaaccccttttatgattttaataattctcacttaactaattttgtaagcctgagatcaataagaaatgttcaggagagaggaaagaaaaaaaatatatgctccacaatttatatttagagagagaacacttagtcttgcctgtcaaaaagtccaacatttcataggtagtaggggccacatattacattcagttgctataggtccagcaactgaacctgccattacctgggcaaggaaagatccctttgctctaggaaagcttggcccaaattgattttcttctttttccccctgtaggactgactgttggctaattttgtcaagcacagctgtggtgggaagagttagggccagtgtcttgaaaatcaatcaagtagtgaatgtgatctctttgcagagctatagatagaaacagctggaaaactaaaggaaaaatacaagtgttttcggggcatacattttttttctgggtgtgcatctgttgaaatgctcaagacttaattatttgccttttgaaatcactgtaaatgcccccatccggttcctcttcttcccaggtgtgccaaggaattaatcttggtttcactacaattaaaattcactcctttccaatcatgtcattgaaagtgcctttaacgaaagaaatggtcactgaatgggaattctcttaagaaaccctgagattaaaaaaagactatttggataacttataggaaagcctagaacctcccagtagagtggggatttttttcttcttccctttctcttttggacaatagttaaattagcagtattagttatgagtttggttgcagtgttcttatcttgtgggctgatttccaaaaaccacatgctgctgaatttaccagggatcctcatacctcacaatgcaaaccacttactaccaggcctttttctgtgtccactggagagcttgagctcacactcaaagatcagaggacctacagagagggctctttggtttgaggaccatggcttacctttcctgcctttgacccatcacaccccatttcctcctctttccctctccccgctgccaaaaaaaaaaaaaaaggaaacgtttatcatgaatcaacagggtttcagtccttatcaaagagagatgtggaaagagctaaagaaaccaccctttgttcccaactccactttacccatattttatgcaacacaaacactgtccttttgggtccctttcttacagatggacctcttgagaagaattatcgtattccacgtttttagccctcaggttaccaagataaatatatgtatatataacctttattattgctatatctttgtggataatacattcaggtggtgctgggtgatttattataatctgaacctaggtatatcctttggtcttccacagtcatgttgaggtgggctccctggtatggtaaaaagccaggtataatgtaacttcaccccagcctttgtactaagctcttgatagtggatatactcttttaagtttagccccaatatagggtaatggaaatttcctgccctctgggttccccatttttactattaagaagaccagtgataatttaataatgccaccaactctggcttagttaagtgagagtgtgaactgtgtggcaagagagcctcacacctcactaggtgcagagagcccaggccttatgttaaaatcatgcacttgaaaagcaaaccttaatctgcaaagacagcagcaagcattatacggtcatcttgaatgatccctttgaaattttttttttgtttgtttgtttaaatcaagcctgaggctggtgaacagtagctacacacccatattgtgtgttctgtgaatgctagctctcttgaatttggatattggttattttttatagagtgtaaaccaagttttatattctgcaatgcgaacaggtacctatctgtttctaaataaaactgtttacattcatt

SEQ ID NO: 4385 - DNA, 4418 bp, Homo sapiens
  source 1..4418: mol_type = unassigned DNA
gattggtcgggaggccgccggcgaggcggatgagggcggggtgcggacccgcttccggttgggcggtgcttgcgcgcgtgagctgagccggtgggtgagcggcggccacggcatcctgtgctgtgggggctacgaggaaaggacctcccaccctcccccactgagctgccttcccagtgatgaaagaaaaaatgtaaaagcctgaaaacccttcttcttgatttttaatttttttttttccctctaagaccttaaccactctggatagtatcacggggtatcagtagagtgtgctaaacagatgtgtactctgcagcttctttgcaggttttttgtcacatttttcagtcaagtgttccagctttgtgcttgttcattagagtcacctgtgactacagagattctgaaagtttgaatcagggcctgggaatctgtactttgaacagtactacaggtggtatttatgcctaggcaagtatgggaaacaactgtgcagaaggataaagacgttcttatctatgactagaccatctgaatgatttggcctttgaaggtgactcaaggttgagcctggatgttggagacttggtgctatagaccaaggaagctgccaagtatttcgctggttcctaatctcatgaacatcagaatcacctgaaaaacatttaaagctacgaatgtctgaattcagcttcagagactctaaatcaataggagaaacttaaagcttcctagatgattctaataaccagccatgtttgaagaccagaccaccaatgcgtacaagaagtaaaggatttggagtcaacatttaaaccttggttctttcacttttaattcttatgaacttgggcaaaaggattaaaattctactttggtatcttttgaaagaaaacagaaagtggacattttaactataagtttcttatcagcctacaatcagatgaaggaaactgatctaattatcatggacctgcgacagtttcttatgtgcctgtccctgtgcacagcctttgccttgagcaaacccacagaaaagaaggaccgtgtacatcatgagcctcagctcagtgacaaggttcacaatgatgctcagagttttgattatgaccatgatgccttcttgggtgctgaagaagcaaagacctttgatcagctgacaccagaagagagcaaggaaaggcttggaaagattgtaagtaaaatagatggcgacaaggacgggtttgtcactgtggatgagctcaaagactggattaaatttgcacaaaagcgctggatttacgaggatgtagagcgacagtggaaggggcatgacctcaatgaggacggcctcgtttcctgggaggagtataaaaatgccacctacggctacgttttagaatgattgtagataaaatagacgcggataaagatgggtttgtgacggagggggagctgaaatcctggattaagcacgcccagaagaaatacatatatgacaatgttgaaaaccaatggcaggagtttgatatgaatcaagacggcttaatctcctgggatgagtacagaaacgtgacttatggcacttacctggatgatccagatcctgatgatggatttaactataaacagatgatggttagagatgagcggaggtttaaaatggcagacaaggatggagacctcattgccaccaaggaggagttcacagctttcctgcaccctgaggagtatgactacatgaaagatatagtagtacaggaaacaatggaagatatagataagaatgctgatggtttcattgatctagaagagtatattggtgacatgtacagccatgatgggaatactgatgagccagaatgggtaaagacagagcgagagcagtttgttgagtttcgggataagaaccgtgatgggaagatggacaaggaagagaccaaagactggatccttccctcagactatgatcatgcagaggcagaagccaggcacctggtctatgaatcagaccaaaacaaggatggcaagcttaccaaggaggagatcgttgacaagtatgacttatttgttggcagccaggccacagattttggggaggccttagtacggcatgatgagttctgagctacggaggaaccctcatttcctcaaaagtaatttatttttacagcttctggtttcacatgaaattgtttgcgctactgagactgttactacaaactttttaagacatgaaaaggcgtaatgaaaaccatcccgtccccattcctcctcctctctgagggactggagggaagccgtgcttctgaggaacaactctaattagtacacttgtgtttgtagatttacactttgtattatgtattaacatggcgtgtttatttttgtatttttctctggttgggagtatgatatgaaggatcaagatcctcaactcacacatgtagacaaacattagctctttactctttctcaaccccttttatgattttaataattctcacttaactaattttgtaagcctgagatcaataagaaatgttcaggagagaggaaagaaaaaaaatatatgctccacaatttatatttagagagagaacacttagtcttgcctgtcaaaaagtccaacatttcataggtagtaggggccacatattacattcagttgctataggtccagcaactgaacctgccattacctgggcaaggaaagatccctttgctctaggaaagcttggcccaaattgattttcttctttttccccctgtaggactgactgttggctaattttgtcaagcacagctgtggtgggaagagttagggccagtgtcttgaaaatcaatcaagtagtgaatgtgatctctttgcagagctatagatagaaacagctggaaaactaaaggaaaaatacaagtgttttcggggcatacattttttttctgggtgtgcatctgttgaaatgctcaagacttaattatttgccttttgaaatcactgtaaatgcccccatccggttcctcttcttcccaggtgtgccaaggaattaatcttggtttcactacaattaaaattcactcctttccaatcatgtcattgaaagtgcctttaacgaaagaaatggtcactgaatgggaattctcttaagaaaccctgagattaaaaaaagactatttggataacttataggaaagcctagaacctcccagtagagtggggatttttttcttcttccctttctcttttggacaatagttaaattagcagtattagttatgagtttggttgcagtgttcttatcttgtgggctgatttccaaaaaccacatgctgctgaatttaccagggatcctcatacctcacaatgcaaaccacttactaccaggcctttttctgtgtccactggagagcttgagctcacactcaaagatcagaggacctacagagagggctctttggtttgaggaccatggcttacctttcctgcctttgacccatcacaccccatttcctcctctttccctctccccgctgccaaaaaaaaaaaaaaaggaaacgtttatcatgaatcaacagggtttcagtccttatcaaagagagatgtggaaagagctaaagaaaccaccctttgttcccaactccactttacccatattttatgcaacacaaacactgtccttttgggtccctttcttacagatggacctcttgagaagaattatcgtattccacgtttttagccctcaggttaccaagataaatatatgtatatataacctttattattgctatatctttgtggataatacattcaggtggtgctgggtgatttattataatctgaacctaggtatatcctttggtcttccacagtcatgttgaggtgggctccctggtatggtaaaaagccaggtataatgtaacttcaccccagcctttgtactaagctcttgatagtggatatactcttttaagtttagccccaatatagggtaatggaaatttcctgccctctgggttccccatttttactattaagaagaccagtgataatttaataatgccaccaactctggcttagttaagtgagagtgtgaactgtgtggcaagagagcctcacacctcactaggtgcagagagcccaggccttatgttaaaatcatgcacttgaaaagcaaaccttaatctgcaaagacagcagcaagcattatacggtcatcttgaatgatccctttgaaattttttttttgtttgtttgtttaaatcaagcctgaggctggtgaacagtagctacacacccatattgtgtgttctgtgaatgctagctctcttgaatttggatattggttattttttatagagtgtaaaccaagttttatattctgcaatgcgaacaggtacctatctgtttctaaataaaactgtttacattcatt

SEQ ID NO: 4386 - DNA, 3206 bp, Homo sapiens
  source 1..3206: mol_type = unassigned DNA
gattggtcgggaggccgccggcgaggcggatgagggcggggtgcggacccgcttccggttgggcggtgcttgcgcgcgtgagctgagccggtgggtgagcggcggccacggcatcctgtgctgtgggggctacgaggaaagatctaattatcatggacctgcgacagtttcttatgtgcctgtccctgtgcacagcctttgccttgagcaaacccacagaaaagaaggaccgtgtacatcatgagcctcagctcagtgacaaggttcacaatgatgctcagagttttgattatgaccatgatgccttcttgggtgctgaagaagcaaagacctttgatcagctgacaccagaagagagcaaggaaaggcttggaatgattgtagataaaatagacgcggataaagatgggtttgtgacggagggggagctgaaatcctggattaagcacgcccagaagaaatacatatatgacaatgttgaaaaccaatggcaggagtttgatatgaatcaagacggcttaatctcctgggatgagtacagaaacgtgacttatggcacttacctggatgatccagatcctgatgatggatttaactataaacagatgatggttagagatgagcggaggtttaaaatggcagacagagcgagagcagtttgttgagtttcgggataagaaccgtgatgggaagatggacaaggaagagaccaaagactggatccttccctcagactatgatcatgcagaggcagaagccaggcacctggtctatgaatcagaccaaaacaaggatggcaagcttaccaaggaggagatcgttgacaagtatgacttatttgttggcagccaggccacagattttggggaggccttagtacggcatgatgagttctgagctacggaggaaccctcatttcctcaaaagtaatttatttttacagcttctggtttcacatgaaattgtttgcgctactgagactgttactacaaactttttaagacatgaaaaggcgtaatgaaaaccatcccgtccccattcctcctcctctctgagggactggagggaagccgtgcttctgaggaacaactctaattagtacacttgtgtttgtagatttacactttgtattatgtattaacatggcgtgtttatttttgtatttttctctggttgggagtatgatatgaaggatcaagatcctcaactcacacatgtagacaaacattagctctttactctttctcaaccccttttatgattttaataattctcacttaactaattttgtaagcctgagatcaataagaaatgttcaggagagaggaaagaaaaaaaatatatgctccacaatttatatttagagagagaacacttagtcttgcctgtcaaaaagtccaacatttcataggtagtaggggccacatattacattcagttgctataggtccagcaactgaacctgccattacctgggcaaggaaagatccctttgctctaggaaagcttggcccaaattgattttcttctttttccccctgtaggactgactgttggctaattttgtcaagcacagctgtggtgggaagagttagggccagtgtcttgaaaatcaatcaagtagtgaatgtgatctctttgcagagctatagatagaaacagctggaaaactaaaggaaaaatacaagtgttttcggggcatacattttttttctgggtgtgcatctgttgaaatgctcaagacttaattatttgccttttgaaatcactgtaaatgcccccatccggttcctcttcttcccaggtgtgccaaggaattaatcttggtttcactacaattaaaattcactcctttccaatcatgtcattgaaagtgcctttaacgaaagaaatggtcactgaatgggaattctcttaagaaaccctgagattaaaaaaagactatttggataacttataggaaagcctagaacctcccagtagagtggggatttttttcttcttccctttctcttttggacaatagttaaattagcagtattagttatgagtttggttgcagtgttcttatcttgtgggctgatttccaaaaaccacatgctgctgaatttaccagggatcctcatacctcacaatgcaaaccacttactaccaggcctttttctgtgtccactggagagcttgagctcacactcaaagatcagaggacctacagagagggctctttggtttgaggaccatggcttacctttcctgcctttgacccatcacaccccatttcctcctctttccctctccccgctgccaaaaaaaaaaaaaaaggaaacgtttatcatgaatcaacagggtttcagtccttatcaaagagagatgtggaaagagctaaagaaaccaccctttgttcccaactccactttacccatattttatgcaacacaaacactgtccttttgggtccctttcttacagatggacctcttgagaagaattatcgtattccacgtttttagccctcaggttaccaagataaatatatgtatatataacctttattattgctatatctttgtggataatacattcaggtggtgctgggtgatttattataatctgaacctaggtatatcctttggtcttccacagtcatgttgaggtgggctccctggtatggtaaaaagccaggtataatgtaacttcaccccagcctttgtactaagctcttgatagtggatatactcttttaagtttagccccaatatagggtaatggaaatttcctgccctctgggttccccatttttactattaagaagaccagtgataatttaataatgccaccaactctggcttagttaagtgagagtgtgaactgtgtggcaagagagcctcacacctcactaggtgcagagagcccaggccttatgttaaaatcatgcacttgaaaagcaaaccttaatctgcaaagacagcagcaagcattatacggtcatcttgaatgatccctttgaaattttttttttgtttgtttgtttaaatcaagcctgaggctggtgaacagtagctacacacccatattgtgtgttctgtgaatgctagctctcttgaatttggatattggttattttttatagagtgtaaaccaagttttatattctgcaatgcgaacaggtacctatctgtttctaaataaaactgtttacattcatt

SEQ ID NO: 4387 - DNA, 3067 bp, Homo sapiens
  source 1..3067: mol_type = unassigned DNA
gattggtcgggaggccgccggcgaggcggatgagggcggggtgcggacccgcttccggttgggcggtgcttgcgcgcgtgagctgagccggtgggtgagcggcggccacggcatcctgtgctgtgggggctacgaggaaagatctaattatcatggacctgcgacagtttcttatgtgcctgtccctgtgcacagcctttgccttgagcaaacccacagaaaagaaggaccgtgtacatcatgagcctcagctcagtgacaaggttcacaatgatgctcagagttttgattatgaccatgatgccttcttgggtgctgaagaagcaaagacctttgatcagctgacaccagaagagagcaaggaaaggcttggaatgattgtagataaaatagacgcggataaagatgggtttgtgacggagggggagctgaaatcctggattaagcacgcccagaagaaatacatatatgacaatgttgaaaaccaatggcaggagtttgatatgaatcaagacggcttaatctcctgggatgagtacagaaacgtgacttatggcacttacctggatgatccagatcctgatgatggatttaactataaacagatgatggttagagatgagcggaggtttaaaatggcagacaaggatggagacctcattgccaccaaggaggagatcgttgacaagtatgacttatttgttggcagccaggccacagattttggggaggccttagtacggcatgatgagttctgagctacggaggaaccctcatttcctcaaaagtaatttatttttacagcttctggtttcacatgaaattgtttgcgctactgagactgttactacaaactttttaagacatgaaaaggcgtaatgaaaaccatcccgtccccattcctcctcctctctgagggactggagggaagccgtgcttctgaggaacaactctaattagtacacttgtgtttgtagatttacactttgtattatgtattaacatggcgtgtttatttttgtatttttctctggttgggagtatgatatgaaggatcaagatcctcaactcacacatgtagacaaacattagctctttactctttctcaaccccttttatgattttaataattctcacttaactaattttgtaagcctgagatcaataagaaatgttcaggagagaggaaagaaaaaaaatatatgctccacaatttatatttagagagagaacacttagtcttgcctgtcaaaaagtccaacatttcataggtagtaggggccacatattacattcagttgctataggtccagcaactgaacctgccattacctgggcaaggaaagatccctttgctctaggaaagcttggcccaaattgattttcttctttttccccctgtaggactgactgttggctaattttgtcaagcacagctgtggtgggaagagttagggccagtgtcttgaaaatcaatcaagtagtgaatgtgatctctttgcagagctatagatagaaacagctggaaaactaaaggaaaaatacaagtgttttcggggcatacattttttttctgggtgtgcatctgttgaaatgctcaagacttaattatttgccttttgaaatcactgtaaatgcccccatccggttcctcttcttcccaggtgtgccaaggaattaatcttggtttcactacaattaaaattcactcctttccaatcatgtcattgaaagtgcctttaacgaaagaaatggtcactgaatgggaattctcttaagaaaccctgagattaaaaaaagactatttggataacttataggaaagcctagaacctcccagtagagtggggatttttttcttcttccctttctcttttggacaatagttaaattagcagtattagttatgagtttggttgcagtgttcttatcttgtgggctgatttccaaaaaccacatgctgctgaatttaccagggatcctcatacctcacaatgcaaaccacttactaccaggcctttttctgtgtccactggagagcttgagctcacactcaaagatcagaggacctacagagagggctctttggtttgaggaccatggcttacctttcctgcctttgacccatcacaccccatttcctcctctttccctctccccgctgccaaaaaaaaaaaaaaaggaaacgtttatcatgaatcaacagggtttcagtccttatcaaagagagatgtggaaagagctaaagaaaccaccctttgttcccaactccactttacccatattttatgcaacacaaacactgtccttttgggtccctttcttacagatggacctcttgagaagaattatcgtattccacgtttttagccctcaggttaccaagataaatatatgtatatataacctttattattgctatatctttgtggataatacattcaggtggtgctgggtgatttattataatctgaacctaggtatatcctttggtcttccacagtcatgttgaggtgggctccctggtatggtaaaaagccaggtataatgtaacttcaccccagcctttgtactaagctcttgatagtggatatactcttttaagtttagccccaatatagggtaatggaaatttcctgccctctgggttccccatttttactattaagaagaccagtgataatttaataatgccaccaactctggcttagttaagtgagagtgtgaactgtgtggcaagagagcctcacacctcactaggtgcagagagcccaggccttatgttaaaatcatgcacttgaaaagcaaaccttaatctgcaaagacagcagcaagcattatacggtcatcttgaatgatccctttgaaattttttttttgtttgtttgtttaaatcaagcctgaggctggtgaacagtagctacacacccatattgtgtgttctgtgaatgctagctctcttgaatttggatattggttattttttatagagtgtaaaccaagttttatattctgcaatgcgaacaggtacctatctgtttctaaataaaactgtttacattcatt

SEQ ID NO: 4388 - DNA, 3259 bp, Homo sapiens
  source 1..3259: mol_type = unassigned DNA
gattggtcgggaggccgccggcgaggcggatgagggcggggtgcggacccgcttccggttgggcggtgcttgcgcgcgtgagctgagccggtgggtgagcggcggccacggcatcctgtgctgtgggggctacgaggaaagatctaattatcatggacctgcgacagtttcttatgtgcctgtccctgtgcacagcctttgccttgagcaaacccacagaaaagaaggaccgtgtacatcatgagcctcagctcagtgacaaggttcacaatgatgctcagagttttgattatgaccatgatgccttcttgggtgctgaagaagcaaagacctttgatcagctgacaccagaagagagcaaggaaaggcttggaaagattgtaagtaaaatagatggcgacaaggacgggtttgtcactgtggatgagctcaaagactggattaaatttgcacaaaagcgctggatttacgaggatgtagagcgacagtggaaggggcatgacctcaatgaggacggcctcgtttcctgggaggagtataaaaatgccacctacggctacgttttagatgatccagatcctgatgatggatttaactataaacagatgatggttagagatgagcggaggtttaaaatggcagacaaggatggagacctcattgccaccaaggaggagttcacagctttcctgcaccctgaggagtatgactacatgaaagatatagtagtacaggaaacaatggaagatatagataagaatgctgatggtttcattgatctagaagagtatattggtgacatgtacagccatgatgggaatactgatgaatcagaccaaaacaaggatggcaagcttaccaaggaggagatcgttgacaagtatgacttatttgttggcagccaggccacagattttggggaggccttagtacggcatgatgagttctgagctacggaggaaccctcatttcctcaaaagtaatttatttttacagcttctggtttcacatgaaattgtttgcgctactgagactgttactacaaactttttaagacatgaaaaggcgtaatgaaaaccatcccgtccccattcctcctcctctctgagggactggagggaagccgtgcttctgaggaacaactctaattagtacacttgtgtttgtagatttacactttgtattatgtattaacatggcgtgtttatttttgtatttttctctggttgggagtatgatatgaaggatcaagatcctcaactcacacatgtagacaaacattagctctttactctttctcaaccccttttatgattttaataattctcacttaactaattttgtaagcctgagatcaataagaaatgttcaggagagaggaaagaaaaaaaatatatgctccacaatttatatttagagagagaacacttagtcttgcctgtcaaaaagtccaacatttcataggtagtaggggccacatattacattcagttgctataggtccagcaactgaacctgccattacctgggcaaggaaagatccctttgctctaggaaagcttggcccaaattgattttcttctttttccccctgtaggactgactgttggctaattttgtcaagcacagctgtggtgggaagagttagggccagtgtcttgaaaatcaatcaagtagtgaatgtgatctctttgcagagctatagatagaaacagctggaaaactaaaggaaaaatacaagtgttttcggggcatacattttttttctgggtgtgcatctgttgaaatgctcaagacttaattatttgccttttgaaatcactgtaaatgcccccatccggttcctcttcttcccaggtgtgccaaggaattaatcttggtttcactacaattaaaattcactcctttccaatcatgtcattgaaagtgcctttaacgaaagaaatggtcactgaatgggaattctcttaagaaaccctgagattaaaaaaagactatttggataacttataggaaagcctagaacctcccagtagagtggggatttttttcttcttccctttctcttttggacaatagttaaattagcagtattagttatgagtttggttgcagtgttcttatcttgtgggctgatttccaaaaaccacatgctgctgaatttaccagggatcctcatacctcacaatgcaaaccacttactaccaggcctttttctgtgtccactggagagcttgagctcacactcaaagatcagaggacctacagagagggctctttggtttgaggaccatggcttacctttcctgcctttgacccatcacaccccatttcctcctctttccctctccccgctgccaaaaaaaaaaaaaaaggaaacgtttatcatgaatcaacagggtttcagtccttatcaaagagagatgtggaaagagctaaagaaaccaccctttgttcccaactccactttacccatattttatgcaacacaaacactgtccttttgggtccctttcttacagatggacctcttgagaagaattatcgtattccacgtttttagccctcaggttaccaagataaatatatgtatatataacctttattattgctatatctttgtggataatacattcaggtggtgctgggtgatttattataatctgaacctaggtatatcctttggtcttccacagtcatgttgaggtgggctccctggtatggtaaaaagccaggtataatgtaacttcaccccagcctttgtactaagctcttgatagtggatatactcttttaagtttagccccaatatagggtaatggaaatttcctgccctctgggttccccatttttactattaagaagaccagtgataatttaataatgccaccaactctggcttagttaagtgagagtgtgaactgtgtggcaagagagcctcacacctcactaggtgcagagagcccaggccttatgttaaaatcatgcacttgaaaagcaaaccttaatctgcaaagacagcagcaagcattatacggtcatcttgaatgatccctttgaaattttttttttgtttgtttgtttaaatcaagcctgaggctggtgaacagtagctacacacccatattgtgtgttctgtgaatgctagctctcttgaatttggatattggttattttttatagagtgtaaaccaagttttatattctgcaatgcgaacaggtacctatctgtttctaaataaaactgtttacattcatt

SEQ ID NO: 4389 - DNA, 2983 bp, Homo sapiens
  source 1..2983: mol_type = unassigned DNA
gattggtcgggaggccgccggcgaggcggatgagggcggggtgcggacccgcttccggttgggcggtgcttgcgcgcgtgagctgagccggtgggtgagcggcggccacggcatcctgtgctgtgggggctacgaggaaagatgatccagatcctgatgatggatttaactataaacagatgatggttagagatgagcggaggtttaaaatggcagacaaggatggagacctcattgccaccaaggaggagttcacagctttcctgcaccctgaggagtatgactacatgaaagatatagtagtacaggaaacaatggaagatatagataagaatgctgatggtttcattgatctagaagagtatattggtgacatgtacagccatgatgggaatactgatgagccagaatgggtaaagacagagcgagagcagtttgttgagtttcgggataagaaccgtgatgggaagatggacaaggaagagaccaaagactggatccttccctcagactatgatcatgcagaggcagaagccaggcacctggtctatgaatcagaccaaaacaaggatggcaagcttaccaaggaggagatcgttgacaagtatgacttatttgttggcagccaggccacagattttggggaggccttagtacggcatgatgagttctgagctacggaggaaccctcatttcctcaaaagtaatttatttttacagcttctggtttcacatgaaattgtttgcgctactgagactgttactacaaactttttaagacatgaaaaggcgtaatgaaaaccatcccgtccccattcctcctcctctctgagggactggagggaagccgtgcttctgaggaacaactctaattagtacacttgtgtttgtagatttacactttgtattatgtattaacatggcgtgtttatttttgtatttttctctggttgggagtatgatatgaaggatcaagatcctcaactcacacatgtagacaaacattagctctttactctttctcaaccccttttatgattttaataattctcacttaactaattttgtaagcctgagatcaataagaaatgttcaggagagaggaaagaaaaaaaatatatgctccacaatttatatttagagagagaacacttagtcttgcctgtcaaaaagtccaacatttcataggtagtaggggccacatattacattcagttgctataggtccagcaactgaacctgccattacctgggcaaggaaagatccctttgctctaggaaagcttggcccaaattgattttcttctttttccccctgtaggactgactgttggctaattttgtcaagcacagctgtggtgggaagagttagggccagtgtcttgaaaatcaatcaagtagtgaatgtgatctctttgcagagctatagatagaaacagctggaaaactaaaggaaaaatacaagtgttttcggggcatacattttttttctgggtgtgcatctgttgaaatgctcaagacttaattatttgccttttgaaatcactgtaaatgcccccatccggttcctcttcttcccaggtgtgccaaggaattaatcttggtttcactacaattaaaattcactcctttccaatcatgtcattgaaagtgcctttaacgaaagaaatggtcactgaatgggaattctcttaagaaaccctgagattaaaaaaagactatttggataacttataggaaagcctagaacctcccagtagagtggggatttttttcttcttccctttctcttttggacaatagttaaattagcagtattagttatgagtttggttgcagtgttcttatcttgtgggctgatttccaaaaaccacatgctgctgaatttaccagggatcctcatacctcacaatgcaaaccacttactaccaggcctttttctgtgtccactggagagcttgagctcacactcaaagatcagaggacctacagagagggctctttggtttgaggaccatggcttacctttcctgcctttgacccatcacaccccatttcctcctctttccctctccccgctgccaaaaaaaaaaaaaaaggaaacgtttatcatgaatcaacagggtttcagtccttatcaaagagagatgtggaaagagctaaagaaaccaccctttgttcccaactccactttacccatattttatgcaacacaaacactgtccttttgggtccctttcttacagatggacctcttgagaagaattatcgtattccacgtttttagccctcaggttaccaagataaatatatgtatatataacctttattattgctatatctttgtggataatacattcaggtggtgctgggtgatttattataatctgaacctaggtatatcctttggtcttccacagtcatgttgaggtgggctccctggtatggtaaaaagccaggtataatgtaacttcaccccagcctttgtactaagctcttgatagtggatatactcttttaagtttagccccaatatagggtaatggaaatttcctgccctctgggttccccatttttactattaagaagaccagtgataatttaataatgccaccaactctggcttagttaagtgagagtgtgaactgtgtggcaagagagcctcacacctcactaggtgcagagagcccaggccttatgttaaaatcatgcacttgaaaagcaaaccttaatctgcaaagacagcagcaagcattatacggtcatcttgaatgatccctttgaaattttttttttgtttgtttgtttaaatcaagcctgaggctggtgaacagtagctacacacccatattgtgtgttctgtgaatgctagctctcttgaatttggatattggttattttttatagagtgtaaaccaagttttatattctgcaatgcgaacaggtacctatctgtttctaaataaaactgtttacattcatt

SEQ ID NO: 4390 - DNA, 4224 bp, Homo sapiens
  source 1..4224: mol_type = unassigned DNA
gattggtcgggaggccgccggcgaggcggatgagggcggggtgcggacccgcttccggttgggcggtgcttgcgcgcgtgagctgagccggtgggtgagcggcggccacggcatcctgtgctgtgggggctacgaggaaaggacctcccaccctcccccactgagctgccttcccagtgatgaaagaaaaaatgtaaaagcctgaaaacccttcttcttgatttttaatttttttttttccctctaagaccttaaccactctggatagtatcacggggtatcagtagagtgtgctaaacagatgtgtactctgcagcttctttgcaggttttttgtcacatttttcagtcaagtgttccagctttgtgcttgttcattagagtcacctgtgactacagagattctgaaagtttgaatcagggcctgggaatctgtactttgaacagtactacaggtggtatttatgcctaggcaagtatgggaaacaactgtgcagaaggataaagacgttcttatctatgactagaccatctgaatgatttggcctttgaaggtgactcaaggttgagcctggatgttggagacttggtgctatagaccaaggaagctgccaagtatttcgctggttcctaatctcatgaacatcagaatcacctgaaaaacatttaaagctacgaatgtctgaattcagcttcagagactctaaatcaataggagaaacttaaagcttcctagatgattctaataaccagccatgtttgaagaccagaccaccaatgcgtacaagaagtaaaggatttggagtcaacatttaaaccttggttctttcacttttaattcttatgaacttgggcaaaaggattaaaattctactttggtatcttttgaaagaaaacagaaagtggacattttaactataagtttcttatcagcctacaatcagatgaaggaaactgatctaattatcatggacctgcgacagtttcttatgtgcctgtccctgtgcacagcctttgccttgagcaaacccacagaaaagaaggaccgtgtacatcatgagcctcagctcagtgacaaggttcacaatgatgctcagagttttgattatgaccatgatgccttcttgggtgctgaagaagcaaagacctttgatcagctgacaccagaagagagcaaggaaaggcttggaatgattgtagataaaatagacgcggataaagatgggtttgtgacggagggggagctgaaatcctggattaagcacgcccagaagaaatacatatatgacaatgttgaaaaccaatggcaggagtttgatatgaatcaagacggcttaatctcctgggatgagtacagaaacgtgacttatggcacttacctggatgatccagatcctgatgatggatttaactataaacagatgatggttagagatgagcggaggtttaaaatggcagacaaggatggagacctcattgccaccaaggaggagttcacagctttcctgcaccctgaggagtatgactacatgaaagatatagtagtacaggaaacaatggaagatatagataagaatgctgatggtttcattgatctagaagagtatattggtgacatgtacagccatgatgggaatactgatgagccagaatgggtaaagacagagcgagagcagtttgttgagtttcgggataagaaccgtgatgggaagatggacaaggaagagaccaaagactggatccttccctcagactatgatcatgcagaggcagaagccaggcacctggtctatgaatcagaccaaaacaaggatggcaagcttaccaaggaggagatcgttgacaagtatgacttatttgttggcagccaggccacagattttggggaggccttagtacggcatgatgagttctgagctacggaggaaccctcatttcctcaaaagtaatttatttttacagcttctggtttcacatgaaattgtttgcgctactgagactgttactacaaactttttaagacatgaaaaggcgtaatgaaaaccatcccgtccccattcctcctcctctctgagggactggagggaagccgtgcttctgaggaacaactctaattagtacacttgtgtttgtagatttacactttgtattatgtattaacatggcgtgtttatttttgtatttttctctggttgggagtatgatatgaaggatcaagatcctcaactcacacatgtagacaaacattagctctttactctttctcaaccccttttatgattttaataattctcacttaactaattttgtaagcctgagatcaataagaaatgttcaggagagaggaaagaaaaaaaatatatgctccacaatttatatttagagagagaacacttagtcttgcctgtcaaaaagtccaacatttcataggtagtaggggccacatattacattcagttgctataggtccagcaactgaacctgccattacctgggcaaggaaagatccctttgctctaggaaagcttggcccaaattgattttcttctttttccccctgtaggactgactgttggctaattttgtcaagcacagctgtggtgggaagagttagggccagtgtcttgaaaatcaatcaagtagtgaatgtgatctctttgcagagctatagatagaaacagctggaaaactaaaggaaaaatacaagtgttttcggggcatacattttttttctgggtgtgcatctgttgaaatgctcaagacttaattatttgccttttgaaatcactgtaaatgcccccatccggttcctcttcttcccaggtgtgccaaggaattaatcttggtttcactacaattaaaattcactcctttccaatcatgtcattgaaagtgcctttaacgaaagaaatggtcactgaatgggaattctcttaagaaaccctgagattaaaaaaagactatttggataacttataggaaagcctagaacctcccagtagagtggggatttttttcttcttccctttctcttttggacaatagttaaattagcagtattagttatgagtttggttgcagtgttcttatcttgtgggctgatttccaaaaaccacatgctgctgaatttaccagggatcctcatacctcacaatgcaaaccacttactaccaggcctttttctgtgtccactggagagcttgagctcacactcaaagatcagaggacctacagagagggctctttggtttgaggaccatggcttacctttcctgcctttgacccatcacaccccatttcctcctctttccctctccccgctgccaaaaaaaaaaaaaaaggaaacgtttatcatgaatcaacagggtttcagtccttatcaaagagagatgtggaaagagctaaagaaaccaccctttgttcccaactccactttacccatattttatgcaacacaaacactgtccttttgggtccctttcttacagatggacctcttgagaagaattatcgtattccacgtttttagccctcaggttaccaagataaatatatgtatatataacctttattattgctatatctttgtggataatacattcaggtggtgctgggtgatttattataatctgaacctaggtatatcctttggtcttccacagtcatgttgaggtgggctccctggtatggtaaaaagccaggtataatgtaacttcaccccagcctttgtactaagctcttgatagtggatatactcttttaagtttagccccaatatagggtaatggaaatttcctgccctctgggttccccatttttactattaagaagaccagtgataatttaataatgccaccaactctggcttagttaagtgagagtgtgaactgtgtggcaagagagcctcacacctcactaggtgcagagagcccaggccttatgttaaaatcatgcacttgaaaagcaaaccttaatctgcaaagacagcagcaagcattatacggtcatcttgaatgatccctttgaaattttttttttgtttgtttgtttaaatcaagcctgaggctggtgaacagtagctacacacccatattgtgtgttctgtgaatgctagctctcttgaatttggatattggttattttttatagagtgtaaaccaagttttatattctgcaatgcgaacaggtacctatctgtttctaaataaaactgtttacattcatt

SEQ ID NO: 4391 - DNA, 1832 bp, Homo sapiens
  source 1..1832: mol_type = unassigned DNA
gcgcaatccggagaggacgccaggacgacgcccgagttccctttcaggctagaactcttcctttttctagcttggggtagaaggcggagccggagccccggaacccccgccctcggggtgcgaggcggcagcagggccgtcccctacatttgcatagcccctgggacgtggcgctgcacccaagcctcttctcagttggagggaactccaagtcccacagtgccacggggtggggtgcgtcactttcgctgcgttggaggctgaggagaattgagcctgggaggcgggtccggagagggctatggaaagccgccggcggggaatcccggccgtagagggacagtggataggtgcccgaggcctacagctggcctggggctcgtgtctgggcttcggacgttggggcccggtggcccaccctttccgtagttgtcccaaatggagctggaattggatgctggtgaccaagacctgctggccttcctgctagaggaaagtggagatttggggacggcacccgatgaggccgtgagggccccactggactgggcgctgccgctttctgaggtaccgagcgactgggaagtagatgatttgctgtgctccctgctgagtcccccagcgtcgttgaacattctcagctcctccaacccctgccttgtccaccatgaccacacctactccctcccacgggaaactgtctctatggatctagagagtgagagctgtagaaaagaggggacccagatgactccacagcatatggaggagctggcagagcaggagattgctaggctagtactgacagatgaggagaagagtctattggagaaggaggggcttattctgcctgagacacttcctctcactaagacagaggaacaaattctgaaacgtgtgcggaggaagattcgaaataaaagatctgctcaagagagccgcaggaaaaagaaggtgtatgttgggggtttagagagcagggtcttgaaatacacagcccagaatatggagcttcagaacaaagtacagcttctggaggaacagaatttgtcccttctagatcaactgaggaaactccaggccatggtgattgagatatcaaacaaaaccagcagcagcagcacctgcatcttggtcctactagtctccttctgcctcctccttgtacctgctatgtactcctctgacacaagggggagcctgccagctgagcatggagtgttgtcccgccagcttcgtgccctccccagtgaggacccttaccagctggagctgcctgccctgcagtcagaagtgccgaaagacagcacacaccagtggttggacggctcagactgtgtactccaggcccctggcaacacttcctgcctgctgcattacatgcctcaggctcccagtgcagagcctcccctggagtggccattccctgacctcttctcagagcctctctgccgaggtcccatcctccccctgcaggcaaatctcacaaggaagggaggatggcttcctactggtagcccctctgtcattttgcaggacagatactcaggctagatatgaggatatgtggggggtctcagcaggagcctggggggctccccatctgtgtccaaataaaaagcggtgggcaagggctggccgcagctcctgtgccctgtcaggacgactgagggctcaaacacaccacacttaatggctttctgggtcttttatttgtacccatgtgtctgtcacaccatgaatgtacctggggaaatcaactgacctccctgaacatttcacgcagtcagggaacaggtgaggaaagaaataaataagtgattctaatgctg

SEQ ID NO: 4392 - DNA, 2586 bp, Homo sapiens
  source 1..2586: mol_type = unassigned DNA
acagagccacagagggctgtgagcttgcccggccccaggtaacgctggcggtgggtgggcctccagcttggagcagagaccccccgaggcatctgcagacagaactggatggacccatgaatacggatttagctgctggaaagatggcttctgctgcctgctccatggaccccatcgacagctttgagctcctggatctcctgtttgaccggcaggacggcatcctgagacacgtggagctgggcgagggctggggtcacgtcaaggaccagcaggtcctgccaaaccccgactctgacgacttcctcagctccatcctgggctctggagactcactgcccagctccccactctggtcccccgaaggcagtgatagtggcatctccgaagacctcccctccgacccccaggacacccctccacgcagcggaccagccacctcccccgccggctgccatcctgcccagcctggcaaggggccctgcctctcctatcatcctggcaactcttgctccaccacaaccccagggccagtgatccaagtacctgaagcctctgtgaccatagacctggaaatgtggagcccaggaggaaggatctgtgctgagaagccggctgatccggtggacctgtccccacgatgcaatctcaccgtgaaagacctcctcctttcgggcagcagtggggacctgcaacagcatcacctgggggcctcctacctcctgcgacctggggctgggcactgtcaggagctggtgctcaccgaggatgagaagaagctgctggctaaagaaggcatcaccctgcccactcagctgcccctcactaagtacgaggagcgagtgctgaaaaaaatccgccggaaaatccggaacaagcagtcggcgcaagaaagcaggaagaagaagaaggaatatatcgatggcctggagactcggatgtcagcttgcactgctcagaatcaggagttacagaggaaagtcttgcatctcgagaagcaaaacctgtccctcttggagcaactgaagaaactccaggccattgtggtgcagtccaccagcaagtcagcccagacaggcacctgtgtcgcagtcctgttgctgtcctttgccctcatcatcctcccctccatcagcccttttggccccaacaaaaccgagagccctggggactttgcgcctgtacgagtgttctccagaactttgcacaacgatgctgcctcccgcgtggctgctgatgctgtgccaggctccgaggccccaggaccccgacccgaggctgacacaacccgagaagagtctccaggaagccccggggcagactggggcttccaggacaccgcgaacctgaccaattcgacggaggagctggacaacgccaccctggtcctgaggaatgcaacagaggggctgggccaggtcgccctgctggactgggtggcgcctgggccgagcactggctcaggacgtgcagggctggaggcggcgggagacgagctgtgagccccgccaggactatgctcccaggcccctctgcccaggggtgccttggggatgctgcactgggcagctacccacctggggatgggacgtgaggccaagaccccagcagagatgccagaatgggggaggcacagctcatagccacacacccagggcctgactgaggcccacgcaggaaccgacactcagacacaaggcaaagagggccacaggacccgggaaatacacacagagccaggagcagaagcaaagagcagacacacatacagcctgaaacagacctggacagacagacacagcctgaaacagacccggacagacagacacagcctgaaacagacccagacaaacagacagacagacacagcctgaaacagacccagacagacagacagacagcctgaaacagacccagacacagcctgaaacagatccggacagacagacagaaacagcctgaaacagacccagacagacagacagacacagcctgaaacagacccggacagacagacagacacagcctgaaacagacccggacagacagacagacacagcctgaaacagacccggacagacagacagacacagcctgaaacagacctagacagacagacacagattgaaacagacccagacaaacagacagacacagcctgaaacagacccagacacagcctgaaacagacccggacagacagacagacacagcctgaaacagacccagacagacagacagacacagcctgaaacagacccagacagacagaccgacgcagcctgaaagagacccagacagagagacaggcagacacagcctaaaacagacctggacagacaggcagacgtagtctgaaacagacctgaacagacagacagacgcacacacacaacagatgcgcagcaactccccgcccagggacccctcccggcctccctcgcacactgggaggaggaagccgccgagactgcagggagcctggccccggagccccgggtgcgccctggtctttggagcagccacggcccacaatcaccccccttttctaagactgcctgatccgaaataaagtattttgacaga

SEQ ID NO: 4393 - DNA, 2279 bp, Homo sapiens
  source 1..2279: mol_type = unassigned DNA
acagagccacagagggctgtgagcttgcccggccccaggtaacgctggcggtgggtgggcctccagcttggagcagagaccccccgaggcatctgcagacagaactggatggacccatgaatacggatttagctgctggaaagatggcttctgctgcctgctccatggaccccatcgacagctttgagctcctggatctcctgtttgaccggcaggacggcatcctgagacacgtggagctgggcgagggctggggtcacgtcaaggaccaggtcctgccaaaccccgactctgacgacttcctcagctccatcctgggctctggagactcactgcccagctccccactctggtcccccgaaggcagtgatagtggcatctccgaagacctcccctccgacccccaggacacccctccacgcagcggaccagccacctcccccgccggctgccatcctgcccagcctggcaaggggccctgcctctcctatcatcctggcaactcttgctccaccacaaccccagggccagtgatccaacaacagcatcacctgggggcctcctacctcctgcgacctggggctgggcactgtcaggagctggtgctcaccgaggatgagaagaagctgctggctaaagaaggcatcaccctgcccactcagctgcccctcactaagtacgaggagcgagtgctgaaaaaaatccgccggaaaatccggaacaagcagtcggcgcaagaaagcaggaagaagaagaaggaatatatcgatggcctggagactcggtcctgttgctgtcctttgccctcatcatcctcccctccatcagcccttttggccccaacaaaaccgagagccctggggactttgcgcctgtacgagtgttctccagaactttgcacaacgatgctgcctcccgcgtggctgctgatgctgtgccaggctccgaggccccaggaccccgacccgaggctgacacaacccgagaagagtctccaggaagccccggggcagactggggcttccaggacaccgcgaacctgaccaattcgacggaggagctggacaacgccaccctggtcctgaggaatgcaacagaggggctgggccaggtcgccctgctggactgggtggcgcctgggccgagcactggctcaggacgtgcagggctggaggcggcgggagacgagctgtgagccccgccaggactatgctcccaggcccctctgcccaggggtgccttggggatgctgcactgggcagctacccacctggggatgggacgtgaggccaagaccccagcagagatgccagaatgggggaggcacagctcatagccacacacccagggcctgactgaggcccacgcaggaaccgacactcagacacaaggcaaagagggccacaggacccgggaaatacacacagagccaggagcagaagcaaagagcagacacacatacagcctgaaacagacctggacagacagacacagcctgaaacagacccggacagacagacacagcctgaaacagacccagacaaacagacagacagacacagcctgaaacagacccagacagacagacagacagcctgaaacagacccagacacagcctgaaacagatccggacagacagacagaaacagcctgaaacagacccagacagacagacagacacagcctgaaacagacccggacagacagacagacacagcctgaaacagacccggacagacagacagacacagcctgaaacagacccggacagacagacagacacagcctgaaacagacctagacagacagacacagattgaaacagacccagacaaacagacagacacagcctgaaacagacccagacacagcctgaaacagacccggacagacagacagacacagcctgaaacagacccagacagacagacagacacagcctgaaacagacccagacagacagaccgacgcagcctgaaagagacccagacagagagacaggcagacacagcctaaaacagacctggacagacaggcagacgtagtctgaaacagacctgaacagacagacagacgcacacacacaacagatgcgcagcaactccccgcccagggacccctcccggcctccctcgcacactgggaggaggaagccgccgagactgcagggagcctggccccggagccccgggtgcgccctggtctttggagcagccacggcccacaatcaccccccttttctaagactgcctgatccgaaataaagtattttgacaga

SEQ ID NO: 4394 - DNA, 2460 bp, Homo sapiens
  source 1..2460: mol_type = unassigned DNA
acagagccacagagggctgtgagcttgcccggccccaggtaacgctggcggtgggtgggcctccagcttggagcagagaccccccgaggcatctgcagacagaactggatggacccatgaatacggatttagctgctggaaagatggcttctgctgcctgctccatggaccccatcgacagctttgagctcctggatctcctgtttgaccggcaggacggcatcctgagacacgtggagctgggcgagggctggggtcacgtcaaggaccagcaggtcctgccaaaccccgactctgacgacttcctcagctccatcctgggctctggagactcactgcccagctccccactctggtcccccgaaggcagtgatagtggcatctccgaagacctcccctccgacccccaggacacccctccacgcagcggaccagccacctcccccgccggctgccatcctgcccagcctggcaaggggccctgcctctcctatcatcctggcaactcttgctccaccacaaccccagggccagtgatccaagtacctgaagcctctgtgaccatagacctggaaatgtggagcccaggaggaaggatctgtgctgagaagccggctgatccggtggacctgtccccacgatgcaatctcaccgtgaaagacctcctcctttcgggcagcagtggggacctgcaacagcatcacctgggggcctcctacctcctgcgacctggggctgggcactgtcaggagctggtgctcaccgaggatgagaagaagctgctggctaaagaaggcatcaccctgcccactcagctgcccctcactaagtacgaggagcgagtgctgaaaaaaatccgccggaaaatccggaacaagcagtcggcgcaagaaagcaggaagaagaagaaggccattgtggtgcagtccaccagcaagtcagcccagacaggcacctgtgtcgcagtcctgttgctgtcctttgccctcatcatcctcccctccatcagcccttttggccccaacaaaaccgagagccctggggactttgcgcctgtacgagtgttctccagaactttgcacaacgatgctgcctcccgcgtggctgctgatgctgtgccaggctccgaggccccaggaccccgacccgaggctgacacaacccgagaagagtctccaggaagccccggggcagactggggcttccaggacaccgcgaacctgaccaattcgacggaggagctggacaacgccaccctggtcctgaggaatgcaacagaggggctgggccaggtcgccctgctggactgggtggcgcctgggccgagcactggctcaggacgtgcagggctggaggcggcgggagacgagctgtgagccccgccaggactatgctcccaggcccctctgcccaggggtgccttggggatgctgcactgggcagctacccacctggggatgggacgtgaggccaagaccccagcagagatgccagaatgggggaggcacagctcatagccacacacccagggcctgactgaggcccacgcaggaaccgacactcagacacaaggcaaagagggccacaggacccgggaaatacacacagagccaggagcagaagcaaagagcagacacacatacagcctgaaacagacctggacagacagacacagcctgaaacagacccggacagacagacacagcctgaaacagacccagacaaacagacagacagacacagcctgaaacagacccagacagacagacagacagcctgaaacagacccagacacagcctgaaacagatccggacagacagacagaaacagcctgaaacagacccagacagacagacagacacagcctgaaacagacccggacagacagacagacacagcctgaaacagacccggacagacagacagacacagcctgaaacagacccggacagacagacagacacagcctgaaacagacctagacagacagacacagattgaaacagacccagacaaacagacagacacagcctgaaacagacccagacacagcctgaaacagacccggacagacagacagacacagcctgaaacagacccagacagacagacagacacagcctgaaacagacccagacagacagaccgacgcagcctgaaagagacccagacagagagacaggcagacacagcctaaaacagacctggacagacaggcagacgtagtctgaaacagacctgaacagacagacagacgcacacacacaacagatgcgcagcaactccccgcccagggacccctcccggcctccctcgcacactgggaggaggaagccgccgagactgcagggagcctggccccggagccccgggtgcgccctggtctttggagcagccacggcccacaatcaccccccttttctaagactgcctgatccgaaataaagtattttgacaga

SEQ ID NO: 4395 - DNA, 1750 bp, Homo sapiens
  source 1..1750: mol_type = unassigned DNA
ccatgatctccctcttgcaaaagcgagggctacagaacaggcattcaggagtcctgtgctccagtcacagccttttctgttcttcagctaggagacaccaaaccctcaggaagatttactatagctaagagaaaactgcagcagaaagggcgcggctacctacttcttaaattccgtttgtggaccctcagactcttagtcccctactcccagatacagcggccctaccgtggctcctggcaaggtggcatccacttttgtagtaagcatggatctcggaatccctgacctgctggacgcgtggctggagcccccagaggatatcttctcgacaggatccgtcctggagctgggactccactgcccccctccagaggttccggtaactaggctacaggaacagggactgcaaggctggaagtccggtggggaccgtggctgtggccttcaagagagtgagcctgaagatttcttgaagcttttcattgatcccaatgaggtgtactgctcagaagcatctcctggcagtgacagtggcatctctgaggacccctgccatccagacagtccccctgcccccagggcaaccagttctcctatgctctatgaggttgtctatgaggcaggggccctggagaggatgcagggggaaactgggccaaatgtaggccttatctccatccagctagatcagtggagcccagcatttatggtgcctgattcctgcatggtcagtgagctgccctttgatgctcatgcccacatcctgcccagagcaggcaccgtagccccagtgccctgtacaaccctgctgccctgtcaaaccctgttcctgaccgatgaggagaagcgtctgctggggcaggaaggggtttccctgccctctcacctgcccctcaccaaggcagaggagagggtcctcaagaaggtcaggaggaaaatccgtaacaagcagtcagctcaggacagtcggcggcggaagaaggagtacattgatgggctggagagcagggtggcagcctgttctgcacagaaccaagaattacagaaaaaagtccaggagctggagaggcacaacatctccttggtagctcagctccgccagctgcagacgctaattgctcaaacttccaacaaagctgcccagaccagcacttgtgttttgattcttcttttttccctggctctcatcatcctgcccagcttcagtccattccagagtcgaccagaagctgggtctgaggattaccagcctcacggagtgacttccagaaatatcctgacccacaaggacgtaacagaaaatctggagacccaagtggtagagtccagactgagggagccacctggagccaaggatgcaaatggctcaacaaggacactgcttgagaagatgggagggaagccaagacccagtgggcgcatccggtccgtgctgcatgcagatgagatgtgagctggaacagaccttcctggcccacttcctgatcacaaggaatcctgggcttccttatggctttgcttcccactgggattcctacttaggtgtctgccctcaggggtccaaatcacttcaggacaccccaagagatgtcctttagtctctgcctgaggcctagtctgcatttgtttgcatatatgagagggtacctcaaatacttctgttatgtatctgtgattttatttcttctttgggtatagggttgaggggaaataagttttgagtgagaaataaacgttttagctgaaa

SEQ ID NO: 4396 - DNA, 1496 bp, Homo sapiens
  source 1..1496: mol_type = unassigned DNA
aaaaggtgtagtgtttggggaggtcaacgggctatgctggcttgacagggctgggctcttcagaacagaagcatggatctcggaatccctgacctgctggacgcgtggctggagcccccagaggatatcttctcgacaggatccgtcctggagctgggactccactgcccccctccagaggttccgggccttcaagagagtgagcctgaagatttcttgaagcttttcattgatcccaatgaggtgtactgctcagaagcatctcctggcagtgacagtggcatctctgaggacccctgccatccagacagtccccctgcccccagggcaaccagttctcctatgctctatgaggttgtctatgaggcaggggccctggagaggatgcagggggaaactgggccaaatgtaggccttatctccatccagctagatcagtggagcccagcatttatggtgcctgattcctgcatggtcagtgagctgccctttgatgctcatgcccacatcctgcccagagcaggcaccgtagccccagtgccctgtacaaccctgctgccctgtcaaaccctgttcctgaccgatgaggagaagcgtctgctggggcaggaaggggtttccctgccctctcacctgcccctcaccaaggcagaggagagggtcctcaagaaggtcaggaggaaaatccgtaacaagcagtcagctcaggacagtcggcggcggaagaaggagtacattgatgggctggagagcagggtggcagcctgttctgcacagaaccaagaattacagaaaaaagtccaggagctggagaggcacaacatctccttggtagctcagctccgccagctgcagacgctaattgctcaaacttccaacaaagctgcccagaccagcacttgtgttttgattcttcttttttccctggctctcatcatcctgcccagcttcagtccattccagagtcgaccagaagctgggtctgaggattaccagcctcacggagtgacttccagaaatatcctgacccacaaggacgtaacagaaaatctggagacccaagtggtagagtccagactgagggagccacctggagccaaggatgcaaatggctcaacaaggacactgcttgagaagatgggagggaagccaagacccagtgggcgcatccggtccgtgctgcatgcagatgagatgtgagctggaacagaccttcctggcccacttcctgatcacaaggaatcctgggcttccttatggctttgcttcccactgggattcctacttaggtgtctgccctcaggggtccaaatcacttcaggacaccccaagagatgtcctttagtctctgcctgaggcctagtctgcatttgtttgcatatatgagagggtacctcaaatacttctgttatgtatctgtgattttatttcttctttgggtatagggttgaggggaaataagttttgagtgagaaataaacgttttagctgaaatt

SEQ ID NO: 4397 - DNA, 950 bp, Homo sapiens
  source 1..950: mol_type = unassigned DNA
agaaagaaaaggtgtagtgtttggggaggtcaacgggctatgctggcttgacagggctgggctcttcagaacagaagcatggatctcggaatccctgacctgctggacgcgtggctggagcccccagaggatatcttctcgacaggatccgtcctggagctgggactccactgcccccctccagaggttccggtaactaggctacaggaacagggactgcaaggctggaagtccggtggggaccgtggctgtggccttcaagagagtgagcctgaagatttcttgaagcttttcattgatcccaatgaggtgtactgctcagaagcatctcctggcagtgacagtggcatctctgaggacccctgccatccagacagtccccctgcccccagggcaaccagttctcctatgctctatgaggttgtctatgaggcaggggccctggagaggatgcagggggaaactgggccaaatgtaggccttatctccatccagctagatcagtggagcccagcatttatggtgcctgattcctgcatggtcagtgagctgccctttgatgctcatgcccacatcctgcccagagcaggcaccgtagccccagtgccctgtacaaccctgctgccctgtcaaaccctgttcctgaccgatgaggagaagcgtctgctggggcaggaaggggtttccctgccctctcacctgcccctcaccaaggtaacatgcttcccctaagggtatcccaacccaggggcctcaccatgacctctgaggggccaatatcccaggagaagcattggggagttgggggcaggtgaaggacccaggactcacacatcctgggcctccaaggcagaggagagggtcctcaagaaggtcaggaggaaaatccgtaacaagcagtcagctcaggacagtcggcggcggaagaaggagtacattgatgggctgga

SEQ ID NO: 4398 - DNA, 1557 bp, Homo sapiens
  source 1..1557: mol_type = unassigned DNA
agaaagaaaaggtgtagtgtttggggaggtcaacgggctatgctggcttgacagggctgggctcttcagaacagaagcatggatctcggaatccctgacctgctggacgcgtggctggagcccccagaggatatcttctcgacaggatccgtcctggagctgggactccactgcccccctccagaggttccggtaactaggctacaggaacagggactgcaaggctggaagtccggtggggaccgtggctgtggccttcaagagagtgagcctgaagatttcttgaagcttttcattgatcccaatgaggtgtactgctcagaagcatctcctggcagtgacagtggcatctctgaggacccctgccatccagacagtccccctgcccccagggcaaccagttctcctatgctctatgaggttgtctatgaggcaggggccctggagaggatgcagggggaaactgggccaaatgtaggccttatctccatccagctagatcagtggagcccagcatttatggtgcctgattcctgcatggtcagtgagctgccctttgatgctcatgcccacatcctgcccagagcaggcaccgtagccccagtgccctgtacaaccctgctgccctgtcaaaccctgttcctgaccgatgaggagaagcgtctgctggggcaggaaggggtttccctgccctctcacctgcccctcaccaaggcagaggagagggtcctcaagaaggtcaggaggaaaatccgtaacaagcagtcagctcaggacagtcggcggcggaagaaggagtacattgatgggctggagagcagggtggcagcctgttctgcacagaaccaagaattacagaaaaaagtccaggagctggagaggcacaacatctccttggtagctcagctccgccagctgcagacgctaattgctcaaacttccaacaaagctgcccagaccagcacttgtgttttgattcttcttttttccctggctctcatcatcctgcccagcttcagtccattccagagtcgaccagaagctgggtctgaggattaccagcctcacggagtgacttccagaaatatcctgacccacaaggacgtaacagaaaatctggagacccaagtggtagagtccagactgagggagccacctggagccaaggatgcaaatggctcaacaaggacactgcttgagaagatgggagggaagccaagacccagtgggcgcatccggtccgtgctgcatgcagatgagatgtgagctggaacagaccttcctggcccacttcctgatcacaaggaatcctgggcttccttatggctttgcttcccactgggattcctacttaggtgtctgccctcaggggtccaaatcacttcaggacaccccaagagatgtcctttagtctctgcctgaggcctagtctgcatttgtttgcatatatgagagggtacctcaaatacttctgttatgtatctgtgattttatttcttctttgggtatagggttgaggggaaataagttttgagtgagaaataaacgttttagctg

SEQ ID NO: 4399 - DNA, 1752 bp, Homo sapiens
  source 1..1752: mol_type = unassigned DNA
cctttgtttacaaccctgccatgatctccctcttgcaaaagcgagggctacagaacaggcattcaggagtcctgtgctccagtcacagccttttctgttcttcagctaggagacaccaaaccctcaggaagatttactatagctaagagaaaactgcagcagaaagggcgcggctacctacttcttaaattccgtttgtggaccctcagactcttagtcccctactcccagatacagcggccctaccgtggctcctggcaagaagcatggatctcggaatccctgacctgctggacgcgtggctggagcccccagaggatatcttctcgacaggatccgtcctggagctgggactccactgcccccctccagaggttccggtaactaggctacaggaacagggactgcaaggctggaagtccggtggggaccgtggctgtggccttcaagagagtgagcctgaagatttcttgaagcttttcattgatcccaatgaggtgtactgctcagaagcatctcctggcagtgacagtggcatctctgaggacccctgccatccagacagtccccctgcccccagggcaaccagttctcctatgctctatgaggttgtctatgaggcaggggccctggagaggatgcagggggaaactgggccaaatgtaggccttatctccatccagctagatcagtggagcccagcatttatggtgcctgattcctgcatggtcagtgagctgccctttgatgctcatgcccacatcctgcccagagcaggcaccgtagccccagtgccctgtacaaccctgctgccctgtcaaaccctgttcctgaccgatgaggagaagcgtctgctggggcaggaaggggtttccctgccctctcacctgcccctcaccaaggcagaggagagggtcctcaagaaggtcaggaggaaaatccgtaacaagcagtcagctcaggacagtcggcggcggaagaaggagtacattgatgggctggagagcagggtggcagcctgttctgcacagaaccaagaattacagaaaaaagtccaggagctggagaggcacaacatctccttggtagctcagctccgccagctgcagacgctaattgctcaaacttccaacaaagctgcccagaccagcacttgtgttttgattcttcttttttccctggctctcatcatcctgcccagcttcagtccattccagagtcgaccagaagctgggtctgaggattaccagcctcacggagtgacttccagaaatatcctgacccacaaggacgtaacagaaaatctggagacccaagtggtagagtccagactgagggagccacctggagccaaggatgcaaatggctcaacaaggacactgcttgagaagatgggagggaagccaagacccagtgggcgcatccggtccgtgctgcatgcagatgagatgtgagctggaacagaccttcctggcccacttcctgatcacaaggaatcctgggcttccttatggctttgcttcccactgggattcctacttaggtgtctgccctcaggggtccaaatcacttcaggacaccccaagagatgtcctttagtctctgcctgaggcctagtctgcatttgtttgcatatatgagagggtacctcaaatacttctgttatgtatctgtgattttatttcttctttgggtatagggttgaggggaaataagttttgagtgagaaataaacgttttagctgaaattgt

SEQ ID NO: 4400 - DNA, 1531 bp, Homo sapiens
  source 1..1531: mol_type = unassigned DNA
ctagtaaattcgcaggtctcttgactctttccgcctttgtttacaaccctgccatgatctccctcttgcaaaagcgagggctacagaacaggcattcaggagtcctgtgctccagtcacagccttttctgttcttcagctaggagacaccaaaccctcaggaagatttactatagctaagagaaaactgcagcagaaagggcgcggctacctacttcttaaattccgtttgtggaccctcagactcttagtcccctactcccagatacagcggccctaccgtggctcctggcaagaagcatggatctcggaatccctgacctgctggacgcgtggctggagcccccagaggatatcttctcgacaggatccgtcctggagctgggactccactgcccccctccagaggttccggtaactaggctacaggaacagggactgcaaggctggaagtccggtggggaccgtggctgtatcagtggagcccagcatttatggtgcctgattcctgcatggtcagtgagctgccctttgatgctcatgcccacatcctgcccagagcaggcaccgtagccccagtgccctgtacaaccctgctgccctgtcaaaccctgttcctgaccgatgaggagaagcgtctgctggggcaggaaggggtttccctgccctctcacctgcccctcaccaaggcagaggagagggtcctcaagaaggtcaggaggaaaatccgtaacaagcagtcagctcaggacagtcggcggcggaagaaggagtacattgatgggctggagagcagggtggcagcctgttctgcacagaaccaagaattacagaaaaaagtccaggagctggagaggcacaacatctccttggtagctcagctccgccagctgcagacgctaattgctcaaacttccaacaaagctgcccagaccagcacttgtgttttgattcttcttttttccctggctctcatcatcctgcccagcttcagtccattccagagtcgaccagaagctgggtctgaggattaccagcctcacggagtgacttccagaaatatcctgacccacaaggacgtaacagaaaatctggagacccaagtggtagagtccagactgagggagccacctggagccaaggatgcaaatggctcaacaaggacactgcttgagaagatgggagggaagccaagacccagtgggcgcatccggtccgtgctgcatgcagatgagatgtgagctggaacagaccttcctggcccacttcctgatcacaaggaatcctgggcttccttatggctttgcttcccactgggattcctacttaggtgtctgccctcaggggtccaaatcacttcaggacaccccaagagatgtcctttagtctctgcctgaggcctagtctgcatttgtttgcatatatgagagggtacctcaaatacttctgttatgtatctgtgattttatttcttctttgggtatagggttgaggggaaataagttttgagtgagaaataaacgttttagctg

SEQ ID NO: 4401 - DNA, 602 bp, Homo sapiens
  source 1..602: mol_type = unassigned DNA
ggtaatgcttggggggggcctctttgtctaaacctgagggatagggctgaagaagcatggatctcggaatccctgacctgctggacgcgtggctggagcccccagaggatatcttctcgacaggatccgtcctggagctgggactccactgcccccctccagaggttccggtaactaggctacaggaacagggactgcaaggctggaagtccggtggggaccgtggctgtggccttcaagagagtgagcctgaagatttcttgaagcttttcattgatcccaatgaggtgtactgctcagaagcatctcctggcagtgacagtggcatctctgaggacccctgccatccagacagtccccctgcccccagggcaaccagttctcctatgctctatgaggttgtctatgaggcaggggccctggagaggatgcagggggaaactgggccaaatgtaggccttatctccatccagctagatcagtggagcccagcatttatggtgcctgattcctgcatggtcagtgagctgccctttgatgctcatgcccacatcctgcccagagcaggcaccgtagccccagtgccctgtacaaccctggtg

SEQ ID NO: 4402 - DNA, 982 bp, Homo sapiens
  source 1..982: mol_type = unassigned DNA
gactctttccgcctttgtttacaaccctgccatgatctccctcttgcaaaagcgagggctacagaacaggcattcaggagtcctgtgctccagtcacagccttttctgttcttcagctaggagacaccaaaccctcaggaagatttactatagctaagagaaaactgcagcagaaagggcgcggctacctacttcttaaattccgtttgtggaccctcagactcttagtcccctactcccagatacagcggccctaccgtggctcctggcaaggtggcatccacttttgtagtaagcatggatctcggaatccctgacctgctggacgcgtggctggagcccccagaggatatcttctcgacaggatccgtcctggagctgggactccactgcccccctccagaggttccgggccttcaagagagtgagcctgaagatttcttgaagcttttcattgatcccaatgaggtgtactgctcagaagcatctcctggcagtgacagtggcatctctgaggacccctgccatccagacagtccccctgcccccagggcaaccagttctcctatgctctatgaggttgtctatgaggcaggggccctggagaggatgcagggggaaactgggccaaatgtaggccttatctccatccagctagatcagtggagcccagcatttatggtgcctgattcctgcatggtcagtgagctgccctttgatgctcatgcccacatcctgcccagagcaggcaccgtagccccagtgccctgtacaaccctgctgccctgtcaaaccctgttcctgaccgatgaggagaagcgtctgctggggcaggaaggggtttccctgccctctcacctgcccctcaccaaggcagaggagagggtcctcaagaaggtcaggaggaaaatccgtaacaagcagtcagctcaggacagtcggcggcggaagaaggagtacattgatgggctggagagcaggt

SEQ ID NO: 4403 - DNA, 2658 bp, Homo sapiens
  source 1..2658: mol_type = unassigned DNA
gataaataaagaaaacaggaaaggaggaaagcattgattacaaatatcttaacaatgagcaaatgtgcaaggaaaaaatatattaagacaaatccaagacaaatgaccatggaaacagttgaatcccagcatgatggaagtataacagcttctttgacagagagcaagtctgctcatgtgcagactcagactggccaaaattcaatccctgctttagctcaggtttctgtggctggatcaggcaccagaagaggctccccagctgtaactctagtgcagttaccttcgggccaaactatacatgtccagggagtaattcagacaccacagccatgggttattcagtcatcagaaatacacaccgttcaggtagcagcaattgcagagacagatgaatctgcagaatcagaaggtgtaattgattctcataaacgtagagaaatcctttcacgaagaccctcttataggaaaatactgaatgaactgtcctctgatgtgcctggtgttcccaagattgaagaagagagatcagaggaagaaggaacaccacctagtattgctaccatggcagtaccaactagcatatatcagactagcacggggcaatacattgctatagcccaaggtggaacaatccagatttctaacccaggatctgatggtgttcagggactgcaggcattaacaatgacaaattcaggagctcctccaccaggtgctacaattgtacagtacgcagcacaatcagctgatggcacacagcagttctttgtcccaggcagccaggttgttgttcaagctgccactggtgacatgccaacttaccagatccgagctcctactgctgctttgccacagggagtggtgatggctgcatcgcccggaagtttgcacagtccccagcagctggcagaagaagcaacacgcaaacgagagctgaggctaatgaaaaacagggaagctgcccgggagtgtcgcaggaagaagaaagaatatgtcaaatgtcttgaaaatcgtgtggctgtgcttgaaaaccaaaacaagactctcattgaggaactcaaggccctcaaagatctttattgccataaagtagagtaactgtctttgacttggaccttgtttactctaatcaaggcaggagatgcagcagtcctacttattgccatgtggacttgtgggaaggacacgtgtgacccttaagaatccagtttggattagtgtttgaaattgaattgggaatgttgttccaggatgtggaatgcagccgtgatcacacttaccgagcttactttgatctgtttgtcaatagcatgcaaaaaatgctttgtttgccctttgcttctgctttttttcagggaagctgccaaagaatgtcgacgtcgaaagaaagaatatgtaaaatgtctggagagccgagttgcagtgctggaagtccagaacaagaagcttatagaggaacttgaaaccttgaaagacatttgttctcccaaaacagattactagaaatatttaactatgaactgaaggcagcatgtatagttgcttttgaaggaatacaatatatagctggcaagaatggtggcttcttttctttgtatcattcatcttcttctttaatcacttaacattcctaaaatgcttcactgtacgtagttaagtcgtagctataacttcaaattttttaaaagagacaaactgtaaaaaatgtgtgtattcttaaaatgcaatatttgtaaggcttgttccaatgccacatacttgcagctcccattctatgtgtcatcaatagtgtcctatgcaataaaattatttgcaggtctttaaatcattttaggaaaggatgatcaaaaataatgcatccagcagtacaataaaagtaaaccacaaaaaaatacctcaggaaagaatagaaagaaagtctatctaatgacatgcctatatgagaagaatagcctagatatgaatatatggcatttgcagatttttatattagttgctttgttaaaaaaaaaaagattgtattgctgtccttgaatgccatagtcaaagagagtttttaatagaaccatgttggttgcactttgtagtgtttggtgctcatttaaatatctgaacatttactacagtttttaactctactgtgtaatataaaagatcttgcagaagttcttagtgttggtttaatattacctaatgaaagtgatgacatattttttatatctggaatgagcctgttgggatcgcattgcataccttcggggtacaagtcagtttctacactgggtgctgatccttgcacgcgccctttctaccatctcacggtggggatggccgcagggctgtgcacccagaagaagatggctgttagcgtttcggccttcataatggcctgagactttctttctgtaggtggtctggagctgtccggctggtggccccctattttgccatttagcgaacaaccacaggaattttaaaaacaaaaacatcccaagattttttcatttcaaaatgcttcaaagtccacattagatcagatactccgctgtcggcacattcagctgaggttcattacaatcgagactgcaatgtgatctatgtttcatcttgtttttataataaaaagcttcagggaacaagcccaaagccctcacc

SEQ ID NO: 4404 - DNA, 900 bp, Homo sapiens
  source 1..900: mol_type = unassigned DNA
atgagcaaatgtgcaaggaaaaaatatattaagacaaatccaagacaaatgaccatggaaacagttgaatcccagcatgatggaagtataacagcttctttgacagagagcaagtctgctcatgtgcagactcagactggccaaaattcaatccctgctttagctcaggtagcagcaattgcagagacagatgaatctgcagaatcagaaggtgtaattgattctcataaacgtagagaaatcctttcacgaagaccctcttataggaaaatactgaatgaactgtcctctgatgtgcctggtgttcccaagattgaagaagagagatcagaggaagaaggaacaccacctagtattgctaccatggcagtaccaactagcatatatcagactagcacggggcaatacattgctatagcccaaggtggaacaatccagatttctaacccaggatctgatggtgttcagggactgcaggcattaacaatgacaaattcaggagctcctccaccaggtgctacaattgtacagtacgcagcacaatcagctgatggcacacagcagttctttgtcccaggcagccaggttgttgttcaagctgccactggtgacatgccaacttaccagatccgagctcctactgctgctttgccacagggagtggtgatggctgcatcgcccggaagtttgcacagtccccagcagctggcagaagaagcaacacgcaaacgagagctgaggctaatgaaaaacagggaagctgcccgggagtgtcgcaggaagaagaaagaatatgtcaaatgtcttgaaaatcgtgtggctgtgcttgaaaaccaaaacaagactctcattgaggaactcaaggccctcaaagatctttattgccataaagtagagtaa

SEQ ID NO: 4405 - DNA, 1541 bp, Homo sapiens
  source 1..1541: mol_type = unassigned DNA
ggaacattcttagccaccgaagtatgggcaccaaaagcgataaggagcatgtgttccttaataaatgtcacatcagaaaatgactgttccaggacagtaaccacctcccgatggtagcagcaattgcagagacagatgaatctgcagaatcagaaggtgtaattgattctcataaacgtagagaaatcctttcacgaagaccctcttataggaaaatactgaatgaactgtcctctgatgtgcctggtgttcccaagattgaagaagagagatcagaggaagaaggaacaccacctagtattgctaccatggcagtaccaactagcatatatcagactagcacggggcaatacattgctatagcccaaggtggaacaatccagatttctaacccaggatctgatggtgttcagggactgcaggcattaacaatgacaaattcaggagctcctccaccaggtgctacaattgtacagtacgcagcacaatcagctgatggcacacagcagttctttgtcccaggcagccaggttgttgttcaagctgccactggtgacatgccaacttaccagatccgagctcctactgctgctttgccacagggagtggtgatggctgcatcgcccggaagtttgcacagtccccagcagctggcagaagaagcaacacgcaaacgagagctgaggctaatgaaaaacagggaagctgccaaagaatgtcgacgtcgaaagaaagaatatgtaaaatgtctggagagccgagttgcagtgctggaagtccagaacaagaagcttatagaggaacttgaaaccttgaaagacatttgttctcccaaaacagattactagaaatatttaactatgaactgaaggcagcatgtatagttgcttttgaaggaatacaatatatagctggcaagaatggtggcttcttttctttgtatcattcatcttcttctttaatcacttaacattcctaaaatgcttcactgtacgtagttaagtcgtagctataacttcaaattttttaaaagagacaaactgtaaaaaatgtgtgtattcttaaaatgcaatatttgtaaggcttgttccaatgccacatacttgcagctcccattctatgtgtcatcaatagtgtcctatgcaataaaattatttgcaggtctttaaatcattttaggaaaggatgatcaaaaataatgcatccagcagtacaataaaagtaaaccacaaaaaaatacctcaggaaagaatagaaagaaagtctatctaatgacatgcctatatgagaagaatagcctagatatgaatatatggcatttgcagatttttatattagttgctttgttaaaaaaaaaaagattgtattgctgtccttgaatgccatagtcaaagagagtttttaatagaaccatgttggttgcactttgtagtgtttggtgctcatttaaatatctgaacatttactacagtttttaactctactgtgtaatataaaagatcttgcagaagttcttagtgttggtttaatattacctaatg

SEQ ID NO: 4406 - DNA, 1625 bp, Homo sapiens
  source 1..1625: mol_type = unassigned DNA
cagatttagagttaactagctcaccactgcctctgcctccaagctgccttttagactgaatagcttttcttgttagccctactttaacatttcttttgaagtggttgtctgcttgaagagggaaacacgtcatgaaactgtaatgcatgaacagaactcaggagttgtctggccagcttagtggtaagatcgagcctcctactgaggccgtccctgcatgcgcctgctgccactggtgacatgccaacttaccagatccgagctcctactgctgctttgccacagggagtggtgatggctgcatcgcccggaagtttgcacagtccccagcagctggcagaagaagcaacacgcaaacgagagctgaggctaatgaaaaacagggaagctgcccgggagtgtcgcaggaagaagaaagaatatgtcaaatgtcttgaaaatcgtgtggctgtgcttgaaaaccaaaacaagactctcattgaggaactcaaggccctcaaagatctttattgccataaagtagagtaactgtctttgacttggaccttgtttactctaatcaaggcaggagatgcagcagtcctacttattgccatgtggacttgtgggaaggacacgtgtgacccttaagaatccagtttggattagtgtttgaaattgaattgggaatgttgttccaggatgtggaatgcagccgtgatcacacttaccgagcttactttgatctgtttgtcaatagcatgcaaaaaatgctttgtttgccctttgcttctgctttttttcagggaagctgccaaagaatgtcgacgtcgaaagaaagaatatgtaaaatgtctggagagccgagttgcagtgctggaagtccagaacaagaagcttatagaggaacttgaaaccttgaaagacatttgttctcccaaaacagattactagaaatatttaactatgaactgaaggcagcatgtatagttgcttttgaaggaatacaatatatagctggcaagaatggtggcttcttttctttgtatcattcatcttcttctttaatcacttaacattcctaaaatgcttcactgtacgtagttaagtcgtagctataacttcaaattttttaaaagagacaaactgtaaaaaatgtgtgtattcttaaaatgcaatatttgtaaggcttgttccaatgccacatacttgcagctcccattctatgtgtcatcaatagtgtcctatgcaataaaattatttgcaggtctttaaatcattttaggaaaggatgatcaaaaataatgcatccagcagtacaataaaagtaaaccacaaaaaaatacctcaggaaagaatagaaagaaagtctatctaatgacatgcctatatgagaagaatagcctagatatgaatatatggcatttgcagatttttatattagttgctttgttaaaaaaaaaaagattgtattgctgtccttgaatgccatagtcaaagagagtttttaatagaaccatgttggttgcactttgtagtgtttggtgctcatttaaatatctgaacatttactacagtttttaactctactgtgtaatataaaagatcttgcagaagttcttagtgttggtttaatattacctaat

SEQ ID NO: 4407 - DNA, 2220 bp, Homo sapiens
  source 1..2220: mol_type = unassigned DNA
gacccgcctgcctcctcgcgaacttgggacgagttggaaaatcctccctgagagagccgtgcggctcaggggagcggtttaactcggaaaaggaaaaggaatccagaagataaataaagaaaacaggaaaggaggaaagcattgattacaaatatcttaacaatgagcaaatgtgcaaggaaaaaatatattaagacaaatccaagacaaatgaccatggaaacagttgaatcccagcatgatggaagtataacagcttctttgacagagagcaagtctgctcatgtgcagactcagactggccaaaattcaatccctgctttagctcaggtagcagcaattgcagagacagatgaatctgcagaatcagaaggtgtaattgattctcataaacgtagagaaatcctttcacgaagaccctcttataggaaaatactgaatgaactgtcctctgatgtgcctggtgttcccaagattgaagaagagagatcagaggaagaaggaacaccacctagtattgctaccatggcagtaccaactagcatatatcagactagcacggggcaatacattgctatagcccaaggtggaacaatccagatttctaacccaggatctgatggtgttcagggactgcaggcattaacaatgacaaattcaggagctcctccaccaggtgctacaattgtacagtacgcagcacaatcagctgatggcacacagcagttctttgtcccaggcagccaggttgttgttcaagctgccactggtgacatgccaacttaccagatccgagctcctactgctgctttgccacagggagtggtgatggctgcatcgcccggaagtttgcacagtccccagcagctggcagaagaagcaacacgcaaacgagagctgaggctaatgaaaaacagggaagctgccaaagaatgtcgacgtcgaaagaaagaatatgtaaaatgtctggagagccgagttgcagtgctggaagtccagaacaagaagcttatagaggaacttgaaaccttgaaagacatttgttctcccaaaacagattactagaaatatttaactatgaactgaaggcagcatgtatagttgcttttgaaggaatacaatatatagctggcaagaatggtggcttcttttctttgtatcattcatcttcttctttaatcacttaacattcctaaaatgcttcactgtacgtagttaagtcgtagctataacttcaaattttttaaaagagacaaactgtaaaaaatgtgtgtattcttaaaatgcaatatttgtaaggcttgttccaatgccacatacttgcagctcccattctatgtgtcatcaatagtgtcctatgcaataaaattatttgcaggtctttaaatcattttaggaaaggatgatcaaaaataatgcatccagcagtacaataaaagtaaaccacaaaaaaatacctcaggaaagaatagaaagaaagtctatctaatgacatgcctatatgagaagaatagcctagatatgaatatatggcatttgcagatttttatattagttgctttgttaaaaaaaaaaagattgtattgctgtccttgaatgccatagtcaaagagagtttttaatagaaccatgttggttgcactttgtagtgtttggtgctcatttaaatatctgaacatttactacagtttttaactctactgtgtaatataaaagatcttgcagaagttcttagtgttggtttaatattacctaatgaaagtgatgacatattttttatatctggaatgagcctgttgggatcgcattgcataccttcggggtacaagtcagtttctacactgggtgctgatccttgcacgcgccctttctaccatctcacggtggggatggccgcagggctgtgcacccagaagaagatggctgttagcgtttcggccttcataatggcctgagactttctttctgtaggtggtctggagctgtccggctggtggccccctattttgccatttagcgaacaaccacaggaattttaaaaacaaaaacatcccaagattttttcatttcaaaatgcttcaaagtccacattagatcagatactccgctgtcggcacattcagctgaggttcattacaatcgagactgcaatgtgatctatgtttcatcttgtttttataataaaaagcttcagggaacaagcccaaagccctcaccaca

SEQ ID NO: 4408 - DNA, 1821 bp, Homo sapiens
  source 1..1821: mol_type = unassigned DNA
atgaccatggaaacagttgaatcccagcatgatggaagtataacagcttctttgacagagagcaagtctgctcatgtgcagactcagactggccaaaattcaatccctgctttagctcaggtagcagcaattgcagagacagatgaatctgcagaatcagaaggtgtaattgattctcataaacgtagagaaatcctttcacgaagaccctcttataggaaaatactgaatgaactgtcctctgatgtgcctggtgttcccaagattgaagaagagagatcagaggaagaaggaacaccacctagtattgctaccatggcagtaccaactagcatatatcagactagcacggggcaatacactgccactggtgacatgccaacttaccagatccgagctcctactgctgctttgccacagggagtggtgatggctgcatcgcccggaagtttgcacagtccccagcagctggcagaagaagcaacacgcaaacgagagctgaggctaatgaaaaacagggaagctgccaaagaatgtcgacgtcgaaagaaagaatatgtaaaatgtctggagagccgagttgcagtgctggaagtccagaacaagaagcttatagaggaacttgaaaccttgaaagacatttgttctcccaaaacagattactagaaatatttaactatgaactgaaggcagcatgtatagttgcttttgaaggaatacaatatatagctggcaagaatggtggcttcttttctttgtatcattcatcttcttctttaatcacttaacattcctaaaatgcttcactgtacgtagttaagtcgtagctataacttcaaattttttaaaagagacaaactgtaaaaaatgtgtgtattcttaaaatgcaatatttgtaaggcttgttccaatgccacatacttgcagctcccattctatgtgtcatcaatagtgtcctatgcaataaaattatttgcaggtctttaaatcattttaggaaaggatgatcaaaaataatgcatccagcagtacaataaaagtaaaccacaaaaaaatacctcaggaaagaatagaaagaaagtctatctaatgacatgcctatatgagaagaatagcctagatatgaatatatggcatttgcagatttttatattagttgctttgttaaaaaaaaaaagattgtattgctgtccttgaatgccatagtcaaagagagtttttaatagaaccatgttggttgcactttgtagtgtttggtgctcatttaaatatctgaacatttactacagtttttaactctactgtgtaatataaaagatcttgcagaagttcttagtgttggtttaatattacctaatgaaagtgatgacatattttttatatctggaatgagcctgttgggatcgcattgcataccttcggggtacaagtcagtttctacactgggtgctgatccttgcacgcgccctttctaccatctcacggtggggatggccgcagggctgtgcacccagaagaagatggctgttagcgtttcggccttcataatggcctgagactttctttctgtaggtggtctggagctgtccggctggtggccccctattttgccatttagcgaacaaccacaggaattttaaaaacaaaaacatcccaagattttttcatttcaaaatgcttcaaagtccacattagatcagatactccgctgtcggcacattcagctgaggttcattacaatcgagactgcaatgtgatctatgtttcatcttgtttttataataaaaagcttcagggaacaagcccaaagccctcaccaca

SEQ ID NO: 4409 - DNA, 1589 bp, Homo sapiens
  source 1..1589: mol_type = unassigned DNA
cgaggtccgctacgtaaatccctttgcggcgggataaataaagaaaacaggaaaggaggaaagcattgattacaaatatcttaacaatgagcaaatgtgcaaggaaaaaatatattaagacaaatccaagacaaatgaccatggaaacagttgaatcccagcatgatggaagtataacagcttctttgacagagagcaagtctgctcatgtgcagactcagactggccaaaattcaatccctgctttagctcaggtagcagcaattgcagagacagatgaatctgcagaatcagaaggtgtaattgattctcataaacgtagagaaatcctttcacgaagaccctcttataggaaaatactgaatgaactgtcctctgatgtgcctggtgttcccaagattgaagaagagagatcagaggaagaaggaacaccacctagtattgctaccatggcagtaccaactagcatatatcagactagcacggggcaatacaatgaggaaactgaacttgccccaagtcacatggctgctgccactggtgacatgccaacttaccagatccgagctcctactgctgctttgccacagggagtggtgatggctgcatcgcccggaagtttgcacagtccccagcagctggcagaagaagcaacacgcaaacgagagctgaggctaatgaaaaacagggaagctgcccgggagtgtcgcaggaagaagaaagaatatgtcaaatgtcttgaaaatcgtgtggctgtgcttgaaaaccaaaacaagactctcattgaggaactcaaggccctcaaagatctttattgccataaagtagagtaactgtctttgacttggaccttgtttactctaatcaaggcaggagatgcagcagtcctacttattgccatgtggacttgtgggaaggacacgtgtgacccttaagaatccagtttggattagtgtttgaaattgaattgggaatgttgttccaggatgtggaatgcagccgtgatcacacttaccgagcttactttgatctgtttgtcaatagcatgcaaaaaatgctttgtttgccctttgcttctgctttttttcagggaagctgccaaagaatgtcgacgtcgaaagaaagaatatgtaaaatgtctggagagccgagttgcagtgctggaagtccagaacaagaagcttatagaggaacttgaaaccttgaaagacatttgttctcccaaaacagattactagaaatatttaactatgaactgaaggcagcatgtatagttgcttttgaaggaatacaatatatagctggcaagaatggtggcttcttttctttgtatcattcatcttcttctttaatcacttaacattcctaaaatgcttcactgtacgtagttaagtcgtagctataacttcaaattttttaaaagagacaaactgtaaaaaatgtgtgtattcttaaaatgcaatatttgtaaggcttgttccaatgccacatacttgcagctcccattctatgtgtcatcaatagtgtcctatgcaataaaattatttgcaggtctttaaatcattttaggaaaggatgatcaaaaataa

SEQ ID NO: 4410 - DNA, 1895 bp, Homo sapiens
  source 1..1895: mol_type = unassigned DNA
tgtggtagaggaaacaagacagttctgtctgcagaagcccattatggctgtaactggagatgacacagctgccactggtgacatgccaacttaccagatccgagctcctactgctgctttgccacagggagtggtgatggctgcatcgcccggaagtttgcacagtccccagcagctggcagaagaagcaacacgcaaacgagagctgaggctaatgaaaaacagggaagctgcccgggagtgtcgcaggaagaagaaagaatatgtcaaatgtcttgaaaatcgtgtggctgtgcttgaaaaccaaaacaagactctcattgaggaactcaaggccctcaaagatctttattgccataaagtagagtaactgtctttgacttggaccttgtttactctaatcaaggcaggagatgcagcagtcctacttattgccatgtggacttgtgggaaggacacgtgtgacccttaagaatccagtttggattagtgtttgaaattgaattgggaatgttgttccaggatgtggaatgcagccgtgatcacacttaccgagcttactttgatctgtttgtcaatagcatgcaaaaaatgctttgtttgccctttgcttctgctttttttcagggaagctgccaaagaatgtcgacgtcgaaagaaagaatatgtaaaatgtctggagagccgagttgcagtgctggaagtccagaacaagaagcttatagaggaacttgaaaccttgaaagacatttgttctcccaaaacagattactagaaatatttaactatgaactgaaggcagcatgtatagttgcttttgaaggaatacaatatatagctggcaagaatggtggcttcttttctttgtatcattcatcttcttctttaatcacttaacattcctaaaatgcttcactgtacgtagttaagtcgtagctataacttcaaattttttaaaagagacaaactgtaaaaaatgtgtgtattcttaaaatgcaatatttgtaaggcttgttccaatgccacatacttgcagctcccattctatgtgtcatcaatagtgtcctatgcaataaaattatttgcaggtctttaaatcattttaggaaaggatgatcaaaaataatgcatccagcagtacaataaaagtaaaccacaaaaaaatacctcaggaaagaatagaaagaaagtctatctaatgacatgcctatatgagaagaatagcctagatatgaatatatggcatttgcagatttttatattagttgctttgttaaaaaaaaaaagattgtattgctgtccttgaatgccatagtcaaagagagtttttaatagaaccatgttggttgcactttgtagtgtttggtgctcatttaaatatctgaacatttactacagtttttaactctactgtgtaatataaaagatcttgcagaagttcttagtgttggtttaatattacctaatgaaagtgatgacatattttttatatctggaatgagcctgttgggatcgcattgcataccttcggggtacaagtcagtttctacactgggtgctgatccttgcacgcgccctttctaccatctcacggtggggatggccgcagggctgtgcacccagaagaagatggctgttagcgtttcggccttcataatggcctgagactttctttctgtaggtggtctggagctgtccggctggtggccccctattttgccatttagcgaacaaccacaggaattttaaaaacaaaaacatcccaagattttttcatttcaaaatgcttcaaagtccacattagatcagatactccgctgtcggcacattcagctgaggttcattacaatcgagactgcaatgtgatctatgtttcatcttgtttttataataaa

SEQ ID NO: 4411 - DNA, 2170 bp, Homo sapiens
  source 1..2170: mol_type = unassigned DNA
taaaccccatcgtgagggaacctagctacgggtcagagctagtccactaggtgctaatcaaatgctgtgttacaacactgtgaggttttcccagttataagtgtcactattagggttttttttaattgcaaagccaaataaggctgtcaattgcatcatcttaccttatttcttcagattaagtactgtttatagtgggatttttggtggatgtggtggcatcagcataatctatgtttcaggcgtcctatagaagaggattattcttcaggggatgtggaagaaaaggtagcagcaattgcagagacagatgaatctgcagaatcagaaggtgtaattgattctcataaacgtagagaaatcctttcacgaagaccctcttataggaaaatactgaatgaactgtcctctgatgtgcctggtgttcccaagattgaagaagagagatcagaggaagaaggaacaccacctagtattgctaccatggcagtaccaactagcatatatcagactagcacggggcaatacattgctatagcccaaggtggaacaatccagatttctaacccaggatctgatggtgttcagggactgcaggcattaacaatgacaaattcaggagctcctccaccaggtgctacaattgtacagtacgcagcacaatcagctgatggcacacagcagttctttgtcccaggcagccaggttgttgttcaagctgccactggtgacatgccaacttaccagatccgagctcctactgctgctttgccacagggagtggtgatggctgcatcgcccggaagtttgcacagtccccagcagctggcagaagaagcaacacgcaaacgagagctgaggctaatgaaaaacagggaagctgccaaagaatgtcgacgtcgaaagaaagaatatgtaaaatgtctggagagccgagttgcagtgctggaagtccagaacaagaagcttatagaggaacttgaaaccttgaaagacatttgttctcccaaaacagattactagaaatatttaactatgaactgaaggcagcatgtatagttgcttttgaaggaatacaatatatagctggcaagaatggtggcttcttttctttgtatcattcatcttcttctttaatcacttaacattcctaaaatgcttcactgtacgtagttaagtcgtagctataacttcaaattttttaaaagagacaaactgtaaaaaatgtgtgtattcttaaaatgcaatatttgtaaggcttgttccaatgccacatacttgcagctcccattctatgtgtcatcaatagtgtcctatgcaataaaattatttgcaggtctttaaatcattttaggaaaggatgatcaaaaataatgcatccagcagtacaataaaagtaaaccacaaaaaaatacctcaggaaagaatagaaagaaagtctatctaatgacatgcctatatgagaagaatagcctagatatgaatatatggcatttgcagatttttatattagttgctttgttaaaaaaaaaaagattgtattgctgtccttgaatgccatagtcaaagagagtttttaatagaaccatgttggttgcactttgtagtgtttggtgctcatttaaatatctgaacatttactacagtttttaactctactgtgtaatataaaagatcttgcagaagttcttagtgttggtttaatattacctaatgaaagtgatgacatattttttatatctggaatgagcctgttgggatcgcattgcataccttcggggtacaagtcagtttctacactgggtgctgatccttgcacgcgccctttctaccatctcacggtggggatggccgcagggctgtgcacccagaagaagatggctgttagcgtttcggccttcataatggcctgagactttctttctgtaggtggtctggagctgtccggctggtggccccctattttgccatttagcgaacaaccacaggaattttaaaaacaaaaacatcccaagattttttcatttcaaaatgcttcaaagtccacattagatcagatactccgctgtcggcacattcagctgaggttcattacaatcgagactgcaatgtgatctatgtttcatcttgtttttataataaaaagcttcagggaacaagcccaaagccc

SEQ ID NO: 4412 - DNA, 1425 bp, Homo sapiens
  source 1..1425: mol_type = unassigned DNA
atgaccatggaaacagttgaatcccagcatgatggaagtataacagcttctttgacagagagcaagtctgctcatgtgcagactcagactggccaaaattcaatccctgctttagctcaggtttctgtggctggatcaggcaccagaagaggctccccagctgtaactctagtgcagttaccttcgggccaaactatacatgtccagggagtaattcagacaccacagccatgggttattcagtcatcagaaatacacaccgttcaggtagcagcaattgcagagacagatgaatctgcagaatcagaaggtgtaattgattctcataaacgtagagaaatcctttcacgaagaccctcttataggaaaatactgaatgaactgtcctctgatgtgcctggtgttcccaagattgaagaagagagatcagaggaagaaggaacaccacctagtattgctaccatggcagtaccaactagcatatatcagactagcacggggcaatacattgctatagcccaaggtggaacaatccagatttctaacccaggatctgatggtgttcagggactgcaggcattaacaatgacaaattcaggagctcctccaccaggtgctacaattgtacagtacgcagcacaatcagctgatggcacacagcagttctttgtcccaggcagccaggttgttgttcaagctgccactggtgacatgccaacttaccagatccgagctcctactgctgctttgccacagggagtggtgatggctgcatcgcccggaagtttgcacagtccccagcagctggcagaagaagcaacacgcaaacgagagctgaggctaatgaaaaacagggaagctgcccgggagtgtcgcaggaagaagaaagaatatgtcaaatgtcttgaaaatcgtgtggctgtgcttgaaaaccaaaacaagactctcattgaggaactcaaggccctcaaagatctttattgccataaagtagagtaactgtctttgacttggaccttgtttactctaatcaaggcaggagatgcagcagtcctacttattgccatgtggacttgtgggaaggacacgtgtgacccttaagaatccagtttggattagtgtttgaaattgaattgggaatgttgttccaggatgtggaatgcagccgtgatcacacttaccgagcttactttgatctgtttgtcaatagcatgcaaaaaatgctttgtttgccctttgcttctgctttttttcagggaagctgccaaagaatgtcgacgtcgaaagaaagaatatgtaaaatgtctggagagccgagttgcagtgctggaagtccagaacaagaagcttatagaggaacttgaaaccttgaaagacatttgttctcccaaaacagattactagaaatatttaactatgaactga

SEQ ID NO: 4413 - DNA, 2157 bp, Homo sapiens
  source 1..2157: mol_type = unassigned DNA
atgaccatggaaacagttgaatcccagcatgatggaagtataacagcttctttgacagagagcaagtctgctcatgtgcagactcagactggccaaaattcaatccctgctttagctcaggtttctgtggctggatcaggcaccagaagaggctccccagctgtaactctagtgcagttaccttcgggccaaactatacatgtccagggagtaattcagacaccacagccatgggttattcagtcatcagaaatacacaccgttcaggtagcagcaattgcagagacagatgaatctgcagaatcagaaggtgtaattgattctcataaacgtagagaaatcctttcacgaagaccctcttataggaaaatactgaatgaactgtcctctgatgtgcctggtgttcccaagattgaagaagagagatcagaggaagaaggaacaccacctagtattgctaccatggcagtaccaactagcatatatcagactagcacggggcaatacattgctatagcccaaggtggaacaatccagatttctaacccaggatctgatggtgttcagggactgcaggcattaacaatgacaaattcaggagctcctccaccaggtgctacaattgtacagtacgcagcacaatcagctgatggcacacagcagttctttgtcccaggcagccaggttgttgttcaagctgccactggtgacatgccaacttaccagatccgagctcctactgctgctttgccacagggagtggtgatggctgcatcgcccggaagtttgcacagtccccagcagctggcagaagaagcaacacgcaaacgagagctgaggctaatgaaaaacagggaagctgccaaagaatgtcgacgtcgaaagaaagaatatgtaaaatgtctggagagccgagttgcagtgctggaagtccagaacaagaagcttatagaggaacttgaaaccttgaaagacatttgttctcccaaaacagattactagaaatatttaactatgaactgaaggcagcatgtatagttgcttttgaaggaatacaatatatagctggcaagaatggtggcttcttttctttgtatcattcatcttcttctttaatcacttaacattcctaaaatgcttcactgtacgtagttaagtcgtagctataacttcaaattttttaaaagagacaaactgtaaaaaatgtgtgtattcttaaaatgcaatatttgtaaggcttgttccaatgccacatacttgcagctcccattctatgtgtcatcaatagtgtcctatgcaataaaattatttgcaggtctttaaatcattttaggaaaggatgatcaaaaataatgcatccagcagtacaataaaagtaaaccacaaaaaaatacctcaggaaagaatagaaagaaagtctatctaatgacatgcctatatgagaagaatagcctagatatgaatatatggcatttgcagatttttatattagttgctttgttaaaaaaaaaaagattgtattgctgtccttgaatgccatagtcaaagagagtttttaatagaaccatgttggttgcactttgtagtgtttggtgctcatttaaatatctgaacatttactacagtttttaactctactgtgtaatataaaagatcttgcagaagttcttagtgttggtttaatattacctaatgaaagtgatgacatattttttatatctggaatgagcctgttgggatcgcattgcataccttcggggtacaagtcagtttctacactgggtgctgatccttgcacgcgccctttctaccatctcacggtggggatggccgcagggctgtgcacccagaagaagatggctgttagcgtttcggccttcataatggcctgagactttctttctgtaggtggtctggagctgtccggctggtggccccctattttgccatttagcgaacaaccacaggaattttaaaaacaaaaacatcccaagattttttcatttcaaaatgcttcaaagtccacattagatcagatactccgctgtcggcacattcagctgaggttcattacaatcgagactgcaatgtgatctatgtttcatcttgtttttataataaaaagcttcagggaacaagcccaaagccctcaccaca

SEQ ID NO: 4414 - DNA, 1203 bp, Homo sapiens
  source 1..1203: mol_type = unassigned DNA
gcctcccccgggaggccgtcccggcgtgggggaggggaggacggggcgggaggacgcggttcggtcggctgcagcgctacttttggtccggggtcggcagggaggccgcggctaccgcatcacagctgacgtgaggactacgtggggccgctgccggctccgggttgctgggcggcggcgccgctgctgagcggcggtcgggctcgccgtctccacctcctcgcgtccgtaatcagtgacgaggtccgctacgtaaatccctttgcggcggacaaatgaccatggaaacagttgaatcccagcatgatggaagtataacagcttctttgacagagagcaagtctgctcatgtgcagactcagactggccaaaattcaatccctgctttagctcaggtagcagcaattgcagagacagatgaatctgcagaatcagaaggtgtaattgattctcataaacgtagagaaatcctttcacgaagaccctcttataggaaaatactgaatgaactgtcctctgatgtgcctggtgttcccaagattgaagaagagagatcagaggaagaaggaacaccacctagtattgctaccatggcagtaccaactagcatatatcagactagcacggggcaatacagtatgtatgctgcaattcgatatgatacagtgctagctttaagtcttctctagttatattgaagcaactcaggttttggcattaaattgttccattttaaaatgcatcattaatacctaaactgtatcatagaatgaaagtatatgttaaaaagtgagatctttgtattgacagctgtcatataattttgaaaagtaaaaattttgactgccgaatatagaagaaaattttggggtaaaaaggagaatttttcctatttacatgtttatattaatctctagtaaaacattgtttttgttgtctttatgatgcatgcgaacataaatgtctgtatttcattcttgttggcttttgttacccacaattacatactattcttactaatctgagagttttctaaagtatgttttcaatgtttcactactctctactctgttaatttgtgctacagtttttcctaaaagagaatggaaaaatgatttaattttttaaactgtagcaattggatagataattttatttgaaattttacacactgaaagctctaaataaacagatacattcaca

SEQ ID NO: 4415 - DNA, 1930 bp, Homo sapiens
  source 1..1930: mol_type = unassigned DNA
gacccgcctgcctcctcgcgaacttgggacgagttggaaaatcctccctgagagagccgtgcggctcaggggagcggtttaactcggaaaaggaaaaggaatccagaaacaaatgaccatggaaacagttgaatcccagcatgatggaagtataacagcttctttgacagagagcaagtctgctcatgtgcagactcagactggccaaaattcaatccctgctttagctcaggtagcagcaattgcagagacagatgaatctgcagaatcagaaggtgtaattgattctcataaacgtagagaaatcctttcacgaagaccctcttataggaaaatactgaatgaactgtcctctgatgtgcctggtgttcccaagattgaagaagagagatcagaggaagaaggaacaccacctagtattgctaccatggcagtaccaactagcatatatcagactagcacggggcaatacactgccactggtgacatgccaacttaccagatccgagctcctactgctgctttgccacagggagtggtgatggctgcatcgcccggaagtttgcacagtccccagcagctggcagaagaagcaacacgcaaacgagagctgaggctaatgaaaaacagggaagctgccaaagaatgtcgacgtcgaaagaaagaatatgtaaaatgtctggagagccgagttgcagtgctggaagtccagaacaagaagcttatagaggaacttgaaaccttgaaagacatttgttctcccaaaacagattactagaaatatttaactatgaactgaaggcagcatgtatagttgcttttgaaggaatacaatatatagctggcaagaatggtggcttcttttctttgtatcattcatcttcttctttaatcacttaacattcctaaaatgcttcactgtacgtagttaagtcgtagctataacttcaaattttttaaaagagacaaactgtaaaaaatgtgtgtattcttaaaatgcaatatttgtaaggcttgttccaatgccacatacttgcagctcccattctatgtgtcatcaatagtgtcctatgcaataaaattatttgcaggtctttaaatcattttaggaaaggatgatcaaaaataatgcatccagcagtacaataaaagtaaaccacaaaaaaatacctcaggaaagaatagaaagaaagtctatctaatgacatgcctatatgagaagaatagcctagatatgaatatatggcatttgcagatttttatattagttgctttgttaaaaaaaaaaagattgtattgctgtccttgaatgccatagtcaaagagagtttttaatagaaccatgttggttgcactttgtagtgtttggtgctcatttaaatatctgaacatttactacagtttttaactctactgtgtaatataaaagatcttgcagaagttcttagtgttggtttaatattacctaatgaaagtgatgacatattttttatatctggaatgagcctgttgggatcgcattgcataccttcggggtacaagtcagtttctacactgggtgctgatccttgcacgcgccctttctaccatctcacggtggggatggccgcagggctgtgcacccagaagaagatggctgttagcgtttcggccttcataatggcctgagactttctttctgtaggtggtctggagctgtccggctggtggccccctattttgccatttagcgaacaaccacaggaattttaaaaacaaaaacatcccaagattttttcatttcaaaatgcttcaaagtccacattagatcagatactccgctgtcggcacattcagctgaggttcattacaatcgagactgcaatgtgatctatgtttcatcttgtttttataataaaaagcttcagggaacaagcccaaagccctcacc

SEQ ID NO: 4416 - DNA, 711 bp, Homo sapiens
  source 1..711: mol_type = unassigned DNA
atgagcaaatgtgcaaggaaaaaatatattaagacaaatccaagacaaatgaccatggaaacagttgaatcccagcatgatggaagtataacagcttctttgacagagagcaagtctgctcatgtgcagactcagactggccaaaattcaatccctgctttagctcaggtagcagcaattgcagagacagatgaatctgcagaatcagaaggtgtaattgattctcataaacgtagagaaatcctttcacgaagaccctcttataggaaaatactgaatgaactgtcctctgatgtgcctggtgttcccaagattgaagaagagagatcagaggaagaaggaacaccacctagtattgctaccatggcagtaccaactagcatatatcagactagcacggggcaatacactgccactggtgacatgccaacttaccagatccgagctcctactgctgctttgccacagggagtggtgatggctgcatcgcccggaagtttgcacagtccccagcagctggcagaagaagcaacacgcaaacgagagctgaggctaatgaaaaacagggaagctgcccgggagtgtcgcaggaagaagaaagaatatgtcaaatgtcttgaaaatcgtgtggctgtgcttgaaaaccaaaacaagactctcattgaggaactcaaggccctcaaagatctttattgccataaagtagagtaa

SEQ ID NO: 4417 - DNA, 849 bp, Homo sapiens
  source 1..849: mol_type = unassigned DNA
atgtggtggcatcagcataatctatgtttcaggcgtcctatagaagaggattattcttcaggggatgtggaagaaaaggtagcagcaattgcagagacagatgaatctgcagaatcagaaggtgtaattgattctcataaacgtagagaaatcctttcacgaagaccctcttataggaaaatactgaatgaactgtcctctgatgtgcctggtgttcccaagattgaagaagagagatcagaggaagaaggaacaccacctagtattgctaccatggcagtaccaactagcatatatcagactagcacggggcaatacattgctatagcccaaggtggaacaatccagatttctaacccaggatctgatggtgttcagggactgcaggcattaacaatgacaaattcaggagctcctccaccaggtgctacaattgtacagtacgcagcacaatcagctgatggcacacagcagttctttgtcccaggcagccaggttgttgttcaagatgaggaaactgaacttgccccaagtcacatggctgctgccactggtgacatgccaacttaccagatccgagctcctactgctgctttgccacagggagtggtgatggctgcatcgcccggaagtttgcacagtccccagcagctggcagaagaagcaacacgcaaacgagagctgaggctaatgaaaaacagggaagctgccaaagaatgtcgacgtcgaaagaaagaatatgtaaaatgtctggagagccgagttgcagtgctggaagtccagaacaagaagcttatagaggaacttgaaaccttgaaagacatttgttctcccaaaacagattactag

SEQ ID NO: 4418 - DNA, 2400 bp, Homo sapiens
  source 1..2400: mol_type = unassigned DNA
gacccgcctgcctcctcgcgaacttgggacgagttggaaaatcctccctgagagagccgtgcggctcaggggagcggtttaactcggaaaaggaaaaggaatccagaagataaataaagaaaacaggaaaggaggaaagcattgattacaaatatcttaacaatgagcaaatgtgcaaggaaaaaatatattaagacaaatccaagacaaatgaccatggaaacagttgaatcccagcatgatggaagtataacagcttctttgacagagagcaagtctgctcatgtgcagactcagactggccaaaattcaatccctgctttagctcaggtttctgtggctggatcaggcaccagaagaggctccccagctgtaactctagtgcagttaccttcgggccaaactatacatgtccagggagtaattcagacaccacagccatgggttattcagtcatcagaaatacacaccgttcaggtagcagcaattgcagagacagatgaatctgcagaatcagaaggtgtaattgattctcataaacgtagagaaatcctttcacgaagaccctcttataggaaaatactgaatgaactgtcctctgatgtgcctggtgttcccaagattgaagaagagagatcagaggaagaaggaacaccacctagtattgctaccatggcagtaccaactagcatatatcagactagcacggggcaatacattgctatagcccaaggtggaacaatccagatttctaacccaggatctgatggtgttcagggactgcaggcattaacaatgacaaattcaggagctcctccaccaggtgctacaattgtacagtacgcagcacaatcagctgatggcacacagcagttctttgtcccaggcagccaggttgttgttcaagatgaggaaactgaacttgccccaagtcacatggctgctgccactggtgacatgccaacttaccagatccgagctcctactgctgctttgccacagggagtggtgatggctgcatcgcccggaagtttgcacagtccccagcagctggcagaagaagcaacacgcaaacgagagctgaggctaatgaaaaacagggaagctgccaaagaatgtcgacgtcgaaagaaagaatatgtaaaatgtctggagagccgagttgcagtgctggaagtccagaacaagaagcttatagaggaacttgaaaccttgaaagacatttgttctcccaaaacagattactagaaatatttaactatgaactgaaggcagcatgtatagttgcttttgaaggaatacaatatatagctggcaagaatggtggcttcttttctttgtatcattcatcttcttctttaatcacttaacattcctaaaatgcttcactgtacgtagttaagtcgtagctataacttcaaattttttaaaagagacaaactgtaaaaaatgtgtgtattcttaaaatgcaatatttgtaaggcttgttccaatgccacatacttgcagctcccattctatgtgtcatcaatagtgtcctatgcaataaaattatttgcaggtctttaaatcattttaggaaaggatgatcaaaaataatgcatccagcagtacaataaaagtaaaccacaaaaaaatacctcaggaaagaatagaaagaaagtctatctaatgacatgcctatatgagaagaatagcctagatatgaatatatggcatttgcagatttttatattagttgctttgttaaaaaaaaaaagattgtattgctgtccttgaatgccatagtcaaagagagtttttaatagaaccatgttggttgcactttgtagtgtttggtgctcatttaaatatctgaacatttactacagtttttaactctactgtgtaatataaaagatcttgcagaagttcttagtgttggtttaatattacctaatgaaagtgatgacatattttttatatctggaatgagcctgttgggatcgcattgcataccttcggggtacaagtcagtttctacactgggtgctgatccttgcacgcgccctttctaccatctcacggtggggatggccgcagggctgtgcacccagaagaagatggctgttagcgtttcggccttcataatggcctgagactttctttctgtaggtggtctggagctgtccggctggtggccccctattttgccatttagcgaacaaccacaggaattttaaaaacaaaaacatcccaagattttttcatttcaaaatgcttcaaagtccacattagatcagatactccgctgtcggcacattcagctgaggttcattacaatcgagactgcaatgtgatctatgtttcatcttgtttttataataaaaagcttcagggaacaagcccaaagccctcacc

SEQ ID NO: 4419 - DNA, 635 bp, Homo sapiens
  source 1..635: mol_type = unassigned DNA
cgggacccgcctgcctcctcgcgaacttgggacgagttggaaaatcctccctgagagagccgtgcggctcaggggagcggtttaactcggaaaaggaaaaggaatccagaagataaataaagaaaacaggaaaggaggaaagcattgattacaaatatcttaacaatgagcaaatgtgcaaggaaaaaatatattaagacaaatccaagacaaatgaccatggaaacagttgaatcccagcatgatggaagtataacagcttctttgacagagagcaagtctgctcatgtgcagactcagactggccaaaattcaatccctgctttagctcaggtagcagcaattgcagagacagatgaatctgcagaatcagaaggtgtaattgattctcataaacgtagagaaatcctttcacgaagaccctcttataggaaaatactgaatgaactgtcctctgatgtgcctggtgttcccaagattgaagaagagagatcagaggaagaaggaacaccacctagtattgctaccatggcagtaccaactagcatatatcagactagcacggggcaatacattgctatagcccaaggtggaacaatccagatttctaacccaggatctgatggtgttcaggg

SEQ ID NO: 4420 - DNA, 1038 bp, Homo sapiens
  source 1..1038: mol_type = unassigned DNA
atgaccatggaaacagttgaatcccagcatgatggaagtataacagcttctttgacagagagcaagtctgctcatgtgcagactcagactggccaaaattcaatccctgctttagctcaggtttctgtggctggatcaggcaccagaagaggctccccagctgtaactctagtgcagttaccttcgggccaaactatacatgtccagggagtaattcagacaccacagccatgggttattcagtcatcagaaatacacaccgttcaggtagcagcaattgcagagacagatgaatctgcagaatcagaaggtgtaattgattctcataaacgtagagaaatcctttcacgaagaccctcttataggaaaatactgaatgaactgtcctctgatgtgcctggtgttcccaagattgaagaagagagatcagaggaagaaggaacaccacctagtattgctaccatggcagtaccaactagcatatatcagactagcacggggcaatacattgctatagcccaaggtggaacaatccagatttctaacccaggatctgatggtgttcagggactgcaggcattaacaatgacaaattcaggagctcctccaccaggtgctacaattgtacagtacgcagcacaatcagctgatggcacacagcagttctttgtcccaggcagccaggttgttgttcaagatgaggaaactgaacttgccccaagtcacatggctgctgccactggtgacatgccaacttaccagatccgagctcctactgctgctttgccacagggagtggtgatggctgcatcgcccggaagtttgcacagtccccagcagctggcagaagaagcaacacgcaaacgagagctgaggctaatgaaaaacagggaagctgccaaagaatgtcgacgtcgaaagaaagaatatgtaaaatgtctggagagccgagttgcagtgctggaagtccagaacaagaagcttatagaggaacttgaaaccttgaaagacatttgttctcccaaaacagattactag

SEQ ID NO: 4421 - DNA, 2469 bp, Homo sapiens
  source 1..2469: mol_type = unassigned DNA
gataaataaagaaaacaggaaaggaggaaagcattgattacaaatatcttaacaatgagcaaatgtgcaaggaaaaaatatattaagacaaatccaagacaaatgaccatggaaacagttgaatcccagcatgatggaagtataacagcttctttgacagagagcaagtctgctcatgtgcagactcagactggccaaaattcaatccctgctttagctcaggtttctgtggctggatcaggcaccagaagaggctccccagctgtaactctagtgcagttaccttcgggccaaactatacatgtccagggagtaattcagacaccacagccatgggttattcagtcatcagaaatacacaccgttcaggtagcagcaattgcagagacagatgaatctgcagaatcagaaggtgtaattgattctcataaacgtagagaaatcctttcacgaagaccctcttataggaaaatactgaatgaactgtcctctgatgtgcctggtgttcccaagattgaagaagagagatcagaggaagaaggaacaccacctagtattgctaccatggcagtaccaactagcatatatcagactagcacggggcaatacactgccactggtgacatgccaacttaccagatccgagctcctactgctgctttgccacagggagtggtgatggctgcatcgcccggaagtttgcacagtccccagcagctggcagaagaagcaacacgcaaacgagagctgaggctaatgaaaaacagggaagctgcccgggagtgtcgcaggaagaagaaagaatatgtcaaatgtcttgaaaatcgtgtggctgtgcttgaaaaccaaaacaagactctcattgaggaactcaaggccctcaaagatctttattgccataaagtagagtaactgtctttgacttggaccttgtttactctaatcaaggcaggagatgcagcagtcctacttattgccatgtggacttgtgggaaggacacgtgtgacccttaagaatccagtttggattagtgtttgaaattgaattgggaatgttgttccaggatgtggaatgcagccgtgatcacacttaccgagcttactttgatctgtttgtcaatagcatgcaaaaaatgctttgtttgccctttgcttctgctttttttcagggaagctgccaaagaatgtcgacgtcgaaagaaagaatatgtaaaatgtctggagagccgagttgcagtgctggaagtccagaacaagaagcttatagaggaacttgaaaccttgaaagacatttgttctcccaaaacagattactagaaatatttaactatgaactgaaggcagcatgtatagttgcttttgaaggaatacaatatatagctggcaagaatggtggcttcttttctttgtatcattcatcttcttctttaatcacttaacattcctaaaatgcttcactgtacgtagttaagtcgtagctataacttcaaattttttaaaagagacaaactgtaaaaaatgtgtgtattcttaaaatgcaatatttgtaaggcttgttccaatgccacatacttgcagctcccattctatgtgtcatcaatagtgtcctatgcaataaaattatttgcaggtctttaaatcattttaggaaaggatgatcaaaaataatgcatccagcagtacaataaaagtaaaccacaaaaaaatacctcaggaaagaatagaaagaaagtctatctaatgacatgcctatatgagaagaatagcctagatatgaatatatggcatttgcagatttttatattagttgctttgttaaaaaaaaaaagattgtattgctgtccttgaatgccatagtcaaagagagtttttaatagaaccatgttggttgcactttgtagtgtttggtgctcatttaaatatctgaacatttactacagtttttaactctactgtgtaatataaaagatcttgcagaagttcttagtgttggtttaatattacctaatgaaagtgatgacatattttttatatctggaatgagcctgttgggatcgcattgcataccttcggggtacaagtcagtttctacactgggtgctgatccttgcacgcgccctttctaccatctcacggtggggatggccgcagggctgtgcacccagaagaagatggctgttagcgtttcggccttcataatggcctgagactttctttctgtaggtggtctggagctgtccggctggtggccccctattttgccatttagcgaacaaccacaggaattttaaaaacaaaaacatcccaagattttttcatttcaaaatgcttcaaagtccacattagatcagatactccgctgtcggcacattcagctgaggttcattacaatcgagactgcaatgtgatctatgtttcatcttgtttttataataaaaagcttcagggaacaagcccaaagccctcacc

SEQ ID NO: 4422 - DNA, 1416 bp, Homo sapiens
  source 1..1416: mol_type = unassigned DNA
cggtcgggctcgccgtctccacctcctcgcgtccgtaatcagtgacgaggtccgctacgtaaatccctttgcggcggctgccactggtgacatgccaacttaccagatccgagctcctactgctgctttgccacagggagtggtgatggctgcatcgcccggaagtttgcacagtccccagcagctggcagaagaagcaacacgcaaacgagagctgaggctaatgaaaaacagggaagctgcccgggagtgtcgcaggaagaagaaagaatatgtcaaatgtcttgaaaatcgtgtggctgtgcttgaaaaccaaaacaagactctcattgaggaactcaaggccctcaaagatctttattgccataaagtagagtaactgtctttgacttggaccttgtttactctaatcaaggcaggagatgcagcagtcctacttattgccatgtggacttgtgggaaggacacgtgtgacccttaagaatccagtttggattagtgtttgaaattgaattgggaatgttgttccaggatgtggaatgcagccgtgatcacacttaccgagcttactttgatctgtttgtcaatagcatgcaaaaaatgctttgtttgccctttgcttctgctttttttcagggaagctgccaaagaatgtcgacgtcgaaagaaagaatatgtaaaatgtctggagagccgagttgcagtgctggaagtccagaacaagaagcttatagaggaacttgaaaccttgaaagacatttgttctcccaaaacagattactagaaatatttaactatgaactgaaggcagcatgtatagttgcttttgaaggaatacaatatatagctggcaagaatggtggcttcttttctttgtatcattcatcttcttctttaatcacttaacattcctaaaatgcttcactgtacgtagttaagtcgtagctataacttcaaattttttaaaagagacaaactgtaaaaaatgtgtgtattcttaaaatgcaatatttgtaaggcttgttccaatgccacatacttgcagctcccattctatgtgtcatcaatagtgtcctatgcaataaaattatttgcaggtctttaaatcattttaggaaaggatgatcaaaaataatgcatccagcagtacaataaaagtaaaccacaaaaaaatacctcaggaaagaatagaaagaaagtctatctaatgacatgcctatatgagaagaatagcctagatatgaatatatggcatttgcagatttttatattagttgctttgttaaaaaaaaaaagattgtattgctgtccttgaatgccatagtcaaagagagtttttaatagaaccatgttggttgcactttgtagtgtttggtgctcatttaaatatctgaacatttactacagtttttaact

SEQ ID NO: 4423 - DNA, 810 bp, Homo sapiens
  source 1..810: mol_type = unassigned DNA
atgaccatggaaacagttgaatcccagcatgatggaagtataacagcttctttgacagagagcaagtctgctcatgtgcagactcagactggccaaaattcaatccctgctttagctcaggtttctgtggctggatcaggcaccagaagaggctccccagctgtaactctagtgcagttaccttcgggccaaactatacatgtccagggagtaattcagacaccacagccatgggttattcagtcatcagaaatacacaccgttcaggtagcagcaattgcagagacagatgaatctgcagaatcagaaggtgtaattgattctcataaacgtagagaaatcctttcacgaagaccctcttataggaaaatactgaatgaactgtcctctgatgtgcctggtgttcccaagattgaagaagagagatcagaggaagaaggaacaccacctagtattgctaccatggcagtaccaactagcatatatcagactagcacggggcaatacactgccactggtgacatgccaacttaccagatccgagctcctactgctgctttgccacagggagtggtgatggctgcatcgcccggaagtttgcacagtccccagcagctggcagaagaagcaacacgcaaacgagagctgaggctaatgaaaaacagggaagctgcccgggagtgtcgcaggaagaagaaagaatatgtcaaatgtcttgaaaatcgtgtggctgtgcttgaaaaccaaaacaagactctcattgaggaactcaaggccctcaaagatctttattgccataaagtagagtaa

SEQ ID NO: 4424 - DNA, 585 bp, Homo sapiens
  source 1..585: mol_type = unassigned DNA
atggtagcagcaattgcagagacagatgaatctgcagaatcagaaggtgtaattgattctcataaacgtagagaaatcctttcacgaagaccctcttataggaaaatactgaatgaactgtcctctgatgtgcctggtgttcccaagattgaagaagagagatcagaggaagaaggaacaccacctagtattgctaccatggcagtaccaactagcatatatcagactagcacggggcaatacaatgaggaaactgaacttgccccaagtcacatggctgctgccactggtgacatgccaacttaccagatccgagctcctactgctgctttgccacagggagtggtgatggctgcatcgcccggaagtttgcacagtccccagcagctggcagaagaagcaacacgcaaacgagagctgaggctaatgaaaaacagggaagctgccaaagaatgtcgacgtcgaaagaaagaatatgtaaaatgtctggagagccgagttgcagtgctggaagtccagaacaagaagcttatagaggaacttgaaaccttgaaagacatttgttctcccaaaacagattactag

SEQ ID NO: 4425 - DNA, 1182 bp, Homo sapiens
  source 1..1182: mol_type = unassigned DNA
tggaacactttatgttgaactgtggtagaggaaacaagacagttctgtctgcagaagcccattatggctgtaactggagatgacacagatgaggaaactgaacttgccccaagtcacatggctgctgccactggtgacatgccaacttaccagatccgagctcctactgctgctttgccacagggagtggtgatggctgcatcgcccggaagtttgcacagtccccagcagctggcagaagaagcaacacgcaaacgagagctgaggctaatgaaaaacagggaagctgcccgggagtgtcgcaggaagaagaaagaatatgtcaaatgtcttgaaaatcgtgtggctgtgcttgaaaaccaaaacaagactctcattgaggaactcaaggccctcaaagatctttattgccataaagtagagtaactgtctttgacttggaccttgtttactctaatcaaggcaggagatgcagcagtcctacttattgccatgtggacttgtgggaaggacacgtgtgacccttaagaatccagtttggattagtgtttgaaattgaattgggaatgttgttccaggatgtggaatgcagccgtgatcacacttaccgagcttactttgatctgtttgtcaatagcatgcaaaaaatgctttgtttgccctttgcttctgctttttttcagggaagctgccaaagaatgtcgacgtcgaaagaaagaatatgtaaaatgtctggagagccgagttgcagtgctggaagtccagaacaagaagcttatagaggaacttgaaaccttgaaagacatttgttctcccaaaacagattactagaaatatttaactatgaactgaaggcagcatgtatagttgcttttgaaggaatacaatatatagctggcaagaatggtggcttcttttctttgtatcattcatcttcttctttaatcacttaacattcctaaaatgcttcactgtacgtagttaagtcgtagctataacttcaaattttttaaaagagacaaactgtaaaaaatgtgtgtattcttaaaatgcaatatttgtaaggcttgttccaatgccacatacttgcagctcccattctatgtgtcatcaatagtgtcctatgcaataaaattatttgcaggtctttaaatcattttaggaaaggatgatcaaaaataa

SEQ ID NO: 4426 - DNA, 1030 bp, Homo sapiens
  source 1..1030: mol_type = unassigned DNA
ctaggccccgccccctgacccgcaccttcccgccgcccctccccggttccatttcattgttggattgtggcgcttcactcctgctggcggccggcagggggcggagttcgagcctggatttttttcctcggggcctcccccgggaggccgtcccggcgtgggggaggggaggacggggcgggaggacgcggttcggtcggctgcagcgctacttttggtccggggtcggcagggaggccgcggctaccgcatcacagctgacgtgaggactacgtggggccgctgccggctccgggttgctgggcggcggcgccgctgctgagcggcggtcgggctcgccgtctccacctcctcgcgtccgtaatcagtgacgaggtccgctacgtaaatccctttgcggcggctgccactggtgacatgccaacttaccagatccgagctcctactgctgctttgccacagggagtggtgatggctgcatcgcccggaagtttgcacagtccccagcagctggcagaagaagcaacacgcaaacgagagctgaggctaatgaaaaacagggaagctgccaaagaatgtcgacgtcgaaagaaagaatatgtaaaatgtctggagagccgagttgcagtgctggaagtccagaacaagaagcttatagaggaacttgaaaccttgaaagacatttgttctcccaaaacagattactagaaatatttaactatgaactgaaggcagcatgtatagttgcttttgaaggaatacaatatatagctggcaagaatggtggcttcttttctttgtatcattcatcttcttctttaatcacttaacattcctaaaatgcttcactgtacgtagttaagtcgtagctataacttcaaattttttaaaagagacaaactgtaaaaaatgtgtgtattcttaaaatgcaatatttgtaaggcttgttccaatgccacatacttgcagctcccattctatgtgtcatcaatagtgtcctatgcaataaaattatttgcaggtctttaaa

SEQ ID NO: 4427 - DNA, 626 bp, Homo sapiens
  source 1..626: mol_type = unassigned DNA
gtaaaatgctgctgacagatttagagttaactagctcaccactgcctctgcctccaagctgccttttagactgaatagcttttcttgttagccctactttaacatttcttttgaagtggttgtctgcttgaagagggaaacacgtcatgaaactgtaatgcatgaacagaactcaggagttgtctggccagcttagtgctgccactggtgacatgccaacttaccagatccgagctcctactgctgctttgccacagggagtggtgatggctgcatcgcccggaagtttgcacagtccccagcagctggcagaagaagcaacacgcaaacgagagctgaggctaatgaaaaacagggaagctgcccgggagtgtcgcaggaagaagaaagaatatgtcaaatgtcttgaaaatcgtgtggctgtgcttgaaaaccaaaacaagactctcattgaggaactcaaggccctcaaagatctttattgccataaagtagagtaactgtctttgacttggaccttgtttactctaatcaaggcaggagatgcagcagtcctacttattgccatgtggacttgtgggaaggacacgtgtgacccttaagaatccagtttggattagtgtttg

SEQ ID NO: 4428 - DNA, 939 bp, Homo sapiens
  source 1..939: mol_type = unassigned DNA
atgagcaaatgtgcaaggaaaaaatatattaagacaaatccaagacaaatgaccatggaaacagttgaatcccagcatgatggaagtataacagcttctttgacagagagcaagtctgctcatgtgcagactcagactggccaaaattcaatccctgctttagctcaggtagcagcaattgcagagacagatgaatctgcagaatcagaaggtgtaattgattctcataaacgtagagaaatcctttcacgaagaccctcttataggaaaatactgaatgaactgtcctctgatgtgcctggtgttcccaagattgaagaagagagatcagaggaagaaggaacaccacctagtattgctaccatggcagtaccaactagcatatatcagactagcacggggcaatacattgctatagcccaaggtggaacaatccagatttctaacccaggatctgatggtgttcagggactgcaggcattaacaatgacaaattcaggagctcctccaccaggtgctacaattgtacagtacgcagcacaatcagctgatggcacacagcagttctttgtcccaggcagccaggttgttgttcaagatgaggaaactgaacttgccccaagtcacatggctgctgccactggtgacatgccaacttaccagatccgagctcctactgctgctttgccacagggagtggtgatggctgcatcgcccggaagtttgcacagtccccagcagctggcagaagaagcaacacgcaaacgagagctgaggctaatgaaaaacagggaagctgccaaagaatgtcgacgtcgaaagaaagaatatgtaaaatgtctggagagccgagttgcagtgctggaagtccagaacaagaagcttatagaggaacttgaaaccttgaaagacatttgttctcccaaaacagattactag

SEQ ID NO: 4429 - DNA, 660 bp, Homo sapiens
  source 1..660: mol_type = unassigned DNA
atgtggtggcatcagcataatctatgtttcaggcgtcctatagaagaggattattcttcaggggatgtggaagaaaaggtagcagcaattgcagagacagatgaatctgcagaatcagaaggtgtaattgattctcataaacgtagagaaatcctttcacgaagaccctcttataggaaaatactgaatgaactgtcctctgatgtgcctggtgttcccaagattgaagaagagagatcagaggaagaaggaacaccacctagtattgctaccatggcagtaccaactagcatatatcagactagcacggggcaatacaatgaggaaactgaacttgccccaagtcacatggctgctgccactggtgacatgccaacttaccagatccgagctcctactgctgctttgccacagggagtggtgatggctgcatcgcccggaagtttgcacagtccccagcagctggcagaagaagcaacacgcaaacgagagctgaggctaatgaaaaacagggaagctgccaaagaatgtcgacgtcgaaagaaagaatatgtaaaatgtctggagagccgagttgcagtgctggaagtccagaacaagaagcttatagaggaacttgaaaccttgaaagacatttgttctcccaaaacagattactag

SEQ ID NO: 4430 - DNA, 429 bp, Homo sapiens
  source 1..429: mol_type = unassigned DNA
tggaacactttatgttgaactgtggtagaggaaacaagacagttctgtctgcagaagcccattatggctgtaactggagatgacacagatgaggaaactgaacttgccccaagtcacatggctgctgccactggtgacatgccaacttaccagatccgagctcctactgctgctttgccacagggagtggtgatggctgcatcgcccggaagtttgcacagtccccagcagctggcagaagaagcaacacgcaaacgagagctgaggctaatgaaaaacagggaagctgccaaagaatgtcgacgtcgaaagaaagaatatgtaaaatgtctggagagccgagttgcagtgctggaagtccagaacaagaagcttatagaggaacttgaaaccttgaaagacatttgttctcccaaaacagattactag

SEQ ID NO: 4431 - DNA, 1049 bp, Homo sapiens
  source 1..1049: mol_type = unassigned DNA
actttatgttgaactgtggtagaggaaacaagacagttctgtctgcagaagcccattatggctgtaactggagatgacacagctgccactggtgacatgccaacttaccagatccgagctcctactgctgctttgccacagggagtggtgatggctgcatcgcccggaagtttgcacagtccccagcagctggcagaagaagcaacacgcaaacgagagctgaggctaatgaaaaacagggaagctgccaaagaatgtcgacgtcgaaagaaagaatatgtaaaatgtctggagagccgagttgcagtgctggaagtccagaacaagaagcttatagaggaacttgaaaccttgaaagacatttgttctcccaaaacagattactagaaatatttaactatgaactgaaggcagcatgtatagttgcttttgaaggaatacaatatatagctggcaagaatggtggcttcttttctttgtatcattcatcttcttctttaatcacttaacattcctaaaatgcttcactgtacgtagttaagtcgtagctataacttcaaattttttaaaagagacaaactgtaaaaaatgtgtgtattcttaaaatgcaatatttgtaaggcttgttccaatgccacatacttgcagctcccattctatgtgtcatcaatagtgtcctatgcaataaaattatttgcaggtctttaaatcattttaggaaaggatgatcaaaaataatgcatccagcagtacaataaaagtaaaccacaaaaaaatacctcaggaaagaatagaaagaaagtctatctaatgacatgcctatatgagaagaatagcctagatatgaatatatggcatttgcagatttttatattagttgctttgttaaaaaaaaaaagattgtattgctgtccttgaatgccatagtcaaagagagtttttaatagaaccatgttggttgcactttgtagtgtttggtgctcatttaaatatctgaacatttactacagtttttaactctactgtgtaatataaaagatcttgcagaa

SEQ ID NO: 4432 - DNA, 651 bp, Homo sapiens
  source 1..651: mol_type = unassigned DNA
gagtcatgttgtgatttagtcagttcctttccgctttgtaaaatgctgctgacagatttagagttaactagctcaccactgcctctgcctccaagctgccttttagactgaatagcttttcttgttagccctactttaacatttcttttgaagtggttgtctgcttgaagagggaaacacgtcatgaaactgtaatgcatgaacagaactcaggagttgtctggccagcttagtggtaagatcgagcctcctactgaggccgtccctgcatgcgcctgatgaggaaactgaacttgccccaagtcacatggctgctgccactggtgacatgccaacttaccagatccgagctcctactgctgctttgccacagggagtggtgatggctgcatcgcccggaagtttgcacagtccccagcagctggcagaagaagcaacacgcaaacgagagctgaggctaatgaaaaacagggaagctgcccgggagtgtcgcaggaagaagaaagaatatgtcaaatgtcttgaaaatcgtgtggctgtgcttgaaaaccaaaacaagactctcattgaggaactcaaggccctcaaagatctttattgccataaagtagagtaactgtctttgacttggaccttgtttactctaatcaa

SEQ ID NO: 4433 - DNA, 731 bp, Homo sapiens
  source 1..731: mol_type = unassigned DNA
cgccccacgcccgcttcgtgcgctcagctgccccgggacccgcctgcctcctcgcgaacttgggacgagttggaaaatcctccctgagagagccgtgcggctcaggggagcggtttaactcggaaaaggaaaaggaatccagaaacaaatgaccatggaaacagttgaatcccagcatgatggaagtataacagcttctttgacagagagcaagtctgctcatgtgcagactcagactggccaaaattcaatccctgctttagctcaggtagcagcaattgcagagacagatgaatctgcagaatcagaaggtgtaattgattctcataaacgtagagaaatcctttcacgaagaccctcttataggaaaatactgaatgaactgtcctctgatgtgcctggtgttcccaagattgaagaagagagatcagaggaagaaggaacaccacctagtattgctaccatggcagtaccaactagcatatatcagactagcacggggcaatacagtatgtatgctgcaattcgatatgatacagtgctagctttaagtcttctctagttatattgaagcaactcaggttttggcattaaattgttccattttaaaatgcatcattaatacctaaactgtatcatagaatgaaagtatatgttaaaaagtgagatctttgtattgacagctgtcatataattttgaaaagtaaaaattttgactgccgaatatagaa

SEQ ID NO: 4434 - DNA, 618 bp, Homo sapiens
  source 1..618: mol_type = unassigned DNA
atgaccatggaaacagttgaatcccagcatgatggaagtataacagcttctttgacagagagcaagtctgctcatgtgcagactcagactggccaaaattcaatccctgctttagctcaggtagttgctatagcccaaggtggaacaatccagatttctaacccaggatctgatggtgttcagggactgcaggcattaacaatgacaaattcaggagctcctccaccaggtgctacaattgtacagtacgcagcacaatcagctgatggcacacagcagttctttgtcccaggcagccaggttgttgttcaagctgccactggtgacatgccaacttaccagatccgagctcctactgctgctttgccacagggagtggtgatggctgcatcgcccggaagtttgcacagtccccagcagctggcagaagaagcaacacgcaaacgagagctgaggctaatgaaaaacagggaagctgccaaagaatgtcgacgtcgaaagaaagaatatgtaaaatgtctggagagccgagttgcagtgctggaagtccagaacaagaagcttatagaggaacttgaaaccttgaaagacatttgttctcccaaaacagattactag

SEQ ID NO: 4435 - DNA, 813 bp, Homo sapiens
  source 1..813: mol_type = unassigned DNA
atgaccatggaaacagttgaatcccagcatgatggaagtataacagcttctttgacagagagcaagtctgctcatgtgcagactcagactggccaaaattcaatccctgctttagctcaggtttctgtggctggatcaggcaccagaagaggctccccagctgtaactctagtgcagttaccttcgggccaaactatacatgtccagggagtaattcagacaccacagccatgggttattcagtcatcagaaatacacaccgttcaggtagcagcaattgcagagacagatgaatctgcagaatcagaaggtgtaattgattctcataaacgtagagaaatcctttcacgaagaccctcttataggaaaatactgaatgaactgtcctctgatgtgcctggtgttcccaagattgaagaagagagatcagaggaagaaggaacaccacctagtattgctaccatggcagtaccaactagcatatatcagactagcacggggcaatacactgccactggtgacatgccaacttaccagatccgagctcctactgctgctttgccacagggagtggtgatggctgcatcgcccggaagtttgcacagtccccagcagctggcagaagaagcaacacgcaaacgagagctgaggctaatgaaaaacagggaagctgccaaagaatgtcgacgtcgaaagaaagaatatgtaaaatgtctggagagccgagttgcagtgctggaagtccagaacaagaagcttatagaggaacttgaaaccttgaaagacatttgttctcccaaaacagattactag

SEQ ID NO: 4436 - DNA, 469 bp, Homo sapiens
  source 1..469: mol_type = unassigned DNA
cttttgaagtggttgtctgcttgaagagggaaacacgtcatgaaactgtaatgcatgaacagaactcaggagttgtctggccagcttagtgctgccactggtgacatgccaacttaccagatccgagctcctactgctgctttgccacagggagtggtgatggctgcatcgcccggaagtttgcacagtccccagcagctggcagaagaagcaacacgcaaacgagagctgaggctaatgaaaaacagggaagctgccaaagaatgtcgacgtcgaaagaaagaatatgtaaaatgtctggagagccgagttgcagtgctggaagtccagaacaagaagcttatagaggaacttgaaaccttgaaagacatttgttctcccaaaacagattactagaaatatttaactatgaactgaaggcagcatgtatagttgcttttgaaggaatacaatatatagctggcaagaa

SEQ ID NO: 4437 - DNA, 465 bp, Homo sapiens
  source 1..465: mol_type = unassigned DNA
atgaccatggaaacagttgaatcccagcatgatggaagtataacagcttctttgacagagagcaagtctgctcatgtgcagactcagactggccaaaattcaatccctgctttagctcaggtagatgaggaaactgaacttgccccaagtcacatggctgctgccactggtgacatgccaacttaccagatccgagctcctactgctgctttgccacagggagtggtgatggctgcatcgcccggaagtttgcacagtccccagcagctggcagaagaagcaacacgcaaacgagagctgaggctaatgaaaaacagggaagctgccaaagaatgtcgacgtcgaaagaaagaatatgtaaaatgtctggagagccgagttgcagtgctggaagtccagaacaagaagcttatagaggaacttgaaaccttgaaagacatttgttctcccaaaacagattactag

SEQ ID NO: 4438 - DNA, 5162 bp, Homo sapiens
  source 1..5162: mol_type = unassigned DNA
gccattttcgcgggcggaggcggcccggcgggccctgggagagctgggacgggcggcggccgggtggcctcggccacccgctaattgcatcttttcccggcgtctcgtctgcagagggagcactatgtctgcggaagtccccgaggcagcctccgcggaggagcagaaggaaatggaagataaagtgactagtccagagaaagcagaagaagcaaaattaaaagcaagatatcctcatctgggacaaaagcctggaggttcagatttcttaaggaaacggttgcagaaagggcaaaaatattttgattctggggattacaacatggctaaagcaaaaatgaagaacaagcaacttcctactgcagctccggataagacggaggtcactggtgaccacattcccactccgcaagaccttcctcaacggaagccgtcccttgttgctagcaagctggctggctgattaagaggctgaactgcatgaatctgctaaatctcattatttctccttaatatgttacttatctactttttatttcctttcattcactagtcatttgagactgacagctttgcaggtagcagtagtgtgtgctgctattgtggaatatacgtgtgtagagtttttgattagtttaacagtgcactggtgaagaggacatgttagagcaacataagtaaactacttgaaaatagttgtatatattacctaacttctagtgtagtactggttctaacaagtaacaagcaagttttaaaattttaatgttttggctttcattacttcatcttaattatagctttgtatgttactcttatttaatataatctctattgtattgatttcttctgtatttaccttttggattttgtaaaacagaagtttaagaccacaagttagaagaaaggtcacatatttcaaacacaactagatggggctctgaaagatttgtatctctgtgcttgaacttgaatggccttaaacctgtttcagctttaacagtagaattttacttgggcaatatttgcccattctggtgtaacttatgtgactctagtgcttaacagctgccgttgaagctaatattcagttctgtagagttagaataccttttgttgttgaagatgtgaatgaagtatgcatgtgcattaactgttgaattcacttttgtgccatttttgtaaatacagtagttttgcacaacctctcacaaatgtctgtattaatttcacatacttaaaaagtagataatgtgccaaccagaagcacaagagttcctacacaaaactctgtaaatcattatagcttttgtataataagagtagtttacaatctcgggcttatagaataccaaactgaaatcttagttcaatctgccatagacttaagcttttcatttgttactaatatccatgacattcagtggccttgtgcaaatacgatatgttgcttaggcatatcttttgtcctatgcagaacctttcattttgatttttatgaaagttgcaattcatgtaatttatataaactttttaaatgtagaaactttttacttccacactcagttttggagaccctagaataaaaggcttcaatactctgcattccatgccctctgccacctgcttttttttcccctttgttctttgactcaaatggtattgagctgtttgttgtatatggaagcataggtgtctatatccttactcttttatataacacaataatggcgttttccttctaatttctcagttgttaacttctttctcttttttttttaggatagggccttgctctgtcacctgagctctagtgcagtagtgcaatcacagctcactgcaaccttactcctaggctcaagttaactattcttgatcctttattattactaatattctacaattgtttaaataaaaggaactttataatgaaacggttcggaatactggctcaagaacctatgtcaagatgagctgaattttggtaaattattttaggaattatgacaagctaattgaattaggcttgtgacaattagagtaatttacatgacaggtaaaactcctattaaaaatgtttagatgtttgcttctgtagatgtcactttagtaaaataccaatttagttttacttgtggcttatctagttagaacttagcagactttactgggacaagtttactgctcttgtaggagctcctctcacaagtagttgtaatgctgtagcatgatactcaggatcagtagcttgagatgctactatttttctcttcatctttgacttgcagagagcctcccgtttttggatccaggcatcttttctgaatcctggttccatcagtatacctgctctcctatgaccccaaatcatagtcaatggtgcctcaaacatagcaccttaagttaaaggctgcctagtgctctgaggaaagcttgctgattatcttcctgatctactcaccccaaaaggcagaaaagcaacacagtcactgctgtggtcatttgtaatgtaaagatcagttatatatatatatttgtaatgagagcaagtatatactcattatagaatcaatttaagaagtttaaaataacccagagtagaatttctatatctagtcttggtttttttcatgaatatttgcaagtaattaccattaaattcacacatgaaagattaatctgaaagatcagagaccatgttattcctgaccacgatagaactgctcctgtggtttgggacaagtaataaaacaactgcttgagttttgtttgtaaaatacataattaatatttgacctacctcaaaatgtattgaggatctgtgaaatgctaagtgcccaaaataaaatattgctgattgtctttttattaaaagtaaatttcctcattaagccaacctgccttctgtaagtcacagtgcttaaatctcaggatttttcattaggagagacctgtcgttaaggatttgtaggtataattgcttagcctccattattggtgcttgggatagagaggttttagatttttgttttttttttgttctgcctcaaagctcagtttattgaagacatttgtaagctattggatcatcacttgaatcaagattttgactagtgagcttaattgtccatttcttacaatttcaaagttacagtctcagaaatggttaattttaataactgtcctatcataaattaatgttggaataaattgaagttgttgataaatacttcatgaaaactaaagtctgaaataaattacttgttttatgtccaatagctactacatttgatagaacagttttgaggaacatttcattcttgaacgcagcatctgacatggttctcagcaagttggaatagtaaggattattggcttgtttcgatgagtggaagcggcatgtttgtagcatacaagttattcaataatcttgtgctgatgacctaaaaatatgtcttaactattcatcaaggaaagcctggtgaagcctttacttgttactacttcaacagttggaattagttgctctttttacttgatgaaacaaaactatacctctgaatatttatggatactttttactaaatcaggcttgtgttcttaatccaaattagtaaagttttatggaagctgaaatgtaatacagtagtctccccttatctgtaagagatacattccaagacccctagtggatgcctgaaacctcagatagtactgaaccctttatcaactatgttttttcagtctgacaaccaaggcggctactaagtgactaaggggcaggtagtatacagtgtggataagcaggacaaaggggtgattcacatcccaggcaggacagagcaggagatcatgagatttcatcactcaggatggcttgtgatttattttattttattcttttttttttttgagatggagtctcactcttgcccaggctggagtgcagtggtgcgatcttggctcactgcaacctctgcctcctgggttcaagcagttctcctgcctcagcctcccaagtagctgggattacaggcgtccgccaccatgcccagccaatttttgtacttttagtagagatggggtttcaccatgttggccaggctggtctcgaactcctgacctcaggtgatccactcgcctcggcctcccaaagtgctgggattataggcatgtgccaccatgcccggccggcttatgatttaaaacatgaattgtttatttctggaattttccacataatatttttggaccaaggttgcctcaggtaacaaactacagaaagtgaaattgcagataaaggggattactgctcctctgctctaaaattggtgtttgggtgatcagaagcaggtagccaatgggaagagcacttctgagtgataactaaagcagtttggtggccttttcacattctccaatgttcaaacatattttccactttccattttctctttcacctcattttgcctctctatcccccatccctgcttatttcttaagcccattgatggcactcattaaattgtatttagggctaatgagtcattgttccttaatatcgttttcaatatgccacaatttaggacacatttaaaattttctaaaacaatatcctaatcaatattgactaatttgagccacattcccaactctaactcagcacacactgccagtcttccccaatatctgtctcctctcaattccccaccacaccttataaaattgtaatcaaagatatctcactctgtcattgttaatctaagaataaaaacactgactttaatacggttttactaagtttcaaccttctaattaggtaggcctctaggtattctgcagatcactgctggtcttgatagccattaatatatgtttgtattatgttatttttcaactaaatcgcagttggaaaaaaacatatttaatattatgcccttggatctgttactgcatcactagcacttgtgatgcaatagaacacttcgcctgtactgaaagggccaagagtaaatgccttgttttgtttttttgttttgttttgttttgctttttgttaaaacatgtctatagagttggcagttaatgctgaatttgtcaaataccccttccaaaattatacttgtatttaaaaaataaatggatctacctaatttctattg

SEQ ID NO: 4439 - DNA, 2821 bp, Homo sapiens
  source 1..2821: mol_type = unassigned DNA
tggatgttctgtgctctcaggaaggcgtgttgagtagccggcacggcgaggcccgtgctggccgtttcttcccggagttttcgtttctgtaccccactttgtgtttactgcggcaggaggcgccagctagcccacaggctgttcggcctagggggtcgtaccttcctaacttcaccactctctgggaagacaccgcacccacagtagggtcgctcgggcctcgcgggctgcacctgtctctgcggagttcccccggcgcgggcggacgtcacacaggggcgttccagcactccgggagcccgattgcgagtttgtgagagtccttggtggaggaggttggaaagcgttctccctcccacaaaacccggtgcagagggagggagagccaggtccgtagcgtgggtccaagaaactatggatcctggaagtgagcacacttttgtgtcttaaaaagtttggtgtctcgttttgaggtgaaaaatgaatgagataagtgctttttaaaaagaacgaaataaagaattttgaaagggaaaatgagtatgaatccacactttgtgaagatgcttatggcacactagacaatttgttaaatgataacaacattgaaaattactcaacgaatgcactaattcagccagttgacaccatcagcatatcttccttgagacaatttgaaaccgtttgcaaatttcactgggtagaagcatttgatgatgaaatgacagagaagccagaatttcaaagtcaagtgtataattatgcaaaagacaacaatataaagcaagactcatttaaggaagaaaatccaatggaaactagtgtttctgcaaatacagaccaacttggtaacgagtattttagacagcctcctcctagaagcccgcctctaatccactgcagtggagagatgctgaaatttacagaaaagtcactggctaaaagtattgccaaggaatctgccctcaaccctagccaacctccaagcttcttatgtaagactgcagttccttcaaaagaaatacagaattatggggagattcctgagatgtcagtcagttatgaaaaggaagtcacagcagagggtgtggagaggccagaaattgtctcaacttggtcttcggcaggcatttcctggaggagtgaagcatgtcgggagaactgtgagatgcctgactgggagcaaagtgctgaaagcttacaacctgttcaagaggacatggctttaaatgaagtcttgcagaaattaaaacatactaacagaaagcaggaagtgcgaatccaagaactccagtgtagtaacctgtatttagagaagagggttaaagaactacagatgaagattaccaaacagcaagtgttcattgatgtcatcaataagctaaaggagaatgttgaagaattaattgaagacaaatacaaaataatcctagagaagaatgatactaaaaagacattgcagaatttggaagaggttttagctaacacgcaaaaacatcttcaggaatccaggaatgacaaggaaatgttacagcttcaatttaagaagatcaaggctaattatgtgtgtttacaggaaaggtacatgactgaaatgcaacaaaaaaataaatctgtaagtcagtatttagagatggacaaaaccttaagcaagaaagaagaagaggtagagagactacaacaactcaaaaaagaactggaaaaggccacagcttctgctttggacttgttgaaacgggaaaaagaggcccaagaacaagagttcttgtctttacaggaggaattccagaaacttgaaaaggaaaacctggaagaaagacagaaactgaaatctagacttgagaaattgctcactcaagttagaaatttgcaatttatgtctgaaaatgaaagaacgaagaatataaaacttcagcagcaaatcaacgaagtaaaaaatgagaatgcaaaacttaaacagcaggttgcaaggagtgaagagcaaaattatgtccctaaatttgagacagctcagttaaaggatcaattagaggaagtcttgaagtcagatattaccaaggatacaaaaacgacacattctaatctgctcccggattgctcaccttgtgaagagaggctgaatcctgcagatataaaaagagcttctcagctggcctccaaaatgcacagtcttctggctctgatggtgggacttctcacatgccaggacatcatcaattctgatgctgaacatttcaaagagagtgagaaggttagtgatataatgctgcaaaaactgaagagcctccatcttaaaaagaaaactttagataaagaggtcatagactgtgattcagatgaagccaagagtatcagagatgtacctacccttctgggagccaaactggataagtaccacagtctaaatgaggagcttgatttcttggttacatcatatgaagaaatcattgaatgtgctgaccaaaggcttgcaatatcccactcccagattgcacatttggaagagagaaataaacatttagaggatttaattagaaagcccagagaaaaagccagaaaaccaagatcaaaaagcttagaaaatcatccgaagtccatgaccatgatgccagctctttttaaagaaaatagaaatgatttagattaaacaagcctgaagattaaacagtaatcatttttgtcaaccactccaggaagagtcattactacatatgctagccaaatcaatccatgcagatgatatattaaaatctgtataaagggtaaagtcttacattccaaagatgtgattacttttcttctaatttcttcctgtgaataa

SEQ ID NO: 4440 - DNA, 2771 bp, Homo sapiens
  source 1..2771: mol_type = unassigned DNA
ttgcgagtttgtgagagtccttggtggaggaggttggaaagcgttctccctcccacaaaacccggtgcagagggagggagagccaggtccgtagcgtgggtccaagaaactatggatcctggaagtgagcacacttttgtgtcttaaaaagtttggtgtctcgttttgaggtgaaaaatgaatgagataagtgctttttaaaaagaagtcttctattgttcaacagttatgaacaaggactatcaaaaattttggtcatcaccttcagatcctgtacattttgaagtggatacttctcatgaaaaagtagaaagcatgtcagaatcggataccatgaatgtcagcaatctttctcaaggtgtaatgctttcacattctccaatctgtatggaaaccaccggcaccacttgtgacttgcctcagaacgaaataaagaattttgaaagggaaaatgagtatgaatccacactttgtgaagatgcttatggcacactagacaatttgttaaatgataacaacattgaaaattactcaacgaatgcactaattcagccagttgacaccatcagcatatcttccttgagacaatttgaaaccgtttgcaaatttcactgggtagaagcatttgatgatgaaatgacagagaagccagaatttcaaagtcaagtgtataattatgcaaaagacaacaatataaagcaagactcatttaaggaagaaaatccaatggaaactagtgtttctgcaaatacagaccaacttggtaacgagtattttagacagcctcctcctagaagcccgcctctaatccactgcagtggagagatgctgaaatttacagaaaagtcactggctaaaagtattgccaaggaatctgccctcaaccctagccaacctccaagcttcttatgtaagactgcagttccttcaaaagaaatacagaattatggggagattcctgagatgtcagtcagttatgaaaaggaagtcacagcagagggtgtggagaggccagaaattgtctcaacttggtcttcggcaggcatttcctggaggagtgaagcatgtcgggagaactgtgagatgcctgactgggagcaaagtgctgaaagcttacaacctgttcaagaggacatggctttaaatgaagtcttgcagaaattaaaacatactaacagaaagcaggaagtgcgaatccaagaactccagtgtagtaacctgtatttagagaagagggttaaagaactacagatgaagattaccaaacagcaagtgttcattgatgtcatcaataagctaaaggagaatgttgaagaattaattgaagacaaatacaaaataatcctagagaagaatgatactaaaaagacattgcagaatttggaagaggttttagctaacacgcaaaaacatcttcaggaatccaggaatgacaaggaaatgttacagcttcaatttaagaagatcaaggctaattatgtgtgtttacaggaaaggtacatgactgaaatgcaacaaaaaaataaatctgtaagtcagtatttagagatggacaaaaccttaagcaagaaagaagaagaggtagagagactacaacaactcaaaaaagaactggaaaaggccacagcttctgctttggacttgttgaaacgggaaaaagaggcccaagaacaagagttcttgtctttacaggaggaattccagaaacttgaaaaggaaaacctggaagaaagacagaaactgaaatctagacttgagaaattgctcactcaagttagaaatttgcaatttatgtctgaaaatgaaagaacgaagaatataaaacttcagcagcaaatcaacgaagtaaaaaatgagaatgcaaaacttaaacagcaggttgcaaggagtgaagagcaaaattatgtccctaaatttgagacagctcagttaaaggatcaattagaggaagtcttgaagtcagatattaccaaggatacaaaaacgacacattctaatctgctcccggattgctcaccttgtgaagagaggctgaatcctgcagatataaaaagagcttctcagctggcctccaaaatgcacagtcttctggctctgatggtgggacttctcacatgccaggacatcatcaattctgatgctgaacatttcaaagagagtgagaaggttagtgatataatgctgcaaaaactgaagagcctccatcttaaaaagaaaactttagataaagagctactgaaacataaagatagaatcacaacctttagagagttaattgctaaggaaaaagcatttcaagatcatgctattaaggtcatagactgtgattcagatgaagccaagagtatcagagatgtacctacccttctgggagccaaactggataagtaccacagtctaaatgaggagcttgatttcttggttacatcatatgaagaaatcattgaatgtgctgaccaaaggcttgcaatatcccactcccagattgcacatttggaagagagaaataaacatttagaggatttaattagaaagcccagagaaaaagccagaaaaccaagatcaaaaagcttagaaaatcatccgaagtccatgaccatgttggcatataacttgtacatatttataggatacaggctgggcgcggtggctgacgcctgtaatcccagcactttgggaggccgaggcgggtggatcacttgagttcaggagttcaagaccagcctgaccaacatggggaaccctcgtctctattaaaaatacagaaaatt

SEQ ID NO: 4441 - DNA, 3069 bp, Homo sapiens
  source 1..3069: mol_type = unassigned DNA
tggatgttctgtgctctcaggaaggcgtgttgagtagccggcacggcgaggcccgtgctggccgtttcttcccggagttttcgtttctgtaccccactttgtgtttactgcggcaggaggcgccagctagcccacaggctgttcggcctagggggtcgtaccttcctaacttcaccactctctgggaagacaccgcacccacagtagggtcgctcgggcctcgcgggctgcacctgtctctgcggagttcccccggcgcgggcggacgtcacacaggggcgttccagcactccgggagcccgattgcgagtttgtgagagtccttggtggaggaggttggaaagcgttctccctcccacaaaacccggtgcagagggagggagagccaggtccgtagcgtgggtccaagaaactatggatcctggaagtgagcacacttttgtgtcttaaaaagtttggtgtctcgttttgaggtgaaaaatgaatgagataagtgctttttaaaaagaagtcttctattgttcaacagttatgaacaaggactatcaaaaattttggtcatcaccttcagatcctgtacattttgaagtggatacttctcatgaaaaagtagaaagcatgtcagaatcggataccatgaatgtcagcaatctttctcaaggtgtaatgctttcacattctccaatctgtatggaaaccaccggcaccacttgtgacttgcctcagaacgaaataaagaattttgaaagggaaaatgagtatgaatccacactttgtgaagatgcttatggcacactagacaatttgttaaatgataacaacattgaaaattactcaacgaatgcactaattcagccagttgacaccatcagcatatcttccttgagacaatttgaaaccgtttgcaaatttcactgggtagaagcatttgatgatgaaatgacagagaagccagaatttcaaagtcaagtgtataattatgcaaaagacaacaatataaagcaagactcatttaaggaagaaaatccaatggaaactagtgtttctgcaaatacagaccaacttggtaacgagtattttagacagcctcctcctagaagcccgcctctaatccactgcagtggagagatgctgaaatttacagaaaagtcactggctaaaagtattgccaaggaatctgccctcaaccctagccaacctccaagcttcttatgtaagactgcagttccttcaaaagaaatacagaattatggggagattcctgagatgtcagtcagttatgaaaaggaagtcacagcagagggtgtggagaggccagaaattgtctcaacttggtcttcggcaggcatttcctggaggagtgaagcatgtcgggagaactgtgagatgcctgactgggagcaaagtgctgaaagcttacaacctgttcaagaggacatggctttaaatgaagtcttgcagaaattaaaacatactaacagaaagcaggaagtgcgaatccaagaactccagtgtagtaacctgtatttagagaagagggttaaagaactacagatgaagattaccaaacagcaagtgttcattgatgtcatcaataagctaaaggagaatgttgaagaattaattgaagacaaatacaaaataatcctagagaagaatgatactaaaaagacattgcagaatttggaagaggttttagctaacacgcaaaaacatcttcaggaatccaggaatgacaaggaaatgttacagcttcaatttaagaagatcaaggctaattatgtgtgtttacaggaaaggtacatgactgaaatgcaacaaaaaaataaatctgtaagtcagtatttagagatggacaaaaccttaagcaagaaagaagaagaggtagagagactacaacaactcaaaaaagaactggaaaaggccacagcttctgctttggacttgttgaaacgggaaaaagaggcccaagaacaagagttcttgtctttacaggaggaattccagaaacttgaaaaggaaaacctggaagaaagacagaaactgaaatctagacttgagaaattgctcactcaagttagaaatttgcaatttatgtctgaaaatgaaagaacgaagaatataaaacttcagcagcaaatcaacgaagtaaaaaatgagaatgcaaaacttaaacagcaggttgcaaggagtgaagagcaaaattatgtccctaaatttgagacagctcagttaaaggatcaattagaggaagtcttgaagtcagatattaccaaggatacaaaaacgacacattctaatctgctcccggattgctcaccttgtgaagagaggctgaatcctgcagatataaaaagagcttctcagctggcctccaaaatgcacagtcttctggctctgatggtgggacttctcacatgccaggacatcatcaattctgatgctgaacatttcaaagagagtgagaaggttagtgatataatgctgcaaaaactgaagagcctccatcttaaaaagaaaactttagataaagaggtcatagactgtgattcagatgaagccaagagtatcagagatgtacctacccttctgggagccaaactggataagtaccacagtctaaatgaggagcttgatttcttggttacatcatatgaagaaatcattgaatgtgctgaccaaaggcttgcaatatcccactcccagattgcacatttggaagagagaaataaacatttagaggatttaattagaaagcccagagaaaaagccagaaaaccaagatcaaaaagcttagaaaatcatccgaagtccatgaccatgatgccagctctttttaaagaaaatagaaatgatttagattaaacaagcctgaagattaaacagtaatcatttttgtcaaccactccaggaagagtcattactacatatgctagccaaatcaatccatgcagatgatatattaaaatctgtataaagggtaaagtcttacattccaaagatgtgattacttttcttctaatttcttcctgtgaataatcaaatatattctatttaacataaacagaa

SEQ ID NO: 4442 - DNA, 2634 bp, Homo sapiens
  source 1..2634: mol_type = unassigned DNA
tggatgttctgtgctctcaggaaggcgtgttgagtagccggcacggcgaggcccgtgctggccgtttcttcccggagttttcgtttctgtaccccactttgtgtttactgcggcaggaggcgccagctagcccacaggctgttcggcctagggggtcgtaccttcctaacttcaccactctctgggaagacaccgcacccacagtagggtcgctcgggcctcgcgggctgcacctgtctctgcggagttcccccggcgcgggcggacgtcacacaggggcgttccagcactccgggagcccgattgcgagtttgtgagagtccttggtggaggaggttggaaagcgttctccctcccacaaaacccggtgcagagggagggagagccaggtccgtagcgtgggtccaagaaactatggatcctggaagtgagcacacttttgtgtcttaaaaagtttggtgtctcgttttgaggtgaaaaatgaatgagataagtgctttttaaaaagaagtcttctattgttcaacagttatgaacaaggactatcaaaaattttggtcatcaccttcagatcctgtacattttgaagtggatacttctcatgaaaaagtagaaagcatgtcagaatcggataccatgaatgtcagcaatctttctcaaggtgtaatgctttcacattctccaatctgtatggaaaccaccggcaccacttgtgacttgcctcagaacgaaataaagaattttgaaagggaaaatgagtatgaatccacactttgtgaagatgcttatggcacactagacaatttgttaaatgataacaacattgaaaattactcaacgaatgcactaattcagccagttgacaccatcagcatatcttccttgagacaatttgaaaccgtttgcaaatttcactgggtagaagcatttgatgatgaaatgacagagaagccagaatttcaaagtcaagtgtataattatgcaaaagacaacaatataaagcaagactcatttaaggaagaaaatccaatggaaactagtgtttctgcaaatacagaccaacttggtaacgagtattttagacagcctcctcctagaagcccgcctctaatccactgcagtggagagatgctgaaatttacagaaaagtcactggctaaaagtattgccaaggaatctgccctcaaccctagccaacctccaagcttcttatgtaagactgcagttccttcaaaagaaatacagaattatggggagattcctgagatgtcagtcagttatgaaaaggaagtcacagcagagggtgtggagaggccagaaattgtctcaacttggtcttcggcaggcatttcctggaggagtgaagcatgtcgggagaactgtgagatgcctgactgggagcaaagtgctgaaagcttacaacctgttcaagaggacatggctttaaatgaagtcttgcagaaattaaaacatactaacagaaagcaggaagtgcgaatccaagaactccagtgtagtaacctgtatttagagaagagggttaaagaactacagatgaagattaccaaacagcaagtgttcattgatgtcatcaataagctaaaggagaatgttgaagaattaattgaagacaaatacaaaataatcctagagaagaatgatactaaaaagacattgcagaatttggaagaggttttagctaacacgcaaaaacatcttcaggaatccaggaatgacaaggaaatgttacagcttcaatttaagaagatcaaggctaattatgtgtgtttacaggaaaggtacatgactgaaatgcaacaaaaaaataaatctgtaagtcagtatttagagatggacaaaaccttaagcaagaaagaagaagaggtagagagactacaacaactcaaaaaagaactggaaaaggccacagcttctgctttggacttgttgaaacgggaaaaagaggcccaagaacaagagttcttgtctttacaggaggaattccagaaacttgaaaaggaaaacctggaagaaagacagaaactgaaatctagacttgagaaattgctcactcaagttagaaatttgcaatttatgtctgaaaatgaaagaacgaagaatataaaacttcagcagcaaatcaacgaagtaaaaaatgagaatgcaaaacttaaacagcaggttgcaaggagtgaagagcaaaattatgtccctaaatttgagacagctcagttaaaggatcaattagaggaagtcttgaagtcagatattaccaaggatacaaaaacgacacattctaatctgctcccggattgctcaccttgtgaagagaggctgaatcctgcagatataaaaagagcttctcagctggcctccaaaatgcacagtcttctggctctgatggtgggacttctcacatgccaggacatcatcaattctgatgctgaacatttcaaagagagtgagaaggttagtgatataatgctgcaaaaactgaagagcctccatcttaaaaagaaaactttagataaagagctactgaaacataaagatagaatcacaacctttagagagttaattgctaaggaaaaagcatttcaagatcatgctattaaggtattccaaggagtatga

SEQ ID NO: 4443 - DNA, 3284 bp, Homo sapiens
  source 1..3284: mol_type = unassigned DNA
cggagctctctggatggcgcgctgtatagggctgtggatgttctgtgctctcaggaaggcgtgttgagtagccggcacggcgaggcccgtgctggccgtttcttcccggagttttcgtttctgtaccccactttgtgtttactgcggcaggaggcgccagctagcccacaggctgttcggcctagggggtcgtaccttcctaacttcaccactctctgggaagacaccgcacccacagtagggtcgctcgggcctcgcgggctgcacctgtctctgcggagttcccccggcgcgggcggacgtcacacaggggcgttccagcactccgggagcccgattgcgagtttgtgagagtccttggtggaggaggttggaaagcgttctccctcccacaaaacccggtgcagagggagggagagccaggtccgtagcgtgggtccaagaaactatggatcctggaagtgagcacacttttgtgtcttaaaaagtttggtgtctcgttttgaggtgaaaaatgaatgagataagtgctttttaaaaagaagtcttctattgttcaacagttatgaacaaggactatcaaaaattttggtcatcaccttcagatcctgtacattttgaagtggatacttctcatgaaaaagtagaaagcatgtcagaatcggataccatgaatgtcagcaatctttctcaaggtgtaatgctttcacattctccaatctgtatggaaaccaccggcaccacttgtgacttgcctcagaacgaaataaagaattttgaaagggaaaatgagtatgaatccacactttgtgaagatgcttatggcacactagacaatttgttaaatgataacaacattgaaaattactcaacgaatgcactaattcagccagttgacaccatcagcatatcttccttgagacaatttgaaaccgtttgcaaatttcactgggtagaagcatttgatgatgaaatgacagagaagccagaatttcaaagtcaagtgtataattatgcaaaagacaacaatataaagcaagactcatttaaggaagaaaatccaatggaaactagtgtttctgcaaatacagaccaacttggtaacgagtattttagacagcctcctcctagaagcccgcctctaatccactgcagtggagagatgctgaaatttacagaaaagtcactggctaaaagtattgccaaggaatctgccctcaaccctagccaacctccaagcttcttatgtaagactgcagttccttcaaaagaaatacagaattatggggagattcctgagatgtcagtcagttatgaaaaggaagtcacagcagagggtgtggagaggccagaaattgtctcaacttggtcttcggcaggcatttcctggaggagtgaagcatgtcgggagaactgtgagatgcctgactgggagcaaagtgctgaaagcttacaacctgttcaagaggacatggctttaaatgaagtcttgcagaaattaaaacatactaacagaaagcaggaagtgcgaatccaagaactccagtgtagtaacctgtatttagagaagagggttaaagaactacagatgaagattaccaaacagcaagtgttcattgatgtcatcaataagctaaaggagaatgttgaagaattaattgaagacaaatacaaaataatcctagagaagaatgatactaaaaagacattgcagaatttggaagaggttttagctaacacgcaaaaacatcttcaggaatccaggaatgacaaggaaatgttacagcttcaatttaagaagatcaaggctaattatgtgtgtttacaggaaaggtacatgactgaaatgcaacaaaaaaataaatctgtaagtcagtatttagagatggacaaaaccttaagcaagaaagaagaagaggtagagagactacaacaactcaaaaaagaactggaaaaggccacagcttctgctttggacttgttgaaacgggaaaaagaggcccaagaacaagagttcttgtctttacaggaggaattccagaaacttgaaaaggaaaacctggaagaaagacagaaactgaaatctagacttgagaaattgctcactcaagttagaaatttgcaatttatgtctgaaaatgaaagaacgaagaatataaaacttcagcagcaaatcaacgaagtaaaaaatgagaatgcaaaacttaaacagcaggttgcaaggagtgaagagcaaaattatgtccctaaatttgagacagctcagttaaaggatcaattagaggaagtcttgaagtcagatattaccaaggatacaaaaacgacacattctaatctgctcccggattgctcaccttgtgaagagaggctgaatcctgcagatataaaaagagcttctcagctggcctccaaaatgcacagtcttctggctctgatggtgggacttctcacatgccaggacatcatcaattctgatgctgaacatttcaaagagagtgagaaggttagtgatataatgctgcaaaaactgaagagcctccatcttaaaaagaaaactttagataaagagctactgaaacataaagatagaatcacaacctttagagagttaattgctaaggaaaaagcatttcaagatcatgctattaaggtcatagactgtgattcagatgaagccaagagtatcagagatgtacctacccttctgggagccaaactggataagtaccacagtctaaatgaggagcttgatttcttgatcacaaaactgggacatctcctagagtcaaaagaaaaccactgcaacagactcattgaagaaaatgacaagtatcaaagacatttaggcaacttaataaagaaggttacatcatatgaagaaatcattgaatgtgctgaccaaaggcttgcaatatcccactcccagattgcacatttggaagagagaaataaacatttagaggatttaattagaaagcccagagaaaaagccagaaaaccaagatcaaaaagcttagaaaatcatccgaagtccatgaccatgatgccagctctttttaaagaaaatagaaatgatttagattaaacaagcctgaagattaaacagtaatcatttttgtcaaccactccaggaagagtcattactacatatgctagccaaatcaatccatgcagatgatatattaaaatctgtataaagggtaaagtcttacattccaaagatgtgattacttttcttctaatttcttcctgtgaataatcaaatatattctatttaacataaa

SEQ ID NO: 4444 - DNA, 4180 bp, Homo sapiens
  source 1..4180: mol_type = unassigned DNA
aatccgggtcggccgcaaacgtgccgcaggcctaggccccgcccagtgccccgcccctcccccaacacacacacacacacacacacacacacacaccccaacacacacacacacaccccaacacacacacacacacacacacacacacacacacacacacacacacacacacacacagcgggatggccgagcgccgcacgcgtagcacgccgggactagctatccagcctcccagcagcctctgcgacgggcgcggtgcgtaagtacctcgccggtggtggccgttctccgtaagatggcggaccggcggcggcagcgcgcttcgcaagacaccgaggacgaggaatctggtgcttcgggctccgacagcggcggctccccgttgcggggaggcgggagctgcagcggtagcgccggaggcggcggcagcggctctctgccttcacagcgcggaggccgaaccggggcccttcatctgcggcgggtggagagcgggggcgccaagagtgctgaggagtcggagtgtgagagtgaagatggcattgaaggtgatgctgttctctcggattatgaaagtgcagaagactcggaaggtgaagaaggtgaatacagtgaagaggaaaactccaaagtggagctgaaatcagaagctaatgatgctgttaattcttcaacaaaagaagagaagggagaagaaaagcctgacaccaaaagcactgtgactggagagaggcaaagtggggacggacaggagagcacagagcctgtggagaacaaagtgggtaaaaagggccctaagcatttggatgatgatgaagatcggaagaatccagcatacatacctcggaaagggctcttctttgagcatgatcttcgagggcaaactcaggaggaggaagtcagacccaaggggcgtcagcgaaagctatggaaggatgagggtcgctgggagcatgacaagttccgggaagatgagcaggccccaaagtcccgacaggagctcattgctctttatggttatgacattcgctcagctcataatcctgatgacatcaaacctcgaagaatccggaaaccccgatatgggagtcctccacaaagagatccaaactggaacggtgagcggctaaacaagtctcatcgccaccagggtcttgggggcaccctaccaccaaggacatttattaacaggaatgctgcaggtaccggccgtatgtctgcacccaggaattattctcgatctgggggcttcaaggaaggtcgtgctggttttaggcctgtggaagctggtgggcagcatggtggccggtctggtgagactgttaagcatgagattagttaccggtcacggcgcctagagcagacttctgtgagggatccatctccagaagcagatgctccagtgcttggcagtcctgagaaggaagaggcagcctcagagccaccagctgctgctcctgatgctgcaccaccaccccctgataggcccattgagaagaaatcctattcccgggcaagaagaactcgaaccaaagttggagatgcagtcaagcttgcagaggaggtgccccctcctcctgaaggactgattccagcacctccagtcccagaaaccaccccaactccacctactaagactgggacctgggaagctccggtggattctagtacaagtggacttgagcaagatgtggcacaactaaatatagcagaacagaattggagtccggggcagccttctttcctgcaaccacgggaacttcgaggtatgcccaaccatatacacatgggagcaggacctccacctcagtttaaccggatggaagaaatgggtgtccagggtggtcgagccaaacgctattcatcccagcggcaaagacctgtgccagagccccccgcccctccagtgcatatcagtatcatggagggacattactatgatccactgcagttccagggaccaatctatacccatggtgacagccctgccccgctgcctccacagggcatgcttgtgcagccaggaatgaaccttccccacccaggtttacatccccaccagacaccagctcctctgcccaatccaggcctctatcccccaccagtgtccatgtctccaggacagccaccacctcagcagttgcttgctcctacttacttttctgctccaggcgtcatgaactttggtaatcccagttacccttatgctccaggggcactgcctcccccaccaccgcctcatctgtatcctaatacacaggccccatcacaggtatatggaggagtgacctactataaccccgcccagcagcaggtgcagccaaagccctccccaccccggaggactccccagccagtcaccatcaagccccctccacctgaggttgtaagcaggggttccagttaatacaagtttctgaatattttaaatcttaacatcatataaaaagcagcagaggtgagaactcagaagagaaatacagctggctatctactaccagaagggcttcaaagatatagggtgtggctcctaccagcaaacagctgaaagaggaggacccctgccttcctctgaggacaggctctagagagagggagaaacaagtggacctcgtcccatcttcactcttcacttgagttggctgtgttcgggggagcagagagagccagacagccccaagcttctgagtctagatacagaagcccatgtcttctgctgttcttcacttctgggaaattgaagtgtcttctgttcccaaggaagctccttcctgtttgttttgttttctaagatgttcatttttaaagcctggcttcttatccttaatattattttaattttttctctttgtttctgtttcttgctctctctccctgcctttaaatgaaacaagtctagtcttctggttttctagcccctctggattcccttttgactcttccgtgcatcccagataatggagaatgtatcagccagccttccccaccaagtctaaaaagacctggcctttcacttttagttggcatttgttatcctcttgtatacttgtattcccttaactctaaccctgtggaagcatggctgtctgcacagagggtcccattgtgcagaaaagctcagagtaggtgggtaggagcccttctctttgacttaggtttttaggagtctgagcatccatcaatacctgtactatgatgggcttctgttctctgctgagggccaataccctactgtggggagagatggcacaccagatgcttttgtgagaaagggatggtggagtgagagcctttgcctttaggggtgtgtattcacatagtcctcagggctcagtcttttgaggtaagtggaattagagggccttgcttctcttctttccattcttcttgctacaccccttttccagttgctgtggaccaatgcatctctttaaaggcaaatattatccagcaagcagtctaccctgtcctttgcaattgctcttctccacgtctttcctgctacaagtgttttagatgttactaccttattttccccgaattctatttttgtccttgcagacagaatataaaaactcctgggcttaaggcctaaggaagccagtcaccttctgggcaagggctcctatctttcctccctatccatggcactaaaccacttctctgctgcctctgtggaagagattcctattactgcagtacatacgtctgccaggggtaacctggccactgtccctgtccttctacagaacctgagggcaaagatggtggctgtgtctctccccggtaatgtcactgtttttattccttccatctagcagctggcctaatcactctgagtcacaggtgtgggatggagagtggggagaggcacttaatctgtaacccccaaggaggaaataactaagagattcttctaggggtagctggtggttgtgccttttgtaggctgttccctttgccttaaacctgaagatgtctcctcaagcctgtgggcagcatgcccagattcccagaccttaagacactgtgagagttgtctctgttggtccactgtgtttagttgcaaggatttttccatgtgtggtggtgttttttgttactgttttaaagggtgcccatttgtgatcagcattgtgacttggagataataaaatttagactataaacttggctccct

SEQ ID NO: 4445 - DNA, 4895 bp, Homo sapiens
  source 1..4895: mol_type = unassigned DNA
cacacacacacacacacacacacacaccccaacacacacacacacaccccaacacacacacacacacacacacacacacacacacacacacacacacacacacacacagcgggatggccgagcgccgcacgcgtagcacgccgggactagctatccagcctcccagcagcctctgcgacgggcgcggtgcgtaagtacctcgccggtggtggccgttctccgtaagatggcggaccggcggcggcagcgcgcttcgcaagacaccgaggacgaggaatctggtgcttcgggctccgacagcggcggctccccgttgcggggaggcgggagctgcagcggtagcgccggaggcggcggcagcggctctctgccttcacagcgcggaggccgaaccggggcccttcatctgcggcgggtggagagcgggggcgccaagagtgctgaggagtcggagtgtgagagtgaagatggcattgaaggtgatgctgttctctcggattatgaaagtgcagaagactcggaaggtgaagaaggtgaatacagtgaagaggaaaactccaaagtggagctgaaatcagaagctaatgatgctgttaattcttcaacaaaagaagagaagggagaagaaaagcctgacaccaaaagcactgtgactggagagaggcaaagtggggacggacaggagagcacagagcctgtggagaacaaagtgggtaaaaagggccctaagcatttggatgatgatgaagatcggaagaatccagcatacatacctcggaaagggctcttctttgagcatgatcttcgagggcaaactcaggaggaggaagtcagacccaaggggcgtcagcgaaagctatggaaggatgagggtcgctgggagcatgacaagttccgggaagatgagcaggccccaaagtcccgacaggagctcattgctctttatggttatgacattcgctcagctcataatcctgatgacatcaaacctcgaagaatccggaaaccccgatatgggagtcctccacaaagagatccaaactggaacggtgagcggctaaacaagtctcatcgccaccagggtcttgggggcaccctaccaccaaggacatttattaacaggaatgctgcaggtaccggccgtatgtctgcacccaggaattattctcgatctgggggcttcaaggaaggtcgtgctggttttaggcctgtggaagctggtgggcagcatggtggccggtctggtgagactgttaagcatgagattagttaccggtcacggcgcctagagcagacttctgtgagggatccatctccagaagcagatgctccagtgcttggcagtcctgagaaggaagaggcagcctcagagccaccagctgctgctcctgatgctgcaccaccaccccctgataggcccattgagaagaaatcctattcccgggcaagaagaactcgaaccaaagttggagatgcagtcaagcttgcagaggaggtgccccctcctcctgaaggactgattccagcacctccagtcccagaaaccaccccaactccacctactaagactgggacctgggaagctccggtggattctagtacaagtggacttgagcaagatgtggcacaactaaatatagcagaacagaattggagtccggggcagccttctttcctgcaaccacgggaacttcgaggtatgcccaaccatatacacatgggagcaggacctccacctcagtttaaccggatggaagaaatgggtgtccagggtggtcgagccaaacgctattcatcccagcggcaaagacctgtgccagagccccccgcccctccagtgcatatcagtatcatggagggacattactatgatccactgcagttccagggaccaatctatacccatggtgacagccctgccccgctgcctccacagggcatgcttgtgcagccaggaatgaaccttccccacccaggtttacatccccaccagacaccagctcctctgcccaatccaggcctctatcccccaccagtgtccatgtctccaggacagccaccacctcagcagttgcttgctcctacttacttttctgctccaggcgtcatgaactttggtaatcccagttacccttatgctccaggggcactgcctcccccaccaccgcctcatctgtatcctaatacacaggccccatcacaggtatatggaggagtgacctactataaccccgcccagcagcaggtgcagccaaagccctccccaccccggaggactccccagccagtcaccatcaagccccctccacctgaggttgtaagcaggggttccagttaatacaagtttctgaatattttaaatcttaacatcatataaaagtaagtgcacaacttactgtgaatattgttaaaactaatgctcacacttgcttaataaacaaaaatcacttaattaatgctttttttttttttttttttttttttttttttgagacggcgtctcagtctgttatccaggctggagtgcagtggtgcaatctcggctcactgcaacctccatctcctgagttcaagcgattctcttgcctcagcctcctaagtagctaggattacaggcacgcaccaccacacctggctaatttttgtatttttagtgggaatggggtttcaccatattggccaggctggtcttgaactcctgacctcaggtgatccacctgccttggcctcccaaagtgttgggattacaggtgtgagccaccccacccagcctctgattaatgctttaagttataataatcatgggatatctcaggaggcttaaaggagtcctgaaatttgccagtttgtttgtttggcaagtgtattgggcagggttgaagtagaaacgattgttaacatgacagttttcaattgggaagctacaaggaaaaaatacaggaaggcagtcaaggaaaagggaaatctaaatttgagatgttatagcagaaaaaaccagttctaaagatcatagaggagaaggactgggggttttgttgcttttgtttaaggacattacttaaaacacattatttagaagtgtggctttttgaaaacagcttgtgaatgcccagaaggcccactaacactttggtggttcttccctttttccaacccctgtcagagcagcagaggtgagaactcagaagagaaatacagctggctatctactaccagaagggcttcaaagatatagggtgtggctcctaccagcaaacagctgaaagaggaggacccctgccttcctctgaggacaggctctagagagagggagaaacaagtggacctcgtcccatcttcactcttcacttgagttggctgtgttcgggggagcagagagagccagacagccccaagcttctgagtctagatacagaagcccatgtcttctgctgttcttcacttctgggaaattgaagtgtcttctgttcccaaggaagctccttcctgtttgttttgttttctaagatgttcatttttaaagcctggcttcttatccttaatattattttaattttttctctttgtttctgtttcttgctctctctccctgcctttaaatgaaacaagtctagtcttctggttttctagcccctctggattcccttttgactcttccgtgcatcccagataatggagaatgtatcagccagccttccccaccaagtctaaaaagacctggcctttcacttttagttggcatttgttatcctcttgtatacttgtattcccttaactctaaccctgtggaagcatggctgtctgcacagagggtcccattgtgcagaaaagctcagagtaggtgggtaggagcccttctctttgacttaggtttttaggagtctgagcatccatcaatacctgtactatgatgggcttctgttctctgctgagggccaataccctactgtggggagagatggcacaccagatgcttttgtgagaaagggatggtggagtgagagcctttgcctttaggggtgtgtattcacatagtcctcagggctcagtcttttgaggtaagtggaattagagggccttgcttctcttctttccattcttcttgctacaccccttttccagttgctgtggaccaatgcatctctttaaaggcaaatattatccagcaagcagtctaccctgtcctttgcaattgctcttctccacgtctttcctgctacaagtgttttagatgttactaccttattttccccgaattctatttttgtccttgcagacagaatataaaaactcctgggcttaaggcctaaggaagccagtcaccttctgggcaagggctcctatctttcctccctatccatggcactaaaccacttctctgctgcctctgtggaagagattcctattactgcagtacatacgtctgccaggggtaacctggccactgtccctgtccttctacagaacctgagggcaaagatggtggctgtgtctctccccggtaatgtcactgtttttattccttccatctagcagctggcctaatcactctgagtcacaggtgtgggatggagagtggggagaggcacttaatctgtaacccccaaggaggaaataactaagagattcttctaggggtagctggtggttgtgccttttgtaggctgttccctttgccttaaacctgaagatgtctcctcaagcctgtgggcagcatgcccagattcccagaccttaagacactgtgagagttgtctctgttggtccactgtgtttagttgcaaggatttttccatgtgtggtggtgttttttgttactgttttaaagggtgcccatttgtgatcagcattgtgacttggagataataaaatttagactataaacttggctccct

SEQ ID NO: 4446 - DNA, 2173 bp, Homo sapiens
  source 1..2173: mol_type = unassigned DNA
aacacacacacacacacacacacacacacacaccccaacacacacacacacaccccaacacacacacacacacacacacacacacacacacacacacacacacacacacacacagcgggatggccgagcgccgcacgcgtagcacgccgggactagctatccagcctcccagcagcctctgcgacgggcgcggtgcgtaagtacctcgccggtggtggccgttctccgtaagatggcggaccggcggcggcagcgcgcttcgcaagacaccgaggacgaggaatctggtgcttcgggctccgacagcggcggctccccgttgcggggaggcgggagctgcagcggtagcgccggaggcggcggcagcggctctctgccttcacagcgcggaggccgaaccggggcccttcatctgcggcgggtggagagcgggggcgccaagagtgctgaggagtcggagtgtgagagtgaagatggcattgaaggtgatgctgttctctcggattatgaaagtgcagaagactcggaaggtgaagaaggtgaatacagtgaagaggaaaactccaaagtggagctgaaatcagaagctaatgatgctgttaattcttcaacaaaagaagagaagggagaagaaaagcctgacaccaaaagcactgtgactggagagaggcaaagtggggacggacaggagagcacagagcctgtggagaacaaagtgggtaaaaagggccctaagcatttggatgatgatgaagatcggaagaatccagcatacatacctcggaaagggctcttctttgagcatgatcttcgagggcaaactcaggaggaggaagtcagacccaaggggcgtcagcgaaagctatggaaggatgagggtcgctgggagcatgacaagttccgggaagatgagcaggccccaaagtcccgacaggagctcattgctctttatggttatgacattcgctcagctcataatcctgatgacatcaaacctcgaagaatccggaaaccccgatatgggagtcctccacaaagagatccaaactggaacggtgagcggctaaacaagtctcatcgccaccagggtcttgggggcaccctaccaccaaggacatttattaacaggaatgctgcaggtaccggccgtatgtctgcacccaggaattattctcgatctgggggcttcaaggaaggtcgtgctggttttaggcctgtggaagctggtgggcagcatggtggccggtctggtgagactgttaagcatgagattagttaccggtcacggcgcctagagcagacttctgtgagggatccatctccagaagcagatgctccagtgcttggcagtcctgagaaggaagaggcagcctcagagccaccagctgctgctcctgatgctgcaccaccaccccctgataggcccattgagaagaaatcctattcccgggcaagaagaactcgaaccaaagttggagatgcagtcaagcttgcagaggaggtgccccctcctcctgaaggactgattccagcacctccagtcccagaaaccaccccaactccacctactaagactgggacctgggaagctccggtggattctagtacaagtggacttgagcaagatgtggcacaactaaatatagcagaacagaattggagtccggggcagccttctttcctgcaaccacgggaacttcgaggtatgcccaaccatatacacatgggagcaggacctccacctcagtttaaccggatggaagaaatgggtgtccagggtggtcgagccaaacgctattcatcccagcggcaaagacctgtgccagagccccccgcccctccagtgcatatcagtatcatggagggacattactatgatccactgcagttccagggaccaatctatacccatggtgacagccctgccccgctgcctccacagggcatgcttgtgcagccaggaatgaaccttccccacccaggtttacatccccaccagacaccagcatgcccagattcccagaccttaagacactgtgagagttgtctctgttggtccactgtgtttagttgcaaggatttttccatgtgtggtggtgttttttgttactgttttaaagggtgcccatttgtgatcagcattgtgacttggagataataaaatttagactat

SEQ ID NO: 4447 - DNA, 748 bp, Homo sapiens
  source 1..748: mol_type = unassigned DNA
atcctcgtgggccctgaccttctctctgagagccgggcagaggctccggagccatgcaggccgaaggccggggcacagggggttcgacgggcgatgctgatggcccaggaggccctggcattcctgatggcccagggggcaatgctggcggcccaggagaggcgggtgccacgggcggcagaggtccccggggcgcaggggcagcaagggcctcggggccgggaggaggcgccccgcggggtccgcatggcggcgcggcttcagggctgaatggatgctgcagatgcggggccagggggccggagagccgcctgcttgagttctacctcgccatgcctttcgcgacacccatggaagcagagctggcccgcaggagcctggcccaggatgccccaccgcttcccgtgccaggggtgcttctgaaggagttcactgtgtccggcaacatactgactatccgactgactgctgcagaccaccgccaactgcagctctccatcagctcctgtctccagcagctttccctgttgatgtggatcacgcagtgctttctgcccgtgtttttggctcagcctccctcagggcagaggcgctaagcccagcctggcgccccttcctaggtcatgcctcctcccctagggaatggtcccagcacgagtggccagttcattgtgggggcctgattgtttgtcgctggaggaggacggcttacatgtttgtttctgtagaaaataaaactgagctacga

SEQ ID NO: 4448 - DNA, 1010 bp, Homo sapiens
  source 1..1010: mol_type = unassigned DNA
agtgttcggctggggcaggcacgctgtggctggctgcttcccttccttccatcccctttggaccaaacgggatcggtgcttctggtgagacgcctccccatgcacatcactcccaggtgccctagggggcacatttcccacaactcccagagggcaggtttctagaaagtgccaccagtggggaggcgccacaacttcactgccattttgtgaggtgccgctgtctctcctccagcaaggaaacaatgaccgataaaacagagaaggtggctgtagatcctgaaactgtgtttaaacgtcccagggaatgtgacagtccttcgtatcagaaaaggcagaggatggccctgttggcaaggaaacaaggagcaggagacagccttattgcaggctctgccatgtccaaagcaaagaagcttatgacaggacatgctattccacccagccaattggattctcagattgatgacttcactggtttcagcaaagataggatgatgcagaaacctggtagcaatgcacctgtgggaggaaacgttaccagcagtttctctggagatgacctagaatgcagagaaacagcctcctctcccaaaagccaacgagaaattaatgctgatataaaacgtaaattagtgaaggaactccgatgcgttggacaaaaatatgaaaaaatcttcgaaatgcttgaaggagtgcaaggacctactgcagtcaggaagcgattttttgaatccatcatcaaggaagcagcaagatgtatgagacgagactttgttaagcaccttaagaagaaactgaaacgtatgatttgagaatacttgtccctggaggattatcacaccccaaatgcataatctcgttaatgattgaggagagaaaaggatcagattgctgttttctacaatggagcaggatattgctgaagtctcctggcatatgttaccgaatcaactggccttccagaggctaagaaatttctgttagtaaaagatgttctttttcccaaa

SEQ ID NO: 4449 - DNA, 1010 bp, Homo sapiens
  source 1..1010: mol_type = unassigned DNA
agtgttcggctggggcaggcacgctgtggctggctacttcccttcctcccatcccccttgggccaaacgggatcggtgcttctggtgagacgcctccccatgcacatcactcccaggtgccctagggggcacatttcccacaactcccagagggcaggtttctagaaagtgccaccagtggggaggcgccacaacttcactgccattttgtgaggtgccgccgtctctcctccagcaaggaaacaatgaccgataaaacagagaaggtggctgtagatcctgaaactgtgtttaaacgtcccagggaatgtgacagtccttcgtatcagaaaaggcagaggatggccctgttggcaaggaaacaaggagcaggagacagccttattgcaggctctgccatgtccaaagaaaagaagcttatgacaggacatgctattccacccagccaattggattctcagattgatgacttcactggtttcagcaaagataggatgatgcagaaacctggtagcaatgcacctgtgggaggaaacgttaccagcagtttctctggagatgacctagaatgcagagaaacagcctcctctcccaaaagccaacaagaaattaatgctgatataaaacgtaaattagtgaaggaactccgatgcgttggacaaaaatatgaaaaaatcttcgaaatgcttgaaggagtgcaaggacctactgcagtcaggaaacgattttttgaatccatcatcaaggaagcagcaagatgtatgagacgagactttgttaagcaccttaagaagaaactgaaacgtatgatttgagaatacttgtccctggaggattatcacaccccaaatgcataatctcattaatgattgaggagagaaaaggatcagattgctgttttctacaatggagcaggatattgctgaagtctcctggcatatgttaccgaatcaactggccttccagaggctaagaaatttctgttagtaaaagatgttctttttcccaaa

SEQ ID NO: 4450 - DNA, 827 bp, Homo sapiens
  source 1..827: mol_type = unassigned DNA
gcgccacaacttcactgccattttgtgaggtgccgccgtctctcctccagcaaggtcaggacttcaggactgaaacaatgaccgataaaacagagaaggtggctgtagatcctgaaactgtgtttaaacgtcccagggaatgtgacagtccttcgtatcagaaaaggcagaggatggccctgttggcaaggaaacaaggagcaggagacagccttattgcaggctctgccatgtccaaagaaaagaagcttatgacaggacatgctattccacccagccaattggattctcagattgatgacttcactggtttcagcaaagataggatgatgcagaaacctggtagcaatgcacctgtgggaggaaacgttaccagcagtttctctggagatgacctagaatgcagagaaacagcctcctctcccaaaagccaacaagaaattaatgctgatataaaacgtaaattagtgaaggaactccgatgcgttggacaaaaatatgaaaaaatcttcgaaatgcttgaaggagtgcaaggacctactgcagtcaggaaacgattttttgaatccatcatcaaggaagcagcaagatgtatgagacgagactttgttaagcaccttaagaagaaactgaaacgtatgatttgagaatacttgtccctggaggattatcacaccccaaatgcataatctcattaatgattgaggagagaaaaggatcagattgctgttttctacaatggagcaggatattgctgaagtctcctggcatatgttaccgaatcaactggccttccagaggctaagaaatttctgttagtaaaagat

SEQ ID NO: 4451 - DNA, 1010 bp, Homo sapiens
  source 1..1010: mol_type = unassigned DNA
agtgttcggctggggcaggcacgctgtggctggctacttcccttcctcccatcccccttgggccaaacgggatcggtgcttctggtgagacgcctccccatgcacatcactcccaggtgccctagggggcacatttcccacaactcccagagggcaggtttctagaaagtgccaccagtggggaggcgccacaacttcactgccattttgtgaggtgccgccgtctctcctccagcaaggaaacaatgaccgataaaacagagaaggtggctgtagatcctgaaactgtgtttaaacgtcccagggaatgtgacagtccttcgtatcagaaaaggcagaggatggccctgttggcaaggaaacaaggagcaggagacagccttattgcaggctctgccatgtccaaagaaaagaagcttatgacaggacatgctattccacccagccaattggattctcagattgatgacttcactggtttcagcaaagataggatgatgcagaaacctggtagcaatgcacctgtgggaggaaacgttaccagcagtttctctggagatgacctagaatgcagagaaacagcctcctctcccaaaagccaacgagaaattaatgctgatataaaacgtaaattagtgaaggaactccgatgcgttggacaaaaatatgaaaaaatcttcgaaatgcttgaaggagtgcaaggacctactgcagtcaggaagcgattttttgaatccatcatcaaggaagcagcaagatgtatgagacgagactttgttaagcaccttaagaagaaactgaaacgtatgatttgagaatacttgtccctggaggattatcacaccccaaatgcataatctcgttaatgattgaggagagaaaaggatcagattgctgttttctacaatggagcaggatattgctgaagtctcctggcatatgttaccgaatcaaatagccttccagaggctaagaaatttctgttagtaaaagatgttctttttcccaaa

SEQ ID NO: 4452 - DNA, 763 bp, Homo sapiens
  source 1..763: mol_type = unassigned DNA
atgaccgataaaacagagaaggtggctgtagatcctgaaactgtgtttaaacgtcccagggaatgtgacagtccttcgtatcagaaaaggcagaggatggccctgttggcaaggaaacaaggagcaggagacagccttattgcaggctctgccatgtccaaagaaaagaagcttatgacaggacatgctattccacccagccaattggattctcagattgatgacttcactggtttcagcaaagataggatgatgcagaaacctggtagcaatgcacctgtgggaggaaacgttaccagcagtttctctggagatgacctagaatgcagagaaacagcctcctctcccaaaagccaacgagaaattaatgctgatataaaacgtaaattagtgaaggaactccgatgcgttggacaaaaatatgaaaaaatcttcgaaatgcttgaaggagtgcaaggacctactgcagtcaggaagcgattttttgaatccatcatcaaggaagcagcaagatgtatgagacgagactttgttaagcaccttaagaagaaactgaaacgtatgatttgagaatacttgtccctggaggattatcacaccccaaatgcataatctcgttaatgattgaggagagaaaaggatcagattgctgttttctacaatggagcaggatattgctgaagtctcctggcatatgttaccgaatcaaatagccttccagaggctaagaaatttctgttagtaaaagatgttctttttccca

SEQ ID NO: 4453 - DNA, 1008 bp, Homo sapiens
  source 1..1008: mol_type = unassigned DNA
agtgttcggctggggcaggcacgctgtggctggctacttcccttcctcccatcccccttgggccaaacgggatcggtgcttctggtgagacgcctccccatgcacatcactcccaggtgccctagggggcacatttcccacaactcccagagggcaggtttctagaaagtgccaccagtggggaggcgccacaacttcactgccattttgtgaggtgccgccgtctctcctccagcaaggaaacaatgaccgataaaacagagaaggtggctgtagatcctgaaactgtgtttaaacgtcccagggaatgtgacagtccttcgtatcagaaaaggcagaggatggccctgttggcaaggaaacaaggagcaggagacagccttattgcaggctctgccatgtccaaagaaaagaagcttatgacaggacatgctattccacccagccaattggattctcagattgatgacttcactggtttcagcaaagataggatgatgcagaaacctggtagcaatgcacctgtgggaggaaacgttaccagcagtttctctggagatgacctagaatgcagagaaacagcctcctctcccaaaagccaacaagaaattaatgctgatataaaacgtaaattagtgaaggaactccgatgcgttggacaaaaatatgaaaaaatcttcgaaatgcttgaaggagtgcaaggacctactgcagtcaggaaacgattttttgaatccatcatcaaggaagcagcaagatgtatgagacgagactttgttaagcaccttaagaagaaactgaaacgtatgatttgagaatacttgtccctggaggattatcacaccccaaatgcataatctcgttaatgattgaggagagaaaaggatcagattgctgttttctacaatggagcaggatattgctgaagtctcctggcatatgttaccgaatcaaatagccttccagaggctaagaaatttctgttagtaaaagatgttctttttccca

SEQ ID NO: 4454 - DNA, 1010 bp, Homo sapiens
  source 1..1010: mol_type = unassigned DNA
agtgttcggctggggcaggcacgctgtggctggctacttcccttcctcccatcccccttgggccaaacgggatcggtgcttctggtgagacgcctccccatgcacatcactcccaggtgccctagggggcacatttcccacaactcccagagggcaggtttctagaaagtgccaccagtggggaggcgccacaacttcactgccattttgtgaggtgccgccgtctctcctccagcaaggaaacaatgaccgataaaacagagaaggtggctgtagatcctgaaactgtgtttaaacgtcccagggaatgtgacagtccttcgtatcagaaaaggcagaggatggccctgttggcaaggaaacaaggagcaggagacagccttattgcaggctctgccatgtccaaagcaaagaagcttatgacaggacatgctattccacccagccaattggattctcagattgatgacttcactggtttcagcaaagataggatgatgcagaaacctggtagcaatgcacctgtgggaggaaacgttaccagcagtttctctggagatgacctagaatgcagagaaacagcctcctctcccaaaagccaacaagaaattaatgctgatataaaacgtaaattagtgaaggaactccgatgcgttggacaaaaatatgaaaaaatcttcgaaatgcttgaaggagtgcaaggacctactgcagtcaggaaacgattttttgaatccatcatcaaggaagcagcaagatgtatgagacgagactttgttaagcaccttaagaagaaactgaaacgtatgatttgagaatacttgtccctggaggattatcacaccccaaatgcataatctcgttaatgattgaggagagaaaaggatcagattgctgttttctacaatggagcaggatattgctgaagtctcctggcatatgttaccgaatcaaatagccttccagaggctaagaaatttctgttagtaaaagatgttctttttcccaaa

SEQ ID NO: 4455 - DNA, 831 bp, Homo sapiens
  source 1..831: mol_type = unassigned DNA
gcgccacaacttcactgccattttgtgaggtgccgccgtctctcctccagcaaggtcaggacttcaggactgaaacaatgaccgataaaacagagaaggtggctgtagatcctgaaactgtgtttaaacgtcccagggaatgtgacagtccttcgtatcagaaaaggcagaggatggccctgttggcaaggaaacaaggagcaggagacagccttattgcaggctctgccatgtccaaagcaaagaagcttatgacaggacatgctattccacccagccaattggattctcagattgatgacttcactggtttcagcaaagataggatgatgcagaaacctggtagcaatgcacctgtgggaggaaacgttaccagcagtttctctggagatgacctagaatgcagagaaacagcctcctctcccaaaagccaacaagaaattaatgctgatataaaacgtaaattagtgaaggaactccgatgcgttggacaaaaatatgaaaaaatcttcgaaatgcttgaaggagtgcaaggacctactgcagtcaggaaacgattttttgaatccatcatcaaggaagcagcaagatgtatgagacgagactttgttaagcaccttaagaagaaactgaaacgtatgatttgagaatacttgtccctggaggattatcacaccccaaatgcataatctcgttaatgattgaggagagaaaaggatcagattgctgttttctacaatggagcaggatattgctgaagtctcctggcatatgttaccgaatcaaatagccttccagaggctaagaaatttctgttagtaaaagatgttc

SEQ ID NO: 4456 - DNA, 1010 bp, Homo sapiens
  source 1..1010: mol_type = unassigned DNA
agtgttcggctggggcaggcacgctgtggctggctacttcccttcctcccatcccccttgggccaaacgggatcggtgcttctggtgagacgcctccccatgcacatcactcccaggtgccctagggggcacatttcccacaactcccagagggcaggtttctagaaagtgccaccagtggggaggcgccacaacttcactgccattttgtgaggtgccgccgtctctcctccagcaaggaaacaatgaccgataaaacagagaaggtggctgtagatcctgaaactgtgtttaaacgtcccagggaatgtgacagtccttcgtatcagaaaaggcagaggatggccctgttggcaaggaaacaaggagcaggagacagccttattgcaggctctgccatgtccaaagaaaagaagcttatgacaggacatgctattccacccagccaattggattctcagattgatgacttcactggtttcagcaaagatgggatgatgcagaaacctggtagcaatgcacctgtgggaggaaatgttaccagcaatttctctggagatgacctagaatgcagaggaatagcctcctctcccaaaagccaacaagaaattaatgctgatataaaatgtcaagtagtgaaggaaatccgatgccttggacgaaaatatgaaaaaatcttcgaaatgcttgaaggagtgcaaggacctactgcagtcaggaaacgattttttgaatccatcatcaaggaagcagcaagatgtatgagacgagactttgttaagcaccttaagaagaaactgaaacgtatgatttgagaatacttgtccctggaggattatcacaccccaaatgcataatctcattaatgattgaggagagaaaaggatcagattgctgttttctacaatggagcaggatattgctgaagtctcctggcatatgttaccgaatcaactggccttccagaggctaagaaatttctgttagtaaaagatgttctttttcccaaa

SEQ ID NO: 4457 - DNA, 831 bp, Homo sapiens
  source 1..831: mol_type = unassigned DNA
gcgccacaacttcactgccattttgtgaggtgccgccgtctctcctccagcaaggtcaggacttcaggactgaaacaatgaccgataaaacagagaaggtggctgtagatcctgaaactgtgtttaaacgtcccagggaatgtgacagtccttcgtatcagaaaaggcagaggatggccctgttggcaaggaaacaaggagcaggagacagccttattgcaggctctgccatgtccaaagaaaagaagcttatgacaggacatgctattccacccagccaattggattctcagattgatgacttcactggtttcagcaaagatgggatgatgcagaaacctggtagcaatgcacctgtgggaggaaatgttaccagcaatttctctggagatgacctagaatgcagaggaatagcctcctctcccaaaagccaacaagaaattaatgctgatataaaatgtcaagtagtgaaggaaatccgatgccttggacgaaaatatgaaaaaatcttcgaaatgcttgaaggagtgcaaggacctactgcagtcaggaaacgattttttgaatccatcatcaaggaagcagcaagatgtatgagacgagactttgttaagcaccttaagaagaaactgaaacgtatgatttgagaatacttgtccctggaggattatcacaccccaaatgcataatctcattaatgattgaggagagaaaaggatcagattgctgttttctacaatggagcaggatattgctgaagtctcctggcatatgttaccgaatcaactggccttccagaggctaagaaatttctgttagtaaaagatgttc

SEQ ID NO: 4458 - DNA, 1010 bp, Homo sapiens
  source 1..1010: mol_type = unassigned DNA
agtgttcggctgggacaggcacgctgtggctggctacttcccttccttccatcccccttgggccaaacaggatcggtgcttctggtgagacgtctccccatgcacatcactcccagatgccctagggggcacatttcccacaactcccagagggcaggtttctagaaagtgccaccagtggggaggcgccacaacttcactgccattttgtgaggtgccgccgtctctcctccagcaaggaaacaatgaccgataaaacagagaaggtggctgtagatcctgaaactgtgtttaaacgtcccagggaatgtgacagtccttcgtatcagaaaaggcagaggatggccctgttggcaaggaaacaaggagcaggagacagccttattgcaggctctgccatgtccaaagcaaagaagcttatgacaggacatgctattccacccagccaattggattctcagattgatgacttcactggtttcagcaaagataggatgatgcagaaacctggtagcaatgcacctgtgggaggaaacgttaccagcagtttctctggagatgacctagaatgcagagaaacagcctcctctcccaaaagccaacaagaaattaatgctgatataaaacgtaaattagtgaaggaactccgatgcgttggacaaaaatatgaaaaaatcttcgaaatgcttgaaggagtgcaaggacctactgcagtcaggaaacgattttttgaatccatcatcaaggaagcagcaagatgtatgagacgagactttgttaagcaccttaagaagaaactgaaacgtatgatttgagaatacttgtccctggaggattatcacaccccaaatgcataatctcgttaatgattgaggagagaaaaggatcagattgctgttttctacaatggagcaggatattgctgaagtctcctggcatatgttaccgaatcaactggccttccagaggctaagaaatttctgttagtaaaagatgttctttttcccaaa

SEQ ID NO: 4459 - DNA, 831 bp, Homo sapiens
  source 1..831: mol_type = unassigned DNA
gcgccacaacttcactgccattttgtgaggtgccgccgtctctcctccagcaaggtcaggacttcaggactgaaacaatgaccgataaaacagagaaggtggctgtagatcctgaaactgtgtttaaacgtcccagggaatgtgacagtccttcgtatcagaaaaggcagaggatggccctgttggcaaggaaacaaggagcaggagacagccttattgcaggctctgccatgtccaaagcaaagaagcttatgacaggacatgctattccacccagccaattggattctcagattgatgacttcactggtttcagcaaagataggatgatgcagaaacctggtagcaatgcacctgtgggaggaaacgttaccagcagtttctctggagatgacctagaatgcagagaaacagcctcctctcccaaaagccaacaagaaattaatgctgatataaaacgtaaattagtgaaggaactccgatgcgttggacaaaaatatgaaaaaatcttcgaaatgcttgaaggagtgcaaggacctactgcagtcaggaaacgattttttgaatccatcatcaaggaagcagcaagatgtatgagacgagactttgttaagcaccttaagaagaaactgaaacgtatgatttgagaatacttgtccctggaggattatcacaccccaaatgcataatctcgttaatgattgaggagagaaaaggatcagattgctgttttctacaatggagcaggatattgctgaagtctcctggcatatgttaccgaatcaactggccttccagaggctaagaaatttctgttagtaaaagatgttc

SEQ ID NO: 4460 - DNA, 1126 bp, Homo sapiens
  source 1..1126: mol_type = unassigned DNA
gccaaccagaatctttcccaacttgtctaagtcctctcaggccagccttggtgggaggtttctaggattcgctccctgcccttcccatcttagggtgtcgtctgagacagactcttattccctcaataaagagagagactcttattccctcagcggccagctcctcgcctcccctcggccgtagccacctcagtggtcaccgtcttcaccgtggtcgcctcagcccgctcgccaccccagttgaggcgctgctggtgtcatgtctgccacaggggaccgacacccgacccaaggggaccaggaggccccggtaagccaggagggagcacaggccgaggcggccggagctggtaaccaggagggcggcgactccggccccgacagcagcgacgtggtgcctgcggccgaggtggtcggagtcgcagggcccgtggaaggcctcggggaggaggagggtgagcaggcggcaggcctggccgcagtcccccggggcgggagcgccgaggaggactcagatatcgggcccgcgacggaggaagaggaggaggaagaggggaacgaggcggccaacttcgacttggcggtggtcgcccgtcgctacccggcgtcgggcattcacttcgtgctcctggacatggtccactcccttctccaccgcctctctcacaacgaccacatcctcatagagaaccgtcaactcagccgcctgatggtggggccacacgctgctgcgcgcaacctctggggcaacctccccccgctgctgctgccccagaggctgggtgcaggggccgcagcccgggcgggcgagggcctgggcctgatccaggaggccgcatcggtcccagagcctgcagtgccagctgacctggccgagatggccagggagcccgcggaggaggccgcagaggagaagctctcagaggaggccacagaggaaccagacgcagaggaaccggccacagaagaaccgaccgcacaggaggccacggccccagaggaagtcactaaatctcagcccgaaaagtgggatgaagaggcccaagatgctgcaggcgaggaagagaaagaacaagaaaaagagaaggatgcagaaaacaaggtgaagaactccaaagggacctag

SEQ ID NO: 4461 - DNA, 1288 bp, Homo sapiens
  source 1..1288: mol_type = unassigned DNA
accagaatctttcccaacttgtctaagtcctctcaggccagccttggtgggaggtttctaggattcgctccctgcccttcccatcttagggtgtcgtctgagacagactcttattccctcaataaagagagagactcttattccctcagcggccagctcctcgcctcccctcggccgtagccacctcagtggtcaccgtcttcaccgtggtcgcctcagcccgctcgccaccccagttgaggcgctgctggtgtcatgtctgccacaggggaccgacacccgacccaaggggaccaggaggccccggtaagccaggagggagcacaggccgaggcggccggagctggtaaccaggagggcggcgactccggccccgacagcagcgacgtggtgcctgcggccgaggtggtcggagtcgcagggcccgtggaaggcctcggggaggaggagggtgagcaggcggcaggcctggccgcagtcccccggggcgggagcgccgaggaggactcagatatcgggcccgcgacggaggaagaggaggaggaagaggggaacgaggcggccaacttcgacttggcggtggtcgcccgtcgctacccggcgtcgggcattcacttcgtgctcctggacatggtccactcccttctccaccgcctctctcacaacgaccacatcctcatagagaaccgtcaactcagccgcctgatggtggggccacacgctgctgcgcgcaacctctggggcaacctccccccgctgctgctgccccagaggctgggtgcaggggccgcagcccgggcgggcgagggcctgggcctgatccaggaggccgcatcggtcccagagcctgcagtgccagctgacctggccgagatggccagggagcccgcggaggaggccgcagaggagaagctctcagaggaggccacagaggaaccagacgcagaggaaccggccacagaagaaccgaccgcacaggaggccacggccccagaggaagtcactaaatctcagcccgaaaagtgggatgaagaggcccaagatgctgcaggcgaggaagagaaagaacaagaaaaagagaaggatgcagaaaacaaggtgaagaactccaaagggacctagacgcagcagaggtgaagccaagaaaatccagatgcctgtgggaattgtaacacatatcattccaaagttcgttacatcaaaagtgatatccagtgacatctaactttcatggatgtatgtgacagtgttcaagttaaaaaataaaagtttgttttaaatgaataaa

SEQ ID NO: 4462 - DNA, 1294 bp, Homo sapiens
  source 1..1294: mol_type = unassigned DNA
accagaatctttcccaacttgtctaagtcctctcaggccagccttggtgggaggtttctaggattcgctccctgcccttcccatcttagggtgtcgtctgagacagactcttattccctcaataaagagagagactcttattccctcagcggccagctcctcgcctcccctcggccgtagccacctcagtggtcaccgtcttcaccgtggtcgcctcagcccgctcgccaccccagttgaggcgctgctggtgtcatgtctgccacaggggaccgacacccgacccaaggggaccaggaggccccggtaagccaggagggagcacaggccgaggcggccggagctggtaaccaggagggcggcgactccggccccgacagcagcgacgtggtgcctgcggccgaggtggtcggagtcgcagggcccgtggaaggcctcggggaggaggagggtgagcaggcggcaggcctggccgcagtcccccggggcgggagcgccgaggaggactcagatatcgggcccgcgacggaggaagaggaggaggaagaggggaacgaggcggccaacttcgacttggcggtggtcgcccgtcgctacccggcgtcgggcattcacttcgtgctcctggacatggtccactcccttctccaccgcctctctcacaacgaccacatcctcatagagaaccgtcaactcagccgcctgatggtggggccacacgctgctgcgcgcaacctctggggcaacctccccccgctgctgctgccccagaggctgggtgcaggggccgcagcccgggcgggcgagggcctgggcctgatccaggaggccgcatcggtcccagagcctgcagtgccagctgacctggccgagatggccagggagcccgcggaggaggccgcagaggagaagctctcagaggaggccacagaggaaccagacgcagaggaaccggccacagaagaaccgaccgcacaggaggccacggccccagaggaagtcactaaatctcagcccgaaaagtgggatgaagaggcccaagatgctgcaggcgaggaagagaaagaacaagaaaaagagaaggatgcggaaaacaaggtgaagaactccaaagggacctagacgcagcagaggtgaagccaagaaaatccagatgcctgtgggaattgtaacacatatcattccaaagttcgttacatcaaaagtgatatccagtgacatctaactttcatggatgtatgtgacagtgttcaagttaaaaaataaaagtttgttttaaatgaataaactgaaa

SEQ ID NO: 4463 - DNA, 1288 bp, Homo sapiens
  source 1..1288: mol_type = unassigned DNA
accagaatctttcccaacttgtctaagtcctctcaggccagccttggtgggaggtttctaggattcgctccctgcccttcccatcttagggtgtcgtctgagacagactcttattccctcaataaagagagagactcttattccctcagcggccagctcctcgcctcccctcggccgtagccacctcagtggtcaccgtcttcaccgtggtcgcctcagcccgctcgccaccccagttgaggcgctgctggtgtcatgtctgccacaggggaccgacacccgacccaaggggaccaggaggccccggtaagccaggagggagcacaggccgaggcggccggagctggtaaccaggagggcggcgactccggccccgacagcagcgacgtggtgcctgcggccgaggtggtcggagtcgcagggcccgtggaaggcctcggggaggaggagggtgagcaggcggcaggcctggccgcagtcccccggggcgggagcgccgaggaggactcagatatcgggcccgcgacggaggaagaggaggaggaagaggggaacgaggcggccaacttcgacttggcggtggtcgcccgtcgctacccggcgtcgggcattcacttcgtgctcctggacatggtccactcccttctccaccgcctctctcacaacgaccacatcctcatagagaaccgtcaactcagccgcctgatggtggggccacacgctgctgcgcgcaacctctggggcaacctccccccgctgctgctgccccagaggctgggtgcaggggccgcagcccgggcgggcgagggcctgggcctgatccaggaggccgcatcggtcccagagcctgcagtgccagctgacctggccgagatggccagggagcccgcggaggaggccgcagaggagaagctctcagaggaggccacagaggaaccagacgcagaggaaccggccacagaagaaccgaccgcacaggaggccacggccccagaggaagtcactaaatctcagcccgaaaagtgggatgaagaggcccaagatgctgcaggcgaggaagagaaagaacaagaaaaagagaaggatgcggaaaacaaggtgaagaactccaaagggacctagacgcagcagaggtgaagccaagaaaatccagatgcctgtgggaattgtaacacatatcattccaaagttcgttacatcaaaagtgatatccagtgacatctaactttcatggatgtatgtgacagtgttcaagttaaaaaataaaagtttgttttaaatgaataaa

SEQ ID NO: 4464 - DNA, 1288 bp, Homo sapiens; identical to SEQ ID NO: 4463
  source 1..1288: mol_type = unassigned DNA

SEQ ID NO: 4465 - DNA, 1288 bp, Homo sapiens; identical to SEQ ID NO: 4463
  source 1..1288: mol_type = unassigned DNA

SEQ ID NO: 4466 - DNA, 1288 bp, Homo sapiens; identical to SEQ ID NO: 4463
  source 1..1288: mol_type = unassigned DNA

SEQ ID NO: 4467 - DNA, 1288 bp, Homo sapiens; identical to SEQ ID NO: 4463
  source 1..1288: mol_type = unassigned DNA

SEQ ID NO: 4468 - DNA, 1294 bp, Homo sapiens
  source 1..1294: mol_type = unassigned DNA
accagaatctttcccaacttgtctaagtcctctcaggccagccttggtgggaggtttctaggattcgctccctgcccttcccatcttagggtgtcgtctgagacagactcttattccctcaataaagagagagactcttattccctcagcggccagctcctcgcctcccctcggccgtagccacctcagtggtcaccgtcttcaccgtggtcgcctcagcccgctcgccaccccagttgaggcgctgctggtgtcatgtctgccacaggggaccgacacccgacccaaggggaccaggaggccccggtaagccaggagggagcacaggccgaggcggccggagctggtaaccaggagggcggcgactccggccccgacagcagcgacgtggtgcctgcggccgaggtggtcggagtcgcagggcccgtggaaggcctcggggaggaggagggtgagcaggcggcaggcctggccgcagtcccccggggcgggagcgccgaggaggactcagatatcgggcccgcgacggaggaagaggaggaggaagaggggaacgaggcggccaacttcgacttggcggtggtcgcccgtcgctacccggcgtcgggcattcacttcgtgctcctggacatggtccactcccttctccaccgcctctctcacaacgaccacatcctcatagagaaccgtcaactcagccgcctgatggtggggccacacgctgctgcgcgcaacctctggggcaacctccccccgctgctgctgccccagaggctgggtgcaggggccgcagcccgggcgggcgagggcctgggcctgatccaggaggccgcatcggtcccagagcctgcagtgccagctgacctggccgagatggccagggagcccgcggaggaggccgcagaggagaagctctcagaggaggccacagaggaaccagacgcagaggaaccggccacagaagaaccgaccgcacaggaggccacggccccagaggaagtcactaaatctcagcccgaaaagtgggatgaagaggcccaagatgctgcaggcgaggaagagaaagaacaagaaaaagagaaggatgcagaaaacaaggtgaagaactccaaagggacctagacgcagcagaggtgaagccaagaaaatccagatgcctgtgggaattgtaacacatatcattccaaagttcgttacatcaaaagtgatatccagtgacatctaactttcatggatgtatgtgacagtgttcaagttaaaaaataaaagtttgttttaaatgaataaactgaaa

SEQ ID NO: 4469 - DNA, 1288 bp, Homo sapiens; identical to SEQ ID NO: 4463
  source 1..1288: mol_type = unassigned DNA

SEQ ID NO: 4470 - DNA, 1288 bp, Homo sapiens
  source 1..1288: mol_type = unassigned DNA
accagaatctttcccaacttgtctaagtcctctcaggccagccttggtgggaggtttctaggattcgctccctgcccttcccatcttagggtgtcgtctgagacagactcttattccctcaataaagagagagactcttattccctcagcggccagctcctcgcctcccctcggccgtagccacctcagtggtcaccgtcttcaccgtggtcgcctcagcccgctcgccaccccagttgaggcgctgctggtgtcatgtctgccacaggggaccgacacccgacccaaggggaccaggaggccccggtaagccaggagggagcacaggccgaggcggccggagctggtaaccaggagggcggcgactccggccccgacagcagcgacgtggtgcctgcggccgaggtggtcggagtcgcagggcccgtggaaggcctcggggaggaggagggtgagcaggcggcaggcctggccgcagtcccccggggcgggagcgccgaggaggactcagatatcgggcccgcgacggaggaagaggaggaggaagaggggaacgaggcggccaacttcgacttggcggtggtcgcccgtcgctacccggcgtcgggcattcacttcgtgctcctggacatggtccactcccttctccaccgcctctctcacaacgaccacatcctcatagagaaccgtcaactcagccgcctgatggtggggccacacgctgctgcgcgcaacctctggggcaacctccccccgctgctgctgccccagaggctgggtgcaggggccgcagcccgggcgggcgagggcctgggcctgatccaggaggccgcatcggtcccagagcctgcagtgccagctgacctggccgagatggccagggagcccgcggaggaggccgcagaggagaagctctcagaggaggccacagaggaaccagacgcagaggaaccagccacagaagaaccgaccgcacaggaggccacggccccagaggaagtcactaaatctcagcccgaaaagtgggatgaagaggcccaagatgctgcaggcgaggaagagaaagaacaagaaaaagagaaggatgcagaaaacaaggtgaagaactccaaagggacctagacgcagcagaggtgaagccaagaaaatccagatgcctgtgggaattgtaacacatatcattccaaagttcgttacatcaaaagtgatatccagtgacatctaactttcatggatgtatgtgacagtgttcaagttaaaaaataaaagtttgttttaaatgaataaa

SEQ ID NO: 4471 - DNA, 1288 bp, Homo sapiens
  source 1..1288: mol_type = unassigned DNA
accagaatctttcccgccttatctaagtcctctcaggccagacttggtgggaggttcctaggattcgctccctgcccttcccaccttagggtgtcctctgagacagactcttatttcctcaataaagagaaagactcttattccctcagcggccagctcctcgcctcccctcggccgtagccacctcagtggtcaccgtcttcaccgtggtcgcctcagcccgctcgccaccccagttgaggcgctgctggtgtcatgtctgccacaggggaccgacacccgacccaaggggaccaggaggccccggtaagccaggagggagcacaggccgaggcggccggagctggtaaccaggagggcggcgactccggccccgacagcagcgacgtggtgcctgcggccgaggtggtcggagtcgcagggcccgtggaaggcctcggggaggaggagggtgagcaggcggcaggcctggccgcagtcccccggggcgggagcgccgaggaggactcagatatcgggcccgcgacggaggaagaggaggaggaagaggggaacgaggcggccaacttcgacttggcggtggtcgcccgtcgctacccggcgtcgggcattcacttcgtgctcctggacatggtccactcccttctccaccgcctctctcacaacgaccacatcctcatagagaaccgtcaactcagccgcctgatggtggggccacacgctgctgcgcgcaacctctggggcaacctccccccgctgctgctgccccagaggctgggtgcaggggccgcagcccgggcgggcgagggcctgggcctgatccaggaggccgcatcggtcccagagcctgcagtgccagctgacctggccgagatggccagggagcccgcggaggaggccgcagaggagaagctctcagaggaggccacagaggaaccagacgcagaggaaccggccacagaagaaccgaccgcacaggaggccacggccccagaggaagtcactaaatctcagcccgaaaagtgggatgaagaggcccaagatgctgcaggcgaggaagagaaagaacaagaaaaagagaaggatgcggaaaacaaggtgaagaactccaaagggacctagacgcagcagaggtgaagccaagaaaatccagatgcctgtgggaattgtaacacatatcattccaaagttcgttacatcaaaagtgatatccagtgacatctaactttcatggatgtatgtgacagtgttcaagttaaaaaataaaagtttgttttaaatgaataaa

SEQ ID NO: 4472 - DNA, 1288 bp, Homo sapiens; identical to SEQ ID NO: 4463
  source 1..1288: mol_type = unassigned DNA

SEQ ID NO: 4473 - DNA, 1288 bp, Homo sapiens; identical to SEQ ID NO: 4463
  source 1..1288: mol_type = unassigned DNA

SEQ ID NO: 4474 - DNA, 1324 bp, Homo sapiens
  source 1..1324: mol_type = unassigned DNA
accagaatctttcccgccttatctaagtcctctcaggccagacttggtgggaggttcctaggattcgctccctgcccttcccaccttagggtgtcctctgagacagactcttatttcctcaataaagagaaagactcttattccctcagcggccagctcctcgcctcccctcggccgtagccacctcagtggtcaccgtcttcaccgtggtcgcctcagcccgctcgccaccccagttgaggcgctgctggtgtcatgtctgccacaggggaccgacacccgacccaaggggaccaggaggccccggtaagccaggagggagcacaggccgaggcggccggagctggtaaccaggagggcggcgactccggccccgacagcagcgacatggtgcctgcggccgaggtggtcggagtcgcagggcccgtggaaggcctcggggaggaggagggtgagcaggcggcaggcctggccgcagtcccccagggcgggagcgccgaggaggactcagatatcgggcccgcgacggaggaagaggaggaggaggaagaggggaacgaggcggccaacttcgacttggcggtggccacccgtcggtacccggcggcgggcattggcttcgtgttcctgtacctggtccactcccttctccgccgcctctatcacaacgaccacatccagatagcgaaccgtcacctcagccgcctgatggtggggccccacgctgctgtgcccaacctctgggacaaccctcccctgctgctgctgtcccagaggctgggtgcaggggctgcagccccagaaggcgagggcctcggcctgatccaggaggctgcgtcggtccaggaggccgcgtcggtcccagagcctgcagtgccagctgacctggccgagatggccagggagcccgcggaggaggccgcagatgagaaacccccagaggaggccgcagaggagaagctcacagaggaggccacagaggaaccggccgcagaggaaccgacctcagaggaggccgtggcccccgaggaagtcactaaatctcagcccgaaaagtgggatgaagaggcccaagatgctgcaggcgaggaagagaaagaacaagaaaaagagaaggatgtggaaaacaaggtgaagaactccaaagggacctagacgcagcagaggtgaagccaagaaaatccagatgcctgtgggaattgtaacacatatcattccaaagttcgttacatcaaaagtgatatccagtgacatctaactttcatggatgtatgtgacagtgtttgttcaagttaaaaataaaagtttgttttcaatgaataaa

SEQ ID NO: 4475 - DNA, 5549 bp, Homo sapiens
  source 1..5549: mol_type = unassigned DNA
ttagcttatcaggagaacttactgtaaaccgactctttttgtttcaaagatgtctcccactccaggcgaggagcgctcttggctgaggattgccccctgtgggtcactttctcagtcattttgagctcagcctaatcaaagactgaggttatgaagtcgatcctagatggccttgcagataccaccttccgcaccatcaccactgacctcctgtacgtgggctcaaatgacattcagtacgaagacatcaaaggtgacatggcatccaaattagggtacttcccacagaaattccctttaacttcctttaggggaagtcccttccaagagaagatgactgcgggagacaacccccagctagtcccagcagaccaggtgaacattacagaattttacaacaagtctctctcgtccttcaaggagaatgaggagaacatccagtgtggggagaacttcatggacatagagtgtttcatggtcctgaaccccagccagcagctggccattgcagtcctgtccctcacgctgggcaccttcacggtcctggagaacctcctggtgctgtgcgtcatcctccactcccgcagcctccgctgcaggccttcctaccacttcatcggcagcctggcggtggcagacctcctggggagtgtcatttttgtctacagcttcattgacttccacgtgttccaccgcaaagatagccgcaacgtgtttctgttcaaactgggtggggtcacggcctccttcactgcctccgtgggcagcctgttcctcacagccatcgacaggtacatatccattcacaggcccctggcctataagaggattgtcaccaggcccaaggccgtggtggcgttttgcctgatgtggaccatagccattgtgatcgccgtgctgcctctcctgggctggaactgcgagaaactgcaatctgtttgctcagacattttcccacacattgatgaaacctacctgatgttctggatcggggtcaccagcgtactgcttctgttcatcgtgtatgcgtacatgtatattctctggaaggctcacagccacgccgtccgcatgattcagcgtggcacccagaagagcatcatcatccacacgtctgaggatgggaaggtacaggtgacccggccagaccaagcccgcatggacattaggttagccaagaccctggtcctgatcctggtggtgttgatcatctgctggggccctctgcttgcaatcatggtgtatgatgtctttgggaagatgaacaagctcattaagacggtgtttgcattctgcagtatgctctgcctgctgaactccaccgtgaaccccatcatctatgctctgaggagtaaggacctgcgacacgctttccggagcatgtttccctcttgtgaaggcactgcgcagcctctggataacagcatgggggactcggactgcctgcacaaacacgcaaacaatgcagccagtgttcacagggccgcagaaagctgcatcaagagcacggtcaagattgccaaggtaaccatgtctgtgtccacagacacgtctgccgaggctctgtgagcctgatgcctccctggcagcacaggaaaagaatttttttttttaagctcaaaatctagaagagtctattgtctccttggttatatttttttaactttaccatgctcaatgaaaaggtgattgtcaccatgatcacttatcagtttgctaatgtttccatagtttaggtactcaaactccattctccaggggtttacagtgaagaaagcctgttgtttaagtgactgaacgatccttcaaagtctcaatgaaataggagggaaacctttggctacacaattggaagtctaagaacccatggaaaaatgccatcaaatgaataatgcctttgtaaccacaactttcactataatgtgaaatgtaactgtccgtagtatcagagatgtccatttttacaagttatagtactagagatattttgtaaaatgtattatgtcctgtgagatgtgtatcagtgtttatgtgctattaatatttgtttagttcagcaaaactgaaaggtagacttttatgagaacaatggacaagcagtggatacgtgtcaatgtgtgcactttttttctatattattgcccatgatataactttagaaataaaccttaatatttcttcaaatatctctatttaattttgacactgaaataaccgtaaaggtttatttttctgttacctcaacaagaagaatttgaagacttcaaaatattgagcagaattcattcatacttaaaaatttattagccctgcattttcataggaagacacattatcttctggactatagctgttctaatggattataatcagaatggaagagagaaagcatattgactttttttgagcgacatctctgactttctttagtctttagctattactggatctcttaagacagcatgtgttaatcttaatgtatatcgttatcactgtgcagttgctgtttacttgaatagtattgtgttcctatattccaggtttaagtagatttcatgcctgggtggccaaacaacagtcttcattttttttaattgaaaagaagtagtgtctggatcagtaaaattatactgtgtgtgagtgtgaatataaatgtgtgtatgtgtgtttctgtcctgtaactgttacagtaatgtcataaagtgagaaaactgtgaccaagtataaacttttaccacttgctgcactcttgcacatggattcagtttctaaaattgagttcttcctgtaatcttgttgataaaaatactgactccaaccattcaaaaatttcaccccatccctccttaagagattggatcaagtattactaaattgacctttaggtattacacaagaccagtgcttagcaaaaaataatgacaggcatccaaggaagggatgtatttgtagtgttattgccaggaaaggagagtactttggtttctgagcaccgaatattgagcaatatgtcagtcactaaaaggaagacagttctacagaaaaacaatggtaacatttttcaatagcgtgtgtagatagtatgcactatatacatcacgttaaagtaggactatcacacccagcccatgtggctaaaaaagctgaatcagacagtggatgagacacacaacggcagtgaagaaccgatacacttggcattgacgtctagctatgctgtatctgtgctttgcccacatgcccttggtgacagctgagcacccagctctgtcttggtaggtttgggctaaggaacaaatctctcctttgctcgtggttagcaagatacactcaagcatgaagataaacacagctgctttcttcttacaccccggtctcatgctccttaatggcgccatgggtgcttgttgggcctttttccagtaaggaatgatattgctgaagaatctacttaaccctgacaaattttaattataatctcttcttatacagataaaacatgactcctacaaggccccaaggtttacatagtctgaagtgaagtacagagctggcatctatctggtgatttctagctctcgagatacccaagcagcctgatggggcagttccccttcttacggttcacgctctaaggcaggatgtggcttatgagatactttgcattgtctgtctgcacaccttgaatctgcctgctggctcccttactttacctctctgtcatgtgcagatgaaggctcagggtgctagaggattagtaagatctctttctaaagacaggagagattatttacaagaagaactcaccagggtttagtttgcatttaagaattgccagtcttttgtcctgcatcatcttgaacattaatccacatgtttcagagctcaccaggcagtaccaatgctcttttcacagctatgaagagctagagaaattcttgttatggtagaaaaatttcacgattcatttttgaaactgcatttgtgcgtatgcagtgtagattttatagtgtgttgtgctttcaagatctaaatcatatataataaattaagggacaatggggctgacagcactaaacttggtgcttattgatattctaagaaatatctgtgaaatatcatcacgtatgttatacaaccttcatttaaaaaggtttaaaactagttagattcactttgacacttttcatatcatttcttaacccaagtgacgaaaacattgtccccaatgaatatactcattagaattaccatttgttaatatcactcattaattaaccccataattagatccattaatttaaatgatttaaatttaagtaagttttataaggtctgacatcagaggtatcttactttcctctgaggatgatgtacttgccctgaccatgcattttaccatcacacatgttcagaaagggccaaattcccaacctgctcattttttttttatcagagtcatgatgaatcagtcctagaatgtttcatttgcacaagtagggctgcctccaagaggaacctctgatttattttgtatgaaatatatgtgaaaggatatgaatctgagagatgctgtagacatctgtcctacacttgagatgatttccaagcctctctggcactttgagttaagtctatctggtattaaatgccaaggaccttttgctgcctaaatccactctgcaggaaataggcccaaccaccagatgagaattaggccctggatgagtagcgctatagttactgtcctgttgattaatttctgccatttcatgtccataaaagagaccacccatatcatgcacacaattagatttctcacactctaactgtatatttgtatgatattttaaaatctcctaaatgctgggcaatggctattaacaattaattgtcttgcactggccttctgatgaaatgttaacaatgcctattgtaatatagaaaaaaacattctatctactgatttgggctgaatgtatgtaaataggtttctaaaaagtcagatgtttgagcagtggcctacaaatcagtaattttcggatgggagagtttctttacattgccgtggcatcttaaaagctatcttcatgtaaattgactgtactaggcctactggggatcagagttcccaagaaaggaaaccttttcttgtatctggattcaaatttatttccaatgtttcaagcgggaaacatgactctttattgtctgtaaatctaacattattacttttcctcttagaagaatattgtattgttagatgtttgttgagctggtaacatcgttgcaaccactgcaatatcttcgttagtaatctgtataatactttgtatacaagtactggtaagattgttattaaatgtagcttcagtcattaaattactatagcaaagtagtacttcttctgtaatatttacaatgtattaagcccacagtatattttatttcaatgtaattaaactgttaacttattcaaagagaaaacatctcatcatgtctattgtccaaagttacctggaatcaaataaaaattctagattaccatg

SEQ ID NO: 4476 - DNA, 6031 bp, Homo sapiens
  source 1..6031: mol_type = unassigned DNA
cgagagggagccagagacagcgcgagcggagggagcggcagggactgcgcgagcgggacgaggcgacgggcgcccgggctggcggagacgggcggccccacgccgggccaggcggggctcgcgggaggacccagtgaagagcctgggaaggggcgaggctcgccggcggtcggagcagcggggcgccagtcccggtcgctgtcgcgggcgggcgctggagaccgggacgccggcgctcggacggactgacttgctgaccgcccgccggaggcacaccccactccaccccaccccgcctcgccagcagcccggcgccggcgccgcctcccgcacgctactccctctgccaccccttccttctccacttcttttccgcctccgcctcttcttgtctcccgcggcgccagcgccttcccttggcccgggcgggggcctcggctccctgcagagctctccgtagtcagtgggggatatttcgttctagcggacaaccagcccctgagctgggcgagaggtgccaagggagcttctgtcccgaggaccaggggatgcgaagggattgccccctgtgggtcactttctcagtcattttgagctcagcctaatcaaagactgaggttatgaagtcgatcctagatggccttgcagataccaccttccgcaccatcaccactgacctcctgtacgtgggctcaaatgacattcagtacgaagacatcaaaggtgacatggcatccaaattagggtacttcccacagaaattccctttaacttcctttaggggaagtcccttccaagagaagatgactgcgggagacaacccccagctagtcccagcagaccaggtgaacattacagaattttacaacaagtctctctcgtccttcaaggagaatgaggagaacatccagtgtggggagaacttcatggacatagagtgtttcatggtcctgaaccccagccagcagctggccattgcagtcctgtccctcacgctgggcaccttcacggtcctggagaacctcctggtgctgtgcgtcatcctccactcccgcagcctccgctgcaggccttcctaccacttcatcggcagcctggcggtggcagacctcctggggagtgtcatttttgtctacagcttcattgacttccacgtgttccaccgcaaagatagccgcaacgtgtttctgttcaaactgggtggggtcacggcctccttcactgcctccgtgggcagcctgttcctcacagccatcgacaggtacatatccattcacaggcccctggcctataagaggattgtcaccaggcccaaggccgtggtggcgttttgcctgatgtggaccatagccattgtgatcgccgtgctgcctctcctgggctggaactgcgagaaactgcaatctgtttgctcagacattttcccacacattgatgaaacctacctgatgttctggatcggggtcaccagcgtactgcttctgttcatcgtgtatgcgtacatgtatattctctggaaggctcacagccacgccgtccgcatgattcagcgtggcacccagaagagcatcatcatccacacgtctgaggatgggaaggtacaggtgacccggccagaccaagcccgcatggacattaggttagccaagaccctggtcctgatcctggtggtgttgatcatctgctggggccctctgcttgcaatcatggtgtatgatgtctttgggaagatgaacaagctcattaagacggtgtttgcattctgcagtatgctctgcctgctgaactccaccgtgaaccccatcatctatgctctgaggagtaaggacctgcgacacgctttccggagcatgtttccctcttgtgaaggcactgcgcagcctctggataacagcatgggggactcggactgcctgcacaaacacgcaaacaatgcagccagtgttcacagggccgcagaaagctgcatcaagagcacggtcaagattgccaaggtaaccatgtctgtgtccacagacacgtctgccgaggctctgtgagcctgatgcctccctggcagcacaggaaaagaatttttttttttaagctcaaaatctagaagagtctattgtctccttggttatatttttttaactttaccatgctcaatgaaaaggtgattgtcaccatgatcacttatcagtttgctaatgtttccatagtttaggtactcaaactccattctccaggggtttacagtgaagaaagcctgttgtttaagtgactgaacgatccttcaaagtctcaatgaaataggagggaaacctttggctacacaattggaagtctaagaacccatggaaaaatgccatcaaatgaataatgcctttgtaaccacaactttcactataatgtgaaatgtaactgtccgtagtatcagagatgtccatttttacaagttatagtactagagatattttgtaaaatgtattatgtcctgtgagatgtgtatcagtgtttatgtgctattaatatttgtttagttcagcaaaactgaaaggtagacttttatgagaacaatggacaagcagtggatacgtgtcaatgtgtgcactttttttctatattattgcccatgatataactttagaaataaaccttaatatttcttcaaatatctctatttaattttgacactgaaataaccgtaaaggtttatttttctgttacctcaacaagaagaatttgaagacttcaaaatattgagcagaattcattcatacttaaaaatttattagccctgcattttcataggaagacacattatcttctggactatagctgttctaatggattataatcagaatggaagagagaaagcatattgactttttttgagcgacatctctgactttctttagtctttagctattactggatctcttaagacagcatgtgttaatcttaatgtatatcgttatcactgtgcagttgctgtttacttgaatagtattgtgttcctatattccaggtttaagtagatttcatgcctgggtggccaaacaacagtcttcattttttttaattgaaaagaagtagtgtctggatcagtaaaattatactgtgtgtgagtgtgaatataaatgtgtgtatgtgtgtttctgtcctgtaactgttacagtaatgtcataaagtgagaaaactgtgaccaagtataaacttttaccacttgctgcactcttgcacatggattcagtttctaaaattgagttcttcctgtaatcttgttgataaaaatactgactccaaccattcaaaaatttcaccccatccctccttaagagattggatcaagtattactaaattgacctttaggtattacacaagaccagtgcttagcaaaaaataatgacaggcatccaaggaagggatgtatttgtagtgttattgccaggaaaggagagtactttggtttctgagcaccgaatattgagcaatatgtcagtcactaaaaggaagacagttctacagaaaaacaatggtaacatttttcaatagcgtgtgtagatagtatgcactatatacatcacgttaaagtaggactatcacacccagcccatgtggctaaaaaagctgaatcagacagtggatgagacacacaacggcagtgaagaaccgatacacttggcattgacgtctagctatgctgtatctgtgctttgcccacatgcccttggtgacagctgagcacccagctctgtcttggtaggtttgggctaaggaacaaatctctcctttgctcgtggttagcaagatacactcaagcatgaagataaacacagctgctttcttcttacaccccggtctcatgctccttaatggcgccatgggtgcttgttgggcctttttccagtaaggaatgatattgctgaagaatctacttaaccctgacaaattttaattataatctcttcttatacagataaaacatgactcctacaaggccccaaggtttacatagtctgaagtgaagtacagagctggcatctatctggtgatttctagctctcgagatacccaagcagcctgatggggcagttccccttcttacggttcacgctctaaggcaggatgtggcttatgagatactttgcattgtctgtctgcacaccttgaatctgcctgctggctcccttactttacctctctgtcatgtgcagatgaaggctcagggtgctagaggattagtaagatctctttctaaagacaggagagattatttacaagaagaactcaccagggtttagtttgcatttaagaattgccagtcttttgtcctgcatcatcttgaacattaatccacatgtttcagagctcaccaggcagtaccaatgctcttttcacagctatgaagagctagagaaattcttgttatggtagaaaaatttcacgattcatttttgaaactgcatttgtgcgtatgcagtgtagattttatagtgtgttgtgctttcaagatctaaatcatatataataaattaagggacaatggggctgacagcactaaacttggtgcttattgatattctaagaaatatctgtgaaatatcatcacgtatgttatacaaccttcatttaaaaaggtttaaaactagttagattcactttgacacttttcatatcatttcttaacccaagtgacgaaaacattgtccccaatgaatatactcattagaattaccatttgttaatatcactcattaattaaccccataattagatccattaatttaaatgatttaaatttaagtaagttttataaggtctgacatcagaggtatcttactttcctctgaggatgatgtacttgccctgaccatgcattttaccatcacacatgttcagaaagggccaaattcccaacctgctcattttttttttatcagagtcatgatgaatcagtcctagaatgtttcatttgcacaagtagggctgcctccaagaggaacctctgatttattttgtatgaaatatatgtgaaaggatatgaatctgagagatgctgtagacatctgtcctacacttgagatgatttccaagcctctctggcactttgagttaagtctatctggtattaaatgccaaggaccttttgctgcctaaatccactctgcaggaaataggcccaaccaccagatgagaattaggccctggatgagtagcgctatagttactgtcctgttgattaatttctgccatttcatgtccataaaagagaccacccatatcatgcacacaattagatttctcacactctaactgtatatttgtatgatattttaaaatctcctaaatgctgggcaatggctattaacaattaattgtcttgcactggccttctgatgaaatgttaacaatgcctattgtaatatagaaaaaaacattctatctactgatttgggctgaatgtatgtaaataggtttctaaaaagtcagatgtttgagcagtggcctacaaatcagtaattttcggatgggagagtttctttacattgccgtggcatcttaaaagctatcttcatgtaaattgactgtactaggcctactggggatcagagttcccaagaaaggaaaccttttcttgtatctggattcaaatttatttccaatgtttcaagcgggaaacatgactctttattgtctgtaaatctaacattattacttttcctcttagaagaatattgtattgttagatgtttgttgagctggtaacatcgttgcaaccactgcaatatcttcgttagtaatctgtataatactttgtatacaagtactggtaagattgttattaaatgtagcttcagtcattaaattactatagcaaagtagtacttcttctgtaatatttacaatgtattaagcccacagtatattttatttcaatgtaattaaactgttaacttattcaaagagaaaacatctcatcatgtctattgtccaaagttacctggaatcaaataaaaattctagattaccatgaagaacataaaa

SEQ ID NO: 4477 - DNA, 1550 bp, Homo sapiens
  source 1..1550: mol_type = unassigned DNA
cagttgcataaagaacatagatgagagctttcattccctgctgaaaaggatgccatgcctccaccagtgattgccccctgtgggtcactttctcagtcattttgagctcagcctaatcaaagactgaggttatgaagtcgatcctagatggccttgcagataccaccttccgcaccatcaccactgacctcctgtacgtgggctcaaatgacattcagtacgaagacatcaaaggtgacatggcatccaaattagggtacttcccacagaaattccctttaacttcctttaggggaagtcccttccaagagaagatgactgcgggagacaacccccagctagtcccagcagaccaggtgaacattacagaattttacaacaagtctctctcgtccttcaaggagaatgaggagaacatccagtgtggggagaacttcatggacatagagtgtttcatggtcctgaaccccagccagcagctggccattgcagtcctgtccctcacgctgggcaccttcacggtcctggagaacctcctggtgctgtgcgtcatcctccactcccgcagcctccgctgcaggccttcctaccacttcatcggcagcctggcggtggcagacctcctggggagtgtcatttttgtctacagcttcattgacttccacgtgttccaccgcaaagatagccgcaacgtgtttctgttcaaactgggtggggtcacggcctccttcactgcctccgtgggcagcctgttcctcacagccatcgacaggtacatatccattcacaggcccctggcctataagaggattgtcaccaggcccaaggccgtggtggcgttttgcctgatgtggaccatagccattgtgatcgccgtgctgcctctcctgggctggaactgcgagaaactgcaatctgtttgctcagacattttcccacacattgatgaaacctacctgatgttctggatcggggtcaccagcgtactgcttctgttcatcgtgtatgcgtacatgtatattctctggaaggctcacagccacgccgtccgcatgattcagcgtggcacccagaagagcatcatcatccacacgtctgaggatgggaaggtacaggtgacccggccagaccaagcccgcatggacattaggttagccaagaccctggtcctgatcctggtggtgttgatcatctgctggggccctctgcttgcaatcatggtgtatgatgtctttgggaagatgaacaagctcattaagacggtgtttgcattctgcagtatgctctgcctgctgaactccaccgtgaaccccatcatctatgctctgaggagtaaggacctgcgacacgctttccggagcatgtttccctcttgtgaaggcactgcgcagcctctggataacagcatgggggactcggactgcctgcacaaacacgcaaacaatgcagccagtgttcacagggccgcagaaagctgcatcaagagcacggtcaagattgccaaggtaaccatgtctgtgtccacagacacgtctgccgaggctctgtga

SEQ ID NO: 4478 - DNA, 1320 bp, Homo sapiens
  source 1..1320: mol_type = unassigned DNA
atgaagtcgatcctagatggccttgcagataccaccttccgcaccatcaccactgacctcctgggaagtcccttccaagagaagatgactgcgggagacaacccccagctagtcccagcagaccaggtgaacattacagaattttacaacaagtctctctcgtccttcaaggagaatgaggagaacatccagtgtggggagaacttcatggacatagagtgtttcatggtcctgaaccccagccagcagctggccattgcagtcctgtccctcacgctgggcaccttcacggtcctggagaacctcctggtgctgtgcgtcatcctccactcccgcagcctccgctgcaggccttcctaccacttcatcggcagcctggcggtggcagacctcctggggagtgtcatttttgtctacagcttcattgacttccacgtgttccaccgcaaagatagccgcaacgtgtttctgttcaaactgggtggggtcacggcctccttcactgcctccgtgggcagcctgttcctcacagccatcgacaggtacatatccattcacaggcccctggcctataagaggattgtcaccaggcccaaggccgtggtggcgttttgcctgatgtggaccatagccattgtgatcgccgtgctgcctctcctgggctggaactgcgagaaactgcaatctgtttgctcagacattttcccacacattgatgaaacctacctgatgttctggatcggggtcaccagcgtactgcttctgttcatcgtgtatgcgtacatgtatattctctggaaggctcacagccacgccgtccgcatgattcagcgtggcacccagaagagcatcatcatccacacgtctgaggatgggaaggtacaggtgacccggccagaccaagcccgcatggacattaggttagccaagaccctggtcctgatcctggtggtgttgatcatctgctggggccctctgcttgcaatcatggtgtatgatgtctttgggaagatgaacaagctcattaagacggtgtttgcattctgcagtatgctctgcctgctgaactccaccgtgaaccccatcatctatgctctgaggagtaaggacctgcgacacgctttccggagcatgtttccctcttgtgaaggcactgcgcagcctctggataacagcatgggggactcggactgcctgcacaaacacgcaaacaatgcagccagtgttcacagggccgcagaaagctgcatcaagagcacggtcaagattgccaaggtaaccatgtctgtgtccacagacacgtctgccgaggctctgtga

SEQ ID NO: 4479 - DNA, 5776 bp, Homo sapiens
  source 1..5776: mol_type = unassigned DNA
gcgccggcgccgcctcccgcacgctactccctctgccaccccttccttctccacttcttttccgcctccgcctcttcttgtctcccgcggcgccagcgccttcccttggcccgggcgggggcctcggctccctgcagagctctccgtagtcagtgggggatatttcgttctagcggacaaccagcccctgagctgggcgagaggtgccaagggagcttctgtcccgaggaccaggggatgcgaagggtaagacctggcagagttgcgtttggaaatactttttccgcctcccgccccctcgggattgccccctgtgggtcactttctcagtcattttgagctcagcctaatcaaagactgaggttatgaagtcgatcctagatggccttgcagataccaccttccgcaccatcaccactgacctcctgtacgtgggctcaaatgacattcagtacgaagacatcaaaggtgacatggcatccaaattagggtacttcccacagaaattccctttaacttcctttaggggaagtcccttccaagagaagatgactgcgggagacaacccccagctagtcccagcagaccaggtgaacattacagaattttacaacaagtctctctcgtccttcaaggagaatgaggagaacatccagtgtggggagaacttcatggacatagagtgtttcatggtcctgaaccccagccagcagctggccattgcagtcctgtccctcacgctgggcaccttcacggtcctggagaacctcctggtgctgtgcgtcatcctccactcccgcagcctccgctgcaggccttcctaccacttcatcggcagcctggcggtggcagacctcctggggagtgtcatttttgtctacagcttcattgacttccacgtgttccaccgcaaagatagccgcaacgtgtttctgttcaaactgggtggggtcacggcctccttcactgcctccgtgggcagcctgttcctcacagccatcgacaggtacatatccattcacaggcccctggcctataagaggattgtcaccaggcccaaggccgtggtggcgttttgcctgatgtggaccatagccattgtgatcgccgtgctgcctctcctgggctggaactgcgagaaactgcaatctgtttgctcagacattttcccacacattgatgaaacctacctgatgttctggatcggggtcaccagcgtactgcttctgttcatcgtgtatgcgtacatgtatattctctggaaggctcacagccacgccgtccgcatgattcagcgtggcacccagaagagcatcatcatccacacgtctgaggatgggaaggtacaggtgacccggccagaccaagcccgcatggacattaggttagccaagaccctggtcctgatcctggtggtgttgatcatctgctggggccctctgcttgcaatcatggtgtatgatgtctttgggaagatgaacaagctcattaagacggtgtttgcattctgcagtatgctctgcctgctgaactccaccgtgaaccccatcatctatgctctgaggagtaaggacctgcgacacgctttccggagcatgtttccctcttgtgaaggcactgcgcagcctctggataacagcatgggggactcggactgcctgcacaaacacgcaaacaatgcagccagtgttcacagggccgcagaaagctgcatcaagagcacggtcaagattgccaaggtaaccatgtctgtgtccacagacacgtctgccgaggctctgtgagcctgatgcctccctggcagcacaggaaaagaatttttttttttaagctcaaaatctagaagagtctattgtctccttggttatatttttttaactttaccatgctcaatgaaaaggtgattgtcaccatgatcacttatcagtttgctaatgtttccatagtttaggtactcaaactccattctccaggggtttacagtgaagaaagcctgttgtttaagtgactgaacgatccttcaaagtctcaatgaaataggagggaaacctttggctacacaattggaagtctaagaacccatggaaaaatgccatcaaatgaataatgcctttgtaaccacaactttcactataatgtgaaatgtaactgtccgtagtatcagagatgtccatttttacaagttatagtactagagatattttgtaaaatgtattatgtcctgtgagatgtgtatcagtgtttatgtgctattaatatttgtttagttcagcaaaactgaaaggtagacttttatgagaacaatggacaagcagtggatacgtgtcaatgtgtgcactttttttctatattattgcccatgatataactttagaaataaaccttaatatttcttcaaatatctctatttaattttgacactgaaataaccgtaaaggtttatttttctgttacctcaacaagaagaatttgaagacttcaaaatattgagcagaattcattcatacttaaaaatttattagccctgcattttcataggaagacacattatcttctggactatagctgttctaatggattataatcagaatggaagagagaaagcatattgactttttttgagcgacatctctgactttctttagtctttagctattactggatctcttaagacagcatgtgttaatcttaatgtatatcgttatcactgtgcagttgctgtttacttgaatagtattgtgttcctatattccaggtttaagtagatttcatgcctgggtggccaaacaacagtcttcattttttttaattgaaaagaagtagtgtctggatcagtaaaattatactgtgtgtgagtgtgaatataaatgtgtgtatgtgtgtttctgtcctgtaactgttacagtaatgtcataaagtgagaaaactgtgaccaagtataaacttttaccacttgctgcactcttgcacatggattcagtttctaaaattgagttcttcctgtaatcttgttgataaaaatactgactccaaccattcaaaaatttcaccccatccctccttaagagattggatcaagtattactaaattgacctttaggtattacacaagaccagtgcttagcaaaaaataatgacaggcatccaaggaagggatgtatttgtagtgttattgccaggaaaggagagtactttggtttctgagcaccgaatattgagcaatatgtcagtcactaaaaggaagacagttctacagaaaaacaatggtaacatttttcaatagcgtgtgtagatagtatgcactatatacatcacgttaaagtaggactatcacacccagcccatgtggctaaaaaagctgaatcagacagtggatgagacacacaacggcagtgaagaaccgatacacttggcattgacgtctagctatgctgtatctgtgctttgcccacatgcccttggtgacagctgagcacccagctctgtcttggtaggtttgggctaaggaacaaatctctcctttgctcgtggttagcaagatacactcaagcatgaagataaacacagctgctttcttcttacaccccggtctcatgctccttaatggcgccatgggtgcttgttgggcctttttccagtaaggaatgatattgctgaagaatctacttaaccctgacaaattttaattataatctcttcttatacagataaaacatgactcctacaaggccccaaggtttacatagtctgaagtgaagtacagagctggcatctatctggtgatttctagctctcgagatacccaagcagcctgatggggcagttccccttcttacggttcacgctctaaggcaggatgtggcttatgagatactttgcattgtctgtctgcacaccttgaatctgcctgctggctcccttactttacctctctgtcatgtgcagatgaaggctcagggtgctagaggattagtaagatctctttctaaagacaggagagattatttacaagaagaactcaccagggtttagtttgcatttaagaattgccagtcttttgtcctgcatcatcttgaacattaatccacatgtttcagagctcaccaggcagtaccaatgctcttttcacagctatgaagagctagagaaattcttgttatggtagaaaaatttcacgattcatttttgaaactgcatttgtgcgtatgcagtgtagattttatagtgtgttgtgctttcaagatctaaatcatatataataaattaagggacaatggggctgacagcactaaacttggtgcttattgatattctaagaaatatctgtgaaatatcatcacgtatgttatacaaccttcatttaaaaaggtttaaaactagttagattcactttgacacttttcatatcatttcttaacccaagtgacgaaaacattgtccccaatgaatatactcattagaattaccatttgttaatatcactcattaattaaccccataattagatccattaatttaaatgatttaaatttaagtaagttttataaggtctgacatcagaggtatcttactttcctctgaggatgatgtacttgccctgaccatgcattttaccatcacacatgttcagaaagggccaaattcccaacctgctcattttttttttatcagagtcatgatgaatcagtcctagaatgtttcatttgcacaagtagggctgcctccaagaggaacctctgatttattttgtatgaaatatatgtgaaaggatatgaatctgagagatgctgtagacatctgtcctacacttgagatgatttccaagcctctctggcactttgagttaagtctatctggtattaaatgccaaggaccttttgctgcctaaatccactctgcaggaaataggcccaaccaccagatgagaattaggccctggatgagtagcgctatagttactgtcctgttgattaatttctgccatttcatgtccataaaagagaccacccatatcatgcacacaattagatttctcacactctaactgtatatttgtatgatattttaaaatctcctaaatgctgggcaatggctattaacaattaattgtcttgcactggccttctgatgaaatgttaacaatgcctattgtaatatagaaaaaaacattctatctactgatttgggctgaatgtatgtaaataggtttctaaaaagtcagatgtttgagcagtggcctacaaatcagtaattttcggatgggagagtttctttacattgccgtggcatcttaaaagctatcttcatgtaaattgactgtactaggcctactggggatcagagttcccaagaaaggaaaccttttcttgtatctggattcaaatttatttccaatgtttcaagcgggaaacatgactctttattgtctgtaaatctaacattattacttttcctcttagaagaatattgtattgttagatgtttgttgagctggtaacatcgttgcaaccactgcaatatcttcgttagtaatctgtataatactttgtatacaagtactggtaagattgttattaaatgtagcttcagtcattaaattactatagcaaagtagtacttcttctgtaatatttacaatgtattaagcccacagtatattttatttcaatgtaattaaactgttaacttattcaaagagaaaacatctcatcatgtctattgtccaaagttacctggaatcaaataaaaattctagattaccatgaagaacataaaa

SEQ ID NO: 4480 - DNA, 8974 bp, Homo sapiens
  source 1..8974: mol_type = unassigned DNA
accctctgtgcctttcttctgaaaatggggataatagcacctacttcatagggccattgtgaaataaaggaattgatatatatgtaataggctcagtgtcaccagtccataagaagctctctctatatgcttaaaagaggaaaatcagcaagacttagtggtctacctgattgtagaggtcaagaaagaggaggtgtcatagtaagtccaagttaggaacttaggtgactagaaagactactcacaatgccataagaaatgtgaaaaagttctcaggagtcaactcttgctccttgcaaacttatgtttgctaaacaactccatttacatatgaaagttttcatccataatcaaagggacacagaagacagtcacaatatatgagagagctgttccttacatggtcctggcacatccacaaacctagcttttgcctttcaactcccacccatacttaaacaccaggcttactggtcctgagtgacttgctgagtgacctgtggttggattcaatttattgcagcatcatttctaatagcaaaagatgataacctaaacctccatcagtaggaggctggtcacattcatctaacagatccttaaggcagctgaatgaagagagaggttttatatacgaatatggaactgttcacaatgtgtacttctaagaagaaaagaaaggtatgtataataatgttaattactgtttgctaaaaagaaaacaaagagggggtaaatacatatatttgtttgaatatgcatggagtatctctggaaggggtaacaagaaacttactccttgcctttgagaaaaaaaactaggtggctgggatatagggatgagagagattgacttttctctgtatgtctttctgtaccttttgaatcttaaatcttgtgaatctaatacataaagataatcaaaatttctgataaactagtttccagttggaaagtgtaaagggggagttagttaattgagggaagatggcataaggaatgggaagatgactggaatggctcacaggagctacttggagatggaggctcaaactctggttttcaggctaaatgtctattgcataaattattttttctgtcctctaattttaagaaaaaggcaaatgcaaatcactgttttaaggtaccacctaataaaaattcaactgccattttattaggttcaggtgaacatttctgtgggaactcagctgtctgctctcctgctatcatgctatcaggctggtaaaccacttaagaaaaaaagatgcctctgtgtttggagatctcattctagttatggaaataaatatgtgaactcctgattatacgacgtgatgaggcctgtaatagagggatgtgctggggaactagttatacctagtgggaggggctggtcaggaaggtctcagacatggaagtagcattggcacagacctggaaagataagtttagtaggcagagagcttctatccagataaaagaagggacaaggtgaaggaggaaggtgtgcaggtatgacggtgtattcaaagagcagcaagtcactcagggccagtaagcctggtgtttaagtatgagtgggagtcgaaaggcaaaagttaggtttgtggatgtgcaaggaccatgtaaggaacagctctcacacattgtggctgtcttctgtgtccctttgattatggatgaaaactttccatatgtaaatggagttgttaagcaaacataagtttgcaaggagcaagagttgactcctgagaaatagccgaatgtgggacatatagagcatgttctagaagaggtgaggatatgagaaaagatatgacagacagacagatgaacagggaacctaaggatactaaggatactcgagagttaacattggagccaggctgagggtaggaactcaggagatattttagataaaggagcccagaagcactgggcaactggcttggctgttggtctttggtcttttatttctgcatcctttatttctatagccactagcctttgcccctgagacactgccttgacttgattggcgttagcagactgtaccagcacactgggtgcctctgtgtggcttgtaccttagagctcctgcctctggtccagtaggtgatggctcccatctgctttattctatgacagttgcaggaaaggtgtgcagaactggttcagaagcccagactaaaaaaaaccctcaattttcttagtgatgatagaagttacccatgggagattcggggccctcagtttggcagtgcctcctactgccatcacaggctacagtgatcttgtaaaagggttacacaaccatggaggagctaagggagccttctggcttacctgtcacattagtgctgagggctctttctctgttcaccatttggtatggcattgccaatattcttgtttgcctctctgtagccaaagttgcttattgcatatagctcattccatgagagtttagactagataattatataggcagcttcatttaaaatgctaataaccttacctaaatagagcatatttctagcacaattggattgggcagctctccaggctagatcccttgattcaagttacatgatcattttttttttttaatcagcattgggagaatccttccccttctttgggtagaaaagagcttcttgtttttgttctattttgaaatacgtatatccaatcaaccagcttatttggagccttcttctgtgtgttaggcattctactaaatgctgagtagatactaagataaagtccccagtaagatcttcagtgaacttactgtctagtgggtgggaggaagtagtggaacagatgcaaacacaaagaagtattagaaaatctggtcagtaccatgatagaactctgtttgggtattctgggagcccagaaagggtgttcatcgccatgggaagcagggagctatggcaagaagtgacatcaaagtgatggggaggagttgaccaggcgggagtgtaaggggcaatgggagcaacagcactgaggtgaggagcagtcaatttgctgtgtttatggaactaaaattcatctggtgtagcccaagtggcaaggccagggctggcaagaagaagattggagaggtgggcgggagctagatcacaggaaactttttactggacttcatcctgcaggtgggagatagaaagccatcctgtttagggagacaggttgtggagagtattaaggacaagagcctgagggtcagaattggaaaggagctcagctggatggaaacatagaaggcagacgagagttgcatacatgtctggagggcctgggcctgaaaaggaaactgcgtgaaagtttatatttggtttttagggcaaagagattgaaagaggggagtcacataatcagcatacgtttatgaagattacccccacagctgtgtggcaagtgatcaaaaaggaacaggaccagagaagagcaggaaaactggtcagaaagcaggcgccctaaccctggattgccccctgtgggtcactttctcagtcattttgagctcagcctaatcaaagactgaggttatgaagtcgatcctagatggccttgcagataccaccttccgcaccatcaccactgacctcctgtacgtgggctcaaatgacattcagtacgaagacatcaaaggtgacatggcatccaaattagggtacttcccacagaaattccctttaacttcctttaggggaagtcccttccaagagaagatgactgcgggagacaacccccagctagtcccagcagaccaggtgaacattacagaattttacaacaagtctctctcgtccttcaaggagaatgaggagaacatccagtgtggggagaacttcatggacatagagtgtttcatggtcctgaaccccagccagcagctggccattgcagtcctgtccctcacgctgggcaccttcacggtcctggagaacctcctggtgctgtgcgtcatcctccactcccgcagcctccgctgcaggccttcctaccacttcatcggcagcctggcggtggcagacctcctggggagtgtcatttttgtctacagcttcattgacttccacgtgttccaccgcaaagatagccgcaacgtgtttctgttcaaactgggtggggtcacggcctccttcactgcctccgtgggcagcctgttcctcacagccatcgacaggtacatatccattcacaggcccctggcctataagaggattgtcaccaggcccaaggccgtggtggcgttttgcctgatgtggaccatagccattgtgatcgccgtgctgcctctcctgggctggaactgcgagaaactgcaatctgtttgctcagacattttcccacacattgatgaaacctacctgatgttctggatcggggtcaccagcgtactgcttctgttcatcgtgtatgcgtacatgtatattctctggaaggctcacagccacgccgtccgcatgattcagcgtggcacccagaagagcatcatcatccacacgtctgaggatgggaaggtacaggtgacccggccagaccaagcccgcatggacattaggttagccaagaccctggtcctgatcctggtggtgttgatcatctgctggggccctctgcttgcaatcatggtgtatgatgtctttgggaagatgaacaagctcattaagacggtgtttgcattctgcagtatgctctgcctgctgaactccaccgtgaaccccatcatctatgctctgaggagtaaggacctgcgacacgctttccggagcatgtttccctcttgtgaaggcactgcgcagcctctggataacagcatgggggactcggactgcctgcacaaacacgcaaacaatgcagccagtgttcacagggccgcagaaagctgcatcaagagcacggtcaagattgccaaggtaaccatgtctgtgtccacagacacgtctgccgaggctctgtgagcctgatgcctccctggcagcacaggaaaagaatttttttttttaagctcaaaatctagaagagtctattgtctccttggttatatttttttaactttaccatgctcaatgaaaaggtgattgtcaccatgatcacttatcagtttgctaatgtttccatagtttaggtactcaaactccattctccaggggtttacagtgaagaaagcctgttgtttaagtgactgaacgatccttcaaagtctcaatgaaataggagggaaacctttggctacacaattggaagtctaagaacccatggaaaaatgccatcaaatgaataatgcctttgtaaccacaactttcactataatgtgaaatgtaactgtccgtagtatcagagatgtccatttttacaagttatagtactagagatattttgtaaaatgtattatgtcctgtgagatgtgtatcagtgtttatgtgctattaatatttgtttagttcagcaaaactgaaaggtagacttttatgagaacaatggacaagcagtggatacgtgtcaatgtgtgcactttttttctatattattgcccatgatataactttagaaataaaccttaatatttcttcaaatatctctatttaattttgacactgaaataaccgtaaaggtttatttttctgttacctcaacaagaagaatttgaagacttcaaaatattgagcagaattcattcatacttaaaaatttattagccctgcattttcataggaagacacattatcttctggactatagctgttctaatggattataatcagaatggaagagagaaagcatattgactttttttgagcgacatctctgactttctttagtctttagctattactggatctcttaagacagcatgtgttaatcttaatgtatatcgttatcactgtgcagttgctgtttacttgaatagtattgtgttcctatattccaggtttaagtagatttcatgcctgggtggccaaacaacagtcttcattttttttaattgaaaagaagtagtgtctggatcagtaaaattatactgtgtgtgagtgtgaatataaatgtgtgtatgtgtgtttctgtcctgtaactgttacagtaatgtcataaagtgagaaaactgtgaccaagtataaacttttaccacttgctgcactcttgcacatggattcagtttctaaaattgagttcttcctgtaatcttgttgataaaaatactgactccaaccattcaaaaatttcaccccatccctccttaagagattggatcaagtattactaaattgacctttaggtattacacaagaccagtgcttagcaaaaaataatgacaggcatccaaggaagggatgtatttgtagtgttattgccaggaaaggagagtactttggtttctgagcaccgaatattgagcaatatgtcagtcactaaaaggaagacagttctacagaaaaacaatggtaacatttttcaatagcgtgtgtagatagtatgcactatatacatcacgttaaagtaggactatcacacccagcccatgtggctaaaaaagctgaatcagacagtggatgagacacacaacggcagtgaagaaccgatacacttggcattgacgtctagctatgctgtatctgtgctttgcccacatgcccttggtgacagctgagcacccagctctgtcttggtaggtttgggctaaggaacaaatctctcctttgctcgtggttagcaagatacactcaagcatgaagataaacacagctgctttcttcttacaccccggtctcatgctccttaatggcgccatgggtgcttgttgggcctttttccagtaaggaatgatattgctgaagaatctacttaaccctgacaaattttaattataatctcttcttatacagataaaacatgactcctacaaggccccaaggtttacatagtctgaagtgaagtacagagctggcatctatctggtgatttctagctctcgagatacccaagcagcctgatggggcagttccccttcttacggttcacgctctaaggcaggatgtggcttatgagatactttgcattgtctgtctgcacaccttgaatctgcctgctggctcccttactttacctctctgtcatgtgcagatgaaggctcagggtgctagaggattagtaagatctctttctaaagacaggagagattatttacaagaagaactcaccagggtttagtttgcatttaagaattgccagtcttttgtcctgcatcatcttgaacattaatccacatgtttcagagctcaccaggcagtaccaatgctcttttcacagctatgaagagctagagaaattcttgttatggtagaaaaatttcacgattcatttttgaaactgcatttgtgcgtatgcagtgtagattttatagtgtgttgtgctttcaagatctaaatcatatataataaattaagggacaatggggctgacagcactaaacttggtgcttattgatattctaagaaatatctgtgaaatatcatcacgtatgttatacaaccttcatttaaaaaggtttaaaactagttagattcactttgacacttttcatatcatttcttaacccaagtgacgaaaacattgtccccaatgaatatactcattagaattaccatttgttaatatcactcattaattaaccccataattagatccattaatttaaatgatttaaatttaagtaagttttataaggtctgacatcagaggtatcttactttcctctgaggatgatgtacttgccctgaccatgcattttaccatcacacatgttcagaaagggccaaattcccaacctgctcattttttttttatcagagtcatgatgaatcagtcctagaatgtttcatttgcacaagtagggctgcctccaagaggaacctctgatttattttgtatgaaatatatgtgaaaggatatgaatctgagagatgctgtagacatctgtcctacacttgagatgatttccaagcctctctggcactttgagttaagtctatctggtattaaatgccaaggaccttttgctgcctaaatccactctgcaggaaataggcccaaccaccagatgagaattaggccctggatgagtagcgctatagttactgtcctgttgattaatttctgccatttcatgtccataaaagagaccacccatatcatgcacacaattagatttctcacactctaactgtatatttgtatgatattttaaaatctcctaaatgctgggcaatggctattaacaattaattgtcttgcactggccttctgatgaaatgttaacaatgcctattgtaatatagaaaaaaacattctatctactgatttgggctgaatgtatgtaaataggtttctaaaaagtcagatgtttgagcagtggcctacaaatcagtaattttcggatgggagagtttctttacattgccgtggcatcttaaaagctatcttcatgtaaattgactgtactaggcctactggggatcagagttcccaagaaaggaaaccttttcttgtatctggattcaaatttatttccaatgtttcaagcgggaaacatgactctttattgtctgtaaatctaacattattacttttcctcttagaagaatattgtattgttagatgtttgttgagctggtaacatcgttgcaaccactgcaatatcttcgttagtaatctgtataatactttgtatacaagtactggtaagattgttattaaatgtagcttcagtcattaaattactatagcaaagtagtacttcttctgtaatatttacaatgtattaagcccacagtatattttatttcaatgtaattaaactgttaacttattcaaagagaaaacatctcatcatgtctattgtccaaagttacctggaatcaaataaaaattctagattaccatgaagaacataaaa

SEQ ID NO: 4481 - DNA, 1236 bp, Homo sapiens
  source 1..1236: mol_type = unassigned DNA
atggccttgcagataccaccttccgcaccatcaccactgacctcctgtacgtgggctcaaatgacattcagtacgaagacatcaaaggagaatgaggagaacatccagtgtggggagaacttcatggacatagagtgtttcatggtcctgaaccccagccagcagctggccattgcagtcctgtccctcacgctgggcaccttcacggtcctggagaacctcctggtgctgtgcgtcatcctccactcccgcagcctccgctgcaggccttcctaccacttcatcggcagcctggcggtggcagacctcctggggagtgtcatttttgtctacagcttcattgacttccacgtgttccaccgcaaagatagccgcaacgtgtttctgttcaaactgggtggggtcacggcctccttcactgcctccgtgggcagcctgttcctcacagccatcgacaggtacatatccattcacaggcccctggcctataagaggattgtcaccaggcccaaggccgtggtggcgttttgcctgatgtggaccatagccattgtgatcgccgtgctgcctctcctgggctggaactgcgagaaactgcaatctgtttgctcagacattttcccacacattgatgaaacctacctgatgttctggatcggggtcaccagcgtactgcttctgttcatcgtgtatgcgtacatgtatattctctggaaggctcacagccacgccgtccgcatgattcagcgtggcacccagaagagcatcatcatccacacgtctgaggatgggaaggtacaggtgacccggccagaccaagcccgcatggacattaggttagccaagaccctggtcctgatcctggtggtgttgatcatctgctggggccctctgcttgcaatcatggtgtatgatgtctttgggaagatgaacaagctcattaagacggtgtttgcattctgcagtatgctctgcctgctgaactccaccgtgaaccccatcatctatgctctgaggagtaaggacctgcgacacgctttccggagcatgtttccctcttgtgaaggcactgcgcagcctctggataacagcatgggggactcggactgcctgcacaaacacgcaaacaatgcagccagtgttcacagggccgcagaaagctgcatcaagagcacggtcaagattgccaaggtaaccatgtctgtgtccacagacacgtctgccgaggctctgtga

SEQ ID NO: 4482 - DNA, 2122 bp, Homo sapiens
  source 1..2122: mol_type = unassigned DNA
tcggcttatttgttttccctcctcttaggattgccccctgtgggtcactttctcagtcattttgagctcagcctaatcaaagactgaggttatgaagtcgatcctagatggccttgcagataccaccttccgcaccatcaccactgacctcctgtacgtgggctcaaatgacattcagtacgaagacatcaaaggtgacatggcatccaaattagggtacttcccacagaaattccctttaacttcctttaggggaagtcccttccaagagaagatgactgcgggagacaacccccagctagtcccagcagaccaggtgaacattacagaattttacaacaagtctctctcgtccttcaaggagaatgaggagaacatccagtgtggggagaacttcatggacatagagtgtttcatggtcctgaaccccagccagcagctggccattgcagtcctgtccctcacgctgggcaccttcacggtcctggagaacctcctggtgctgtgcgtcatcctccactcccgcagcctccgctgcaggccttcctaccacttcatcggcagcctggcggtggcagacctcctggggagtgtcatttttgtctacagcttcattgacttccacgtgttccaccgcaaagatagccgcaacgtgtttctgttcaaactgggtggggtcacggcctccttcactgcctccgtgggcagcctgttcctcacagccatcgacaggtacatatccattcacaggcccctggcctataagaggattgtcaccaggcccaaggccgtggtggcgttttgcctgatgtggaccatagccattgtgatcgccgtgctgcctctcctgggctggaactgcgagaaactgcaatctgtttgctcagacattttcccacacattgatgaaacctacctgatgttctggatcggggtcaccagcgtactgcttctgttcatcgtgtatgcgtacatgtatattctctggaaggctcacagccacgccgtccgcatgattcagcgtggcacccagaagagcatcatcatccacacgtctgaggatgggaaggtacaggtgacccggccagaccaagcccgcatggacattaggttagccaagaccctggtcctgatcctggtggtgttgatcatctgctggggccctctgcttgcaatcatggtgtatgatgtctttgggaagatgaacaagctcattaagacggtgtttgcattctgcagtatgctctgcctgctgaactccaccgtgaaccccatcatctatgctctgaggagtaaggacctgcgacacgctttccggagcatgtttccctcttgtgaaggcactgcgcagcctctggataacagcatgggggactcggactgcctgcacaaacacgcaaacaatgcagccagtgttcacagggccgcagaaagctgcatcaagagcacggtcaagattgccaaggtaaccatgtctgtgtccacagacacgtctgccgaggctctgtgagcctgatgcctccctggcagcacaggaaaagaatttttttttttaagctcaaaatctagaagagtctattgtctccttggttatatttttttaactttaccatgctcaatgaaaaggtgattgtcaccatgatcacttatcagtttgctaatgtttccatagtttaggtactcaaactccattctccaggggtttacagtgaagaaagcctgttgtttaagtgactgaacgatccttcaaagtctcaatgaaataggagggaaacctttggctacacaattggaagtctaagaacccatggaaaaatgccatcaaatgaataatgcctttgtaaccacaactttcactataatgtgaaatgtaactgtccgtagtatcagagatgtccatttttacaagttatagtactagagatattttgtaaaatgtattatgtcctgtgagatgtgtatcagtgtttatgtgctattaatatttgtttagttcagcaaaactgaaaggtagacttttatgagaacaatggacaagcagtggatacgtgtcaatgtgtgcactttttttctatattattgcccatgatataactttagaaataaaccttaatatttcttc

SEQ ID NO: 4483 - DNA, 591 bp, Homo sapiens
  source 1..591: mol_type = unassigned DNA
gcagagctctccgtagtcagtgggggatatttcgttctagcggacaaccagcccctgagctgggcgagaggtgccaagggagcttctgtcccgaggaccaggggatgcgaaggatgtctcccactccaggcgaggagcgctcttggctgagggcaaagagattgaaagaggggagtcacataatcagcatacgtttatgaagattacccccacagctgtgtggcaagtgatcaaaaaggaacaggaccagagaagagcaggaaaactggtcagaaagcaggcgccctaaccctggattgccccctgtgggtcactttctcagtcattttgagctcagcctaatcaaagactgaggttatgaagtcgatcctagatggccttgcagataccaccttccgcaccatcaccactgacctcctgtacgtgggctcaaatgacattcagtacgaagacatcaaaggtgacatggcatccaaattagggtacttcccacagaaattccctttaacttcctttaggggaagtcccttccaagagaagatgactgcgggagacaacccccagctagtcccagcagaccaggtgaacatt

SEQ ID NO: 4484 - DNA, 5254 bp, Homo sapiens
  source 1..5254: mol_type = unassigned DNA
ggcactcaacaggtgctctgagtggcacccacggccaggtcctgggagaggacagaaaacaactgggactcctcagcccccggcagctcccagtgcccagccacccacaacacaacccaaagccttctagacaagctcagtggaatctgaagggcccaccccatggaggaatgctgggtgacagagatagccaatggctccaaggatggcttggattccaaccctatgaaggattacatgatcctgagtggtccccagaagacagctgttgctgtgttgtgcactcttctgggcctgctaagtgccctggagaacgtggctgtgctctatctgatcctgtcctcccaccaactccgccggaagccctcatacctgttcattggcagcttggctggggctgacttcctggccagtgtggtctttgcatgcagctttgtgaatttccatgttttccatggtgtggattccaaggctgtcttcctgctgaagattggcagcgtgactatgaccttcacagcctctgtgggtagcctcctgctgaccgccattgaccgatacctctgcctgcgctatccaccttcctacaaagctctgctcacccgtggaagggcactggtgaccctgggcatcatgtgggtcctctcagcactagtctcctacctgcccctcatgggatggacttgctgtcccaggccctgctctgagcttttcccactgatccccaatgactacctgctgagctggctcctgttcatcgccttcctcttttccggaatcatctacacctatgggcatgttctctggaaggcccatcagcatgtggccagcttgtctggccaccaggacaggcaggtgccaggaatggcccgaatgaggctggatgtgaggttggccaagaccctagggctagtgttggctgtgctcctcatctgttggttcccagtgctggccctcatggcccacagcctggccactacgctcagtgaccaggtcaagaaggcctttgctttctgctccatgctgtgcctcatcaactccatggtcaaccctgtcatctatgctctacggagtggagagatccgctcctctgcccatcactgcctggctcactggaagaagtgtgtgaggggccttgggtcagaggcaaaagaagaagccccgagatcctcagtcaccgagacagaggctgatgggaaaatcactccgtggccagattccagagatctagacctctctgattgctgatgaggcctcttcccaatttaaacaactcaagtcagaaatcagttcactccctggaagagagagaggggtcttggcactctcttcttacttaaaccagtcccagacacctagacacggacccctttttgctgatgagtgttgggactgactcctggaagacagcctggccttgcccacctgcacacagtctgttggataggtagggccacgaggagtagccaggtaggcgagacacaaaaggcctgggacagggtcagtacaagtcaggtcaggcttcatgcctgcatcctccagagaccacaggagccaaagcgagcctccaggcccagcaatgagggacttgggagaaatctgagaagaatgggttgttctcttgggaagtcagggtatcagatgggatggacatccaggtcttctctctgcctaattgtcaaggcctccttggctctggagctatgaaaggccccactttcaagtcacccttgccactgaggaccgaggactatgctatgatgaggattaaggtgttgacttgcctctttcagagataaatgacaagccttcagtttggggcatcctgttgtttgggcgaggaccctctctgatattctgataatccccacctgtaacctcaggtccctggaaatacagaggaggctgggatcgcctgagacacaaaaatctttggagaattttcttgaccctctgaagtccttccagcagcagtcctggtggtgctgctggaagcaggcaatgtcctagtctaacctaactcgaagaaaaaaaggaagatattcacaaagattgtataaatctccaaactgttcccctatctgcccccaattcagctcccttgcctcctccacacccctattacatataataagcagagcaagtgggaggaggggaaatgtccttcctatatgccaggtatggggctgacatttcagtctattgaccccagctagaatatagctccatgattttaaagatctcaggggccaggcatggtagctcatgcctgtaatcccagcactttgggaggccaaggcaggtggatcacctgaggtcaggagtttgagaccagcctgaccaatatggtgaaaccctgtctctactaaaaatacaaaaattagcagggcatggtggcaggcacctgtagtcccagctactcgggaggctgagacaggagaattgcttgaaccctggaggcagaggttgcagtgagccgagattgcaccactgcactccagcctgggtgacagagcaagactgtctcaaaaaaataaaataaaatagatcccagggtactcatttttcatatgagggaggctgggttcctcccagaggagcctaaaacagccaacaagagaaattgttggcggcaggaagattgcagaggaattctaatgcaattatttgggacctcaaatggaataaaatgaaagatattggttaaacatgtcttcgtttaatactttcaagacaaaatatccactagctattcacttattcattcatctcataaacatgagccaggctctgtgcagggtcctgagtacccagccataaatgagactgtgcccctgtctcatggggcttacagtctatatcctgcttgcaagacagccaataagtcaataaagaagataattacaggcagtacaacaaaggaaatatgcaggttcatgtcatgtaatagggattaattgagttaactcaataaacggtaggatagacctaccatgtgccggctcacttttattgagcctttactatgtgccaggcagggggctaagtgtttttaaatgccttatttcacttcatgtttcccaacaacctaataagaaggtcttagttatcttcattttacagatgtggcaacctcaaagatgcaaagtcacttgtctaaggtcaccctgctaagtaccagagctgaggtctccaacctagttctgtttgacttcaaagcctgccctcttaaccactaaccttttgtcctagttcagtcaaattctgcttgattattgctcattagggataatattagctatctgtagcatcagattgctgcaaagttaactcatcgtagattctcaatatactccattttattaaatggccccgtattaatctcctgtaataaatttcacaaatccagtggcttatcaacagaaatttactgtctcataattctggaggccagaagtcaaaatcaagatgtggtagggccctgctccctccaaaagtttaaggggagaattattccttgactctttcaacttctggcagtccctgtcattccttggcttgtggaaacatcactcctacctctgactctgtcttcatatggcatttcctctgtgtctcttggtgtcttttttttttttttttttttttttgagacggaatctcattctgttgtccaggcaggagtgcagtgacatgatcttggctcactgcaacctccacctctcaggttcaagtgattctcctgcctcagcctcccaaatagctgggactacaggcacccgccaccacactcagctaatttttgtatttttagtagagatggggtttcaccatcttgcccaggctggtcttgaactcctgacctcaagtgatccgcccaccttggcctcctaaattgctgggattacagacgtgagccaccatacccggcctggtgtcttttttaaagaatatcagtcactggatttgggcccaccctaatcctaatagtatgacttcatcttaatttaaccaattatatctgtagagaccctgtttccaaataaggtcacattcacagattccaggtggacaagaagtttaggcggacactattcaactcagtacagacccaggaacaaagtccacccactgggctgtgttgagtggcagtcactagtttatcctccctcaacaagatgagctccaggttgacctctgcatccccagtgctcagtcaggacccagcagagcatctgaagggatctggtcaatatgtgtggaactgaactgtttctgaaaagctctgacgtatgttttggaaaatcaaatcttgttttaatccagacaccaatctttttgtaaggcaaacaagtagcataaatgtttaaaagtgaatttgcatgtttatatactgtcattccttaaagttgaagcatgcctttctttattcatcggtggaatcctttctcattttggcaaagaaaatgcccaagtgcctggcacaaacaagcactgagtaaatacttcttgaatgaataaaactagattctaaaaatcatttgatcaaacgcaactccacactttctacttctcttcttttagaaccacactgtatttctgctttttttttttttttttttttttttgacatagaatctcactctgtcacccaggttggagtgcagtggcatgcaatcttggctcactgcaacctctgcctcctgggttcaagcagttctcctgccttagcctcccatgtagctgggattacaggtacccgccaccatgcccagctaatttttgtattgttagtagagatggaatttcaccatattggccaggctggtcttgaactcctgacttcaagtgatccacccaccttagcctcccaaagtgctaggattacaggtgtgagccaccactcccagcccctatgtctgctttaagtggagaagcagagcttatgagggaggagaacaagggtgcaaaagggacctagatatcactgagaactgcccttgttgtttggttgaggaaatgggcccagacagtggacaagacttgctcagggagacaaacgagatggtgtccagtgcaacaaacctaggtttcctaacttccagttctgtccactctacatcagtgcctctcacctgtccctgcaggttcacattttggttatgtggataaggagaaataaattgaagatcacaatgtcccattttatcttccccaagacaagctctgtaacattaaagaccactatgcaaaccga

SEQ ID NO: 4485 - DNA, 5350 bp, Homo sapiens
  source 1..5350: mol_type = unassigned DNA
cgccttcgcgcgttgtaagtgcacagtaagtttgctgaaagaatgaggactgctctcctcccctttctgccccacttgtaagtgaaaaaggggaagaaagagaatattgttcagttgattatgccagccagatgcagccgccgccgctccactgtcactctccaaggccagcgccacctctcactcaccgagctccagccgaaggagaagggggcaaagccttctagacaagctcagtggaatctgaagggcccaccccatggaggaatgctgggtgacagagatagccaatggctccaaggatggcttggattccaaccctatgaaggattacatgatcctgagtggtccccagaagacagctgttgctgtgttgtgcactcttctgggcctgctaagtgccctggagaacgtggctgtgctctatctgatcctgtcctcccaccaactccgccggaagccctcatacctgttcattggcagcttggctggggctgacttcctggccagtgtggtctttgcatgcagctttgtgaatttccatgttttccatggtgtggattccaaggctgtcttcctgctgaagattggcagcgtgactatgaccttcacagcctctgtgggtagcctcctgctgaccgccattgaccgatacctctgcctgcgctatccaccttcctacaaagctctgctcacccgtggaagggcactggtgaccctgggcatcatgtgggtcctctcagcactagtctcctacctgcccctcatgggatggacttgctgtcccaggccctgctctgagcttttcccactgatccccaatgactacctgctgagctggctcctgttcatcgccttcctcttttccggaatcatctacacctatgggcatgttctctggaaggcccatcagcatgtggccagcttgtctggccaccaggacaggcaggtgccaggaatggcccgaatgaggctggatgtgaggttggccaagaccctagggctagtgttggctgtgctcctcatctgttggttcccagtgctggccctcatggcccacagcctggccactacgctcagtgaccaggtcaagaaggcctttgctttctgctccatgctgtgcctcatcaactccatggtcaaccctgtcatctatgctctacggagtggagagatccgctcctctgcccatcactgcctggctcactggaagaagtgtgtgaggggccttgggtcagaggcaaaagaagaagccccgagatcctcagtcaccgagacagaggctgatgggaaaatcactccgtggccagattccagagatctagacctctctgattgctgatgaggcctcttcccaatttaaacaactcaagtcagaaatcagttcactccctggaagagagagaggggtcttggcactctcttcttacttaaaccagtcccagacacctagacacggacccctttttgctgatgagtgttgggactgactcctggaagacagcctggccttgcccacctgcacacagtctgttggataggtagggccacgaggagtagccaggtaggcgagacacaaaaggcctgggacagggtcagtacaagtcaggtcaggcttcatgcctgcatcctccagagaccacaggagccaaagcgagcctccaggcccagcaatgagggacttgggagaaatctgagaagaatgggttgttctcttgggaagtcagggtatcagatgggatggacatccaggtcttctctctgcctaattgtcaaggcctccttggctctggagctatgaaaggccccactttcaagtcacccttgccactgaggaccgaggactatgctatgatgaggattaaggtgttgacttgcctctttcagagataaatgacaagccttcagtttggggcatcctgttgtttgggcgaggaccctctctgatattctgataatccccacctgtaacctcaggtccctggaaatacagaggaggctgggatcgcctgagacacaaaaatctttggagaattttcttgaccctctgaagtccttccagcagcagtcctggtggtgctgctggaagcaggcaatgtcctagtctaacctaactcgaagaaaaaaaggaagatattcacaaagattgtataaatctccaaactgttcccctatctgcccccaattcagctcccttgcctcctccacacccctattacatataataagcagagcaagtgggaggaggggaaatgtccttcctatatgccaggtatggggctgacatttcagtctattgaccccagctagaatatagctccatgattttaaagatctcaggggccaggcatggtagctcatgcctgtaatcccagcactttgggaggccaaggcaggtggatcacctgaggtcaggagtttgagaccagcctgaccaatatggtgaaaccctgtctctactaaaaatacaaaaattagcagggcatggtggcaggcacctgtagtcccagctactcgggaggctgagacaggagaattgcttgaaccctggaggcagaggttgcagtgagccgagattgcaccactgcactccagcctgggtgacagagcaagactgtctcaaaaaaataaaataaaatagatcccagggtactcatttttcatatgagggaggctgggttcctcccagaggagcctaaaacagccaacaagagaaattgttggcggcaggaagattgcagaggaattctaatgcaattatttgggacctcaaatggaataaaatgaaagatattggttaaacatgtcttcgtttaatactttcaagacaaaatatccactagctattcacttattcattcatctcataaacatgagccaggctctgtgcagggtcctgagtacccagccataaatgagactgtgcccctgtctcatggggcttacagtctatatcctgcttgcaagacagccaataagtcaataaagaagataattacaggcagtacaacaaaggaaatatgcaggttcatgtcatgtaatagggattaattgagttaactcaataaacggtaggatagacctaccatgtgccggctcacttttattgagcctttactatgtgccaggcagggggctaagtgtttttaaatgccttatttcacttcatgtttcccaacaacctaataagaaggtcttagttatcttcattttacagatgtggcaacctcaaagatgcaaagtcacttgtctaaggtcaccctgctaagtaccagagctgaggtctccaacctagttctgtttgacttcaaagcctgccctcttaaccactaaccttttgtcctagttcagtcaaattctgcttgattattgctcattagggataatattagctatctgtagcatcagattgctgcaaagttaactcatcgtagattctcaatatactccattttattaaatggccccgtattaatctcctgtaataaatttcacaaatccagtggcttatcaacagaaatttactgtctcataattctggaggccagaagtcaaaatcaagatgtggtagggccctgctccctccaaaagtttaaggggagaattattccttgactctttcaacttctggcagtccctgtcattccttggcttgtggaaacatcactcctacctctgactctgtcttcatatggcatttcctctgtgtctcttggtgtcttttttttttttttttttttttttgagacggaatctcattctgttgtccaggcaggagtgcagtgacatgatcttggctcactgcaacctccacctctcaggttcaagtgattctcctgcctcagcctcccaaatagctgggactacaggcacccgccaccacactcagctaatttttgtatttttagtagagatggggtttcaccatcttgcccaggctggtcttgaactcctgacctcaagtgatccgcccaccttggcctcctaaattgctgggattacagacgtgagccaccatacccggcctggtgtcttttttaaagaatatcagtcactggatttgggcccaccctaatcctaatagtatgacttcatcttaatttaaccaattatatctgtagagaccctgtttccaaataaggtcacattcacagattccaggtggacaagaagtttaggcggacactattcaactcagtacagacccaggaacaaagtccacccactgggctgtgttgagtggcagtcactagtttatcctccctcaacaagatgagctccaggttgacctctgcatccccagtgctcagtcaggacccagcagagcatctgaagggatctggtcaatatgtgtggaactgaactgtttctgaaaagctctgacgtatgttttggaaaatcaaatcttgttttaatccagacaccaatctttttgtaaggcaaacaagtagcataaatgtttaaaagtgaatttgcatgtttatatactgtcattccttaaagttgaagcatgcctttctttattcatcggtggaatcctttctcattttggcaaagaaaatgcccaagtgcctggcacaaacaagcactgagtaaatacttcttgaatgaataaaactagattctaaaaatcatttgatcaaacgcaactccacactttctacttctcttcttttagaaccacactgtatttctgctttttttttttttttttttttttttgacatagaatctcactctgtcacccaggttggagtgcagtggcatgcaatcttggctcactgcaacctctgcctcctgggttcaagcagttctcctgccttagcctcccatgtagctgggattacaggtacccgccaccatgcccagctaatttttgtattgttagtagagatggaatttcaccatattggccaggctggtcttgaactcctgacttcaagtgatccacccaccttagcctcccaaagtgctaggattacaggtgtgagccaccactcccagcccctatgtctgctttaagtggagaagcagagcttatgagggaggagaacaagggtgcaaaagggacctagatatcactgagaactgcccttgttgtttggttgaggaaatgggcccagacagtggacaagacttgctcagggagacaaacgagatggtgtccagtgcaacaaacctaggtttcctaacttccagttctgtccactctacatcagtgcctctcacctgtccctgcaggttcacattttggttatgtggataaggagaaataaattgaagatcacaatgtcccattttatcttccccaagacaagctctgtaacattaaagaccactatgcaaaccg

SEQ ID NO: 4486 - DNA, 1704 bp, Homo sapiens
  source 1..1704: mol_type = unassigned DNA
gcaggcttcttctcgggtcttggtcctgcatcctctctctcccagagcctccgttagggggtgggaaaggactttgccataggtcgctgaggccaccatctgctctcttactggccaagggcgtaaaaagatagtcttcccattagctagagagcaaaccccagaaagcctattggctgcgccgtccgcgggccttggtccgctttgaaggcgggctgcggctgcgagaggagggcgggcgggaggctagctgttgtcgtggttgctcggaggcacgtgtgcagtcccggaagcggcgaggggaaactgctccgcgcgcgccgcgggaggaggaaccgcccggtcctttagggtccgggcccggccgggccatggattcaatgcctgagcccgcgtcccgctgtcttctgcttcttcccttgctgctgctgctgctgctgctgctgccggccccggagctgggcccgagccaggccggagctgaggagaacgactgggttcgcctgcccagcaaatgcgaagtgtgtaaatatgttgctgtggagctgaagtcagcctttgaggaaaccggcaagaccaaggaggtgattggcacgggctatggcatcctggaccagaaggcctctggagtcaaatacaccaagtcggacttgcggttaatcgaagtcactgagaccatttgcaagaggctcctggattatagcctgcacaaggagaggaccggcagcaatcgatttgccaagggcatgtcagagacctttgagacattacacaacctggtacacaaaggggtcaaggtggtgatggacatcccctatgagctgtggaacgagacttctgcagaggtggctgacctcaagaagcagtgtgatgtgctggtggaagagtttgaggaggtgatcgaggactggtacaggaaccaccaggaggaagacctgactgaattcctctgcgccaaccacgtgctgaagggaaaagacaccagttgcctggcagagcagtggtccggcaagaagggagacacagctgccctgggagggaagaagtccaagaagaagagcagcagggccaaggcagcaggcggcaggagtagcagcagcaaacaaaggaaggagctgggtggccttgagggagaccccagccccgaggaggatgagggcatccagaaggcatcccctctcacacacagcccccctgatgagctctgagcccacccagcatcctctgtcctgagacccctgattttgaagctgaggagtcaggggcatggctctggcaggccgggatggccccgcagccttcagcccctccttgccttggctgtgccctcttctgccaaggaaagacacaagccccaggaagaactcagagccgtcatgggtagcccacgccgtcctttcccctccccaagtgtttctctcctgacccagggttcaggcaggccttgtggtttcaggactgcaaggactccagtgtgaactcaggaggggcaggtgtcagaactgggcaccaggactggagccccctccggagaccaaactcaccatccctcagtcctccccaacagggtactaggactgcagccccctgtagctcctctctgcttacccctcctgtggacaccttgcactctgcctggcccttcccagagcccaaagagtaaaaatgttctggttctgatttctgagtcctctgcagccctca

SEQ ID NO: 4487 - DNA, 1518 bp, Homo sapiens
  source 1..1518: mol_type = unassigned DNA
gagcctccgttagggggtgggaaaggactttgccataggtcgctgaggccaccatctgctctcttactggccaagggcgtaaaaagatagtcttcccattagctagagagcaaaccccagaaagcctattggctgcgccgtccgcgggccttggtccgctttgaaggcgggctgcggctgcgagaggagggcgggcgggaggctagctgttgtcgtggttgctcggaggcacgtgtgcagtcccggaagcggcgaggggaaactgctccgcgcgcgccgcgggaggaggaaccgcccggtcctttagggtccgggcccggccgggccatggattcaatgcctgagcccgcgtcccgctgtcttctgcttcttcccttgctgctgctgctgctgctgctgctgccggccccggagctgggcccgagccaggccggagctgaggagaacgactgggttcgcctgcccagcaaatgcgaagggacttgcggttaatcgaagtcactgagaccatttgcaagaggctcctggattatagcctgcacaaggagaggaccggcagcaatcgatttgccaagggcatgtcagagacctttgagacattacacaacctggtacacaaaggggtcaaggtggtgatggacatcccctatgagctgtggaacgagacttctgcagaggtggctgacctcaagaagcagtgtgatgtgctggtggaagagtttgaggaggtgatcgaggactggtacaggaaccaccaggaggaagacctgactgaattcctctgcgccaaccacgtgctgaagggaaaagacaccagttgcctggcagagcagtggtccggcaagaagggagacacagctgccctgggagggaagaagtccaagaagaagagcagcagggccaaggcagcaggcggcaggagtagcagcagcaaacaaaggaaggagctgggtggccttgagggagaccccagccccgaggaggatgagggcatccagaaggcatcccctctcacacacagcccccctgatgagctctgagcccacccagcatcctctgtcctgagacccctgattttgaagctgaggagtcaggggcatggctctggcaggccgggatggccccgcagccttcagcccctccttgccttggctgtgccctcttctgccaaggaaagacacaagccccaggaagaactcagagccgtcatgggtagcccacgccgtcctttcccctccccaagtgtttctctcctgacccagggttcaggcaggccttgtggtttcaggactgcaaggactccagtgtgaactcaggaggggcaggtgtcagaactgggcaccaggactggagccccctccggagaccaaactcaccatccctcagtcctccccaacagggtactaggactgcagccccctgtagctcctctctgcttacccctcctgtggacaccttgcactctgcctggcccttcccagagcccaaagagtaaaaatgttctggttctgatttctg

SEQ ID NO: 4488 - DNA, 1502 bp, Homo sapiens
  source 1..1502: mol_type = unassigned DNA
tgatcctgcgcatgcgccgaccttcctcggctggatttaaggttgccgctagccgcctgggaatttaagggacccacactaccttcccgaagttgaaggcaagcggtgattgtttgtagacggcgctttgtcatgggacctgtgcggttgggaatattgcttttcctttttttggccgtgcacgaggcttgggctgggatgttgaaggaggaggacgatgacacagaacgcttgcccagcaaatgcgaagtgtgtaagctgctgagcacagagctacaggcggaactgagtcgcaccggtcgatctcgagaggtgctggagctggggcaggtgctggatacaggcaagaggaagagacacgtgccttacagcgtttcagagacaaggctggaagaggccttagagaatttatgtgagcggatcctggactatagtgttcacgctgagcgcaagggctcactgagatatgccaagggtcagagtcagaccatggcaacactgaaaggcctagtgcagaagggggtgaaggtggatctggggatccctctggagctttgggatgagcccagcgtggaggtcacatacctcaagaagcagtgtgagaccatgttggaggagtttgaagacattgtgggagactggtacttccaccatcaggagcagcccctacaaaattttctctgtgaaggtcatgtgctcccagctgctgaaactgcatgtctacaggaaacttggactggaaaggagatcacagatggggaagagaaaacagaaggggaggaagagcaggaggaggaggaggaagaggaggaagaggaagggggagacaagatgaccaagacaggaagccaccccaaacttgaccgagaagatctttgacccttgcctttgagcccccaggaggggaagggatcatggagagccctctaaagcctgcactctccctgctccacagctttcagggtgtgtttatgagtgactccacccaagcttgtagctgttctctcccatctaacctcaggcaagatcctggtgaaacagcatgacatggcttctggggtggagggtgggggtggaggtcctgctcctagagatgaactctatccagccccttaattggcaggtgtatgtgctgacagtactgaaagctttcctctttaactgatcccacccccacccaaaagtcagcagtggcactggagctgtgggctttggggaagtcacttagctccttaaggtctgtttttagacccttccaaggaagaggccagaacggacattctctgcgatctatatacattgcctgtatccaggaggctacacaccagcaaaccgtgaaggagaatgggacactgggtcatggcctggagttgctgataatttaggtgggatagatacttggtctacttaagctcaatgtaacccagagcccaccatatagttttataggtgctcaattttctatatcgctattaaacttttttctttttttctaaaaacta

SEQ ID NO: 4489 - DNA, 3316 bp, Homo sapiens
  source 1..3316: mol_type = unassigned DNA
atattgggtctggggacacacatgccgtctcttgattcctaaggatccattacccatttctctgcacagatcttcgggtatccaacctatctgtgcctccttcagccaggagcctccggatctttccagacttctttgcaatactgcctcatgcactgaatccatttctcgcatagcctggcgcttggcaggcaggctggcgttccctggctctgccttccccatctccctgtcttttctcccacggcccatctgcccctcctttcctccacccccttctcctctctgctcccctttatttccactccccacccgcgtggctttgctctccctctcccccctcagctcgtctgtatttggagctccggaagctgccggcgactctcccctggagcagcgtgactgacaccggctcctattcagctgggaggagggagaggggaggagaaggggagggccgcgggaggagggtacgagtggccgaccacggatttgcattgccgaggacgggaccccagggcagcgaagcagaatggccaacatgcagggactggtggaaagactggaacgagctgtcagccgcctggagtcgctgtctgcagagtcccacaggccccctgggaactgcggggaagtcaatggtgtcattgcaggtgtggcaccctccgtggaagcctttgacaagctgatggacagtatggtggccgagtttttaaagaacagtaggatccttgctggggacgtggagacccatgcagaaatggtgcacagtgctttccaggcccagcgggctttccttctgatggcctctcagtaccaacaaccccacgagaatgacgtggccgcacttctgaaacccatatcggaaaagattcaggaaatccaaactttcagagagagaaaccgggggagtaacatgtttaatcatctttcggccgtcagcgaaagcatccctgcccttggatggatagctgtgtctcccaaacctggtccttatgtcaaggagatgaatgacgctgccaccttttacactaacagggtcttaaaggactacaaacacagtgatttgcgtcatgtggattgggtgaagtcatatttgaacatttggagtgaacttcaagcatacatcaaggaacaccacaccacgggcctcacatggagcaaaacaggtcctgtagcatccacagtatcagcgttttctgtcctctcctctgggcctggccttcctccaccccctcctcctctgcctcctccagggccacctccacttttcgagaatgaaggcaaaaaagaggaatcttctccttcacgctcagctttatttgcccaacttaaccagggagaagcaattacaaaagggctccgccatgtcacagatgaccagaagacatacaaaaatcccagcctgcgggctcaaggagggcaaactcaatctcccaccaaaagtcacactccaagtcccacatctcctaaatcttatccttctcaaaaacatgccccagtgttggagttggaaggaaagaaatggagagtggagtaccaagaggacaggaatgaccttgtgatttcagagactgagctgaaacaagtggcttacattttcaaatgcgaaaaatcaactattcagataaaagggaaagtaaactccattataattgacaactgtaaaaaactcggcctggtgtttgacaatgtggtgggcattgtggaagtgatcaactcccaggacattcaaatccaggtaatggggagagtgccaacaatttccattaataagacagaaggttgccacatatacctcagtgaagatgcattagactgtgagatcgtgagcgccaagtcatctgaaatgaacatacttatccctcaggatggtgattatagagaatttcccattcctgaacagttcaagacagcatgggatggatccaagttaatcactgaacctgcagaaattatggcctaacttcctgagagaccgaaccccctcacctgaatccccctctatcaaacaaacaaaaaagcagcagtaaagagctagaagttgcagtagcccctactgctttagctttggcctccaacgattctgtgctatagatacagcactgtttctggcacgcctcgtgggcattttgaaatatttaacgtttcctcatgatttgcctttgtgtgtgattttagttccacatgatgacttgtgaacattagggatttaaaggaaaaaaaaaaagaattctgttcccctcatatcatgaacacagtaactgataggtaaaaagactgcatgattcacttttacacttatatttcattgctagttaaaaaataaaacctttgagaatctaagatgtacatttttaccttttaggcaatttcaatataatgtagaagtagtagtgtgccctgaaaaatgtacacgttttttcttattgttaccacatgttcacctttatcagcgtggatactgtcagcatgagtacatatttcaacccacgcttgtaaaagacataagagtttataaaggaccaaattcagttccttggtccttggaagacctatattctctgtagttactgaaaaccgaaagtcaattctaattattcatcttacatatttttccaccatgtcatttgaaaacttgcttttcttctgcataagagattcttatgccaaaaacattaaacagaagaaatcattttttttgctatgtaatacctcgcaactttgctctaaaatcaagctcagttattattttccaagtttgaacatgttaaatatcagatgccttgtaaattatgtctttaacgttttcttatagactaatttcctcttttccacctgccagacttgctaaccaagctcgaaaatgaacatgaaaaagccatacatgtattatttctcctaaaacctaaggcattatctgttggtttggcttgctgctcctattttgtagtcttgatagtagatgcttcttcagcgtaagagtagctatgatattcctttttatcttttcagtacatagtgctgaaaaatctgcaacttcttggatcatatttaatgaattatagtataatgcttgcaggcccagtacaagcatatatattgtgcctcttacagcctttggaatacattgtttccattttttaaatatcttctatatccatatagtattcaaattattaatgctcatgtaccaaggttttgctataaaagttttgtctgtatgaataatgtggctttagtaaataatcatttttcaactgtaaacttattctgaaataaagtaaaattctaattgtttaaatactgtgatgaa

SEQ ID NO: 4490 - DNA, 2686 bp, Homo sapiens
  source 1..2686: mol_type = unassigned DNA
gactctcccctggagcagcgtgactgacaccggctcctattcagctgggaggagggagaggggaggagaaggggagggccgcgggaggagggtacgagtggccgaccacggatttgcattgccgaggacgggaccccagggcagcgaagcagaatggccaacatgcagggactggtggaaagactggaacgagctgtcagccgcctggagtcgctgtctgcagagtcccacaggccccctgggaactgcggggaagtcaatggtgtcattgcaggtgtggcaccctccgtggaagcctttgacaagctgatggacagtatggtggccgagtttttaaagaacagtaggatccttgctggggacgtggagacccatgcagaaatggtgcacagtgctttccaggcccagcgggctttccttctgatggcctctcagtaccaacaaccccacgagaatgacgtggccgcacttctgaaacccatatcggaaaagattcaggaaatccaaactttcagagagagaaaccgggggagtaacatgtttaatcatctttcggccgtcagcgaaagcatccctgcccttggatggatagctgtgtctcccaaacctcctcctctgcctcctccagggccacctccacttttcgagaatgaaggcaaaaaagaggaatcttctccttcacgctcagctttatttgcccaacttaaccagggagaagcaattacaaaagggctccgccatgtcacagatgaccagaagacatacaaaaatcccagcctgcgggctcaaggagggcaaactcaatctcccaccaaaagtcacactccaagtcccacatctcctaaatcttatccttctcaaaaacatgccccagtgttggagttggaaggaaagaaatggagagtggagtaccaagaggacaggaatgaccttgtgatttcagagactgagctgaaacaagtggcttacattttcaaatgcgaaaaatcaactattcagataaaagggaaagtaaactccattataattgacaactgtaaaaaactcggcctggtgtttgacaatgtggtgggcattgtggaagtgatcaactcccaggacattcaaatccaggtaatggggagagtgccaacaatttccattaataagacagaaggttgccacatatacctcagtgaagatgcattagactgtgagatcgtgagcgccaagtcatctgaaatgaacatacttatccctcaggatggtgattatagagaatttcccattcctgaacagttcaagacagcatgggatggatccaagttaatcactgaacctgcagaaattatggcctaacttcctgagagaccgaaccccctcacctgaatccccctctatcaaacaaacaaaaaagcagcagtaaagagctagaagttgcagtagcccctactgctttagctttggcctccaacgattctgtgctatagatacagcactgtttctggcacgcctcgtgggcattttgaaatatttaacgtttcctcatgatttgcctttgtgtgtgattttagttccacatgatgacttgtgaacattagggatttaaaggaaaaaaaaaaagaattctgttcccctcatatcatgaacacagtaactgataggtaaaaagactgcatgattcacttttacacttatatttcattgctagttaaaaaataaaacctttgagaatctaagatgtacatttttaccttttaggcaatttcaatataatgtagaagtagtagtgtgccctgaaaaatgtacacgttttttcttattgttaccacatgttcacctttatcagcgtggatactgtcagcatgagtacatatttcaacccacgcttgtaaaagacataagagtttataaaggaccaaattcagttccttggtccttggaagacctatattctctgtagttactgaaaaccgaaagtcaattctaattattcatcttacatatttttccaccatgtcatttgaaaacttgcttttcttctgcataagagattcttatgccaaaaacattaaacagaagaaatcattttttttgctatgtaatacctcgcaactttgctctaaaatcaagctcagttattattttccaagtttgaacatgttaaatatcagatgccttgtaaattatgtctttaacgttttcttatagactaatttcctcttttccacctgccagacttgctaaccaagctcgaaaatgaacatgaaaaagccatacatgtattatttctcctaaaacctaaggcattatctgttggtttggcttgctgctcctattttgtagtcttgatagtagatgcttcttcagcgtaagagtagctatgatattcctttttatcttttcagtacatagtgctgaaaaatctgcaacttcttggatcatatttaatgaattatagtataatgcttgcaggcccagtacaagcatatatattgtgcctcttacagcctttggaatacattgtttccattttttaaatatcttctatatccatatagtattcaaattattaatgctcatgtaccaaggttttgctataaaagttttgtctgtatgaataatgtggctttagtaaataatcatttttcaactgtaaacttattctgaaataaagtaaaattctaattgtttaaatactgtgatg

SEQ ID NO: 4491 - DNA, 5563 bp, Homo sapiens
  source 1..5563: mol_type = unassigned DNA
cggctcggccgcggggcgcgcaggcggctgctgggcggcctcggtgcgcgcctcccgccttcccagagacgtggcgcgaggcccgggccctgagcacctatcgcggggatccccggcgccaggagggggtgcagccggtgggcagcgccgcgcagggaggggccgcagcatcctcgccccccagcgcgcccgggcccgagaggaggaggccggggctctccgggcctcccgccgcttagcctgatgctggaaggacgaaggtgagtgaagatggcagagaggacgtgaccagcactcacccttgtccacctgcccagtggcaccgccatgcagaagcccagcggcctgaagccccccggccgtggggggaagcactccagccccatgggccggacatctactgggtcagcttcatcctcggcggcggtggccgctagctccaaggaaggctccccactgcacaaacagtcatctggaccctcctcctccccggccgcagctgctgcccccgagaagccgggccccaaggcggcggaagtgggggatgacttcctgggggactttgtggtgggcgagcgggtgtgggtgaacggcgtgaagccaggcgtggtgcagtatctgggagagacgcagttcgcaccgggccagtgggctggcgtggtgctggacgacccggtgggcaagaatgatggcgcggtgggcggcgtgcgctacttcgagtgcccggccctccagggtatcttcacgcggccctccaagctgacccggcagcccacggccgagggctcggggagtgatgcccactccgtggagtcgctgactgcccagaacctgtcattgcattcgggcacggccacgcccccgctgaccagccgcgtcatccccctgcgggagagcgtcctcaacagctccgtgaagactggcaacgagtcgggatccaacctctcagacagcggctctgtgaagcggggcgaaaaggacctgcgcctgggggaccgcgtgctggttggcgggacgaagactggcgtggtgcggtacgtgggggagacagactttgccaagggcgagtggtgtggcgtggagctggacgagccccttgggaagaatgatggggcggtggcgggcaccaggtacttccagtgcccacccaagtttggtctcttcgcgcccatccacaaagtgatccgtatcggcttcccatctaccagcccagccaaggccaagaagaccaagcgtatggccatgggtgtgtcagcactgacccacagtcccagcagttcctccatcagctccgtcagctctgtggcctcctccgtggggggtcggcccagccgcagtggcctgctcacggagacctcttcacgctacgcccgcaagatctcgggcaccacggccttgcaggaggcactgaaggagaagcagcagcacattgagcagctgctggctgaacgagacctggaacgggctgaggtggccaaggccacaagccacatctgcgaggtggagaaggagattgccctgctcaaggcacagcatgagcagtatgttgcagaagccgaggagaagctgcagcgagcccggctgctcgtggagagcgtgcggaaagagaaggtggacctgtccaaccagctggaggaggagaggaggaaggtggaggatctgcagttccgcgtggaggaggagtccatcaccaagggagacctggagacccagacgcagctggagcacgcgcgcattggggagctggaacagagcctgctactggagaaggcgcaggccgagcggctgctccgagaattagcggacaacaggctgaccacagtggccgagaagtcgcgcgtgctgcagctggaggaggagctcaccctgcgccgaggtgaaatcgaggagctccagcagtgcctgttgcactcgggtcccccacctccggaccacccagacgccgccgagatcctgcggctacgggagcggctgctctcggccagcaaggaacaccagagggagagtggggtgctgcgggataaatacgagaaggccctgaaggcctaccaggcggaggtggacaagctccgcgcggccaacgagaagtacgcacaggaggtggcgggcctgaaggacaaggttcagcaggccaccagcgagaacatggggctaatggacaactggaaatccaagctggactcgctggcctcggaccaccagaagtccctggaggacctcaaagccaccctgaactcgggcccaggcgcccagcagaaggagatcggcgagctgaaggcagtgatggagggcatcaagatggagcaccagctggagctgggtaacttgcaggccaagcatgacctggagaccgccatgcacgtgaaggagaaggaggccctgcgagagaagctgcaggaggcccaggaggagctggctgggctgcagcggcactggcgggcccagctggaggtgcaagccagccagcaccggctggagctgcaggaggcccaggaccagcgccgggatgccgagctgcgtgtgcacgagctggaaaaactggacgtggagtaccggggccaggcgcaggctatcgagttcctcaaggagcagatctcgctggccgagaagaagatgttggactacgagcggctgcagcgggcagaagcccagggcaaacaggaggtcgagagtttgcgggagaagctcctggtggctgagaacagactccaggcggtcgaggccctgtgctcctcccagcacacccacatgattgagtcgaatgacatttcagaggagacgatcaggacgaaggaaactgtggagggcctgcaggacaagctgaacaagagggacaaagaggtgacagccttgacctcccagaccgagatgctcagggcccaagtaagtgcgctggagagcaagtgtaagtcaggcgagaagaaggtggacgccctcctgaaggagaagcggcgcctggaggcagagctggagaccgtgtcccggaagacccatgacgcctcgggccagctagtcctcatcagccaggagctgctgcggaaggagcggagcctgaacgaactgcgggtgttgctgctggaggccaatcgtcactccccagggccggagagggacctgagccgtgaggtacacaaggctgagtggcggatcaaggagcagaaactcaaggatgacatccggggcctgcgtgaaaagctgaccgggctggacaaagagaaatccctgtcggatcagaggcgctactccctcatcgaccggtcctcggcgcccgagcttctgcggctgcagcaccagctgatgagcacggaggacgccctgcgggatgcgctggaccaggctcagcaggtggagaagctgatggaggccatgaggagctgccctgacaaggcccagaccatcggcaattccggttctgcaaacggcatccaccagcaggacaaagctcagaaacaagaggacaagcactgatcctgaggggatactgtggagcagcccagtccacaccagagccccacgcggctgcccggcagtacctcctccaggcaggagccgggactgtcactttggagacaaaacagtgtttgtaacaataacgtactcaccgccgcggacaatcccccaccccgatccctcgccagaccaggacgcttcctcaagcccagccttctacagagagtgtgaacggtacagccccggcctgacccggggaccttcagcctggacacccggcagcttctggagtttgtcagtggaggcagaggggatccggccaggcccctctgtccagaaggagctgccctgaggaccatcttagcggccctgtcctctttttccgcccattctccctcgggtctccccagaggggccggcgggggctggggagggggtaagtttatccatgcagacaccaagggggagcatccagtctttaagagccaagtgggggccccttttccgaagccacttccaggccaaggcagtcgccagggcttcttgtccccaccttctgaaccttcttcaaacagtagtacaagctcccctcagccagcctgcctgcccagcgaggcccccaggttcaaggtgttggcgggggcggagggcaggggaacgggatccttctcccgctgcccaccaacaccaacacacacacacctctaagctgctggccgaagatgtcaccaaggccaaagacacagtattatgaaggtttggaaacccctctcctcacctcccaccgtgaccttgggcaaaccctggctcggagcccagggcagaggcagctcagagtggaggctctaggcaggtttgacaaaggtcagtaatacggtttcccctggggttgaccagatgttccaaaatatctgcatccacctggagatgcagctaagtgggtccttatgtacacaccacgttcacacacacacagagggaccacgtgtgcacgcatgaccgtgtgggtggcggcgtttgctgtgaaccacgctcaggccacacagagacacatacttggtttctgggactgagacccaggcctggcaggaccgtgcctacagatactgcaaacgttcctacagcctagaggtgcgtatacacacccaagtacacgcagccaggcattcaggggtgtgtttgccacatggagcatcccttcctggtcttgccaggcacctgcacagagcgtctccagccccatctcctaacgggggctgggggtaagagaaatctaactgcgctcccccaacccctcgccctgccatcttcccctcaagcctgctaagttatcccaggcctgtgcgtggtggaaaaagccagccttggccctgcagcctccacctcgccgctgggggaccaacaggttgcttacagctttgcaccccggcatcagcacaggggtccctgccccaccctccggcagctcagggagtgttttcctgtgaggcctcccccatcagtggaccagagggagaagcccgatgccccatcccggctttcccgtaacgcacaggacacgtgtgcaattcataggaacggcccagatcgccctcatgagtgccacctggtacaggtaggtggcgctcacgttcctgcccaaatgcagcccatcggggagtcacagtcagtccccccggcccccctcccagtccctgttggctttcggtagctctcgcatgcagttctattaacagccgtctagaagcgatgctttagtggcctaacccagggtcaaatacagctctttctagcaaaatcaggcagctctgccccatcggtaggggcaccgattagtctactaacagccagaggtccatctagcagggtgccgggaggagctgagcccccggaggtgggctcctggtgacgggtgtccaagaagcggtttccttgggagcttctgcctccgtgggcctctcagcccgccccgtgtggccgcccgggtgtggctcagccatgtcccctccccaggtccttcattcacccctcccctccccacagtggaattgttgaagtgtggcgagtctgtgctcgggacaataaagcttgtgacaggtccaggaccccggca

SEQ ID NO: 4492 - DNA, 5445 bp, Homo sapiens
  source 1..5445: mol_type = unassigned DNA
cggctcggccgcggggcgcgcaggcggctgctgggcggcctcggtgcgcgcctcccgccttcccagagacgtggcgcgaggcccgggccctgagcacctatcgcggggatccccggcgccaggagggggtgcagccggtgggcagcgccgcgcagggaggggccgcagcatcctcgccccccagcgcgcccgggcccgagaggaggaggccggggctctccgggcctcccgccgcttagcctgatgctggaaggacgaaggtgagtgaagatggcagagaggacgtgaccagcactcacccttgtccacctgcccagtggcaccgccatgcagaagcccagcggcctgaagccccccggccgtggggggaagcactccagccccatgggccggacatctactgggtcagcttcatcctcggcggcggtggccgctagctccaaggaaggctccccactgcacaaacagtcatctggaccctcctcctccccggccgcagctgctgcccccgagaagccgggccccaaggcggcggaagtgggggatgacttcctgggggactttgtggtgggcgagcgggtgtgggtgaacggcgtgaagccaggcgtggtgcagtatctgggagagacgcagttcgcaccgggccagtgggctggcgtggtgctggacgacccggtgggcaagaatgatggcgcggtgggcggcgtgcgctacttcgagtgcccggccctccagggtatcttcacgcggccctccaagctgacccggcagcccacggccgagggctcggggagtgatgcccactccgtggagtcgctgactgcccagaacctgtcattgcattcgggcacggccacgcccccgctgaccagccgcgtcatccccctgcgggagagcgtcctcaacagctccgtgaagactggcaacgagtcgggatccaacctctcagacagcggctctgtgaagcggggcgaaaaggacctgcgcctgggggaccgcgtgctggttggcgggacgaagactggcgtggtgcggtacgtgggggagacagactttgccaagggcgagtggtgtggcgtggagctggacgagccccttgggaagaatgatggggcggtggcgggcaccaggtacttccagtgcccacccaagtttggtctcttcgcgcccatccacaaagtgatccgtatcggcttcccatctaccagcccagccaaggccaagaagaccaagcgtatggccatgggtgtgtcagcactgacccacagtcccagcagttcctccatcagctccgtcagctctgtggcctcctccgtggggggtcggcccagccgcagtggcctgctcacggagacctcttcacgctacgcccgcaagatctcgggcaccacggccttgcaggaggcactgaaggagaagcagcagcacattgagcagctgctggctgaacgagacctggaacgggctgaggtggccaaggccacaagccacatctgcgaggtggagaaggagattgccctgctcaaggcacagcatgagcagtatgttgcagaagccgaggagaagctgcagcgagcccggctgctcgtggagagcgtgcggaaagagaaggtggacctgtccaaccagctggaggaggagaggaggaaggtggaggatctgcagttccgcgtggaggaggagtccatcaccaagggagacctggagctgaccacagtggccgagaagtcgcgcgtgctgcagctggaggaggagctcaccctgcgccgaggtgaaatcgaggagctccagcagtgcctgttgcactcgggtcccccacctccggaccacccagacgccgccgagatcctgcggctacgggagcggctgctctcggccagcaaggaacaccagagggagagtggggtgctgcgggataaatacgagaaggccctgaaggcctaccaggcggaggtggacaagctccgcgcggccaacgagaagtacgcacaggaggtggcgggcctgaaggacaaggttcagcaggccaccagcgagaacatggggctaatggacaactggaaatccaagctggactcgctggcctcggaccaccagaagtccctggaggacctcaaagccaccctgaactcgggcccaggcgcccagcagaaggagatcggcgagctgaaggcagtgatggagggcatcaagatggagcaccagctggagctgggtaacttgcaggccaagcatgacctggagaccgccatgcacgtgaaggagaaggaggccctgcgagagaagctgcaggaggcccaggaggagctggctgggctgcagcggcactggcgggcccagctggaggtgcaagccagccagcaccggctggagctgcaggaggcccaggaccagcgccgggatgccgagctgcgtgtgcacgagctggaaaaactggacgtggagtaccggggccaggcgcaggctatcgagttcctcaaggagcagatctcgctggccgagaagaagatgttggactacgagcggctgcagcgggcagaagcccagggcaaacaggaggtcgagagtttgcgggagaagctcctggtggctgagaacagactccaggcggtcgaggccctgtgctcctcccagcacacccacatgattgagtcgaatgacatttcagaggagacgatcaggacgaaggaaactgtggagggcctgcaggacaagctgaacaagagggacaaagaggtgacagccttgacctcccagaccgagatgctcagggcccaagtaagtgcgctggagagcaagtgtaagtcaggcgagaagaaggtggacgccctcctgaaggagaagcggcgcctggaggcagagctggagaccgtgtcccggaagacccatgacgcctcgggccagctagtcctcatcagccaggagctgctgcggaaggagcggagcctgaacgaactgcgggtgttgctgctggaggccaatcgtcactccccagggccggagagggacctgagccgtgaggtacacaaggctgagtggcggatcaaggagcagaaactcaaggatgacatccggggcctgcgtgaaaagctgaccgggctggacaaagagaaatccctgtcggatcagaggcgctactccctcatcgaccggtcctcggcgcccgagcttctgcggctgcagcaccagctgatgagcacggaggacgccctgcgggatgcgctggaccaggctcagcaggtggagaagctgatggaggccatgaggagctgccctgacaaggcccagaccatcggcaattccggttctgcaaacggcatccaccagcaggacaaagctcagaaacaagaggacaagcactgatcctgaggggatactgtggagcagcccagtccacaccagagccccacgcggctgcccggcagtacctcctccaggcaggagccgggactgtcactttggagacaaaacagtgtttgtaacaataacgtactcaccgccgcggacaatcccccaccccgatccctcgccagaccaggacgcttcctcaagcccagccttctacagagagtgtgaacggtacagccccggcctgacccggggaccttcagcctggacacccggcagcttctggagtttgtcagtggaggcagaggggatccggccaggcccctctgtccagaaggagctgccctgaggaccatcttagcggccctgtcctctttttccgcccattctccctcgggtctccccagaggggccggcgggggctggggagggggtaagtttatccatgcagacaccaagggggagcatccagtctttaagagccaagtgggggccccttttccgaagccacttccaggccaaggcagtcgccagggcttcttgtccccaccttctgaaccttcttcaaacagtagtacaagctcccctcagccagcctgcctgcccagcgaggcccccaggttcaaggtgttggcgggggcggagggcaggggaacgggatccttctcccgctgcccaccaacaccaacacacacacacctctaagctgctggccgaagatgtcaccaaggccaaagacacagtattatgaaggtttggaaacccctctcctcacctcccaccgtgaccttgggcaaaccctggctcggagcccagggcagaggcagctcagagtggaggctctaggcaggtttgacaaaggtcagtaatacggtttcccctggggttgaccagatgttccaaaatatctgcatccacctggagatgcagctaagtgggtccttatgtacacaccacgttcacacacacacagagggaccacgtgtgcacgcatgaccgtgtgggtggcggcgtttgctgtgaaccacgctcaggccacacagagacacatacttggtttctgggactgagacccaggcctggcaggaccgtgcctacagatactgcaaacgttcctacagcctagaggtgcgtatacacacccaagtacacgcagccaggcattcaggggtgtgtttgccacatggagcatcccttcctggtcttgccaggcacctgcacagagcgtctccagccccatctcctaacgggggctgggggtaagagaaatctaactgcgctcccccaacccctcgccctgccatcttcccctcaagcctgctaagttatcccaggcctgtgcgtggtggaaaaagccagccttggccctgcagcctccacctcgccgctgggggaccaacaggttgcttacagctttgcaccccggcatcagcacaggggtccctgccccaccctccggcagctcagggagtgttttcctgtgaggcctcccccatcagtggaccagagggagaagcccgatgccccatcccggctttcccgtaacgcacaggacacgtgtgcaattcataggaacggcccagatcgccctcatgagtgccacctggtacaggtaggtggcgctcacgttcctgcccaaatgcagcccatcggggagtcacagtcagtccccccggcccccctcccagtccctgttggctttcggtagctctcgcatgcagttctattaacagccgtctagaagcgatgctttagtggcctaacccagggtcaaatacagctctttctagcaaaatcaggcagctctgccccatcggtaggggcaccgattagtctactaacagccagaggtccatctagcagggtgccgggaggagctgagcccccggaggtgggctcctggtgacgggtgtccaagaagcggtttccttgggagcttctgcctccgtgggcctctcagcccgccccgtgtggccgcccgggtgtggctcagccatgtcccctccccaggtccttcattcacccctcccctccccacagtggaattgttgaagtgtggcgagtctgtgctcgggacaataaagcttgtgacaggtc

SEQ ID NO: 4493 - DNA, 3141 bp, Homo sapiens
  source 1..3141: mol_type = unassigned DNA
atgcagaagcccagcggcctgaagccccccggccgtggggggaagcactccagccccatgggccggacatctactgggtcagcttcatcctcggcggcggtggccgctagctccaaggaaggctccccactgcacaaacagtcatctggaccctcctcctccccggccgcagctgctgcccccgagaagccgggccccaaggcggcggaagtgggggatgacttcctgggggactttgtggtgggcgagcgggtgtgggtgaacggcgtgaagccaggcgtggtgcagtatctgggagagacgcagttcgcaccgggccagtgggctggcgtggtgctggacgacccggtgggcaagaatgatggcgcggtgggcggcgtgcgctacttcgagtgcccggccctccagggtatcttcacgcggccctccaagctgacccggcagcccacggccgagggctcggggagtgatgcccactccgtggagtcgctgactgcccagaacctgtcattgcattcgggcacggccacgcccccgctgaccagccgcgtcatccccctgcgggagagcgtcctcaacagctccgtgaagactggcaacgagtcgggatccaacctctcagacagcggctctgtgaagcggggcgaaaaggacctgcgcctgggggaccgcgtgctggttggcgggacgaagactggcgtggtgcggtacgtgggggagacagactttgccaagggcgagtggtgtggcgtggagctggacgagccccttgggaagaatgatggggcggtggcgggcaccaggtacttccagtgcccacccaagtttggtctcttcgcgcccatccacaaagtgatccgtatcggcttcccatctaccagcccagccaaggccaagaagaccaagcgtatggccatgggtgtgtcagcactgacccacagtcccagcagttcctccatcagctccgtcagctctgtggcctcctccgtggggggtcggcccagccgcagtggcctgctcacggagacctcttcacgctacgcccgcaagatctcgggcaccacggccttgcaggaggcactgaaggagaagcagcagcacattgagcagctgctggctgaacgagacctggaacgggctgaggtggccaaggccacaagccacatctgcgaggtggagaaggagattgccctgctcaaggcacagcatgagcagtatgttgcagaagccgaggagaagctgcagcgagcccggctgctcgtggagagcgtgcggaaagagaaggtggacctgtccaaccagctggaggaggagaggaggaaggtggaggatctgcagttccgcgtggaggaggagtccatcaccaagggagacctggagacccagacgcagctggagcacgcgcgcattggggagctggaacagagcctgctactggagaaggcgcaggccgagcggctgctccgagaattagcggacaacaggctgaccacagtggccgagaagtcgcgcgtgctgcagctggaggaggagctcaccctgcgccgaggtgaaatcgaggagctccagcagtgcctgttgcactcgggtcccccacctccggaccacccagacgccgccgagatcctgcggctacgggagcggctgctctcggccagcaaggaacaccagagggagagtggggtgctgcgggataaatacgagaaggccctgaaggcctaccaggcggaggtggacaagctccgcgcggccaacgagaagtacgcacaggaggtggcgggcctgaaggacaaggttcagcaggccaccagcgagaacatggggctaatggacaactggaaatccaagctggactcgctggcctcggaccaccagaagtccctggaggacctcaaagccaccctgaactcgggcccaggcgcccagcagaaggagatcggcgagctgaaggcagtgatggagggcatcaagatggagcaccagctggagctgggtaacttgcaggccaagcatgacctggagaccgccatgcacgtgaaggagaaggaggccctgcgagagaagctgcaggaggcccaggaggagctggctgggctgcagcggcactggcgggcccagctggaggtgcaagccagccagcaccggctggagctgcaggaggcccaggaccagcgccgggatgccgagctgcgtgtgcacgagctggaaaaactggacgtggagtaccggggccaggcgcaggctatcgagttcctcaaggagcagatctcgctggccgagaagaagatgttggactacgagcggctgcagcgggcagaagcccagggcaaacaggaggtcgagagtttgcgggagaagctcctggtggctgagaacagactccaggcggtcgaggccctgtgctcctcccagcacacccacatgattgagtcgaatgacatttcagaggagacgatcaggacgaaggaaactgtggagggcctgcaggacaagctgaacaagagggacaaagaggtgacagccttgacctcccagaccgagatgctcagggcccaagtaagtgcgctggagagcaagtgtaagtcaggcgagaagaaggtggacgccctcctgaaggagaagcggcgcctggaggcagagctggagaccgtgtcccggaagacccatgacgcctcgggccagctagtcctcatcagccaggagctgctgcggaaggagcggagcctgaacgaactgcgggtgttgctgctggaggccaatcgtcactccccagggccggagagggacctgagccgtgaggtacacaaggctgagtggcggatcaaggagcagaaactcaaggatgacatccggggcctgcgtgaaaagctgaccgggctggacaaagagaaatccctgtcggatcagaggcgctactccctcatcgaccggtcctcggcgcccgagcttctgcggctgcagcaccagctgatgagcacggaggacgccctgcgggatgcgctggaccaggctcagcaggtggagaagctgatggaggccatgaggagctgccctgacaaggcccagaccatcggcaattccggttctgcaaacggcatccaccagcaggacaaagctcagaaacaagaggacaagcactga

SEQ ID NO: 4494 - DNA, 533 bp, Homo sapiens
  source 1..533: mol_type = unassigned DNA
gtcagctctgtggcctcctccgtggggggtcggcccagccgcagtggcctgctcacggagacctcttcacgctacgcccgcaagatctcgggcaccacggccttgcaggaggcactgaaggagaagcagcagcacattgagcagctgctggctgaacgagacctggaacgggctgaggtggccaaggccacaagccacatctgcgaggtggagaaggagattgccctgctcaaggcacagcatgagcagtatgttgcagaagccgaggagaagctgcagcgagcccggctgctcgtggagagcgtgcggaaagagaaggtggacctgtccaaccagctggaggaggagaggaggaaggtggaggatctgcagttccgcgtggaggaggagtccatcaccaagggagacctggaggcagaggatcacttgagcccagaaccaagcatgctgaccacagtggccgagaagtcgcgcgtgctgcagctggaggaggagctcaccctgcgccgaggtgaaatcgaggagctccagca

SEQ ID NO: 4495 - DNA, 3467 bp, Homo sapiens
  source 1..3467: mol_type = unassigned DNA
ctcggctcggccgcggggcgcgcaggcggctgctgggcggcctcggtgcgcgcctcccgccttcccagagacgtggcgcgaggcccgggccctgagcacctatcgcggggatccccggcgccaggagggggtgcagccggtgggcagcgccgcgcagggaggggccgcagcatcctcgccccccagcgcgcccgggcccgagaggaggaggccggggctctccgggcctcccgccgcttagcctgatgctggaaggacgaaggtgagtgaagatggcagagaggacgtgaccagcactcacccttgtccacctgcccagtggcaccgccatgcagaagcccagcggcctgaagccccccggccgtggggggaagcactccagccccatgggccggacatctactgggtcagcttcatcctcggcggcggtggccgctagctccaaggaaggctccccactgcacaaacagtcatctggaccctcctcctccccggccgcagctgctgcccccgagaagccgggccccaaggcggcggaagtgggggatgacttcctgggggactttgtggtgggcgagcgggtgtgggtgaacggcgtgaagccaggcgtggtgcagtatctgggagagacgcagttcgcaccgggccagtgggctggcgtggtgctggacgacccggtgggcaagaatgatggcgcggtgggcggcgtgcgctacttcgagtgcccggccctccagggtatcttcacgcggccctccaagctgacccggcagcccacggccgagggctcggggagtgatgcccactccgtggagtcgctgactgcccagaacctgtcattgcattcgggcacggccacgcccccgctgaccagccgcgtcatccccctgcgggagagcgtcctcaacagctccgtgaagactggcaacgagtcgggatccaacctctcagacagcggctctgtgaagcggggcgaaaaggacctgcgcctgggggaccgcgtgctggttggcgggacgaagactggcgtggtgcggtacgtgggggagacagactttgccaagggcgagtggtgtggcgtggagctggacgagccccttgggaagaatgatggggcggtggcgggcaccaggtacttccagtgcccacccaagtttggtctcttcgcgcccatccacaaagtgatccgtatcggcttcccatctaccagcccagccaaggccaagaagaccaagcgtatggccatgggtgtgtcagcactgacccacagtcccagcagttcctccatcagctccgtcagctctgtggcctcctccgtggggggtcggcccagccgcagtggcctgctcacggagacctcttcacgctacgcccgcaagatctcgggcaccacggccttgcaggaggcactgaaggagaagcagcagcacattgagcagctgctggctgaacgagacctggaacgggctgaggtggccaaggccacaagccacatctgcgaggtggagaaggagattgccctgctcaaggcacagcatgagcagtatgttgcagaagccgaggagaagctgcagcgagcccggctgctcgtggagagcgtgcggaaagagaaggtggacctgtccaaccagctggaggaggagaggaggaaggtggaggatctgcagttccgcgtggaggaggagtccatcaccaagggagacctggagacccagacgcagctggagcacgcgcgcattggggagctggaacagagcctgctactggagaaggcgcaggccgagcggctgctccgagaattagcggacaacaggctgaccacagtggccgagaagtcgcgcgtgctgcagctggaggaggagctcaccctgcgccgaggtgaaatcgaggagctccagcagtgcctgttgcactcgggtcccccacctccggaccacccagacgccgccgagatcctgcggctacgggagcggctgctctcggccagcaaggaacaccagagggagagtggggtgctgcgggataaatacgagaaggccctgaaggcctaccaggcggaggtggacaagctccgcgcggccaacgagaagtacgcacaggaggtggcgggcctgaaggacaaggttcagcaggccaccagcgagaacatggggctaatggacaactggaaatccaagctggactcgctggcctcggaccaccagaagtccctggaggacctcaaagccaccctgaactcgggcccaggcgcccagcagaaggagatcggcgagctgaaggcagtgatggagggcatcaagatggagcaccagctggagctgggtaacttgcaggccaagcatgacctggagaccgccatgcacgtgaaggagaaggaggccctgcgagagaagctgcaggaggcccaggaggagctggctgggctgcagcggcactggcgggcccagctggaggtgcaagccagccagcaccggctggagctgcaggaggcccaggaccagcgccgggatgccgagctgcgtgtgcacgagctggaaaaactggacgtggagtaccggggccaggcgcaggctatcgagttcctcaaggagcagatctcgctggccgagaagaagatgttggactacgagcggctgcagcgggcagaagcccagggcaaacaggaggtcgagagtttgcgggagaagctcctggtggctgagaacagactccaggcggtcgaggccctgtgctcctcccagcacacccacatgattgagtcgaatgacatttcagaggagacgatcaggacgaaggaaactgtggagggcctgcaggacaagctgaacaagagggacaaagaggtgacagccttgacctcccagaccgagatgctcagggcccaagtaagtgcgctggagagcaagtgtaagtcaggcgagaagaaggtggacgccctcctgaaggagaagcggcgcctggaggcagagctggagaccgtgtcccggaagacccatgacgcctcgggccagctagtcctcatcagccaggagctgctgcggaaggagcggagcctgaacgaactgcgggtgttgctgctggaggccaatcgtcactccccagggccggagagggacctgagccgtgaggtacacaaggctgagtggcggatcaaggagcagaaactcaaggatgacatccggggcctgcgtgaaaagctgaccgggctggacaaagagaaatccctgtcggatcagaggcgctactccctcatcgaccggtcctcggcgcccgagcttctgcggctgcagcaccagctgatgagcacggaggacgccctgcgggatgcgctggaccaggctcagcaggtggagaagctgatggaggccatgaggagctgccctgacaaggcccagaccatcggcaattccggttctgcaaacggcatccaccagcaggacaaagctcagaaacaagagaatacacac

SEQ ID NO: 4496 - DNA, 5473 bp, Homo sapiens
  source 1..5473: mol_type = unassigned DNA
ggaggtgcgagcccctgccgggtcccccctgcgccggaccatgtattcggcccacaggcccctgatgcccgcgtccagcgcggcctcccgtggcctcggcatgttcgtgtggacgaatgtggaacctcgctctgtggctgtgttcccttggcactccttagtccccttcctggcacccagccagcctgacccctccgtgcagccgagcgaggcccagcaacctgccagccacccagtggcctccaaccagagcaaagaacctgctgagtcggcagctgttgctcatgaacggccaccaggtgggacagggagtgctgaccctgagcggccccctggagccacatgccctgagagcccaggacccggacccccacaccctttgggggtggtggaatctggtaagggtccgcctcccaccacggaggaggaggcctccggccccccaggagagccccggctggacagtgagacagagagtgaccatgatgatgccttcctctccatcatgtctcctgagatccagttgcctctaccgcccggaaaacgtcggacccagtccctcagtgccctacccaaggaacgggactcatcttctgagaaggatggacgcagccccaacaagcgggagaaggaccacatccggcggcccatgaatgccttcatgatcttcagcaagcggcaccgggccctggtccaccagcgtcatcccaaccaggacaaccggaccgtcagcaagatcctgggcgagtggtggtatgccctggggcccaaggagaagcagaagtaccacgacctggccttccaggtgaaggaggcccacttcaaggcccacccagattggaagtggtgcaacaaggaccgaaagaagtccagctcagaggccaagcccacgagcctggggctggcaggagggcacaaggagacgcgggagcggagcatgtcggagacgggcactgctgctgcccctggggtgtcctctgagctcctgtccgttgcagcccagacactcctgagctcagacaccaaggctccggggagcagctcctgtggggcagaacggctacacacagttgggggacctggctcagcccggccccgagctttctcccacagcggggtacacagcctggacggcggagaagtagacagtcaggcgctacaggaactgacgcagatggtgtctggccctgcatcgtactctggcccaaagccttctacccagtatggagctccaggaccctttgcagcccctggtgagggaggtgccttggcggccactgggcggcccccgctgctgcccacccgagcttctcgttctcagcgtgcggccagtgaggacatgacgagtgatgaggagcgcatggtcatctgtgaggaggaaggggatgatgatgtcattgctgacgatggcttcggcaccactgacattgatctcaagtgcaaggagcgggtgaccgacagcgagagtggggacagctctggggaggacccagagggcaacaagggctttggtcggaaggtgttttcacctgtgatccgttcctcctttacccactgccgccccccactggaccctgagcccccagggcccccggatcctcctgtagcctttggcaaaggctatggttccgccccatcctcctctgcgtcctcgcctgcttcctcctcagcctcggcagccacctccttctcactgggctcaggaaccttcaaggcccaggagtctggtcagggcagcacagcgggccccctacggcccccaccccctggggctgggggtccagcgacaccttccaaggcaacccggttcctcccaatggatcctgccaccttccggcgcaagagacccgaaagtgtgggtggcctggagccaccaggcccctcagtcatcgcggcccctcccagcggaggaggaaacatcctgcagacactggtgctgcccccaaacaaggaggagcaagagggcggcggagccagagtgccctccgcccccgccccatcactggcctatggggccccagcagctcccctgtcccgtcctgccgccaccatggtcaccaatgtggtgcggcctgtcagcagcactcctgtgcccatcgcctctaagcccttccccacctctggccgggctgaggcgtctccaaatgacacagcaggtgccaggactgaaatgggcactgggtctcgggtgcctgggggctccccgctgggtgtcagcttagtgtattcggacaagaagtcggcagcagccacctcaccagccccacacttggtggctggacccctgctgggcactgtggggaaggcgcctgccactgtcactaacctactggtgggcaccccggggtatggggcccctgcgccccctgctgtccagttcattgcccagggggcccctggtggtgggaccactgcgggctcaggagcaggtgctgggagtggccccaatgggccagtacccctgggcatcctgcaaccaggtgccctgggcaaggctgggggaatcacccaggtacagtacatcctgcccacgctgccccagcagcttcaggtggcacctgccccagcaccagcccctgggaccaaggcagcggctcccagcggccctgcacccaccaccagcatccgtttcaccctcccaccgggcacttccaccaacggcaaagtcctggctgccactgcacccactcctggcatccccatcctgcagtctgtaccctccgccccaccccccaaagcccagtcagtttctcccgtgcaggccccgcccccgggtggctcagcccagctgctgcctgggaaggtcctagtgcctctggccgcccctagcatgtcagtgcggggtggaggggccggccagccactgccactggtgagcccgcccttctcagtacctgtgcagaatggtgcccagccccccagcaagatcatccagctgaccccggtgcctgtgagcacacccagcggcctggtgccgcccctgagcccagccacactccctggacccacctctcagcctcagaaggtcctgttgccctcctccaccagaatcacctatgtgcagtcagcgggcgggcacgcgctgcccctgggtaccagccctgcgtccagccaggctggaacagtcacctcgtacgggcccacgagctctgtagctctaggcttcacctcgctggggcccagcggccccgccttcgtgcagcccctgctctcagcaggccaagccccactgctggctcccggtcaggtgggcgtgtcacctgtgcccagtccccagctgccgcctgcctgtgcagcccccggaggtcctgtcataacagcattttactctggcagccctgcacccacctcctcagcacccctggcccagccatcccaggcccccccaagcctggtctacactgtggccaccagcacaaccccacctgcagccaccattctgcccaagggcccgccagcccctgccactgccaccccagccccgactagccctttccccagcgccacagcaggttccatgacctacagcttagtggcccccaaggcccagcggcccagcccgaaggccccccagaaagtgaaggcagccatcgccagcattcccgtggggtcctttgaggcaggtgcctctgggcggcctggccctgcaccccggcagcctctggagcctggcccagtccgagagccaactgccccagagtctgagcttgaggggcagcccacaccaccagcccctccacccctgccagagacctggactcccacggcccggagcagccccccactgcccccacctgctgaggagcggaccagcgccaagggccctgagaccatggccagcaaattccccagctcatcttcagactggcgcgtccctgggcagggcctggagaatcgtggggagcctcccactcctcccagcccggccccagctccagctgtagcccctggtggcagcagcgagagcagcagtgggcgggcagccggggacaccccggagcgcaaggaggcggctggtactggcaagaaggtgaaggtgcggcccccgcccctgaagaagacctttgactctgtggacaacagggtcctgtcagaagtggacttcgaagagcgctttgctgagttgcctgagtttcggcctgaggaggtgctgccctcccccaccctgcagtctctggccacctcaccccgggccatcctgggctcttaccgcaagaagaggaagaactccacggacctggattcagcacccgaggaccccacctcgcccaagcgcaagatgagaagacgctccagctgcagctcggagcccaacacccccaagagtgccaagtgcgagggggacatcttcacctttgaccgtacaggtacagaagccgaggacgtgcttggggagctagagtatgacaaggtgccatactcctccctgcggcgcaccctggaccagcgccgggccctggtcatgcagctctttcaggaccatggcttcttcccgtcagcccaggccacagccgccttccaggcccgctatgcagacatctttccctccaaggtttgtctgcagttgaagatccgtgaggtgcgccagaagatcatgcaggctgccactcccacggagcagccccctggagctgaggctcctctccctgtaccgccccccactggcaccgctgctgcccctgcccccactcccagccccgcagggggccctgaccccacctcacccagctcggactctggcacggcccaggctgccccgccactgcctccacccccagagtcggggcctggacagcctggctgggagggggctccccagccctcccccccacccccaggtccctccacagctgccacaggcaggtgagggacccctgagaagatgccaggacttatagtaccccctcaggacatggacagtatgtgggggcaggaaggttatctcctcccgggtaaagccatttcgtcctctccagtttggggcggaatgaggcctgctcctcttgtaaatacccccttccctcgaagctccctcccggtgctggggggcagctgaggggctgcaggggcagtctccctcctccaagcccctgtacataacctggagcgtgtgaccttcagagcttttcactttatgcaaaatggctcctgtgagggctgcaagctggagggtggtgcaggccttgggccacagggaggcgcctgtggaatagggggagttcatgcaccccttttttccccagaggggctggactcaggttagtttgggggtgggggctcctgcactttgccacaggcacggggagggttttctcctcaccccctctgccctcccaacttgggttgtactttctaagaaggtgattccccctgcccttgcccccttccccagaacaaaacatgttgatcatgtgcaatatttcttactgtgccgagaagccgcaatgagcgagattaaagctgtttaacacac

SEQ ID NO: 4497 - DNA, 1195 bp, Homo sapiens
  source 1..1195: mol_type = unassigned DNA
aagtgagaagccgggtggggcaggctggaaggaagacgaacctacgaagcagagatctgaagacagcatgtacacagccattccccagagtggctctccattcccaggctcagtgcaggatccaggcctgcatgtgtggcgggtggagaagctgaagccggtgcctgtggcgcaagagaaccagggcgtcttcttctcgggggactcctacctagtgctgcacaatggcccagaagaggtttcccatctgcacctgtggataggccagcagtcatcccgggatgagcagggggcctgtgccgtgctggctgtgcacctcaacacgctgctgggagagcggcctgtgcagcaccgcgaggtgcagggcaatgagtctgacctcttcatgagctacttcccacggggcctcaagtaccaggaaggtggtgtggagtcagcatttcacaagacctccacaggagccccagctgccatcaagaaactctaccaggtgaaggggaagaagaacatccgtgccaccgagcgggcactgaactgggacagcttcaacactggggactgcttcatcctggacctgggccagaacatcttcgcctggtgtggtggaaagtccaacatcctggaacgcaacaaggcgagggacctggccctggccatccgggacagtgagcgacagggcaaggcccaggtcctgggccccaagcctgctctgaaggagggcaaccctgaggaagacctcacagctgacaaggcaaatgcccaggccgcagctctgtataaggtctctgatgccactggacagatgaacctgaccaaggtggctgactccagcccatttgcccttgaactgctgatatctgatgactgctttgtgctggacaacgggctctgtggcaagatctatatctggaaggggcgaaaagcgaatgagaaggagcggcaggcagccctgcaggtggccgagggcttcatctcgcgcatgcagtacgccccgaacactcaggtggagattctgcctcagggccatgagagtcccatcttcaagcaatttttcaaggactggaaatgagggtgggcgtcttcctgccccatgctcccctgccccccaccacctgcctgcttgcttctctggctgcctggtcagtgcagaggtgccccctgcagatgttcaataaaggagacaagtgctttccca

SEQ ID NO: 4498 - DNA, 3020 bp, Homo sapiens
  source 1..3020: mol_type = unassigned DNA
gggaatcctgggatagtggcggacctgaagttggcctctgtgaaggctgagtcctggggaaccgggaccgagaagatttcgaaggtggaggagcgtgtctcaagattggggctacctgttctttcgtggggcagggaaggggcggacagcagcgcctattctggaggaactggactgagatgtgaccccgaagtgttaccgcttccaaacgaaatgagggtcacctttcacaccgccccccccccggggttggaaaagccaccgatcgttccagctgccgagcagctcttaaagctttggattcggctgtcgtggagataacgggcaccagaaaaacttgtaggagtagcaacagctatttggtcggatggaggccagaagccaagaataatcgaaacacgctgccagcgcccattagatggatgggaaatgagtgtaactcattgggaaagatattagacttcaaatcacctaaggcaaaccctacttcctggggcgcgggcgcgggcgctggcgttaggagacgtcactcccgcgcataactgacatggggccctcttggtcggcgtttccgggcgggtccttccgacggccgccgcggtgattccatcactcggctttcttcccggcctgcctcgcgcccgtagccgggctgggccagaacagcccaagatggccgacttcgatgatcgtgtgtcggatgaggagaaggtacgcatagctgctaaattcatcactcatgcacccccaggggaatttaatgaagtattcaatgacgttcggctactacttaataatgacaatctcctcagggaaggggcagcacatgcatttgcccagtataacatggatcagttcacgcctgtgaagatagaaggatatgaagatcaggtcttaattacagagcacggtgacctgggtaatagcagatttttagatccaagaaacaaaatttcctttaaatttgaccacttacggaaagaagcaagtgacccccagccagaagaagcagatggaggtctgaagtcttggagagaatcctgtgacagtgctttaagagcctatgtgaaagaccattattccaacggcttctgtactgtttatgctaaaactatcgatgggcaacagactattattgcatgtattgaaagccaccagtttcagcctaaaaacttctggaatggtcgttggagatcagagtggaagttcaccatcacaccacctacagcccaggtggttggcgtgcttaagattcaggttcactattatgaagatggcaatgttcagttggttagtcataaagatgtacaggattcactaactgtttcgaatgaagcccaaactgccaaggagtttattaaaatcatagagaatgcagaaaatgagtatcagacagcaattagtgaaaactatcaaacaatgtcagataccacattcaaggccttgcgccggcagcttccagttacccgcaccaaaatcgactggaacaagatactcagctacaagattggcaaagaaatgcagaatgcttaaaggctgaatgtaggattcttcagtatgtggaaagacaaggattcaacgtgtggtcatatgataaataagtgatttataaacaagagtgatattttgctagggctttcaaagttaaccggttttctagcctcatggaatactgttgaacctatagcgttgtcttgattcttttgtgttctctgccttgtaattttctgttactgctatatctacgtgtaaatctttttttctttttttttttttttttttggttaattctgccacatttaatgttggtgagagagtgatctatcctaatgacattttactgtttaaaaaagtttcctagccatgaagccctgctactgatttagacaaggtattatggtcattactttgtacccctatccttccaagcacttctggtacttcagtcgtttttactgatccaccaacacctaaagaggctatgctacagtctctagctaaatggaagacacattcatccttctccctctgactgctttgatcatcatttattgcatctcataactaattttctaaagtttggattgggacttttcaggtcctttttggagggcaaaggaagtgccagcttctctggggaacttgtttttaaatccaaagacttgaaccacattccctgcacatgaacatgtttgcttttatcccttctctcattgtctccttcccatcttagtaccattgtagttataaacatctgcattttttagaagcattttacccatttatttttttaaacattcaagaactgctgacgtactgtggatgtagagtataaaacttgaaaaatgcagatgttgaaggaataataggtatcttgtgctttaatactttatggcaggattgtactataagcaaatgaattaaacagctatgtaaatcataaagaaaaactaaaaatgaaccaaagtgaaaggataacttccaggcagtatctttctattgtaacctgttatttaaggaaatactagtgatttcttctaaataggatgtaaaacttctttcaaattactcttcctcagtcctgcctgccaagaactcaagtgtaactgtgataaaataacctttcccaggtatattggcaggtatgtgtgtaatctcagaatacacaggtgacatagatatgatatgacaactggtaatggtggattcatttacattgtttacacttctatgaccaggccttaagggaaggtcagttttttaaaaaaccaagtagtgtcttcctacctatctccagatacatgtcaaaaaaagaaaggtgtttgtgcttccgttttgtttctgctcagtaatatagtcaagcaagtttgttccaggtgacccattgagctgtgtatgcatttttgtttatttcaataaaatatatttgtattatttgtccttcatactatccatccataccacactatcttctgtatcaggtagtctaatagaaatatacctgttttgttctaaaattg

SEQ ID NO: 4499 - DNA, 2394 bp, Homo sapiens
  source 1..2394: mol_type = unassigned DNA
cccggggtgcgcgtgcgcggcggcctgagcggcgggcccctcccttagcgggggcgcgcggcgctgaggaccgcacggaaacggggaagtcaggtggccgctgccgccgccgccgccgcggtttgtcgccagaaggaagatggcggatctggaggagcagttgtctgatgaagagaaggtgcgtatagcagcaaaattcatcattcatgcccctcctggagaatttaatgaggttttcaatgatgttcggttactgcttaataatgacaatcttctcagggaaggagcagcccatgcatttgcacagtataacttggaccagtttactccagtaaaaattgaaggttatgaagatcaggtattgataacagaacatggcgacttgggaaatggaaagtttttggatccaaagaacagaatctgttttaaatttgatcacttaaggaaggaggcaactgatccaagaccctgtgaagtagaaaatgcagttgaatcatggagaacttcagtagaaactgctctgagagcttacgtaaaagaacattacccgaatggagtctgcactgtgtatggcaaaaaaatagatggacagcaaaccattattgcatgcatagaaagccatcagttccaagcaaaaaatttttggaatggtcgttggaggtcagaatggaagtttacaatcactccttcaaccactcaagtggttggcatcttgaaaattcaggttcattattatgaagatggtaatgttcagctagtgagtcataaagatatacaagattccctaacagtgtctaatgaagtgcaaacagcaaaagaatttataaagattgtagaagctgcagaaaatgaataccagactgccatcagtgagaattatcagacaatgtcggacactactttcaaagccttacgtcgacagttgccagttacacgcactaagattgattggaacaagatccttagctacaagattggcaaagagatgcagaatgcataagatgaacattgcatgaccggatcattttagtgtctttgcgttaaaaaatcattgcaaaagtattctgaactgtcaagctgcccagtcagatgggctgttgccatttaaaatcactgtaattaattagtttgattagagcacaaagcttagctaatcaaccattatttttcattttgtttgttctaagaggattgaaaatcagtttagtttaaatgtctttctgttaggcctttctttcttacaatgaagagatgattcttctagtttatggttaaaagtttttgaagtgtctcaaaaatattttactaactgtaaccctaaaattgatgtcttttggtttatgaaatcagtaatttttgatatttccccagttctttttaatggggtcaataatggacattctagtttaaggtggttgatggatttagccatatatgctgctaaagaaattgtctaccttttcttcctcacctgttccatttatgtaaagttgagattagagggaaagcattttctatatcaattgtgtttaaacctttcaagaaggttatttagctagcttagtgttgaactaaattttttttaaacaaggcaaggtctaatgctgttttgagattctgaaattaatgaaaatacttatttcagaaatgcatttaatgctttttttcttgtgacagttacgcaaatcagcttgaattccatatgtccctgagttatttttatcataaagccacaaatgtattataacaaggcaaattgtaatatatataatcctgaactcatgaccatgtctcggtttattttttttttcttggattgaaaagtactgaaattcaatgtgacattaaaatgcaaattttcctatttatttgagtagaaaatcacttaccagtgagcatatatattttaaaatactttctttggatattgtaattcttaactggttgtaaattagaaaagctgggattacatatggtgtgcggttacagtctaaattttttcatcctcctatgcatcataagcatgtttgtaatattttcaaaaatagttctactgatgctacaggaatttcaagcctgtggtgaatgttagtatttaccatagggagtgaagtggagttatggtttcattcaatagagtattgctgattatacttgagtggaatcctttcctcacgtactcccacagacgtctgggcctggaaattttttttttattttattttattgtttttttttttagaaaaacaccacttttattatgtacaataaaatatttcattagcttgaattgtatagatttttaaaaattcaatgaaagcatgttgtttaatttctttttaaaatcactgttgggctttgaaagcattgagaatataatatgaaattatgaca

SEQ ID NO: 4500 - DNA, 1423 bp, Homo sapiens
  source 1..1423: mol_type = unassigned DNA
aagtcaggtggccgctgccgccgccgccgccgcggtttgtcgccagaaggaagatggcggatctggaggagcagttgtctgatgaagagaaggtgcgtatagcagcaaaattcatcattcatgcccctcctggagaatttaatgaggttttcaatgatgttcggttactgcttaataatgacaatcttctcagggaaggagcagcccatgcatttgcacagtataacttggaccagtttactccagtaaaaattgaaggttatgaagatcaggtattgataacagaacatggcgacttgggaaatggaaagtttttggatccaaagaacagaatctgttttaaatttgatcacttaaggaaggaggcaactgatccaagaccctgtgaagtagaaaatgcagttgaatcatggagaacttcagtagaaactgctctgagagcttacgtaaaagaacattacccgaatggagtctgcactgaatggtcgttggaggtcagaatggaagtttacaatcactccttcaaccactcaagtggttggcatcttgaaaattcaggttcattattatgaagatggtaatgttcagctagtgagtcataaagatatacaagattccctaacagtgtctaatgaagtgcaaacagcaaaagaatttataaagattgtagaagctgcagaaaatgaataccagactgccatcagtgagaattatcagacaatgtcggacactactttcaaagccttacgtcgacagttgccagttacacgcactaagattgattggaacaagatccttagctacaagattggcaaagagatgcagaatgcataagatgaacattgcatgaccggatcattttagtgtctttgcgttaaaaaatcattgcaaaagtattctgaactgtcaagctgcccagtcagatgggctgttgccatttaaaatcactgtaattaattagtttgattagagcacaaagcttagctaatcaaccattatttttcattttgtttgttctaagaggattgaaaatcagtttagtttaaatgtctttctgttaggcctttctttcttacaatgaagagatgattcttctagtttatggttaaaagtttttgaagtgtctcaaaaatattttactaactgtaaccctaaaattgatgtcttttggtttatgaaatcagtaatttttgatatttccccagttctttttaatggggtcaataatggacattctagtttaaggtggttgatggatttagccatatatgctgctaaagaaattgtctaccttttcttcctcacctgttccatttatgtaaagttgagattagagggaaagcattttctatatcaattgtgtttaaacctttcaagaaggttatttagctagcttagtgttgaactaaattttttttaaaca

SEQ ID NO: 4501 - DNA, 1077 bp, Homo sapiens
  source 1..1077: mol_type = unassigned DNA
ggaggctcagaccttgccagactgcctgctttcatggatagacataaaaaccttcagcttgaatgttaacaccttgatgggaaaggtggctcatggaatgttttcttatcctttgaacactcctcatttcagaagctttgcttctgttgcaaccaaacatgacacttagcgtgctgagcaggaaggacaaggaaagagtaattcgcagactgttattacaggcccctccaggggaatttgtaaatgcctttgatgatctctgtctgcttatccgtgatgaaaaacttatgcaccaccaaggtgagtgtgcaggccaccaacactgccaaaaatattctgtaccactctgcatcgatggaaatccagtactcttgtctcaccacaatgtaatgggcgactaccgattttttgaccatcaaagcaaactttctttcaaatatgacctgcttcaaaatcagctgaaagacatccaaagtcatggtatcattcagaatgaggcagaatacctgagagttgttcttctgtgcgccttaaaactgtatgtgaatgaccactatccaaaaggaaattgcaacatgctgagaaaaactgtcaaaagtaaggagtacttgatagcttgcattgaagatcacaactatgaaacaggagagtgctggaacggactttggaaatctaaatggattttccaagttaacccatttctaacccaagtaacgggaagaatatttgtgcaagctcacttcttcaggtgtgtcaaccttcatattgaaatatccaaggacctgaaagaaagcttggaaatagttaaccaagctcaactggctctaagttttgcaaggcttgtggaagagcaagagaacaaatttcaagctgcagtcttggaagaattacaggagttatccaatgaagccctgagaaaaattctacgaagggatcttccagtgacccgcactcttattgactggcacaggatactctctgacttgaatctggtgatgtatcctaaattaggatatgtcatttattcaagaagtgtgttgtgcaactggataatataaagaattgctcctggtaact

SEQ ID NO: 4502 - DNA, 883 bp, Homo sapiens
  source 1..883: mol_type = unassigned DNA
ggggagagccactgacgccgggaccgggaccgccgccgccgccgccaccatgagtgatcagcagctggactgtgccttggacctaatgaggcgcctgcctccccagcaaatcgagaaaaacctcagcgacctgatcgacctggtccccagtctatgtgaggatctcctgtcttctgttgaccagccactgaaaattgccagagacaaggtggtgggaaaggattaccttttgtgtgactacaacagagatggggactcctataggtcaccatggagtaacaagtatgaccctcccttggaggatggggccatgccgtcagctcggctgagaaagctggaggtggaagccaacaatgcctttgaccagtatcgagacctgtattttgaaggtggcgtctcatctgtctacctctgggatctggatcatggctttgctggagtgatcctcataaagaaggctggagatggatcaaagaagatcaaaggctgctgggattccatccacgtggtagaagtgcaggagaaatccagcggtcgcaccgcccattacaagttgacctccacggtgatgctgtggctgcagaccaacaaatctggctctggcaccatgaacctcggaggcagccttaccagacagatggagaaggatgaaactgtgagtgactgctccccacacatagccaacatcgggcgcctggtagaggacatggaaaataaaatcagaagtacgctgaacgagatctactttggaaaaacaaaggatatcgtcaatgggctgagatctattgatgctatccctgacaaccaaaagtttaagcagttgcagagggagctctctcaagtgctgacccagcgccagatctacatccagcctgataattaa

SEQ ID NO: 4503 - DNA, 2068 bp, Homo sapiens
  source 1..2068: mol_type = unassigned DNA
gtggaagcgccgggccctgctgcgggggggagagccactgacgccgggaccgggaccgccgccgccgccgccaccatgctccatgcctgaccgtgactcgcatctcgccaggccagtgcatttcctcttctggctgtcatcggaattttcaagtgtcaagaccccactttgttcctgttgtcctggttccggctttgggaagcatgacctttcaggcctgctcagagacaccgcagtgcactttgtgcgttatcagccttacagagactctacggtcaggagtttttgtggcaatggaactgctggggtttcatctgcaaatgaaaaccatctggccagctgcttgggtcagatggaaaccagatgggagaagtcaggagcgggcagcgagcagcctggggcagcgtccctagtcacgtcatgtttccacttcctcttgccccctcgcctcccctgcctgcaaaacgattgttattaacccatcacctcctccaatgcccaggcagttccaggatacagggttctctcgcccaggccttggccagcccagaagatgtgacccagaacctagaaagagtgatcagcagctggactgtgccttggacctaatgaggcgcctgcctccccagcaaatcgagaaaaacctcagcgacctgatcgacctggtccccagtctatgtgaggatctcctgtcttctgttgaccagccactgaaaattgccagagacaaggtggtgggaaaggattaccttttgtgtgactacaacagagatggggactcctataggtcaccatggagtaacaagtatgaccctcccttggaggatggggccatgccgtcagctcggctgagaaagctggaggtggaagccaacaatgcctttgaccagtatcgagacctgtattttgaaggtggcgtctcatctgtctacctctgggatctggatcatggctttgctggagtgatcctcataaagaaggctggagatggatcaaagaagatcaaaggctgctgggattccatccacgtggtagaagtgcaggagaaatccagcggtcgcaccgcccattacaagttgacctccacggtgatgctgtggctgcagaccaacaaatctggctctggcaccatgaacctcggaggcagccttaccagacagatggagaaggatgaaactgtgagtgactgctccccacacatagccaacatcgggcgcctggtagaggtctgtgcagacttttgcagacaaatcaaaacaagaagctctgaagaatgacctggtggaggctttgaagagaaagcagcaatgctaaacctctgtttcatgctaaccagacacgccgtgcactcgttagattcctttcttagaaaactcgttttctgctcccttccctcgtcccttccctccccgacaggtcacataacagctgcatcattgaccgcacagcgccatctctccctgagaataaagccgatagccaccctcctccggctccgagcctgcttctgccacacctcgctctcagttctctccacatttccatagagaccgtgtggtttttgttcacccgggccccccgtcttcctccctgtccccccatttataggcataaaatccactgtctgccagcctcccttccctcccacctttttggtacattggtgtaaaaaatgtaaaacaaaaaaattttatgaactaactgtggtgtgtgaaagagagaagaaaaactggaaatcttattccgtgtgtgtttgggagttgcttggggttgggggtcgtggggacaggggacagctctgggagcagaggtggccctcggtgccgtcctgcgcagactctcccgtcccacggaggccgcggggtgggggctggggggggtgccgccgaccgttccgctcttccggccaggtgcttttctgtcaatttctatggaatgcaaaaggaggtttttgttttattttgtttttttgtaaagcttaagaaaaaaatctacatcttatacttgagcctccatacttaaaaaaagaaaagaaaagaaatcaataaaaagaaactggggcgcagtt

SEQ ID NO: 4504 - DNA, 1686 bp, Homo sapiens
  source 1..1686: mol_type = unassigned DNA
ggagagccactgacgccgggaccgggaccgccgccgccgccgccaccatgagtgatcagcagctggactgtgccttggacctaatgaggcgcctgcctccccagcaaatcgagaaaaacctcagcgacctgatcgacctggtccccagtctatgtgaggatctcctgtcttctgttgaccagccactgaaaattgccagagacaaggtggtgggaaaggattaccttttgtgtgactacaacagagatggggactcctataggtcaccatggagtaacaagtatgaccctcccttggaggatggggccatgccgtcagctcggctgagaaagctggaggtggaagccaacaatgcctttgaccagtatcgagacctgtattttgaaggtggcgtctcatctgtctacctctgggatctggatcatggctttgctggagtgatcctcataaagaaggctggagatggatcaaagaagatcaaaggctgctgggattccatccacgtggtagaagtgcaggagaaatccagcggtcgcaccgcccattacaagttgacctccacggtgatgctgtggctgcagaccaacaaatctggctctggcaccatgaacctcggaggcagccttaccagacagatggagaaggatgaaactgtgagtgactgctccccacacatagccaacatcgggcgcctggtagaggacatggaaaataaaatcagaagtacgctgaacgagatctactttggaaaaacaaaggatatcgtcaatgggctgagatctattgatgctatccctgacaaccaaaagtttaagcagttgcagagggagctctctcaagtgctgacccagcgccagatctacatccagcctgataattaagccgatccaggtctgtgcagacttttgcagacaaatcaaaacaagaagctctgaagaatgacctggtggaggctttgaagagaaagcagcaatgctaaacctctgtttcatgctaaccagacacgccgtgcactcgttagattcctttcttagaaaactcgttttctgctcccttccctcgtcccttccctccccgacaggtcacataacagctgcatcattgaccgcacagcgccatctctccctgagaataaagccgatagccaccctcctccggctccgagcctgcttctgccacacctcgctctcagttctctccacatttccatagagaccgtgtggtttttgttcacccgggccccccgtcttcctccctgtccccccatttataggcataaaatccactgtctgccagcctcccttccctcccacctttttggtacattggtgtaaaaaatgtaaaacaaaaaaattttatgaactaactgtggtgtgtgaaagagagaagaaaaactggaaatcttattccgtgtgtgtttgggagttgcttggggttgggggtcgtggggacaggggacagctctgggagcagaggtggccctcggtgccgtcctgcgcagactctcccgtcccacggaggccgcggggtgggggctggggggggtgccgccgaccgttccgctcttccggccaggtgcttttctgtcaatttctatggaatgcaaaaggaggtttttgttttattttgtttttttgtaaagcttaagaaaaaaatctacatcttatacttgagcctccatactta

SEQ ID NO: 4505 - DNA, 1568 bp, Homo sapiens
  source 1..1568: mol_type = unassigned DNA
gagtgatcagcagctggactgtgccttggacctaatgaggcgcctgcctccccagcaaatcgagaaaaacctcagcgacctgatcgacctggtccccagtctatgtgaggatctcctgtcttctgttgaccagccactgaaaattgccagagacaaggtggtgggaaaggattaccttttgtgtgactacaacagagatggggactcctataggtcaccatggagtaacaagtatgaccctcccttggaggatggggccatgccgtcagctcggctgagaaagctggaggtggaagccaacaatgcctttgaccagtatcgagacctgtattttgaaggtggcgtctcatctgtctacctctgggatctggatcatggctttgctggagtgatcctcataaagaaggctggagatggatcaaagaagatcaaaggctgctgggattccatccacgtggtagaagtgcaggagaaatccagcggtcgcaccgcccattacaagttgacctccacggtgatgctgtggctgcagaccaacaaatctggctctggcaccatgaacctcggaggcagccttaccagacagatggagaaggatgaaactgtgagtgactgctccccacacatagccaacatcgggcgcctggtagaggacatggaaaataaaatcagaagtacgctgaacgagatctactttggaaaaacaaaggatatcgtcaatgggctgaggtctgtgcagacttttgcagacaaatcaaaacaagaagctctgaagaatgacctggtggaggctttgaagagaaagcagcaatgctaaacctctgtttcatgctaaccagacacgccgtgcactcgttagattcctttcttagaaaactcgttttctgctcccttccctcgtcccttccctccccgacaggtcacataacagctgcatcattgaccgcacagcgccatctctccctgagaataaagccgatagccaccctcctccggctccgagcctgcttctgccacacctcgctctcagttctctccacatttccatagagaccgtgtggtttttgttcacccgggccccccgtcttcctccctgtccccccatttataggcataaaatccactgtctgccagcctcccttccctcccacctttttggtacattggtgtaaaaaatgtaaaacaaaaaaattttatgaactaactgtggtgtgtgaaagagagaagaaaaactggaaatcttattccgtgtgtgtttgggagttgcttggggttgggggtcgtggggacaggggacagctctgggagcagaggtggccctcggtgccgtcctgcgcagactctcccgtcccacggaggccgcggggtgggggctggggggggtgccgccgaccgttccgctcttccggccaggtgcttttctgtcaatttctatggaatgcaaaaggaggtttttgttttattttgtttttttgtaaagcttaagaaaaaaatctacatcttatacttgagcctccatacttaaaaaaagaaaagaaaagaaatcaataaaaagaaactggggcgca

SEQ ID NO: 4506 - DNA, 1175 bp, Homo sapiens
  source 1..1175: mol_type = unassigned DNA
atgggtggcccacaggacaaggatgaacgcacaatcgcccttgtgaggccgtggccttgggggcaccaggccctggatccagcatatggcctggacacgatgcacccaagcaggcgcagcctccccttccctctgaactgtcagcttgcaagggttggaactgctgattatggaagtccctcggatcagagtgatcagcagctggactgtgccttggacctaatgaggcgcctgcctccccagcaaatcgagaaaaacctcagcgacctgatcgacctggtccccagtctatgtgaggatctcctgtcttctgttgaccagccactgaaaattgccagagacaaggtggtgggaaaggattaccttttgtgtgactacaacagagatggggactcctataggtcaccatggagtaacaagtatgaccctcccttggaggatggggccatgccgtcagctcggctgagaaagctggaggtggaagccaacaatgcctttgaccagtatcgagacctgtattttgaaggtggcgtctcatctgtctacctctgggatctggatcatggctttgctggagtgatcctcataaagaaggctggagatggatcaaagaagatcaaaggctgctgggattccatccacgtggtagaagtgcaggagaaatccagcggtcgcaccgcccattacaagttgacctccacggtgatgctgtggctgcagaccaacaaatctggctctggcaccatgaacctcggaggcagccttaccagacagatggagaaggatgaaactgtgagtgactgctccccacacatagccaacatcgggcgcctggtagaggacatggaaaataaaatcagaagtacgctgaacgagatctactttggaaaaacaaaggatatcgtcaatgggctgaggtctgtgcagacttttgcagacaaatcaaaacaagaagctctgaagaatgacctggtggaggctttgaagagaaagcagcaatgctaaacctctgtttcatgctaaccagacacgccgtgcactcgttagattcctttcttagaaaactcgttttctgctcccttccctcgtcccttccctccccgacaggtcacataacagctgcatcattgaccgcacagcgccatctctccctgagaataaagccgatagccacc

SEQ ID NO: 4507 - DNA, 1710 bp, Homo sapiens
  source 1..1710: mol_type = unassigned DNA
gcccggcgcggggggaggggggtgctgacccggatgttcactcctgggcacccggggaagtggaagcgccgggccctgctgcgggggggagagccactgacgccgggaccgggaccgccgccgccgccgccaccatgagtgatcagcagctggactgtgccttggacctaatgaggcgcctgcctccccagcaaatcgagaaaaacctcagcgacctgatcgacctggtccccagtctatgtgaggatctcctgtcttctgttgaccagccactgaaaattgccagagacaaggtggtgggaaaggattaccttttgtgtgactacaacagagatggggactcctataggtcaccatggagtaacaagtatgaccctcccttggaggatggggccatgccgtcagctcggctgagaaagctggaggtggaagccaacaatgcctttgaccagtatcgagacctgtattttgaaggtggcgtctcatctgtctacctctgggatctggatcatggctttgctggagtgatcctcataaagaaggctggagatggatcaaagaagatcaaaggctgctgggattccatccacgtggtagaagtgcaggagaaatccagcggtcgcaccgcccattacaagttgacctccacggtgatgctgtggctgcagaccaacaaatctggctctggcaccatgaacctcggaggcagccttaccagacagatggagaaggatgaaactgtgagtgactgctccccacacatagccaacatcgggcgcctggtagaggacatggaaaataaaatcagaagtacgctgaacgagatctactttggaaaaacaaaggatatcgtcaatgggctgaggtctgtgcagacttttgcagacaaatcaaaacaagaagctctgaagaatgacctggtggaggctttgaagagaaagcagcaatgctaaacctctgtttcatgctaaccagacacgccgtgcactcgttagattcctttcttagaaaactcgttttctgctcccttccctcgtcccttccctccccgacaggtcacataacagctgcatcattgaccgcacagcgccatctctccctgagaataaagccgatagccaccctcctccggctccgagcctgcttctgccacacctcgctctcagttctctccacatttccatagagaccgtgtggtttttgttcacccgggccccccgtcttcctccctgtccccccatttataggcataaaatccactgtctgccagcctcccttccctcccacctttttggtacattggtgtaaaaaatgtaaaacaaaaaaattttatgaactaactgtggtgtgtgaaagagagaagaaaaactggaaatcttattccgtgtgtgtttgggagttgcttggggttgggggtcgtggggacaggggacagctctgggagcagaggtggccctcggtgccgtcctgcgcagactctcccgtcccacggaggccgcggggtgggggctggggggggtgccgccgaccgttccgctcttccggccaggtgcttttctgtcaatttctatggaatgcaaaaggaggtttttgttttattttgtttttttgtaaagcttaagaaaaaaatctacatcttatacttgagcctccatacttaaaaaaagaaaagaaaagaaatcaataaaaagaaactggggcgcagttagc

SEQ ID NO: 4508 - DNA, 853 bp, Homo sapiens
  source 1..853: mol_type = unassigned DNA
ggcccccacagatagacctgccctcctgccacttgacccttctgcaggacaggcccagcacttaggttggaagggccagagaacttcttcctgacaggatcaagggatttttggagcatgtttgtatgtggactttgggcctcaaagtgttttgaggaccatggttccttgtttagtcaagggatgttgctgctgaacgaggagtgatcagcagctggactgtgccttggacctaatgaggcgcctgcctccccagcaaatcgagaaaaacctcagcgacctgatcgacctggtccccagtctatgtgaggatctcctgtcttctgttgaccagccactgaaaattgccagagacaaggtggtgggaaaggattaccttttgtgtgactacaacagagatggggactcctataggtcaccatggagtaacaagtatgaccctcccttggaggatggggccatgccgtcagctcggctgagaaagctggaggtggaagccaacaatgcctttgaccagtatcgagacctgtattttgaaggtggcgtctcatctgtctacctctgggatctggatcatggctttgctggagtgatcctcataaagaaggctggagatggatcaaagaagatcaaaggctgctgggattccatccacgtggtagaagtgcaggagaaatccagcggtcgcaccgcccattacaagttgacctccacggtgatgctgtggctgcagaccaacaaatctggctctggcaccatgaacctcggaggcagccttaccagacagatggagaaggatgaaactgtgagtgactgctccccacacatagccaacatcgggcgcctggtagag

SEQ ID NO: 4509 - DNA, 1462 bp, Homo sapiens
  source 1..1462: mol_type = unassigned DNA
tccctgtacctggggcgcgccttctttgcagcctttggggagcgaggggagctctccatcagggatggggtggtcccggtgctgtgccttctcagttgccgcttctagggaggccgcctaggagccagcgagggaagggcgggcatcggtgtgcccagaaggcagcgcgctgctctgcgggcccttctcgaggctgccgccgtgggtgctgtgcgtgcgaagcattctgcagggcaggccggggtccacggcgcccgggcctgagtgggagccgaggggcgaggatgggtggcccacaggacaaggatgaacgcacaatcgcccttgtgaggccgtggccttggggggccaccaggccctggatccagcatatggcctggacacgatgcacccaagcaggcgcagcctccccttccctctgaactgtcagcttgcaagggttggaactgctgattatggaagtccctcggatcagagtgatcagcagctggactgtgccttggacctaatgaggcgcctgcctccccagcaaatcgagaaaaacctcagcgacctgatcgacctggtccccagtctatgtgaggatctcctgtcttctgttgaccagccactgaaaattgccagagacaaggtggtgggaaaggattaccttttgtgtgactacaacagagatggggactcctataggtcaccatggagtaacaagtatgaccctcccttggaggatggggccatgccgtcagctcggctgagaaagctggaggtggaagccaacaatgcctttgaccagtatcgagacctgtattttgaaggtggcgtctcatctgtctacctctgggatctggatcatggctttgctggagtgatcctcataaagaaggctggagatggatcaaagaagatcaaaggctgctgggattccatccacgtggtagaagtgcaggagaaatccagcggtcgcaccgcccattacaagttgacctccacggtgatgctgtggctgcagaccaacaaatctggctctggcaccatgaacctcggaggcagccttaccagacagatggagaaggatgaaactgtgagtgactgctccccacacatagccaacatcgggcgcctggtagaggacatggaaaataaaatcagaagtacgctgaacgagatctactttggaaaaacaaaggatatcgtcaatgggctgaggtctgtgcagacttttgcagacaaatcaaaacaagaagctctgaagaatgacctggtggaggctttgaagagaaagcagcaatgctaaacctctgtttcatgctaaccagacacgccgtgcactcgttagattcctttcttagaaaactcgttttctgctcccttccctcgtcccttccctccccgacaggtcacataacagctgcatcattgaccgcacagcgccatctctccctgagaataaagccgatagccaccc

SEQ ID NO: 4510 - DNA, 432 bp, Homo sapiens
  source 1..432: mol_type = unassigned DNA
gttggtgtcagacacatgtggaaaagaaaagaacaggcccataattttgtctcagtgcccagggccagatgttaaaggtccccagtctatgtgaggatctcctgtcttctgttgaccagccactgaaaattgccagagacaaggtggtgggaaaggattaccttttgtgtgactacaacagagatggggactcctataggtcaccatggagtaacaagtatgaccctcccttggaggatggggccatgccgtcagctcggctgagaaagctggaggtggaagccaacaatgcctttgaccagtatcgagacctgtattttgaaggtggcgtctcatctgtctacctctgggatctggatcatggctttgctggagtgatcctcataaagaaggctggagatggatcaaagaagatcaaaggctgctgggatt

SEQ ID NO: 4511 - DNA, 1442 bp, Homo sapiens
  source 1..1442: mol_type = unassigned DNA
gacggcctggcatacccactgcccaccccagtgactgctcttctgcttcaggcctgctggcctcccagcactgcctgcccctccctgtcgggggacatcgcctccacaccggctggggaaggagcccaggggtggggctggtgggtggggctggtggttggggcagccagagaagtaagagggaagtgagaagccgggtggggcaggctggaaggaagacgaacctacgaagcagagatctgaagacagcatgtacacagccattccccagagtggctctccattcccaggctcagtgcaggatccaggcctgcatgtgtggcgggtggagaagctgaagccggtgcctgtggcgcaagagaaccagggcgtcttcttctcgggggactcctacctagtgctgcacaatggcccagaagaggtttcccatctgcacctgtggataggccagcagtcatcccgggatgagcagggggcctgtgccgtgctggctgtgcacctcaacacgctgctgggagagcggcctgtgcagcaccgcgaggtgcagggcaatgagtctgacctcttcatgagctacttcccacggggcctcaagtaccaggaaggtggtgtggagtcagcatttcacaagacctccacaggagccccagctgccatcaagaaactctaccaggtgaaggggaagaagaacatccgtgccaccgagcgggcactgaactgggacagcttcaacactggggactgcttcatcctggacctgggccagaacatcttcgcctggtgtggtggaaagtccaacatcctggaacgcaacaaggcgagggacctggccctggccatccgggacagtgagcgacagggcaaggcccaggtggagattgtcactgatggggaggagcctgctgagatgatccaggtcctgggccccaagcctgctctgaaggagggcaaccctgaggaagacctcacagctgacaaggcaaatgcccaggccgcagctctgtataaggtctctgatgccactggacagatgaacctgaccaaggtggctgactccagcccatttgcccttgaactgctgatatctgatgactgctttgtgctggacaacgggctctgtggcaagatctatatctggaaggggcgaaaagcgaatgagaaggagcggcaggcagccctgcaggtggccgagggcttcatctcgcgcatgcagtacgccccgaacactcaggtggagattctgcctcagggccatgagagtcccatcttcaagcaatttttcaaggactggaaatgagggtgggcgtcttcctgccccatgctcccctgccccccaccacctgcctgcttgcttctctggctgcctggtcagtgcagaggtgccccctgcagatgttcaataaaggagacaagtgctttcccagctcttttcctgcaccacc

SEQ ID NO: 4512 - DNA, 835 bp, Homo sapiens
  source 1..835: mol_type = unassigned DNA
cttacacgcgtcctggcgtgtggctctcctgcgtcctcgtttttctcgtgagccctggatctggacagtgggcccggcgcgaggccctcaactccggctgggctcccggtggcactttctgccgaccctgagatgtacccgccacgcctgcgggactgacctctagatctgaagacagcatgtacacagccattccccagagtggctctccattcccaggctcagtgcaggatccaggcctgcatgtgtggcgggtggagaagctgaagccggtgcctgtggcgcaagagaaccagggcgtcttcttctcgggggactcctacctagtgctgcacaatggcccagaagaggtttcccatctgcacctgtggataggccagcagtcatcccgggatgagcagggggcctgtgccgtgctggctgtgcacctcaacacgctgctgggagagcggcctgtgcagcaccgcgaggtgcagggcaatgagtctgacctcttcatgagctacttcccacggggcctcaagtaccaggaaggtggtgtggagtcagcatttcacaagacctccacaggagccccagctgccatcaagaaactctaccaggtgaaggggaagaagaacatccgtgccaccgagcgggcactgaactgggacagcttcaacactggggactgcttcatcctggacctgggccagaacatcttcgcctggtgtggtggaaagtccaacatcctggaacgcaacaaggcgagggacctggccctggccatccgggacagtgagcgacagggcaaggcccaggtggagattgtcactgatggggaggagcctgctga

SEQ ID NO: 4513 - DNA, 1183 bp, Homo sapiens
  source 1..1183: mol_type = unassigned DNA
tccagggggcggggggcggctgagacagcgcccagggcctcggagcaaggcgttggcaggcaagtaacagcatgtacacagccattccccagagtggctctccattcccaggctcagtgcaggatccaggcctgcatgtgtggcgggtggagaagctgaagccggtgcctgtggcgcaagagaaccagggcgtcttcttctcgggggactcctacctagtgctgcacaatggcccagaagaggtttcccatctgcacctgtggataggccagcagtcatcccgggatgagcagggggcctgtgccgtgctggctgtgcacctcaacacgctgctgggagagcggcctgtgcagcaccgcgaggtgcagggcaatgagtctgacctcttcatgagctacttcccacggggcctcaagtaccaggaaggtggtgtggagtcagcatttcacaagacctccacaggagccccagctgccatcaagaaactctaccaggtgaaggggaagaagaacatccgtgccaccgagcgggcactgaactgggacagcttcaacactggggactgcttcatcctggacctgggccagaacatcttcgcctggtgtggtggaaagtccaacatcctggaacgcaacaaggcgagggacctggccctggccatccgggacagtgagcgacagggcaaggcccaggtggagattgtcactgatggggaggagcctgctgagatgatccaggtcctgggccccaagcctgctctgaaggagggcaaccctgaggaagacctcacagctgacaaggcaaatgcccaggccgcagctctgtataaggtctctgatgccactggacagatgaacctgaccaaggtggctgactccagcccatttgcccttgaactgctgatatctgatgactgctttgtgctggacaacgggctctgtggcaagatctatatctggaaggggcgaaaagcgaatgagaaggagcggcaggcagccctgcaggtggccgagggcttcatctcgcgcatgcagtacgccccgaacactcaggtggagattctgcctcagggccatgagagtcccatcttcaagcaatttttcaaggactggaaatgagggtgggcgtcttcctgccccatgctcccctgccccccaccacctgcctgcttgcttctctggct

SEQ ID NO: 4514 - DNA, 1151 bp, Homo sapiens
  source 1..1151: mol_type = unassigned DNA
gactcaccgggggcggctcctggccgcgcacctccagggggcggggggcggctgagacagcgcccagggcctcggagcaaggcgttggcagatctgaagacagcatgtacacagccattccccagagtggctctccattcccaggctcagtgcaggatccaggcctgcatgtgtggcgggtggagaagctgaagccggtgcctgtggcgcaagagaaccagggcgtcttcttctcgggggactcctacctagtgctgcacaatggcccagaagaggtttcccatctgcacctgtggataggccagcagtcatcccgggatgagcagggggcctgtgccgtgctggctgtgcacctcaacacgctgctgggagagcggcctgtgcagcaccgcgaggtgcagggcaatgagtctgacctcttcatgagctacttcccacggggcctcaagtaccaggaaggtggtgtggagtcagcatttcacaagacctccacaggagccccagctgccatcaagaaactctaccaggtgaaggggaagaagaacatccgtgccaccgagcgggcactgaactgggacagcttcaacactggggactgcttcatcctggacctgggccagaacatcttcgcctggtgtggtggaaagtccaacatcctggaacgcaacaaggcgagggacctggccctggccatccgggacagtgagcgacagggcaaggcccaggtggagattgtcactgatggggaggagcctgctgagatgatccaggtcctgggccccaagcctgctctgaaggagggcaaccctgaggaagacctcacagctgacaaggcaaatgcccaggccgcagctctgtataaggtctctgatgccactggacagatgaacctgaccaaggtggctgactccagcccatttgcccttgaactgctgatatctgatgactgctttgtgctggacaacgggctctgtggcaagatctatatctggaaggggcgaaaagcgaatgagaaggagcggcaggcagccctgcaggtggccgagggcttcatctcgcgcatgcagtacgccccgaacactcaggtggagattctgcctcagggccatgagagtcccatcttcaagcaatttttcaaggactggaaatga

SEQ ID NO: 4515 - DNA, 865 bp, Homo sapiens
  source 1..865: mol_type = unassigned DNA
gctcccctcttcaactttagcactttctaatgctgacatctgtgattctgtgacattccccacttagaggaagttcgtctgcggtttcactggatctgaagacagcatgtacacagccattccccagagtggctctccattcccaggctcagtgcaggatccaggcctgcatgtgtggcgggtggagaagctgaagccggtgcctgtggcgcaagagaaccagggcgtcttcttctcgggggactcctacctagtgctgcacaatggcccagaagaggtttcccatctgcacctgtggataggccagcagtcatcccgggatgagcagggggcctgtgccgtgctggctgtgcacctcaacacgctgctgggagagcggcctgtgcagcaccgcgaggtgcagggcaatgagtctgacctcttcatgagctacttcccacggggcctcaagtaccaggaaggtggtgtggagtcagcatttcacaagacctccacaggagccccagctgccatcaagaaactctaccaggtgaaggggaagaagaacatccgtgccaccgagcgggcactgaactgggacagcttcaacactggggactgcttcatcctggacctgggccagaacatcttcgcctggtgtggtggaaagtccaacatcctggaacgcaacaaggcgagggacctggccctggccatccgggacagtgagcgacagggcaaggcccaggtggagattgtcactgatggggaggagcctgctgagatgatccaggtcctgggccccaagcctgctctgaaggagggcaaccctgaggaagacctcacagctgacaaggcaaatgcccaggccgcagctctgtataag

SEQ ID NO: 4516 - DNA, 930 bp, Homo sapiens
  source 1..930: mol_type = unassigned DNA
agggggcggggggcggctgagacagcgcccagggcctcggagcaaggcgttggcaggagaggctttagcctagacagctgagtgtgaggaacagtgattcccattgatccttgttccctccgtgggtcacagagtccagaacttaagagccacccaagatctgaagacagcatgtacacagccattccccagagtggctctccattcccaggctcagtgcaggatccaggcctgcatgtgtggcgggtggagaagctgaagccggtgcctgtggcgcaagagaaccagggcgtcttcttctcgggggactcctacctagtgctgcacaatggcccagaagaggtttcccatctgcacctgtggataggccagcagtcatcccgggatgagcagggggcctgtgccgtgctggctgtgcacctcaacacgctgctgggagagcggcctgtgcagcaccgcgaggtgcagggcaatgagtctgacctcttcatgagctacttcccacggggcctcaagtaccaggaaggtggtgtggagtcagcatttcacaagacctccacaggagccccagctgccatcaagaaactctaccaggtgaaggggaagaagaacatccgtgccaccgagcgggcactgaactgggacagcttcaacactggggactgcttcatcctggacctgggccagaacatcttcgcctggtgtggtggaaagtccaacatcctggaacgcaacaaggcgagggacctggccctggccatccgggacagtgagcgacagggcaaggcccaggtggagattgtcactgatggggaggagcctgctgagatgatccaggtcctgggccccaagcctgctctgaaggagggcaaccctgaggaagacctcacagctgacaaggcaaatgcccaggccgcagctctgtataag

SEQ ID NO: 4517 - DNA, 839 bp, Homo sapiens
  source 1..839: mol_type = unassigned DNA
gtggcacatttgattattttgcaaactctggaagaccttggctgagggtctaggtggactgtctgagatctgaagacagcatgtacacagccattccccagagtggctctccattcccaggctcagtgcaggatccaggcctgcatgtgtggcgggtggagaagctgaagccggtgcctgtggcgcaagagaaccagggcgtcttcttctcgggggactcctacctagtgctgcacaatggcccagaagaggtttcccatctgcacctgtggataggccagcagtcatcccgggatgagcagggggcctgtgccgtgctggctgtgcacctcaacacgctgctgggagagcggcctgtgcagcaccgcgaggtgcagggcaatgagtctgacctcttcatgagctacttcccacggggcctcaagtaccaggaaggtggtgtggagtcagcatttcacaagacctccacaggagccccagctgccatcaagaaactctaccaggtgaaggggaagaagaacatccgtgccaccgagcgggcactgaactgggacagcttcaacactggggactgcttcatcctggacctgggccagaacatcttcgcctggtgtggtggaaagtccaacatcctggaacgcaacaaggcgagggacctggccctggccatccgggacagtgagcgacagggcaaggcccaggtggagattgtcactgatggggaggagcctgctgagatgatccaggtcctgggccccaagcctgctctgaaggagggcaaccctgaggaagacctcacagctgacaaggcaaatgcccaggccgcagctctgtataag

SEQ ID NO: 4518 - DNA, 1703 bp, Homo sapiens
  source 1..1703: mol_type = unassigned DNA
gacagcgcccagggcctcggagcaaggcgttggcagatctgaagacagcatgtacacagccattccccagagtggctctccattcccaggctcagtgcaggatccaggcctgcatgtgtggcgggtggagaagctgaagccggtgcctgtggcgcaagagaaccagggcgtcttcttctcgggggactcctacctagtgctgcacaatggcccagaagaggtttcccatctgcacctcaacacgctgctgggagagcggcctgtgcagcaccgcgaggtgcagggcaatgagtctgacctcttcatgagctacttcccacggggcctcaagtaccaggaaggtggtgtggagtcagcatttcacaagacctccacaggagccccagctgccatcaagaaactctaccaggtgaaggggaagaagaacatccgtgccaccgagcgggcactgaactgggacagcttcaacactggggactgcttcatcctggacctgggccagaacatcttcgcctggtgtggtggaaagtccaacatcctggaacgcaacaaggcgagggacctggccctggccatccgggacagtgagcgacagggcaaggcccaggtggagattgtcactgatggggaggagcctgctgagatgatccaggtcctgggccccaagcctgctctgaaggagggcaaccctgaggaagacctcacagctgacaaggcaaatgcccaggccgcagctctgtataaggtctctgatgccactggacagatgaacctgaccaaggtggctgactccagcccatttgcccttgaactgctgatatctgatgactgctttgtgctggacaacgggctctgtggcaagatctatatctggaaggggcgaaaagcgaatgagaaggagcggcaggcagccctgcaggtggccgagggcttcatctcgcgcatgcagtacgccccgaacactcaggtggagattctgcctcagggccatgagagtcccatcttcaagcaatttttcaaggactggaaatgagggtgggcgtcttcctgccccatgctcccctgccccccaccacctgcctgcttgcttctctggctgcctggtcagtgcagaggtgccccctgcagatgttcaataaaggagacaagtgctttcccagctcttttcctgcaccacctgccctgggctgattctcactgtcacccacctattcacctgggttcatccccatgctgggggtggagtagcacacagatgacaattggacagccttggaggggccagagctgctttgcatgacagaggagtcccagccaggcttgcagggactgccatgaacccaatagggaggtggcacagtgccaggcctcaggatcagttgcatccgggtgttcagttcagtctcacattcccaacagggagaaggttgtggcaatgggcttgggatgcagttccatttaaggcagtatttcttcggatgccctaataaagcactgccaggcagcttcaagtgacatatgcccactgagcaagagaggacagcctttcacaattgtaccaagcctggcttattacttcgtaggcacattgcccagcatgtttggctggtgagcccagggccactgcagggctgtgcgaaaagcaccaggctagcatggacagtcttcagtctggttcttaccctgcctctgtgatcctaggc

SEQ ID NO: 4519 - DNA, 1546 bp, Homo sapiens
  source 1..1546: mol_type = unassigned DNA
aaaggcgtgagcgcgcgtgcgtgcgtgtgcgggtgcgtgagcgtgagcgcgcggaggccggaagcgagcgctgcgcagtcgggtggtcgcgggccatggagggtagcttttcggatggcggagcgctgccggaggggctcgcggaagaggccgagccgcagggcgccgcctggagcggggacagtggcactgtttcccagagccacagcagcgcctcggggccgtgggaggacgagggcgcggaggacggcgcgccgggccgcgacctgccgctgcttcgccgcgccgctgcgggctacgccgcctgcctgctgcccggggccggggcgcggcccgaggtcgaggccctggacgcgagcctagaggacctgcttaccagagtggacgagttcgtgggcatgctggacatgcttcgcggcgactcgtcccacgtcgtcagcgagggcgtgccgcgcatccacgcgaaggccgccgagatgcggcgcatctacagcaggatcgaccggctggaggccttcgtgaggatggtggggggccgcgtggccaggatggaggagcaggtcaccaaggccgaggccgagctgggcaccttccccagggcgttcaagaagctcctgcacacgatgaacgtgccctcgctctttagcaagtctgctccctcgaggccacagcaagccggctacgaagcccccgtcctgtttcggaccgaagactacttcccttgttgcagtgaaaggcctcagctctgacggcctgaccactgcggcaagaggaccccagctggggtgcttacctccagtatgaagtgaattgcaaatcctgcttatggacatatatgatgttggagtgtgggattttaaagtttactttctacaaactctccgtagtatattcatgattcagtgtagaatgtatagactttatgtcttccaagtttaaaaaaagagacagggtcttggtatgttgcccagactgttcggaaactcctgggctcaagtgatccttccacctcagcctccccagtagctgggactacggggtcgccactgcacccagcctgtgtcttccagctctaatcagaaagctgcttgtcgagggcatggggaatcaaactgaatgaacttttctctgcactgtggcaaaactgttatttttatggattttactaaatggcgttaccttttcaagatttatatgtttgtataatcataagaaaattgagccattaaagccttgttattcaatcctaatagtcagttttctagaacctacttttagggtaaatggtacattatttaatattatattaaacctcctatagcgtggattgtagaccaaaggaaatggtacaatttctgagaatatatgttgattttttgtgactaattccaaagttgtatttgaaagtatgacctcacagtcttcatttgtccatagcaaacatatgtgtgtgtgtgtgtatatatatatgtgggttgccaatgtttggtttataatttaaatgttaatagaaattttgagttttattggaaatgatttccttctg

SEQ ID NO: 4520 - DNA, 7114 bp, Homo sapiens
  source 1..7114: mol_type = unassigned DNA
gcgcgcccgaggctcctacgctgccgcgcccggcttctctccagcgccccgcgccgttagccacgtggaccgactccggcgcgccgtcctcacgtggttccagtggagtttgcagtccttcccgcttctccgtactcgcccccgcctctgagctcccttcccatggcggccctagtgttggaggacgggtcggtcctgcggggccagccctttggggccgccgtgtcgactgccggggaagtggtgtttcaaaccggcatggtcggctaccccgaggccctcaccgatccctcctacaaggcacagatcttagtgctcacctatcctctgatcggcaactatggcatccccccagatgaaatggatgagttcggtctctgcaagtggtttgaatcctcgggcatccacgtagcagcactggtagtgggagagtgctgtcctactcccagccactggagtgccacccgcaccctgcatgagtggctgcagcagcatggcatccctggcttgcaaggagtagacactcgggagctgaccaagaagttgcgggaacaggggtctctgctggggaagctggtccagaatggaacagaaccttcatccctgccattcttggaccccaatgcccgccccctggtaccagaggtctccattaagactccacgggtattcaatacagggggtgcccctcggatccttgctttggactgtggcctcaagtataatcagatccgatgcctctgccagcgtggggctgaggtcactgtggtaccctgggaccatgcactagacagccaagagtatgagggtctcttcttaagtaatgggcctggtgaccctgcctcctatcccagtgtcgtatccacactgagccgtgttttatctgagcctaatccccgacctgtctttgggatctgcctgggacaccagctattggccttagccattggggccaagacttacaagatgagatatgggaaccgaggccataaccagccctgcttgttggtgggctctgggcgctgctttctgacatcccagaaccatgggtttgctgtggagacagactcactgccagcagactgggctcctctcttcaccaacgccaatgatggttccaatgaaggcattgtgcacaacagcttgcctttcttcagtgtccagtttcacccagagcaccaagctggcccttcagatatggaactgcttttcgatatctttctggaaactgtgaaagaggccacagctgggaaccctgggggccagacagttagagagcggctgactgagcgcctctgtccccctgggattcccactcccggctctggacttccaccaccacgaaaggttctgatcctgggctcagggggcctctccattggccaagctggagaatttgactactcgggctctcaggcaattaaggccctgaaggaggaaaacatccagacgttgctgatcaaccccaatattgccacagtgcagacctcccaggggctggccgacaaggtctattttcttcccataacacctcattatgtaacccaggtgatacgtaatgaacgccccgatggtgtgttactgacttttgggggccagactgctctgaactgtggtgtggagctgaccaaggccggggtgctggctcggtatggggtccgggtcctgggcacaccagtggagaccattgagctgaccgaggatcgacgggcctttgctgccagaatggcagagatcggagagcatgtggccccgagcgaggcagcaaattctcttgaacaggcccaggcagccgctgaacggctggggtaccctgtgctagtgcgtgcagcctttgccctgggtggcctgggctctggctttgcctctaacagggaggagctctctgctctcgtggccccagcttttgcccataccagccaagtgctagtagacaagtctctgaagggatggaaggagattgagtacgaggtggtgagagacgcctatggcaactgtgtcacggtgtgtaacatggagaacttggacccactgggcatccacactggtgagtccatagtggtggcccctagccagacactgaatgacagggagtatcagctcctgaggcagacagctatcaaggtgacccagcacctgggaattgttggggagtgcaatgtgcagtatgccttgaaccctgagtctgagcagtattacatcattgaagtgaatgccaggctctctcgcagctctgccctggccagtaaggccacaggttatccactggcttatgtggcagccaagctagcattgggcatccctttgcctgagctcaggaactctgtgacagggggtacagcagcctttgaacccagcgtggattattgtgtggtgaagattcctcgatgggaccttagcaagttcctgcgagtcagcacaaagattgggagctgcatgaagagcgttggtgaagtcatgggcattgggcgttcatttgaggaggccttccagaaggccctgcgcatggtggatgagaactgtgtgggctttgatcacacagtgaaaccagtcagcgatatggagttggagactccaacagataagcggatttttgtggtggcagctgctttgtgggctggttattcagtggaccgcctgtatgagctcacacgcatcgaccgctggttcctgcaccgaatgaagcgtatcatcgcacatgcccagctgctagaacaacaccgtggacagcctttgccgccagacctgctgcaacaggccaagtgtcttggcttctcagacaaacagattgcccttgcagttctgagcacagagctggctgttcgcaagctgcgtcaggaactggggatctgtccagcagtgaaacagattgacacagttgcagctgagtggccagcccagacaaattacctatacctaacgtattggggcaccacccatgacctcacctttcgaacacctcatgtcctagtccttggctctggcgtctaccgtattggctctagcgttgaatttgactggtgtgctgtaggctgcatccagcagctccgaaagatgggatataagaccatcatggtgaactataacccagagacagtcagcaccgactatgacatgtgtgatcgactctactttgatgagatctcttttgaggtggtgatggacatctatgagctcgagaaccctgaaggtgtgatcctatccatgggtggacagctgcccaacaacatggccatggcgttgcatcggcagcagtgccgggtgctgggcacctcccctgaagccattgactcggctgagaaccgtttcaagttttcccggctccttgacaccattggtatcagccagcctcagtggagggagctcagtgacctcgagtctgctcgccaattctgccagaccgtggggtacccctgtgtggtgcgcccctcctatgtgctgagcggtgctgctatgaatgtggcctacacggatggagacctggagcgcttcctgagcagcgcagcagccgtctccaaagagcatcccgtggtcatctccaagttcatccaggaggctaaggagattgacgtggatgccgtggcctctgatggtgtggtggcagccatcgccatctctgagcatgtggagaatgcaggtgtgcattcaggtgatgcgacgctggtgacccccccacaagatatcactgccaaaaccctggagcggatcaaagccattgtgcatgctgtgggccaggagctacaggtcacaggacccttcaatctgcagctcattgccaaggatgaccagctgaaagttattgaatgcaacgtacgtgtctctcgctccttccccttcgtttccaagacactgggtgtggacctagtagccttggccacgcgggtcatcatgggggaagaagtggaacctgtggggctaatgactggttctggagtcgtgggagtaaaggtgcctcagttctccttctcccgcttggcgggtgctgacgtggtgttgggtgtggaaatgaccagtactggggaggtggccggctttggggagagccgctgtgaggcatacctcaaggccatgctaagcactggctttaagatccccaagaagaatatcctgctgaccattggcagctataagaacaaaagcgagctgctcccaactgtgcggctactggagagcctgggctacagcctctatgccagtctcggcacagctgacttctacactgagcatggcgtcaaggtaacagctgtggactggcactttgaggaggctgtggatggtgagtgcccaccacagcggagcatcctggagcagctagctgagaaaaactttgagctggtgattaacctgtcaatgcgtggagctgggggccggcgtctctcttcctttgtcaccaagggctaccgcacccgacgcttggccgctgacttctccgtgcccctaatcatcgatatcaagtgcaccaaactctttgtggaggccctaggccagatcgggccagcccctcctttgaaggtgcatgttgactgtatgacctcccaaaagcttgtgcgactgccgggattgattgatgtccatgtgcacctgcgggaaccaggtgggacacataaggaggactttgcttcaggcacagccgctgccctggctgggggtatcaccatggtgtgtgccatgcctaatacccggccccccatcattgacgcccctgctctggccctggcccagaagctggcagaggctggcgcccggtgcgactttgcgctattccttggggcctcgtctgaaaatgcaggaaccttgggcaccgtggccgggtctgcagccgggctgaagctttacctcaatgagaccttctctgagctgcggctggacagcgtggtccagtggatggagcatttcgagacatggccctcccacctccccattgtggctcacgcagagcagcaaaccgtggctgctgtcctcatggtggctcagctcactcagcgctcagtgcacatatgtcacgtggcacggaaggaggagatcctgctaattaaagctgcaaaggcacggggcttgccagtgacctgcgaggtggctccccaccacctgttcctaagccatgatgacctggagcgcctggggcctgggaagggggaggtccggcctgagcttggctcccgccaggatgtggaagccctgtgggagaacatggctgtcatcgactgctttgcctcagaccatgctccccataccttggaggagaagtgtgggtccaggcccccacctgggttcccagggttagagaccatgctgccactactcctgacggctgtaagcgagggccggctcagcctggacgacctgctgcagcgattgcaccacaatcctcggcgcatctttcacctgcccccgcaggaggacacctatgtggaggtggatctggagcatgagtggacaattcccagccacatgcccttctccaaggcccactggacaccttttgaagggcagaaagtgaagggcaccgtccgccgtgtggtcctgcgaggggaggttgcctatatcgatgggcaggttctggtacccccgggctatggacaggatgtacggaagtggccacagggggctgttcctcagctcccaccctcagcccctgccactagtgagatgaccacgacacctgaaagaccccgccgtggcatcccagggcttcctgatggccgcttccatctgccgccccgaatccatcgagcctccgacccaggtttgccagctgaggagccaaaggagaagtcctctcggaaggtagccgagccagagctgatgggaacccctgatggcacctgctaccctccaccaccagtaccgagacaggcatctccccagaacctggggacccctggcttgctgcacccccagacctcacccctgctgcactcattagtgggccaacatatcctgtccgtccagcagttcaccaaggatcagatgtctcacctgttcaatgtggcacacacactgcgtatgatggtgcagaaggagcggagcctcgacatcctgaaggggaaggtcatggcctccatgttctatgaagtgagcacacggaccagcagctcctttgcagcagccatggcccggctgggaggtgctgtgctcagcttctcggaagccacatcgtccgtccagaagggcgaatccctggctgactccgtgcagaccatgagctgctatgccgacgtcgtcgtgctccggcacccccagcctggagcagtggagctggccgccaagcactgccggaggccagtgatcaatgctggggatggggtcggagagcaccccacccaggccctgctggacatcttcaccatccgtgaggagctgggaactgtcaatggcatgacgatcacgatggtgggtgacctgaagcacggacgcacagtacattccctggcctgcctgctcacccagtatcgtgtcagcctgcgctacgtggcacctcccagcctgcgcatgccacccactgtgcgggccttcgtggcctcccgcggcaccaagcaggaggaattcgagagcattgaggaggcgctgcctgacactgatgtgctctacatgactcgaatccagaaggaacgatttggctctacccaggagtacgaagcttgctttggtcagttcatcctcactccccacatcatgacccgggccaagaagaagatggtggtgatgcacccgatgccccgtgtcaacgagataagcgtggaagtggactcggatccccgcgcagcctacttccgccaggctgagaacggcatgtacatccgcatggctctgttagccaccgtgctgggccgtttctagggcctggcttcctcagcctcttctctttaggcccagctgctgggcaaggaattccagtgcctcctacgggggcagcacacttagatattcctggacatccagatagctcacatgtgctgaccacacttcaggctctggactggagctctctggcatgggggtggggcctcagatgctggggcccagtctgccccatcttcattcctgcaccttaaacctgtacagtcatttttctactgacttaataaacagccgagctgtcccttgatgctga

SEQ ID NO: 4521 - DNA, 6970 bp, Homo sapiens
  source 1..6970: mol_type = unassigned DNA
gccttggacgcggttcaggaatccgccgccgctagccggctcgggcctgagcggggagggcgccaggcaggacctctcgcaggctcgctgcgcaggacggcgcccgcctggcgccgcttcccttccagcgtgccgaccggccccgcagcgcctccatccctccggcccgccccggagaagacgcacagctcgggccgcgcgggcgccggggccgcggaaccgcttctgccgggatcttccaggaggaaagcgaagttgcgagcggatgctgcccgcgccggaccccagccgcggagggtcggggccgccggtggagtctcggcggccggggacaagggtgtcccccacctgaagacggcaagctgggtcctgagtgatgcccctcagctgagtgtccaaggctggcccgaggagcccccacggccccacctttccccatggagaaaggactcactttgccccaggactgccgggactttgtgcacagcctgaagatgagaagcaaatacgcccttttcttggtttttgtggtgatagtttttgtcttcatcgaaaaggaaaataaaatcatatcaagggtctcagacaagctgaagcagattccccaagctctagcagatgccaacagcaccgacccagccctgatcttagctgagaacgcatctctcttgtccctgagcgagctcgattcagccttctcccagcttcagagccgtctccgcaacctcagcttgcagctgggcgtggagccagccatggaggccgcaggggaggaagaggaagagcagagaaaggaggaggagccgcccagaccggccgtggcggggccccggcgccacgtgctgctcatggccaccacgcgcaccggctcctcgttcgtgggcgagttcttcaaccagcagggcaacatcttctacctcttcgagccgctgtggcacatcgagcgcacagtgtccttcgagccggggggcgccaacgccgcgggctcggccctggtgtaccgcgacgtgctcaagcagctcttcctgtgcgacctgtacgtgctggagcacttcatcacgccgctgcccgaggaccacctgactcagttcatgttccgccggggctccagccgctccctgtgcgaggaccccgtctgtacgcccttcgtcaagaaggtcttcgagaagtaccactgcaagaaccgccgctgcggccccctcaacgtgacgctggccgcagaggcctgccgccgcaaggagcacatggccctcaaggcggtgcgcatccggcagctggagttcctgcagccgctggccgaggacccccgcctggacctgcgcgtcatccagctggtgcgcgacccccgggccgtgctggcctcgcgcatggtggccttcgccggcaagtataagacctggaagaagtggctggacgacgagggccaggacggcctgagggaagaggaggtgcagcggctgcggggcaactgcgagagcatccgcctgtccgcggagctggggctgcggcagcccgcctggctgcggggccgctacatgctggtgcgctacgaggacgtggcacgcgggccgctgcagaaggcccgcgagatgtaccgcttcgccggcatccccctgaccccgcaggtggaagactggatccaaaagaacacgcaggcggcccacgacggcagcggcatctactccacgcagaagaactcctcggagcagttcgagaagtggcgcttcagcatgcccttcaagctggcccaggtggtgcaggccgcctgcggccctgccatgcgcctcttcggctacaaactggcgcgggacgccgccgccctcaccaaccgctcagtcagcctgctggaggagaggggcaccttctgggtcacgtaggggggccggggccccgtatgcccctcctcgtgaaaggcctgccccgtctttctgccgcagccctcgcagagggcgggtgcacagcgccatgagcgggcagcgcctcctgtagcagtagggcccccagccagcgctccagccaaagcggcggccccagggttaattgcggagaacaggacagtgcccggtccccttgagggccatcacacccagacccaacgggttgcagcctcctgagcaggcctaggcaggcccgggcctgttggcaagcttcgatctcacacacacagaaacatacattcgtgcctggagaccctgcaggccagagtccaaatatttaacaatcagaaggggcaaggctctgaccagtgacagtcagacctcctgctttatttggtgttaaccgtttcttgtctggatggtgaagtctggaatctgggtgggtccttggaggaggggctaggacagccgtgggtgtcaaaggtggcatttgaggctcgtttgaggtgacagtggctgtttaccaactagtacagagcgattcagcgttttcatgaatgggttggctgtgctggttactgatgaatatgggccccttatagagctgcaaaacacacacatgcgtatagacatacatacatgtacaccatacatagacaagcatcataaaggcacaagtgcacacacatctatgcagacaagcttcctcgctgcttatgcccacagggtttttctgtatgacacacctcagaggagcctgtgcttaacatttgtaggattatttcgagggcagggcaggggaaagaaacgcgttaaagggccatgacatgacacagttccctggccgggtttggactgaacagtggattcagaactgcagcgttcaaagcccctgcccgccttagattctcatggctacctcctctgacccatccacatccttgcggctggcaggcaggatgttttgaaatggtgcagccaaaggccccgtctagcttggctggctcccgaacatgtccatatttgaaggctgcctcaggcctggcaggcagaagcagctgtggtccctggaggcaaaaggcagctcacggggccttccatttccagccaggcctcatctggggtagggccaagaggaaagtacagagtgcccgtgggggagaagtcccaccaggatgccccccctcccctgagaagcccgccttctccctcgtggacaggagtcagccagttggttgctgtggttacagccagtgcctggaattcctccttagggccctgggaagagtattgcttaacgcaggatgtgctgggtgttttgtttcgggcttttatttatggcttggtgtctttcttgtttcatggctgtgtttttgcttttgtttctgtaggagcgcctcttccaagcagtggaggcctgagggcttgagggaggctggggaaaaccagcagggagcacttggctcctggcagagggagaggacaggaggaggagccttccccaggaggaacgaggagaggtggccacgtggcaggccacagtgccctatgggcttttctgtttgaaccccatgtgggatgaatctcaaagccaccagcgttcttgcctagtgtccagagcagcagagatttgcagccctcgcccctccctgagaagaagctggatttgaaaatccctcacaggccctaacatgtttcctgggtgggcaggggcctcatgacaagcgacaagtgtacccagagtagaaggccttccccactcccacctcaaacccaggagcagaactcagtatccagagcttacaaggagctgcaagggtttgccgagggctgcccagctctgcttctggtttcctggacaatttctctgtcagatacggcccattgtaaacccagagggctgcattttgggttgagtaatatggacaccatggaagtacaggatctgagtccaacattgccatgggggagggaagagtgtgtcctggcaggaagccaccattggagaaggtgaggccagtaaccatctcatgggattcgctataatcagcctatttgagctgctgggtctctgtcactgtggactccagtcattcaaggaggtctccactcttgggttttttttattttcttttcttttgctattttgcctgaacaccccaacactcttggttttagagtccaagagtaagttgtgcagagacatggttctaatttggagttcaaaggaacaccagctctgaaaacatgaccgtggggccaggatgtttctggcaggcccagaagtgctggccgttcttccccagcctccccactgctccctcctctgttccccatgtggaggtcggaggggctgggactggggagggggcagccacctccatccaaggctcttcctaggggccctgctaatgtggacagtagactttatccctccttcttactctgggccaagacctcccactccgccctctgaggatggtaccaagaatgggcctttgggacttctcaggacattgacaatgtgcacactgcaggttgacttaatttatttattttttgaaaagaagagacagaaaataccttattatctgcagggactcaaagctgtacccaaatcaagaaagacaaaataacaatagaaaccattcacacactccgttcatgcatggacaccagaagacgattcagaacacaagaggagaatgagctggagcgccagcaccacgatggccccaggacgttgtttaagatctgagatcccttggtttctctcttgttgatctgagatgctacatcagggcccttgctgctgtattacctctgcccgggtgtttgagacaggtcacaagcgcgtggatgtttcctggaagtgtattcccctggggctcagcgatgctctgggaacccttggggtttggggaaggacagtgtggtgtgactattggcttgaaacgttatggatatggttggagtcacccatgtggatatgattttcagcttggagctgggatggagaagatggaagcactggtggccgggcctctttttccagcgaggccagccctggcttctcctctgttccagcttgtctgccagaagccttcccctgcaaggtgcccacctgcccggagacagagggagcagctgaggcctctctccactggccgccagcctccctagcacaaggggaccattcagcaatgagtgtttactcatgttctttcttgttgatgagttctgcggcccagcatatagaaatggctcagaacgttccaggccttggtgagacacagcagcgtccaatgctcacaggctgtccccactctgcctgttcccatcttcccctcgggacctgtttataaattgaggaatggatgagggccctggagggtccttgggagtagttagtggagggcaggattctcaggtccccatagagagggaaagagaagaccagatgtgcatagaagccagtctctgtcacatacaccgcaggtggtcaccgagttattttccaaaagctgaggaacataaagcaaatttaggcttttgtccttctgcaatacatgcacttgaaaataaacagaaaagagatgtttaataacaagtttacttccggtctgctagcaccctcagcctgggagctactgccagaggctggcgtagtggggcagctgctgaccaaaccccacagaacagagggcaccaggcatcacacgacatctttccctcccatctctgccatctgtctgtctggcaatggaaggagcttcagcaggaggtccttcccagaaggttgattcttggcctgggtggtagaggagatatcctgaccctaaagtcttccagccccgggtcatcctctcctatactagggcctattgaccgtagaggccaggtgcggtggctcatacctgtaatcccagcagttggggaggccaaggtgggaggattgcttgagcccaagagttggagaccagcctgggcaacatggtgagaccaattgactgtagggcttgtcccttgctaagacaggagcagaagactggatggctgtgtcctcaaggcagtcccctcccatccccattcccaaagtcagaaagtgaagccagatctcaagggctgatacctgaggcaaggagagctaaggggagagaaattggggctgagtggaagcagatgcctgcacaagccaagtgtgtcttattgatctgtacaagctgatagaaggaccatctgctgaaatccagggctcctgagttggtgggtttgcttgtgaagcttctaggacaaggcgcagccagatggaagggagagggtccagggcttcctaaatgcagccgcatcacctgtcaactcgctgcagtttcagagacagtggaagctgctctttacctcaaaagcacaaagcagaattggcaacttcacttgtctcaagagctccaagatcctttggtctcgtgtcctttggcaccccgtaactggactggggacaaatttgttacgtgtttccaaggctacagacatggcgccatcctcacaggcctagctcatgtcatggatcaggtgctttgctggggggatacaatgacccatgtggtctgcgtcttctgccattggcttgaactgggcaccccctgaagtctccatctcagctgtatattctagtccaaattttcctggctcccctgctccctcccaggtcctgcacactgtctttttgccaacacctcagccctgtttgctatttcatgtctgcatggtacgagacaccccttcacggcatacactgccatggtatgtacatatgcatccacgtgtgtgtatgtgtagcatgtagctcattctgctcagcctctggcgccgttccacattgctcccagccccattgctgtcactgtcgtcccagatgtccttgccatggccacagacaatctgccgtctcctggaaacgctggggctgcccttcagagagctggcagccccagcagtcagggcctgctttgcagaatagaatgtgaacccaactcctgatggcctacttgacttatttaattaaagatgaaatcatgcaatgagcaaaacctgca

SEQ ID NO: 4522 - DNA, 2718 bp, Homo sapiens
  source 1..2718: mol_type = unassigned DNA
gctcggagctgtagccgccgctgccgccgctgctcttggctcggggacgcgggcgggcgctccgagaggctctggtgcctgcggctgctgctctcctccggcgcccggggctgcggcgctccgggtcccggcccctgtcccggcatctctcgggtccctgagccccggccccgggtcccgcgtccggccggagagaacgcactcagctgctcgagccgccccgggctcgcgcccccgggccatgaagaggggcccgtgaggcgcgcgcggagtcggaggaagaggagggaggagggaggccgaggaggagggcgcgggaggcggaggatgccgccgcggctgctgccgccgccgccacccgcgggtccccggcgaccctgactccagacccgaggatggagccggcgctgggcgctgcagctgctcccggcgcgtccccgaccaggtagctggtgtcacttcggtgtggttggaagaagactttctccccagctgcattcccggaggcgccctttcgacctggaggccgggtctgctggccacagggctgccgcactggctgggactgccagctgggcctggagacgctggtggctgtggactccccagcttggagcagtccctctttgacctcaccccttggagaagcagccccatgaaggtgcccagccatgcaatgttcctggaaggccgtcctcctccttgccctggcctccattgccatccagtacacggccatccgcaccttcaccgccaagtcctttcacacctgccccgggctggcagaggccgggctggccgagcgactgtgcgaggagagccccaccttcgcctacaacctctcccgcaagacccacatcctcatcctggccaccacgcgcagtggctcctccttcgtgggccagctcttcaaccagcacctggacgtcttctacctgtttgagcccctctaccacgtccagaacacgctcatcccccgcttcacccagggcaagagcccggccgaccggcgggtcatgctaggcgccagccgcgacctcctgcggagcctctacgactgcgacctctacttcctggagaactacatcaagccgccgccggtcaaccacaccaccgacaggatcttccgccgcggggccagccgggtcctctgctcccggcctgtgtgcgaccctccggggccagccgacctggtcctggaggagggggactgtgtgcgcaagtgcgggctactcaacctgaccgtggcggccgaggcgtgccgcgagcgcagccacgtggccatcaagacggtgcgcgtgcccgaggtgaacgacctgcgcgccctggtggaagacccgcgattaaacctcaaggtcatccagctggtccgagacccccgcggcattctggcttcgcgcagcgagaccttccgcgacacgtaccggctctggcggctctggtacggcaccgggaggaaaccctacaacctggacgtgacgcagctgaccacggtgtgcgaggacttctccaactccgtgtccaccggcctcatgcggcccccgtggctcaagggcaagtacatgttggtgcgctacgaggacctggctcggaaccctatgaagaagaccgaggagatctacgggttcctgggcatcccgctggacagccacgtggcccgctggatccagaacaacacgcggggcgaccccaccctgggcaagcacaaatacggcaccgtgcgaaactcggcggccacggccgagaagtggcgcttccgcctctcctacgacatcgtggcctttgcccagaacgcctgccagcaggtgctggcccagctgggctacaagatcgccgcctcggaggaggagctgaagaacccctcggtcagcctggtggaggagcgggacttccgccccttctcgtgacccgggcggtgcgggtgggggcgggaggcgcaaggtgtcggttttgataaaatggaccgtttttaactgttgccttattaacccctccctctcccacctcatcttcgtgtccttcctgcccccagctcaccccactcccttctgccccttttttgtctctgaaatttgcactacgtcttggacgggaatcactggggcagagggcgcctgaagtagggtcccgccccccccccccccattcagacacatggatgttgggtctctgtgcggacggtgacaatgtttacaagcaccacatttacacatccacacacgcacacgggcactcgcgaggcgacttctcaagcttttgaatgggtgagtggtcgggtatctagtttttgcactgtcttactattcaaggtaagaggatacaaacaagaggaccacttgtctctaatttatgaatggtgtccatcctttccccatccctgcctcctgcccctgacgcccatttccccccttagagcagcgaaactgccccctcctgcccgcccttgcctgtcggtgaggcaggtttttactgtgaggtgaacgtggacctgtttctgtttccagtctgtggtgatgctgtctgtctgtctgagtctcgtggccgcccctggaccagtgatgactgatgaatcttatgagcttctgattgatctcggggtccatctgtgatatttctttgtgccaaaaagaaaaaaaaagagtggatcagtttgctaaatgaacattgaaattgaaatgctttatctgtgttttctgtaaataaaagagtgcaataatc

SEQ ID NO: 4523 - DNA, 2194 bp, Homo sapiens
  source 1..2194: mol_type = unassigned DNA
ctgcgaggccgggggtggagagcggccgggcgggacatccggcccgggtccctcgccgcgcccgccgcccgccgcccgcttcggcgccgcagcccgggagccggccacccctacacgcgccagggctgtcccctgccctcccctccccaactacccccggtcccagaccctcctcccgcccccagcccgagcccgccttccaggccgccctcggatcggccgggcccgcgcaggcccccaccccttgagcaccatgttcccccgcccgctgaccccgctggcggccccaaatggcgccgagcccctgggccgggcgctgaggcgggcccctctgggcagggcccgggcggggctgggtgggccgcccctgctgctgccgtccatgctgatgtttgcggtgatcgtggcctccagcgggctgctgctcatgatcgagcggggcatcctggccgagatgaagcccctgcccctgcacccgcccggccgcgagggcacagcctggcgcgggaaagcccccaagcctgggggcctgtccctcagggctggggacgcggacttgcaagtgcggcaggacgtccggaacaggaccctgcgggcggtgtgcggacagccaggcatgccccgggacccctgggacttgccggtggggcagcggcgcaccctgctgcgccacatcctcgtaagtgaccgttaccgcttcctctactgctacgtccccaaggtggcctgctctaactggaagcgggtgatgaaggtgctggcaggcgtcctggacagcgtggacgtccgcctcaagatggaccaccgcagtgacctggtgttcctggccgacctgcggcctgaggagattcgctaccgcctgcagcactactttaagttcctgtttgtgcgggagcccttggaacgcctcctctctgcctaccgcaacaagtttggcgagatccgagagtaccagcaacgctatggggctgagatagtgaggcggtacagggctggagcggggcccagccctgcaggcgacgatgtcacattccccgagttcctgagatacctggtggatgaggaccctgagcgcatgaatgagcattggatgcccgtgtaccacctgtgccagccttgtgccgtgcactatgactttgtgggctcctatgagaggctggaggctgatgcaaatcaggtgctggagtgggtacgggcaccacctcacgtccgatttccagctcgccaggcctggtaccggccagccagccccgaaagcctgcattaccacttgtgcagtgccccccgggccctgctgcaggatgtgctgcctaagtatatcctggacttctccctctttgcctacccactgcctaatgtcaccaaggaggcgtgtcagcagtgaccatgggtgtggggccagcagctggtggggactggtttcaacgccagctttctgtgcttctgcctgtcattcggagaaactctggctctggggcttggggcttctcaggatcctggatggcagagactgccctcagaagttccttgtccagggtgggcacccacagtgactcagaggacagggctaggcaggagacctgctgctcctcattggggggatctcttggggggcagacaccagtttgccaatgaagcaacacatctgatctaaagactggctccagaccccgggctgccaggattatgcagtccacttggtctaccttaatttaacctgtggccaaactcagagatggtaccagccaggggcaagcatgaccagagccagggaccctgtggctctgatcccccatttatccaccccatgtgcctcaggactagagtgagcaatcataccttataaatgacttttgtgcctttctgctccagtctcaaaatttcctacacctgccagttctttacatttttccaaggaaaggaaaacggaagcagggttcttgcctggtagctccaggacccagctctgcaggcacccaaagaccctctgtgcccagcctcttccttgagttctcggaacctcctccctaattctcccttccttccccacaaggcctttgaggttgtgactgtggctggtatatctggctgccatttttctgatgcatttatttaaaatttgtactttttgatagaacccttgtaagggctttgttttcctaatagctgactttttaataaagcagttttatat

SEQ ID NO: 4524 - DNA, 2478 bp, Homo sapiens
  source 1..2478: mol_type = unassigned DNA
gggactcgtcccagagtttgctgccgccgccgccgctgccattagagcggttttaattagctgcaggatttttaatgagctgaaatcaagaagagccccatctcagaagtaagcgagagccgcgcgcagggaagaactagtctgacaaaacagaaggaggtggtgctctcgggggactgggctgtaggctcccaccgatcgatcggcgacgagcagatgagttcccgaggccaggaggctgaggagggaagccagggctcagagaccagcgcccggtgcagagtccccgctgctgccaccgcggcagaaggcacggtgccggattcaaggtgacggcagtgcctggctccattctcctcaagttgccatagcagcctctctcccaacaagcagcttctccgggagccctcagccgggagggacgtcattgttctctcctgcccgtgtggtgcaaggagacccaccggacagagaactttcccgagcccggggtccgctgaccacgtgggtgcacccatgctgcctggagccaggcacagggacaggtccccacggccacagggaatcctctgggcagctgaggggagcgtccaggcccagaagcagctgcagccaagcgtgtccttggagccgtccatgcgtctgtccgcctgctgccggtcgccactggagatctcggcctgatggacgcctggtgtggacgatgagggaagaacgtgccccccacacccaagaggtgacccctgagccagccccggatgaccctgcgacctggaacaatgcggctggcctgcatgttctcttccatcctgctgttcggagctgcaggcctcctcctcttcatcagcctgcaggaccctacggagctcgccccccagcaggtgccaggaataaagttcaacatcaggccaaggcagccccaccacgacctcccaccaggcggctcccaggatggtgacttgaaggaacccacagagagggtcactcgggacttatccagtggggccccgaggggccgcaacctgccagcgcctgaccagcctcaacccccgctgcagaggggaacccgtctgcggctccgccagcgccgtcgccgtctgctcatcaagaaaatgccagctgcggcgaccatcccggccaacagctcggacgcgcccttcatccggccgggacccgggacgctggatggccgctgggtcagcctgcaccggagccagcaggagcgcaagcgggtgatgcaggaggcctgcgccaagtaccgggcgagcagcagccgccgggccgtcacgccccgccacgtgtcccgtatcttcgtggaggaccgccaccgcgtgctctactgcgaggtgcccaaggccggctgctccaattggaagcgggtgctcatggtgctggccggcctggcctcgtccactgccgacatccagcacaacaccgtccactatggcagcgctctcaagcgcctggacaccttcgaccgccagggtatcttgcaccgtctcagcacctacaccaagatgctctttgtccgcgagcccttcgagaggctggtgtccgccttccgcgacaagtttgagcaccccaacagctactatcacccggtcttcggcaaggccatcctggcccggtaccgcgccaatgcctctcgggaggccctgcggaccggctctggggtgcgttttcccgagttcgtccagtacctgctggacgtgcaccggcccgtggggatggacattcactgggaccatgtcagccggctctgcagcccctgcctcatcgactacgatttcgtaggcaagttcgagagcatggaggacgatgccaacttcttcctgagcctcatccgcgcgccgcggaacctgaccttcccccggttcaaggaccggcactcgcaggaggcgcggaccacagcgaggatcgcccaccagtacttcgcccaactctcggccctgcaaaggcagcgcacctacgacttctactacatggattacctgatgttcaactattccaagccctttgcagatctgtactgaggggcgccgcagctggccggggccgccctgccccggtcactcacctgtgctcccgggcatcctcctgtccctggctcctcatcctgggagcaacagggctctgaggacgtgaggagccatcgctgtgggaggcagcaggccccgggtggggggcagaggcgcccagccttggatggggaccccagcccctggcctgtacctgtttcctcattccttggctgagggagaggctgagaactgggcagacacccctggagctcagccgacagttttgatgagcagggaagtctgaggcccagaggacggggggcccagcggtaagggatgtcccgcactcccttagccattgccttggaccaaaccacgtggtttgcagcttttctacgagccaggggggaggttcccttggattaaggttccaaataaagcacatggtttccagagc

SEQ ID NO: 4525 - DNA, 2225 bp, Homo sapiens
  source 1..2225: mol_type = unassigned DNA
ttcgctgggagccttcccggcgcgcaagccggatccggcagtgctgcggggaggagagaggacgaggcggcggcggcagcaggaggtgggggaccgatcgcgccgggggccgaagaggaacgccgccccgcgccctctcgctccccgcacgctccggctgccggccccacgctgctcgcccacagatcgcactgggttccgcttggagcgggcggaggcaccgggcccgagctgggtcggaggtcctctccgccgcctgcgcgccccaagcagaggatccgccgcggagaaccgctcccggactggaggcgcccgcggcctcgggtgcgtccgctgcgccaggtttaaaggtcaacaagaatatcttaccttaatttgacaagtacgcaagaaataatgcaagactcgtttatgttcagatctcggcctgatggacgcctggtgtggacgatgagggaagaacgtgccccccacacccaagaggtgacccctgagccagccccggatgaccctgcgacctggaacaatgcggctggcctgcatgttctcttccatcctgctgttcggagctgcaggcctcctcctcttcatcagcctgcaggaccctacggagctcgccccccagcaggtgccaggaataaagttcaacatcaggccaaggcagccccaccacgacctcccaccaggcggctcccaggatggtgacttgaaggaacccacagagagggtcactcgggacttatccagtggggccccgaggggccgcaacctgccagcgcctgaccagcctcaacccccgctgcagaggggaacccgtctgcggctccgccagcgccgtcgccgtctgctcatcaagaaaatgccagctgcggcgaccatcccggccaacagctcggacgcgcccttcatccggccgggacccgggacgctggatggccgctgggtcagcctgcaccggagccagcaggagcgcaagcgggtgatgcaggaggcctgcgccaagtaccgggcgagcagcagccgccgggccgtcacgccccgccacgtgtcccgtatcttcgtggaggaccgccaccgcgtgctctactgcgaggtgcccaaggccggctgctccaattggaagcgggtgctcatggtgctggccggcctggcctcgtccactgccgacatccagcacaacaccgtccactatggcagcgctctcaagcgcctggacaccttcgaccgccagggtatcttgcaccgtctcagcacctacaccaagatgctctttgtccgcgagcccttcgagaggctggtgtccgccttccgcgacaagtttgagcaccccaacagctactatcacccggtcttcggcaaggccatcctggcccggtaccgcgccaatgcctctcgggaggccctgcggaccggctctggggtgcgttttcccgagttcgtccagtacctgctggacgtgcaccggcccgtggggatggacattcactgggaccatgtcagccggctctgcagcccctgcctcatcgactacgatttcgtaggcaagttcgagagcatggaggacgatgccaacttcttcctgagcctcatccgcgcgccgcggaacctgaccttcccccggttcaaggaccggcactcgcaggaggcgcggaccacagcgaggatcgcccaccagtacttcgcccaactctcggccctgcaaaggcagcgcacctacgacttctactacatggattacctgatgttcaactattccaagccctttgcagatctgtactgaggggcgccgcagctggccggggccgccctgccccggtcactcacctgtgctcccgggcatcctcctgtccctggctcctcatcctgggagcaacagggctctgaggacgtgaggagccatcgctgtgggaggcagcaggccccgggtggggggcagaggcgcccagccttggatggggaccccagcccctggcctgtacctgtttcctcattccttggctgagggagaggctgagaactgggcagacacccctggagctcagccgacagttttgatgagcagggaagtctgaggcccagaggacggggggcccagcggtaagggatgtcccgcactcccttagccattgccttggaccaaaccacgtggtttgcagcttttctacgagccaggggggaggttcccttggattaaggttccaaataaagcacatggtttccagagc

SEQ ID NO: 4526 - DNA, 2136 bp, Homo sapiens
  source 1..2136: mol_type = unassigned DNA
cttcccggcgcgcaagccggatccggcagtgctgcggggaggagagaggacgaggcggcggcggcagcaggaggtgggggaccgatcgcgccgggggccgaagaggaacgccgccccgcgccctctcgctccccgcacgctccggctgccggccccacgctgctcgcccacagatcgcactgggttccgcttggagcgggcggaggcaccgggcccgagctgggtcggaggtcctctccgccgcctgcgcgccccaagcagaggatccgccgcggagaaccgctcccggactggaggcgcccgcggcctcgggtgcgtccgctgcgccagatctcggcctgatggacgcctggtgtggacgatgagggaagaacgtgccccccacacccaagaggtgacccctgagccagccccggatgaccctgcgacctggaacaatgcggctggcctgcatgttctcttccatcctgctgttcggagctgcaggcctcctcctcttcatcagcctgcaggaccctacggagctcgccccccagcaggtgccaggaataaagttcaacatcaggccaaggcagccccaccacgacctcccaccaggcggctcccaggatggtgacttgaaggaacccacagagagggtcactcgggacttatccagtggggccccgaggggccgcaacctgccagcgcctgaccagcctcaacccccgctgcagaggggaacccgtctgcggctccgccagcgccgtcgccgtctgctcatcaagaaaatgccagctgcggcgaccatcccggccaacagctcggacgcgcccttcatccggccgggacccgggacgctggatggccgctgggtcagcctgcaccggagccagcaggagcgcaagcgggtgatgcaggaggcctgcgccaagtaccgggcgagcagcagccgccgggccgtcacgccccgccacgtgtcccgtatcttcgtggaggaccgccaccgcgtgctctactgcgaggtgcccaaggccggctgctccaattggaagcgggtgctcatggtgctggccggcctggcctcgtccactgccgacatccagcacaacaccgtccactatggcagcgctctcaagcgcctggacaccttcgaccgccagggtatcttgcaccgtctcagcacctacaccaagatgctctttgtccgcgagcccttcgagaggctggtgtccgccttccgcgacaagtttgagcaccccaacagctactatcacccggtcttcggcaaggccatcctggcccggtaccgcgccaatgcctctcgggaggccctgcggaccggctctggggtgcgttttcccgagttcgtccagtacctgctggacgtgcaccggcccgtggggatggacattcactgggaccatgtcagccggctctgcagcccctgcctcatcgactacgatttcgtaggcaagttcgagagcatggaggacgatgccaacttcttcctgagcctcatccgcgcgccgcggaacctgaccttcccccggttcaaggaccggcactcgcaggaggcgcggaccacagcgaggatcgcccaccagtacttcgcccaactctcggccctgcaaaggcagcgcacctacgacttctactacatggattacctgatgttcaactattccaagccctttgcagatctgtactgaggggcgccgcagctggccggggccgccctgccccggtcactcacctgtgctcccgggcatcctcctgtccctggctcctcatcctgggagcaacagggctctgaggacgtgaggagccatcgctgtgggaggcagcaggccccgggtggggggcagaggcgcccagccttggatggggaccccagcccctggcctgtacctgtttcctcattccttggctgagggagaggctgagaactgggcagacacccctggagctcagccgacagttttgatgagcagggaagtctgaggcccagaggacggggggcccagcggtaagggatgtcccgcactcccttagccattgccttggaccaaaccacgtggtttgcagcttttctacgagccaggggggaggttcccttggattaaggttccaaataaagcacatggtttccagagc

SEQ ID NO: 4527 - DNA, 4810 bp, Homo sapiens
  source 1..4810: mol_type = unassigned DNA
gtcccctccctgcgccccgccgcgtctcgggaggcggcgtgactcgggagttgccggcgcttcccggcggtggcggcgtctctggccggccttggtgcggcgagccgagcgaggcagctctgagccgcgcggaaatctggcattttttaaagtttgcgccccacaaagaggaaatattccaaaggtactcaggatgtaaaaggggagatcttcacagatgcctccgtggatggcatggcaatccatccatcaatgagaagaccatgatttcttttaattttctgtgtgtttccacattccccagtgagaattcttccacctttttttgtgccatgggaaaaacctgaagggcaggcagagctgctcccgaacttgtgaccttctctgaggttgcagcggctcttgtagaacatgactctgggacatcacttccttttgttttctttcggagctgaaccaaagaatgtgcaccctctttctctagtgctgtggtgtctgcttatttttgtatttgtgctttccatccatcttctgtgatcacaaggcattcttaaggttttctagcacgacttgcggacatccagactcgtggggggcccacccatggctcggtaagccagcagcccagggcactggcactaccatgaggcactgcattaattgctgcatacagctgttacccgacggcgcacacaagcagcaggtcaactgccaagggggcccccatcacggtcaccaggcgtgccccacgtgcaaaggagaaaacaaaattctgtttcgtgtggacagtaagcagatgaacttgcttgctgttctcgaagtgaggactgaagggaacgaaaactggggtgggtttttgcgcttcaaaaaggggaagcgatgtagcctcgtttttggactgataataatgaccttggtaatggcttcttacatcctttctggggcccaccaagagcttctgatctcatcacctttccattacggaggcttccccagcaaccccagcttgatggacagcgaaaacccaagtgacacaaaggagcatcaccaccaatcctctgtaaataatatttcatacatgaaggactatccaagcattaaattaattatcaacagcatcacaactaggattgagttcacgaccagacagctcccagacttagaagaccttaagaagcaggagttgcatatgttttcagtcatccccaacaaattccttccaaacagtaagagcccctgttggtacgaggagttctcggggcagaacaccaccgacccctacctcaccaactcctacgtgctctactccaagcgcttccgctccaccttcgacgccctgcgcaaggccttctggggccacctggcgcacgcgcacgggaagcacttccgcctgcgctgcctgccgcacttctacatcatagggcagcccaagtgcgggaccacagacctctatgaccgcctgcggctgcaccctgaggtcaagttctccgccatcaaggagccacactggtggacccggaagcgctttggaatcgtccgcctaagagatgggctgcgagaccgctatcccgtggaagattatctggacctctttgacctggccgcacaccagatccatcaaggactgcaggccagctctgcaaaggagcagagcaagatgaatacaatcattatcggggaggccagtgcctccacgatgtgggataataatgcctggacgttcttctacgacaacagcacggatggcgagccaccgtttctgacgcaggacttcatccacgcctttcagccaaatgccagactgattgtcatgctcagggaccctgtggagaggttgtactcagactatctctactttgcaagttcgaataaatccgcggacgacttccatgagaaagtgacagaagcactgcagctgtttgaaaattgcatgcttgattattcactgcgcgcctgcgtctacaacaacaccctcaacaacgccatgcctgtgaggctccaggttgggctctatgctgtgtaccttctggactggctcagcgtttttgacaagcaacagtttctcattcttcgcctggaagatcatgcatccaacgtcaagtacaccatgcacaaggtcttccagtttctgaacctagggcccttaagtgagaagcaggaggctttgatgaccaagagccccgcatccaatgcacggcgtcccgaggaccggaacctggggcccatgtggcccatcacacagaagattctgcgggatttctacaggcccttcaacgctaggctggcgcaggtcctcgcggatgaggcgtttgcgtggaagacgacgtgagagctgaattgttgctgcacgtgctgggcccgccaatgccgtcatcatcaggattttacaaatctctttgcggggaactgtttcactcatggtatggaaaaccccaggactctgccactctaggcacacatgaattataaccattttggaatttccttcgtgatgttcgagagctcagcaatggacccctcacagagctcctctatccgaggccattggagaccccagtttctcaagaattcagctctgctctgagcgtcctggagcttggggatgcagccagctggcctgcactgggtgtggagagaacacctagggaaggcagcctggccctgcccgcctccgccttctggagagcctctgggttctgagtcagcaagccagaggtcatgccacaggcctggctggaacttacacttcacgttccctttttttccccctagagatggggtctcgccgtgttgcacagactgtctgtattcaatggctatcttcacaggtgtgatcataccacattcacttctgaaacactcttgttgcgatcgctaacctcactgggacagagaaccgcagtctttcgagaatggaggctcttcattttttttttctcctttactccaaactcagccctccagtttcttcagatgtaaaccctgttaacgtcactgtttccaaaaggaaaaaaataagtcagtttttggcagcaccttcatctttctgacctcctcctattctgtccttgtggacttatgtttaacatagaaaatgaatgcgtttaaaacaaaaccactttctgcatttaaccagtcctggctctctctctgctgcctcttcatacgttttctcaagaacttcagtttataattggaagagaaatttttgctgttaatgccagaatgagcaacctcaaggaattgaacacttcttggaaaatctaggtaattcaagccctcatcaggtttacaagatcatcagagaaacagaggattttaatttttagttctggccggctacaggctccatttctctgccttcccattggaaatagtttatttccacattctccactgcgtgtggtcaaagttcctcacccagcaagggactatagatactcgtgtcccaattccaaaacacaatgcacaagctgaacttgggctgaacgtggcgtgttgagatttggaatgaggtttctaagagccgtgttcttcatggaattttccaggccacttggcagcttggtttaccgatggatgggctagagatcttgtcgtttcttggaagtcacagggaagattgaagagaacgcttgagcatccttggcaacagcccaggtgggacctggatgaagctttgcactcaagtattgtcaagggaagcttcctgtgaaccaaagttctcaggccaaggtctcgcccaccaaagccagaaagtgcaagcacccgtctacccagctctaacttgtatgtgtgagacagaccaggcttcgggggtaggaggatctgcagttgttcagccgtctttctgctggtgttgtctttctgccatcagagaagggacacacagcccgttcgaaggtgtgcagagggctctgagcgccaggatggccagggctgtttttgctactgaaggagcgtgtgtcctgaactcccacttgcagggacagtccccaccttctctatagccggcactgggagcagccgccagcagggaaatctggcctgagcacaaggatgctttagggagagatcacttcagtgtgtgtgtatatttatttgcagtacagtgcgcgcgtgtgtgtgtgtgtacgcgcacgtgtgggtgagtgcgtcttctgagtgggttctgttcagttgctaatgaggctcctccgctctggacacaacccttttatagattaatttctctgccaattaacttgtcattttcagtacatattttactattccacaccaaccataattacaacaagggatttttcttatgcactcctatgcatgtgaataacatgtggtgtaattctgcttcttacagaagtattactgaaggtattatttccaatattatttggtttattatgcggatcttttttatatatgcagtcccatcccttctgtgccactcaatgccatccagacatggtttttccctccaggggcctttctctccagagggcacttcggctgcctctgcttcctctcattcgaggcccggctcttgctgacagaataggttccgttctgggcggtggttctcgagcctgccattcaaaaccaaagcaaattggagcatttctcacaacatggtattgaagttcctttttgttctcaaaagttgtgaccgtgttaaattgtactcccttagtcctgtaaggtatgttaagtgaatcgcagttacgctgtacttttattaatatttaacataattaaagatggacccataagagtgacgcctgtggagcgcgtgctcttcctctgcagccaa

SEQ ID NO: 4528 - DNA, 2255 bp, Homo sapiens
  source 1..2255: mol_type = unassigned DNA
attccagactggagctgatgtgtgtcagcgcgacatggggcggggggagggttctcctcggatgtttcattcgccgtctgcacgtcactcccaaacttttcctcccagcgctcggggagtcaggttgacgcgccctggatgcggggctagaggctcggggctgggcgcgctcccgcggagccggagccgcagaggctcccgggctggactcaggcttctcaggaaatctggcattttttaaagtttgcgccccacaaagaggaaatattccaaaggtactcaggatgtaaaaggggagatcttcacagatgcctccgtggatggcatggcaatccatccatcaatgagaagaccatgatttcttttaattttctgtgtgtttccacattccccagtgagaattcttccacctttttttgtgccatgggaaaaacctgaagggcaggcagagctgctcccgaacttgtgaccttctctgaggttgcagcggctcttgtagaacatgactctgggacatcacttccttttgttttctttcggagctgaaccaaagaatgtgcaccctctttctctagtgctgtggtgtctgcttatttttgtatttgtgctttccatccatcttctgtgatcacaaggcattcttaaggttttctagcacgacttgcggacatccagactcgtggggggcccacccatggctcggtaagccagcagcccagggcactggcactaccatgaggcactgcattaattgctgcatacagctgttacccgacggcgcacacaagcagcaggtcaactgccaagggggcccccatcacggtcaccaggcgtgccccacgtgcaaaggagaaaacaaaattctgtttcgtgtggacagtaagcagatgaacttgcttgctgttctcgaagtgaggactgaagggaacgaaaactggggtgggtttttgcgcttcaaaaaggggaagcgatgtagcctcgtttttggactgataataatgaccttggtaatggcttcttacatcctttctggggcccaccaagagcttctgatctcatcacctttccattacggaggcttccccagcaaccccagcttgatggacagcgaaaacccaagtgacacaaaggagcatcaccaccaatcctctgtaaataatatttcatacatgaaggactatccaagcattaaattaattatcaacagcatcacaactaggattgagttcacgaccagacagctcccagacttagaagaccttaagaagcaggagttgcatatgttttcagtcatccccaacaaattccttccaaacagtaagagcccctgttggtacgaggagttctcggggcagaacaccaccgacccctacctcaccaactcctacgtgctctactccaagcgcttccgctccaccttcgacgccctgcgcaaggccttctggggccacctggcgcacgcgcacgggaagcacttccgcctgcgctgcctgccgcacttctacatcatagggcagcccaagtgcgggaccacagacctctatgaccgcctgcggctgcaccctgaggtcaagttctccgccatcaaggagccacactggtggacccggaagcgctttggaatcgtccgcctaagagatgggctgcgagaccgctatcccgtggaagattatctggacctctttgacctggccgcacaccagatccatcaaggactgcaggccagctctgcaaaggagcagagcaagatgaatacaatcattatcggggaggccagtgcctccacgatgtgggataataatgcctggacgttcttctacgacaacagcacggatggcgagccaccgtttctgacgcaggacttcatccacgcctttcagccaaatgccagactgattgtcatgctcagggaccctgtggagaggttgtactcagactatctctactttgcaagttcgaataaatccgcggacgacttccatgagaaagtgacagaagcactgcagctgtttgaaaattgcatgcttgattattcactgcgcgcctgcgtctacaacaacaccctcaacaacgccatgcctgtgtgtaccccccccccccgtaccccccgagctggcccctggcagaaggagctggtttgttgttattatgcaagcggcattgtgggtttgcgtttcagcataggaacagagagaagcgttttaatgtgcaaatgctgttccccattattcatggatgtaaaagctgaaaactga

SEQ ID NO: 4529 - DNA, 1566 bp, Homo sapiens
  source 1..1566: mol_type = unassigned DNA
aaacttttcctcccagcgctcggggagtcaggttgacgcgccctggatgcggggctagaggctcggggctgggcgcgctcccgcggagccggagccgcagaggctcccgggctggactcaggcttctcaggaaatctggcattttttaaagtttgcgccccacaaagaggaaatattccaaaggtactcaggatgtaaaaggggagatcttcacagatgcctccgtggatggcatggcaatccatccatcaatgagaagaccatgatttcttttaattttctgtgtgtttccacattccccagtgagaattcttccacctttttttgtgccatgggaaaaacctgaagggcaggcagagctgctcccgaacttgtgaccttctctgaggttgcagcggctcttgtagaacatgactctgggacatcacttccttttgttttctttcggagctgaaccaaagaatgtgcaccctctttctctagtgctgtggtgtctgcttatttttgtatttgtgctttccatccatcttctgtgatcacaaggcattcttaaggttttctagcacgacttgcggacatccagactcgtggggggcccacccatggctcggtaagccagcagcccagggcactggcactaccatgaggcactgcattaattgctgcatacagctgttacccgacggcgcacacaagcagcaggtcaactgccaagggggcccccatcacggtcaccaggcgtgccccacgtgcaaaggagaaaacaaaattctgtttcgtgtggacagtaagcagatgaacttgcttgctgttctcgaagtgaggactgaagggaacgaaaactggggtgggtttttgcgcttcaaaaaggggaagcgatgtagcctcgtttttggactgataataatgaccttggtaatggcttcttacatcctttctggggcccaccaagagcttctgatctcatcacctttccattacggaggcttccccagcaaccccagcttgatggacagcgaaaacccaagtgacacaaaggagcatcaccaccaatcctctgtaaataatatttcatacatgaaggactatccaagcattaaattaattatcaacagcatcacaactaggattgagttcacgaccagacagctcccagacttagaagaccttaagaagcaggagttgcatatgttttcagtcatccccaacaaattccttccaaaacacaatgcacaagctgaacttgggctgaacgtggcgtgttgagatttggaatgaggtttctaagagccgtgttcttcatggaattttccaggccacttggcagcttggtttaccgatggatgggctagagatcttgtcgtttcttggaagtcacagggaagattgaagagaacgcttgagcatccttggcaacagcccaggtgggacctggatgaagctttgcactcaagtattgtcaagggaagcttcctgtgaaccaaagttctcaggccaaggtctcgcccaccaaagccagaaagtgcaagcacccgtctacccagctctaacttgtatgtgtgagac

SEQ ID NO: 4530 - DNA, 4678 bp, Homo sapiens
  source 1..4678: mol_type = unassigned DNA
ggaaatctggcattttttaaagtttgcgccccacaaagaggaaatattccaaaggtactcaggatgtaaaaggggagatcttcacagatgcctccgtggatggcatggcaatccatccatcaatgagaagaccatgatttcttttaattttctgtgtgtttccacattccccagtgagaattcttccacctttttttgtgccatgggaaaaacctgaagggcaggcagagctgctcccgaacttgtgaccttctctgaggttgcagcggctcttgtagaacatgactctgggacatcacttccttttgttttctttcggagctgaaccaaagaatgtgcaccctctttctctagtgctgtggtgtctgcttatttttgtatttgtgctttccatccatcttctgtgatcacaaggcattcttaaggttttctagcacgacttgcggacatccagactcgtggggggcccacccatggctcggtaagccagcagcccagggcactggcactaccatgaggcactgcattaattgctgcatacagctgttacccgacggcgcacacaagcagcaggtcaactgccaagggggcccccatcacggtcaccaggcgtgccccacgtgcaaaggagaaaacaaaattctgtttcgtgtggacagtaagcagatgaacttgcttgctgttctcgaagtgaggactgaagggaacgaaaactggggtgggtttttgcgcttcaaaaaggggaagcgatgtagcctcgtttttggactgataataatgaccttggtaatggcttcttacatcctttctggggcccaccaagagcttctgatctcatcacctttccattacggaggcttccccagcaaccccagcttgatggacagcgaaaacccaagtgacacaaaggagcatcaccaccaatcctctgtaaataatatttcatacatgaaggactatccaagcattaaattaattatcaacagcatcacaactaggattgagttcacgaccagacagctcccagacttagaagaccttaagaagcaggagttgcatatgttttcagtcatccccaacaaattccttccaaacagtaagagcccctgttggtacgaggagttctcggggcagaacaccaccgacccctacctcaccaactcctacgtgctctactccaagcgcttccgctccaccttcgacgccctgcgcaaggccttctggggccacctggcgcacgcgcacgggaagcacttccgcctgcgctgcctgccgcacttctacatcatagggcagcccaagtgcgggaccacagacctctatgaccgcctgcggctgcaccctgaggtcaagttctccgccatcaaggagccacactggtggacccggaagcgctttggaatcgtccgcctaagagatgggctgcgagaccgctatcccgtggaagattatctggacctctttgacctggccgcacaccagatccatcaaggactgcaggccagctctgcaaaggagcagagcaagatgaatacaatcattatcggggaggccagtgcctccacgatgtgggataataatgcctggacgttcttctacgacaacagcacggatggcgagccaccgtttctgacgcaggacttcatccacgcctttcagccaaatgccagactgattgtcatgctcagggaccctgtggagaggttgtactcagactatctctactttgcaagttcgaataaatccgcggacgacttccatgagaaagtgacagaagcactgcagctgtttgaaaattgcatgcttgattattcactgcgcgcctgcgtctacaacaacaccctcaacaacgccatgcctgtgaggctccaggttgggctctatgctgtgtaccttctggactggctcagcgtttttgacaagcaacagtttctcattcttcgcctggaagatcatgcatccaacgtcaagtacaccatgcacaaggtcttccagtttctgaacctagggcccttaagtgagaagcaggaggctttgatgaccaagagccccgcatccaatgcacggcgtcccgaggaccggaacctggggcccatgtggcccatcacacagaagattctgcgggatttctacaggcccttcaacgctaggctggcgcaggtcctcgcggatgaggcgtttgcgtggaagacgacgtgagagctgaattgttgctgcacgtgctgggcccgccaatgccgtcatcatcaggattttacaaatctctttgcggggaactgtttcactcatggtatggaaaaccccaggactctgccactctaggcacacatgaattataaccattttggaatttccttcgtgatgttcgagagctcagcaatggacccctcacagagctcctctatccgaggccattggagaccccagtttctcaagaattcagctctgctctgagcgtcctggagcttggggatgcagccagctggcctgcactgggtgtggagagaacacctagggaaggcagcctggccctgcccgcctccgccttctggagagcctctgggttctgagtcagcaagccagaggtcatgccacaggcctggctggaacttacacttcacgttccctttttttccccctagagatggggtctcgccgtgttgcacagactgtctgtattcaatggctatcttcacaggtgtgatcataccacattcacttctgaaacactcttgttgcgatcgctaacctcactgggacagagaaccgcagtctttcgagaatggaggctcttcattttttttttctcctttactccaaactcagccctccagtttcttcagatgtaaaccctgttaacgtcactgtttccaaaaggaaaaaaataagtcagtttttggcagcaccttcatctttctgacctcctcctattctgtccttgtggacttatgtttaacatagaaaatgaatgcgtttaaaacaaaaccactttctgcatttaaccagtcctggctctctctctgctgcctcttcatacgttttctcaagaacttcagtttataattggaagagaaatttttgctgttaatgccagaatgagcaacctcaaggaattgaacacttcttggaaaatctaggtaattcaagccctcatcaggtttacaagatcatcagagaaacagaggattttaatttttagttctggccggctacaggctccatttctctgccttcccattggaaatagtttatttccacattctccactgcgtgtggtcaaagttcctcacccagcaagggactatagatactcgtgtcccaattccaaaacacaatgcacaagctgaacttgggctgaacgtggcgtgttgagatttggaatgaggtttctaagagccgtgttcttcatggaattttccaggccacttggcagcttggtttaccgatggatgggctagagatcttgtcgtttcttggaagtcacagggaagattgaagagaacgcttgagcatccttggcaacagcccaggtgggacctggatgaagctttgcactcaagtattgtcaagggaagcttcctgtgaaccaaagttctcaggccaaggtctcgcccaccaaagccagaaagtgcaagcacccgtctacccagctctaacttgtatgtgtgagacagaccaggcttcgggggtaggaggatctgcagttgttcagccgtctttctgctggtgttgtctttctgccatcagagaagggacacacagcccgttcgaaggtgtgcagagggctctgagcgccaggatggccagggctgtttttgctactgaaggagcgtgtgtcctgaactcccacttgcagggacagtccccaccttctctatagccggcactgggagcagccgccagcagggaaatctggcctgagcacaaggatgctttagggagagatcacttcagtgtgtgtgtatatttatttgcagtacagtgcgcgcgtgtgtgtgtgtgtacgcgcacgtgtgggtgagtgcgtcttctgagtgggttctgttcagttgctaatgaggctcctccgctctggacacaacccttttatagattaatttctctgccaattaacttgtcattttcagtacatattttactattccacaccaaccataattacaacaagggatttttcttatgcactcctatgcatgtgaataacatgtggtgtaattctgcttcttacagaagtattactgaaggtattatttccaatattatttggtttattatgcggatcttttttatatatgcagtcccatcccttctgtgccactcaatgccatccagacatggtttttccctccaggggcctttctctccagagggcacttcggctgcctctgcttcctctcattcgaggcccggctcttgctgacagaataggttccgttctgggcggtggttctcgagcctgccattcaaaaccaaagcaaattggagcatttctcacaacatggtattgaagttcctttttgttctcaaaagttgtgaccgtgttaaattgtactcccttagtcctgtaaggtatgttaagtgaatcgcagttacgctgtacttttattaatatttaacataattaaagatggacccataagagtgacgcctgtggagcgcgtgctcttcctctgcagcc

SEQ ID NO: 4531 - DNA, 2289 bp, Homo sapiens
  source 1..2289: mol_type = unassigned DNA
gactcgggagttgccggcgcttcccggcggtggcggcgtctctggccggccttggtgcggcgagccgagcgaggcagctctgagccgcgcggaaatctggcattttttaaagtttgcgccccacaaagaggaaatattccaaaggtactcaggatgtaaaaggggagatcttcacagatgcctccgtggatggcatggcaatccatccatcaatgagaagaccatgatttcttttaattttctgtgtgtttccacattccccagtgagaattcttccacctttttttgtgccatgggaaaaacctgaagggcaggcagagctgctcccgaacttgtgaccttctctgaggttgcagcggctcttgtagaacatgactctgggacatcacttccttttgttttctttcggagctgaaccaaagaatgtgcaccctctttctctagtgctgtggtgtctgcttatttttgtatttgtgctttccatccatcttctgtgatcacaaggcattcttaaggttttctagcacgacttgcggacatccagactcgtggggggcccacccatggctcggtaagccagcagcccagggcactggcactaccatgaggcactgcattaattgctgcatacagctgttacccgacggcgcacacaagcagcaggtcaactgccaagggggcccccatcacggtcaccaggcgtgccccacgtgcaaaggagaaaacaaaattctgtttcgtgtggacagtaagcagatgaacttgcttgctgttctcgaagtgaggactgaagggaacgaaaactggggtgggtttttgcgcttcaaaaaggggaagcgatgtagcctcgtttttggactgataataatgaccttggtaatggcttcttacatcctttctggggcccaccaagagcttctgatctcatcacctttccattacggaggcttccccagcaaccccagcttgatggacagcgaaaacccaagtgacacaaaggagcatcaccaccaatcctctgtaaataatatttcatacatgaaggactatccaagcattaaattaattatcaacagcatcacaactaggattgagttcacgaccagacagctcccagacttagaagaccttaagaagcaggagttgcatatgttttcagtcatccccaacaaattccttccaaacagtaagagcccctgttggtacgaggagttctcggggcagaacaccaccgacccctacctcaccaactcctacgtgctctactccaagcgcttccgctccaccttcgacgccctgcgcaaggccttctggggccacctggcgcacgcgcacgggaagcacttccgcctgcgctgcctgccgcacttctacatcatagggcagcccaagtgcgggaccacagacctctatgaccgcctgcggctgcaccctgaggtcaagttctccgccatcaaggagccacactggtggacccggaagcgctttggaatcgtccgcctaagagatgggctgcgagaccgctatcccgtggaagattatctggacctctttgacctggccgcacaccagatccatcaaggactgcaggccagctctgcaaaggagcagagcaagatgaatacaatcattatcggggaggccagtgcctccacgatgtgggataataatgcctggacgttcttctacgacaacagcacggatggcgagccaccgtttctgacgcaggacttcatccacgcctttcagccaaatgccagactgattgtcatgctcagggaccctgtggagaggttgtactcagactatctctactttgcaagttcgaataaatccgcggacgacttccatgagaaagtgacagaagcactgcagctgtttgaaaattgcatgcttgattattcactgcgcgcctgcgtctacaacaacaccctcaacaacgccatgcctgtgtgtacccccccccccgtaccccccgagctggcccctggcagaaggagctggtttgttgttattatgcaagcggcattgtgggtttgcgtttcagcataggaacagagagaagcgttttaatgtgcaaatgctgttccccattattcatggatgtaaaagctgaaaactgatgggctcttggtctggctcctgccttcctccctgctggtcacctgccacctccccctcctccctcagcaggaggatgagggtgcctttaggaagattaccatttagcaagacacccagcaattagaatcggcagacatgaggacacccaactctcaaattgtctta

SEQ ID NO: 4532 - DNA, 3248 bp, Homo sapiens
  source 1..3248: mol_type = unassigned DNA
ctctggctgctgctccagctctggcagacacgccaagctttgagaaagctcccagtgaggaactggtcttctggagactctgtgtggcatagagtgattcaaccaccttaagaagacctctggctttcctggaacacagatgtcgagacatctcccatggatttgtgatcagcgttgcagctctcccagcagccctggacggtggtgagtcccctcagctggccaggacagtactctgctctcacctctctgcttcttgggctccatcccagctccccatcaactgatcttcttgcaaacccacagggctccaggacaccctccttctggagcccatgctgcctacagcacttcactccccaccagtgatgacaacagttgctgttctttgtccactttatttacttgtttatctttaatgacaaaagttttttttttgttgtttttttttttttttttgaaacggagtctcactcttcactcaggctgcagtgcagtggcgcaatctcagctcactgccacctctgcctcccaggttcacgccattctcctgcctcagcctcccgagtagctgggactacaggcgcccaccatcacgcctggctaattttttgtatttttagtagagatggggtctcactgtgttagccaggatggtctcgatctcctgacctcgtgatccgcccgcctcggcctcccataatgctgggattacaggcgtgagccaccgcgcctggctgacaaaagttttatacctgcctgttaaaaaaattatataatacagaagcacaccttgtaaaaggtgcaatcctcagttatgggcatgactgcgtgttcccttcccccatcttcattataataaccccccaatccccccagatcctgtgagccaggtaccggaattatccctctttcacacacgggtaaagtgatccgtcacagagagatttaagtgatcttcataagcaagatcataggctaggaagtggcagagccaggattcaacctcggcgagcctggtggtgctctgacatccaccgaagcccccatcaagcccttttagctccacaacctaaaagggtctctctaagaggtatcctgaagcaaaagacaggagttctctttgaaacatagtatttctctctacagatagatagcctgtaggtatgtaagtaggtgggtgggtgggtaggtagacagtttgatgatatcccacattattctgcaactggacttctgctgtgagcacagactatattctggcctatgtcttgactccgtattcctgggaaagtgctcgactgagaccttgggagtcttgggaagtccaatgggtagggtagccgaatctgagggctgatccctgagggcactgggcagtaattggggcatgggatgggcatgagggcccgggtccctaaagttgcccactccacccgaaggcccccagccgcccgcatgtggctgccacggttctccagcaagacagtgacagtgctcctcctggcacagaccacctgcctcctgctcttcatcatctcccggccagggccctcatccccagccggcggcgaggatcgtgtgcacgtgctggtgctgtcctcgtggcgctcgggctcatccttcttgggccagctcttcagccagcaccccgacgtcttctacctgatggagcccgcgtggcatgtgtggaccaccctgtcgcagggcagcgcggcaacgctgcacatggccgtgcgcgacctgatgcgctctatctttttgtgcgacatggacgtgtttgatgcctacatgccacagagccgaaacctgtccgcctttttcaactgggcaacgagccgcgcgctgtgctcgccgcccgcctgcagcgcctttccccgaggcaccatcagcaagcaggacgtatgcaagacactgtgcacgcggcagccattcagcctggcccgggaggcctgccgctcctacagccacgtggtgctcaaggaggtgcgcttcttcaacctgcaggtgctctacccgctgctcagcgaccccgcgctcaacctgcgcatcgtgcacctggtgcgcgacccgcgggccgtgctgcgctcccgggaggcggcgggcccgatactggcacgcgacaacggcatcgtgctgggcaccaacggcaagtgggtggaggccgaccctcacctgcgcctgattcgcgaggtgtgccgcagccacgtgcgcatcgccgaggccgccacactcaagccgccacccttcctgcgcggccgctaccgcctggtgcgcttcgaggacctggcgcgggagccgctggcagagatccgcgcactctacgccttcaccggcctgaccctcacgccacagctcgaggcctggatccacaacatcacccacgggtcggggatcggcaagccaatcgaggccttccatacttcgtctaggaatgcgcgcaacgtctcccaggcctggcgccacgcgttgcccttcactaagatcctgcgcgtgcaggaggtgtgcgccggcgcgctgcagctgctgggctaccggcctgtgtactctgcggaccagcagcgtgacctcaccctggatctggtgctgccacgaggcccagaccacttcagctgggcatcgcctgactgagaactctgggccttagagcaggccccgaactgtggtcgccaggcccaggaggcgactgcatggtggagagggagctggggcgcatggggaagcaggtccctactatcaaccgggagtttggggtcctcccctgaagtaggcaaggactgcacgtttctttctctcctgattctcggttttcctttgagtcttctggagctgccttctcatcaggtgcactcttcatggaaagcaactcttgcccctacctcttctgggcgcagggagtaagttactgctaaattaaattaaatgtgtgccaggccgggtgcggtggctcatgcctgtaatcccagcattttgagaggctgaggcgggtggatcacctgaggtcaggagttcgaaaccagcctggccaacatagtgaaaccccctctctactaaaaatgcaaaaattagtccggcgtggtggcacactcctgtaatcccagctacttaggaggctgaggtgggagaatcacttggactccagaggtggaggttgcagtaagctgagatcatgccactgcaccctagcttgggtggcagagcaagactctatcaaaaaaataagtaataaatttgttcaaaagtcctgc

SEQ ID NO: 4533 - DNA, 1254 bp, Homo sapiens
  source 1..1254: mol_type = unassigned DNA
atgtcgagacatctcccatggatttgtgatcagcgttgcagctctcccagcagccctggacggtggcccccagccgcccgcatgtggctgccacggttctccagcaagacagtgacagtgctcctcctggcacagaccacctgcctcctgctcttcatcatctcccggccagggccctcatccccagccggcggcgaggatcgtgtgcacgtgctggtgctgtcctcgtggcgctcgggctcatccttcttgggccagctcttcagccagcaccccgacgtcttctacctgatggagcccgcgtggcatgtgtggaccaccctgtcgcagggcagcgcggcaacgctgcacatggccgtgcgcgacctgatgcgctctatctttttgtgcgacatggacgtgtttgatgcctacatgccacagagccgaaacctgtccgcctttttcaactgggcaacgagccgcgcgctgtgctcgccgcccgcctgcagcgcctttccccgaggcaccatcagcaagcaggacgtatgcaagacactgtgcacgcggcagccattcagcctggcccgggaggcctgccgctcctacagccacgtggtgctcaaggaggtgcgcttcttcaacctgcaggtgctctacccgctgctcagcgaccccgcgctcaacctgcgcatcgtgcacctggtgcgcgacccgcgggccgtgctgcgctcccgggaggcggcgggcccgatactggcacgcgacaacggcatcgtgctgggcaccaacggcaagtgggtggaggccgaccctcacctgcgcctgattcgcgaggtgtgccgcagccacgtgcgcatcgccgaggccgccacactcaagccgccacccttcctgcgcggccgctaccgcctggtgcgcttcgaggacctggcgcgggagccgctggcagagatccgcgcactctacgccttcaccggcctgaccctcacgccacagctcgaggcctggatccacaacatcacccacgggtcggggatcggcaagccaatcgaggccttccatacttcgtctaggaatgcgcgcaacgtctcccaggcctggcgccacgcgttgcccttcactaagatcctgcgcgtgcaggaggtgtgcgccggcgcgctgcagctgctgggctaccggcctgtgtactctgcggaccagcagcgtgacctcaccctggatctggtgctgccacgaggcccagaccacttcagctgggcatcgcctgactga

SEQ ID NO: 4534 - DNA, 6885 bp, Homo sapiens
  source 1..6885: mol_type = unassigned DNA
gacgacgtttgggagcctttgctgagtccagggagagaggcgtcccccaccgtgccgctgcagctcgggcagagccgccaagctttggggtgctgaggaacctctaatcatctcccatggatttgtgatcagcgttgcagctctcccagcagccctggacagtggcccccagcagtcagcatgtggctgccgcgcgtctccagcacagcagtgaccgcgctcctcctggcgcagaccttcctcctcctctttctggtttcccggccagggccctcgtccccagcaggcggcgaggcgcgcgtgcatgtgctggtgctgtcctcgtggcgctcgggctcgtccttcgtgggccaactcttcaaccagcaccccgacgtcttctacctaatggagcccgcgtggcacgtgtggaccaccctgtcgcagggcagcgccgcaacgctgcacatggctgtgcgcgacctggtgcgctccgtcttcctgtgcgacatggacgtgtttgatgcctatctgccttggcgccgcaacctgtccgacctcttccagtgggccgtgagccgtgcactgtgctcgccacccgcctgcagtgcctttccccgaggcgccatcagcagcgaggccgtgtgcaagccactgtgcgcgcggcagtccttcaccctggcccgggaggcctgccgctcctacagccacgtggtgctcaaggaggtgcgcttcttcaacctgcaggtgctctacccgctgctcagcgaccccgcgctcaacctacgcatcgtgcacctggtgcgcgacccgcgggccgtgctgcgctcccgggagcagacagccaaggctctggcgcgtgacaacggcatcgtgctgggcaccaacggcacgtgggtggaggccgaccccggcctgcgcgtggtgcgcgaggtgtgccgtagccacgtacgcatcgccgaggccgccacactcaagccgccaccctttctgcgcggccgctaccgcctggtgcgcttcgaggacctggcgcgggagccgctggcagaaatccgtgcgctctacgccttcactgggctcagtctcacgccacagctcgaggcctggatccataacatcacccacggatctggacctggtgcgcgccgcgaagccttcaagacttcgtccaggaatgcgctcaacgtctcccaggcctggcgccatgcgctgccctttgccaagatccgccgcgtgcaggaactgtgcgctggtgcgctgcagctgctgggctaccggcctgtgtactctgaggacgagcagcgcaacctcgcccttgatctggtgctgccacgaggcctgaacggcttcacttgggcatcatccaccgcctcgcacccccgaaattagtggaggccacagttgtagcaggcgctaggcccgggaggagagtgcatggtgcagagggggctggggcgcacggagaagcaggtccctatattgaccaaggagtttgtggtacgacccctccccctccccaagtaggcaaggactgcacgtttctttctctcttgattcttggttttcctttgagtcctctggagctgccttctcatcaggtgcactcttcatggaaagcaactcttgcccctcctcctctgggcacagggtgtgcgttcagatgacttggctcctactcaagggctttcttcccctttaactctctccttctggtgacacatcctgcagcagctgagggggtgccctggcactggctgggagtggagaggcactgtggtgaaatggctccagaggtctgtacatcacatacatatgcacacaggcacacatggcaaaactcggaagtgaaaggacttgtctgaaatcacatggtgagaaggaggatgaagggaggagagagcttttgctctgggtctccagtggataggagaggacctgcctcctgggtgagaagggtcagattttcctattttaattgctttagggaagagcaagcagagtcatgaccagggacacagctgagagatagaggaggctgtgaatgctgagaccagagtttatcatgctggacaagcctggaaggaggcaataagtgggaaaggtaggaggagagaaggctggggagggctgggcagcaagccaggcacagtgagtggcagagcaagagggggaaagcaggatcagtgcctggaaggcaggtgtgcccgtcagcggggagtggaactcatcaggcttgccaagaggttggaagggaaatggctctgggctggaactgtcttcccttggtccttctggtccaggccttggaggaaagcagaggatgatccctgcctgtgagccacacctcctagctctgggggcaaaggggcttagtaaaggaatgctggatgtgtagagggtttagtcccgagctcaggaaatgagagcctataagtgcccagtacatgtttaaaagaagagctcatggaacctctggaaaggacagggaagttgagttagccacataaatgaacccaagtcacattggaacacagagctggtctgggaactgtgttggctgccaacagaacttctgaccctgttacctgtgaaatgaggcagtttccctcacgttgccatcagctaccaggagcgatgctggtggtcactagcttctgatcctcatcctgggtgtggccacagattgggggaacctggattgtggagtcacatcctccctgcaaagcaagcagggcaagggagatctggcattttctgctttacgtggagggagaacaggcacattagccttgaagctgaagctcattttaggttccttccaggtttagaagcttcaaccaaatgaaacttgaatctgtccctcgtgacaattataggaggaaggtatttaaaaccccagatttatgaatgtgtactacatggcttagagaatgtctttgttcttgttcaggtggttataacaaaataccttaagagtgggtaacttggctggatgcagtggctcatgcctgtaatcccagcactgtgggaggccgagggggatgaatcacctgaggtcaggcattcaagaacagcctggccaacatggcgaagcccctcctctactaaaaatacaaaattagcgaggcatggtcgcacatacctgtaatcccagctcctcgggaagctgaggcaggagaatcgcttgaacccaggaggcggaggttgcagtgagccaagatcacgccattgcactccagcctgggtgacagagcaagactccatctcaaaaaaaaaaaaaagactgggtaacttataaacaaatgttcttctcacaagtctggagactgggaagtccaagatcaagccaccagtgctgtctgatgagggcccactttttcaaagacagtgccttctagctgtgtcctcttatcgtagaagatgggagacagctctccagggccatttttttttttttttttttttttttgagatggagtctggctctgtcgcccaggctggagtgcagtggcacaatctcggctcactgcaacctctgcctctctctgcctcctgagttcaagcaattctcctgcctcagcctcctgaggagctgggactacagggatgcaccaccatgcccagctaatttttgtatttttgtagacactgggtttcaccatattggccaggttggtctcaaactcctgacctcaagtgatctgcccacctcagcctcccaaagtgctgagattacaggcatgagccactgtacccagtctccagggccttttaaagaatgtcactaatcccattcttgaggtctccaccttcattatctaatcacctcccaaaggctccacatcccaacaccatcatattgtgggttaagatttcaaccacaagccaggcgtggtggctcatgcctgtaatcccagcattttggaaggctgaggcaggtggatcacttgaggtcaggagtttgagaccagcctggccaacatggtgaaaccccatctctactaaaaataaaaaaaattagccgggtgtggtggtgcacacctgtaattccagctactcaggaggctgaggcaggagaatcccttgaatccaggaggcggacagtgcagtgagccgagataatgccactgcactccagcctggatgacagagcaagactccatctcatgcccagccagcatgcccaacaagcttcatttgcccctgtttaggtcacaaattttattgatggctgcaattaatggcctcttggtatccaagtcctttgttgtatgacccatccattctcccctgactcccaaggtgtcaggacatgcttgactggctcctgaatttgctctctgcgcatgggcagtacagtcaagcctcacagtgaacccaggtcagctttcaggacaaagaaagtggcctggctgactaggcacagtaaagccagggctgggtaggtacatacttgtgctgatcacgtatgtcttatatctctgtgagagtgcagtcccaacaggaaggtttaatcactggggactgcccaatgctgtgacagggcacagagctctgggttgctgtgggggtgactgcattgaccactgttagtggtttgctgtgttgacactctgtgctgtgtgaccatggctcctgccatcaagaagtagagtctgtttctccacctctgaatccaggctggtcctgtgacttgctttgtcctgtagacaagtgtagtgcaacttcctgtgagccagtttgaagcataggccttggaagcaaaactttacctccacctgtcttaggttttcagctggggctctgctgtgatttgattgtgtctcccaaagttggaaccttgatccccagtgttgtgaggtgaggcttgatggaaagtaaattacgccgtgcgggttatgcccttgtgaatgggtagagaacattatttctgggcgcaggcatggtagctcatgtctgtaatcccagcattttgggaggttgaggtgtgcggattacttgaggtcaggagtttgagaccagcctggccaacaaggtaaaacaccatttctagttaaaatacaaaaattagccaggtgtggtggcacatgcctgtaaggccagctacttgggaggctgagacaggagaatcgcttgaacccaggaggcagagattgcagtgagctgagatcgcaccactgtactccagcctgggcaacaaagcgagagtctgtcttaaaaaaaaccaccattatttcaggagtgagttggttatcctgagagtggtgccttttaaatgaaggagttcattctttgtctttctctcgccctcactttgcccttctgccatatgatgccttccatcatgctaggacacagcaagaaggctctcgctagatgctggctccttgatcttgggcttcccagcctccagaactgtaagccaatacacttctatttattatatatgacccttgctgggttcagtggctcacgcctgtaatcccaatactttgcaaggctgaggcaggaggatcacttgagaccaggcactcaagaccagcctgggcaacatagtgagaccccatctctacaaagttaaaaaaaaattagcagggcatggtgtcgtgcacctgtagtcctagctacttgggaggctgagttgggaggactgcttgaccctgggaggttgaggctacattgaaccatgatcatgccagtgcactccagcctgagtgacagagcaagacacctatctctaaataaatgaccccatctgtggtattgttatagcaaaacaaaacagattaagagagactttttaatgaaaagacagattcacaaagaaaaacaatgtttttgtttctgtttttttgaggcagagtcttgctcttgtcccccaggctggagtgcagtggcgccatcttggctcactgcaacctccgcctcccagtttcaagcgattctcctgcctcagcctcccgagtagctgggattacagatgtacaccaccacgcccggctaattttttttgtatttttagtagagatggggtttcaccatgtcgatcaggctgggctggaactcctgacctcaggtgatccacctgccttggcctcccaatgtgctaggattacaggcatgagccactgtacctggcgaaaaacagtttgttaacacaggcagccaacatcactcaggataagcctcaatgaaaagtaacaaagtgatggcttggaacactgtcttacacagcatttttaaaaaatacaataaatttgtagagataggatgaccaaggacaacagttttaggcttccaaaggtggtaaactatgggatggtaaatatccgagaggaagctgatgcaacaggatttgtctgcagcagcctctggtaccacctctgagtcaagggttgtgtccagtgatggagagtttatatcgtgcctttaggcagaaaaggggagggaaacctgaacttttcctgcactttctgcttcttaattgccttcagctgaaaatcattttttatgtgaaaaaggcatagtctgagctgacgcctctgctttcctccacctgaagagaacctgcgtgctgctcctttgcttcggacctccgcctctgcccgggagaaagcccaggccagcctgctggacaagcagagaccatgagaaggagagttcaggggtcccaaaccaggccatcctagaccagccagctccagctgatccgcacgcagccacttcggctaccttctactggccaaagggagtcccagggctcacccagattcagaggtggggaaactgagtccaccacttgagaagagtagctataaagacatatgagcgaggccagctgagcccagcactgcggccaagtcgaagactttaggagcaataaaagtgcttattgtgtttcagtca

SEQ ID NO: 4535 - DNA, 2093 bp, Homo sapiens
  source 1..2093: mol_type = unassigned DNA
caccgggcagcgccgagggttgccggccggcgcgcggggagtagagggcgcgggccgcagtgccgggttccagagggagctctgcgccgggtccttccctgtggtagccccaggacacccccagcctcaacatcccattctgggactcctgccctgttcccacattcgttctacctcgagtctccaggagcttccagtggcttggtcaccgccaactctcgtccatgcctcttagagcccctttcccggcctcaccgggtgtcgcttaatagtcttgggaccttaaggagcaagtcagcccctgcggaccctcccagtgaagagaaagagctggctgtgcggtggaatttggaagagacgacgtttgggagcctttgctgagtccagggagagaggcgtcccccaccgtgccgctgcagctcgggcagagccgccaagctttgggttctctagggtgtgtacccaggagtggatctgctgtatcatatggtcactctattcaacctttcgagaaaccaccaaattgtttcttcaggaaatgcaccatctgacatccccattttatgaggatccccacgtctctgtcatctcaccaacacttgtgctgaggaacctctaatcatctcccatggatttgtgatcagcgttgcagctctcccagcagccctggacagtggcccccagcagtcagcatgtggctgccgcgcgtctccagcacagcagtgaccgcgctcctcctggcgcagaccttcctcctcctctttctggtttcccggccagggccctcgtccccagcaggcggcgaggcgcgcgtgcatgtgctggtgctgtcctcgtggcgctcgggctcgtccttcgtgggccaactcttcaaccagcaccccgacgtcttctacctaatggagcccgcgtggcacgtgtggaccaccctgtcgcagggcagcgccgcaacgctgcacatggctgtgcgcgacctggtgcgctccgtcttcctgtgcgacatggacgtgtttgatgcctatctgccttggcgccgcaacctgtccgacctcttccagtgggccgtgagccgtgcactgtgctcgccacccgcctgcagtgcctttccccgaggcgccatcagcagcgaggccgtgtgcaagccactgtgcgcgcggcagtccttcaccctggcccgggaggcctgccgctcctacagccacgtggtgctcaaggaggtgcgcttcttcaacctgcaggtgctctacccgctgctcagcgaccccgcgctcaacctacgcatcgtgcacctggtgcgcgacccgcgggccgtgctgcgctcccgggagcagacagccaaggctctggcgcgtgacaacggcatcgtgctgggcaccaacggcacgtgggtggaggccgaccccggcctgcgcgtggtgcgcgaggtgtgccgtagccacgtacgcatcgccgaggccgccacactcaagccgccaccctttctgcgcggccgctaccgcctggtgcgcttcgaggacctggcgcgggagccgctggcagaaatccgtgcgctctacgccttcactgggctcagtctcacgccacagctcgaggcctggatccataacatcacccacggatctggacctggtgcgcgccgcgaagccttcaagacttcgtccaggaatgcgctcaacgtctcccaggcctggcgccatgcgctgccctttgccaagatccgccgcgtgcaggaactgtgcgctggtgcgctgcagctgctgggctaccggcctgtgtactctgaggacgagcagcgcaacctcgcccttgatctggtgctgccacgaggcctgaacggcttcacttgggcatcatccaccgcctcgcacccccgaaattagtggaggccacagttgtagcaggcgctaggcccgggaggagagtgcatggtgcagagggggctggggcgcacggagaagcaggtccctatattgaccaaggagtttgtggtacgacccctccccctccccaagtaggcaaggactgcacgtttctttctctcttgattcttggttttcctttgagtcctctggagctgccttctcatcaggtgc

SEQ ID NO: 4536 - DNA, 2289 bp, Homo sapiens
  source 1..2289: mol_type = unassigned DNA
aagtttccccttgtggatgcgcggccccgcggctctgctcctcccggcgcagaggggccgggagaggccacaggagcggacctggcacgggatttctgaggaacgggagaagactggcgcccgacccgctctggagggtcggtgaacgatgaagggccggcggcggcgacgccgagagtactgcaagttcgcgctgctgttggtgctgtacacgctggtgctgttgctcgtcccctccgtattggacggcggccgcgacggggacaagggcgccgagcactgccccggcctgcagcgcagcctgggagtgtggagcctggaggcggcggcggccggcgaacgcgagcagggagcggaggcgcgggccgccgaggaagggggcgcgaaccagtctcctcggttcccaagcaacctcagcggcgctgtcggggaggcagtgtctcgcgagaagcagcacatctacgtgcatgccacctggcgcaccggctcgtccttcctgggcgaactctttaaccagcacccggacgttttctacttgtatgagcccatgtggcatctatggcaggcgctgtatccgggcgacgccgagagcttgcagggcgcgctgcgcgacatgctgcgttcgctcttccgctgcgacttctccgtgctgcggctgtacgcgccgccgggggaccccgctgcgcgcgccccggacacggccaatcttaccacggccgccctcttccgctggcggactaacaaggtcatctgctcgccgccactgtgtcctggcgcaccccgtgcccgggccgaggtgggcctcgtcgaggacaccgcctgcgagcgcagctgcccacccgtggcgatacgcgccctggaggccgagtgccgaaagtacccggtggtggtcatcaaggacgtgcgcctgctcgatctgggcgtgctggtgcccctgttgcgtgatccaggcctcaacctgaaggtggtgcagcttttccgcgacccgagggcggtgcacaactcgcgcctcaagtctaggcagggactgctgcgcgagagcatccaggtgctgcgcacccgccagaggggcgaccgcttccaccgtgtgctgctggcgcacggcgtgggtgctcgccccgggggccagtctcgcgcgctgcccgccgcgccgcgcgccgatttcttcctgaccggtgcgctcgaggtgatctgcgaagcctggctgcgcgatctgcttttcgcgcgcggcgcgcccgcctggctgcggcgccgctacctgaggctgcgctatgaggacctggtgcggcagccacgcgcccagctgcgccgcctgctgcgcttctccgggctacgcgcgctcgcagcgctcgatgccttcgcgctcaacatgactcgcggcgcggcctacggcgccgaccggcccttccacctgtcagcgcgcgacgcccgggaggcggtgcacgcctggcgcgagcgcctgagccgagagcaggtgcgccaggtggaggccgcctgcgctccagccatgcgtctgctcgcctaccctcgcagcggagaggagggcgacgcggagcagcccagggaaggggagacgccgctggagatggatgccgacggcgccacgtagcctcccatccctgtccccggcacggatccgggtcagtcaccacgaacaggggcactcggcatgctgccccagcactggagaagcagcgctgtgggggcaatctgtcacactctcagagtctgggacttgacttgctaccaacaactgctgtgcaattctgctgagcaggaatatcatgagctgttcaataatgacggacgcattggttgagatgaagtttccagtaaggaagtgacagtgcaatgtggatatttatggctgtaaaataggaagagctttagttcccaggctgaacctgccactgctggagccatttcaacaaggcatcctcacaacaaagaagagatgtgatttggtaccatttcacaccagcaggtgtctggacgaaaacatcaatgtgaataagggccaagtgcagtcctgtcttgattaaattacttaataatattattaaataataataggtctgggcagtattgtttttaacctgactcatccagctgtccttcaaatagctccgtctccctctacccagaactgatttttaaaaagaagtaatttttctccctgggctgggaaaaccctaatgaactgaaacacacttttactttaaaatttttctgtctggcgtttttgtaatcatactattaaatgactctggagtcatgttaatgacagga

SEQ ID NO: 4537 - DNA, 3526 bp, Homo sapiens
  source 1..3526: mol_type = unassigned DNA
cgcagaggtgtcctcagtgcccggagaggttggcagtgtcggccccgagggaagcgtggagcggacggccgacaggggatttctgcccaaacttcatcaccaactctttctgagagcaaaaacatggggccgagtccggcagctgcacgcagaatccaactctctggcagctctcggcaccgacgagctccagatcccgcgttcgcatcccggcgctttgcgcgcagagctaagccttcggacccgtggactgcagcccccgcgcgtcgcggtaaagcgggtcgcgtctccagcccccgaggcgcagcgacggtgggagccggctcggcgttgggggcgggggcggggccggcgaagggggagggctgcgcggcggaggggaggagccgcggcgacagacggcggcgcgcaccaaccgggcgccggctggcaggagccgcgcagaggctggtccgagcgcgttgcgggcgcccggcgtaaggggagtcgggtagcagcatcctcctgggcgccgctttcgcgcggcggcggcggctgcggcggggtctttctttgcttaaatacctcgttggccagaagcgctggtaccgggggcgggttgggtcgggtcgggcagtgctgcacacctgggtttccttgcctagagctgtgtgttcggggtcctttggtccagtcggaggctgcggagcggcgggggttgcctgcgctgtccgcccgggcatcctcccggtgatggaagcagccgccgccgccgctgcggggtcgcgctgtgccccatccaccgctgccagagaggtgggaaaattcgccgcacggaggccgaaagcgagaggggctgcgccgctatgccgggagctgagtcccatataagccgcccccagccatcgcccccagccggcttcgttcccctgagcgagacaggaagctgcggtcccgagaaagcggaggagacgtcgctggagccgggaggcgccgggttcggcggagcgcggagcggggctctgggccgcgtgaaagtttttcttcccgagccgcagggcgcccgctgcccggaaactgcccagggataagtcggccgactccccagacccctcgaaggtgcggggacccccagcggaagcgagagggagcgaaatcgaggaacgagtgacagccggacagtccgccgggcggtgatccggggccgctcccgggcgcgccctcggctccaggtcctacccggagccgctgccatgggagagccagccttgggcgctggggaccagccgccgcgcccgcctcggagtcgcggcccgagtcccggcgccagcagccagcccgctgcgtccccttcccgggctgcagggctgcctccgccgcgccgccggcccggattgtgcctgtgatgagccgcagcccgcagcgagctctgcccccgggcgcgctccctcggctgctccaggctgcgcctgcagccgcgccgcgtgccctgctcccgcagtggccccggcgcccaggacgccgctggcccgcgtcccctctcggaatgaaggtgttccgtaggaaggcgctggtgttgtgcgcgggctatgcactgctgctggtgctcactatgctcaacctcctggactacaagtggcacaaggagccgctgcagcagtgcaaccccgatgggccgctgggtgccgcagcgggggcagccggaggcagctgggggcgcccagggccgcctccggccgggccgccccgtgctcatgcccgtttggacctccgcactccttaccgccctcccgctgccgccgtcggggcggctcctgcagccgcggcagggatggcgggggttgcggcccctccaggcaatggcactcggggcaccgggggcgtcggggacaagcggcagctggtgtacgtgttcaccacgtggcgctctggctcgtcgttcttcggcgagctattcaaccagaatcccgaggtgttctttctctacgagccagtgtggcatgtatggcaaaaactgtatccgggggacgccgtttccctgcagggggcagcgcgggacatgctgagcgctctttaccgctgcgacctctctgtcttccagttgtatagccccgcgggcagcggggggcgcaacctcaccacgctgggcatcttcggcgcagccaccaacaaggtggtgtgctcgtcaccactctgccccgcctaccgcaaggaggtcgtggggttggtggacgaccgcgtgtgcaagaagtgcccgccacagcgcctggcgcgtttcgaggaggagtgccgcaagtaccgcacactagtcataaagggtgtgcgcgtcttcgacgtggcggtcttggcgccactgctgcgagacccggccctggacctcaaggtcatccacttggtgcgtgatccccgcgcggtggcgagttcacggatccgctcgcgccacggcctcatccgtgagagcctacaggtggtgcgcagccgagacccgcgagctcaccgcatgcccttcttggaggccgcgggccacaagcttggcgccaagaaggagggcgtgggcggccccgcagactaccacgctctgggcgctatggaggtcatctgcaatagtatggctaagacgctgcagacagccctgcagccccctgactggctgcagggccactacctggtggtgcggtacgaggacctggtgggagaccccgtcaagacactacggagagtgtacgattttgtgggactgttggtgagccccgaaatggagcagtttgccctgaacatgaccagtggctcgggctcctcctccaagcctttcgtggtatctgcacgcaatgccacgcaggccgccaatgcctggcggaccgccctcaccttccagcagatcaaacaggtggaggagttttgctaccagcccatggccgtcctgggctatgagcgggtcaacagccctgaggaggtcaaagacctcagcaagaccctgcttcggaagccccgtctctaaaaggggttcccaggagacctgattccctgtggtgatacctataaagaggatcgtagtgtgtttaaataaacacagtccagactcaaacggaggaagcccacatattctattatagatatataaataatcacacacacacttgctgtcaatgttttgagtcagtgcatttcaaggaacagccacaaaatacacacccctaagaaaaggcaagacttgaacgttctgaccaggtgcccctcttcttctttgccttctcttgtcctctttctcctatttcttaccctgtcctccacctgccttccattttgaagtgggatgttaatgaaatcaagttccagtaacccaaatcttgtttacaaaatattcgtggtatctgtgaacatgttaagagtaatttggatgtgggggtgggggtggagaaaggggaagtggtccagaaacaaaaagccccattgggcatgataagccgaggaggcattcttctaaagcagacttttgtgtaaaaagcaaaggttacatgtgagtattaataaagaagataataaataa

SEQ ID NO: 4538 - DNA, 2837 bp, Homo sapiens
  source 1..2837: mol_type = unassigned DNA
cggccggataggcgcgagggggccgcgtgaggcggtgccggcgttctggcccccaaagccggtctagcgcgccgggcgtcttccttacttccgctgccgccgccgccacatcccgggacccgacgggccgcggcgcggaggcctcggggcaaggtggggcgggcctcccgagctcccaggaccccgcgcgcttcgcccacaggcccggcgaagcccgacccgcgcggcgcccccagggccaggggaggagcctaaggacccggacgagcgccgctccagtaggtgacaagaggaaccaagaacctcagttcaggggaaacacagcaaggaaatgtgagccccaggctgcagaaggaagagtcagtgaatggctgcggtgtgacaacatgcaccaccagtggcttctgctggccgcatgcttttgggtgattttcatgttcatggtggctagcaagttcatcacgttgacctttaaagacccagatgtgtacagtgccaaacaggagtttctgttcctgacaaccatgccggaagtgaggaagttgccagaagagaagcacattcctgaggaactgaagccaactgggaaggagcttccagacagccagctcgttcagcccctggtctacatggagcgcctggaactcatcagaaacgtctgcagggatgatgccctgaagaatctctcgcacactcctgtctccaagtttgtcctggaccgaatatttgtctgtgacaagcacaagattcttttctgccagactcccaaagtgggcaacacccagtggaagaaagtgctgattgttctaaatggagcattttcttccattgaggagatccccgaaaacgtggtgcacgaccacgagaagaacggccttcctcggctctcttccttcagtgatgcagaaattcagaagcgattgaaaacatacttcaagttttttattgtaagagatcccttcgaaagacttatttctgcatttaaggataaatttgttcacaatccccggtttgagccttggtacaggcatgagattgctcctggcatcatcagaaaatacaggaggaaccggacagagacccgggggatccagtttgaagatttcgtgcgctacctcggcgatccgaaccacagatggctagaccttcagtttggggaccacatcattcactgggtgacgtatgtagagctctgtgctccctgtgagataatgtacagtgtgattggacaccacgagaccctggaggacgatgccccatacatcttaaaagaggctggcattgaccacctggtgtcatacccgactatccctccgggcattaccgtgtataacagaaccaaggtggagcactatttcctgggcatcagcaaacgagacatccgacgcctgtatgcccgtttcgaaggggactttaagctctttgggtaccagaaaccagactttttgctaaactaatgcataagacctatgaattcaaatatctttattagacctggggctaaccaggtgaagatctgagcccagaaatgacccttcctccaccacacccctcctttgaggacgcccggggtctcccacaggcctgtgagttgcctcggcatatgacgcagaaccccaactgttacaacttagtttggatgtaagatgctctgaggaccctgcccacacccctgcgtgcattaggatgtcgctggcctttgctcacctcagaggggagaaaaggctaaagatttgcagtttgacagcccagcagggaggaagcatcacacagcgttaggagccgtttccttcaggtgttaaggaaggggatgcccctgaggttctcctggctagtcagggtggcttcacccatcactggtgggttgcaggaacagcacccaggactctgaggagggacagagaagcaagggggctgctgaaatcgcagagacttttgcagcatcagatctgaggagtaaaacggcacctctggccttcatcttggtgctgcgacaattgtggaggcaaagcattctttctgtgactattttgttcctgtagacagtcagcgatggccagagggtggtgtggtgtccaggggtccatctttccagaatccatgcctgtgtaatgctggtccatgcttctgaacctgtgtctgccaagcgcctatttcattcagcacaagacatacgattttagaaggtgaggggaggggaggctttttctacctgagaaggggagtgtctttgagggccttaaaaggaccatggcccaggaatgggggcgctggttgggcttggagctcaggctgctgtggatcccggcgcatcagttctgacttgccttacctgggtggacagcagtgaatctccacctgtcttctccagggagctcccatgttggggctgaagacgagcaggggcaacctgccagcatcacagaattcagtgtagtttatacatttcgattcctttcatctcagcaaaatgggcactgccagagccatttctgatcacaccaccatcctggaccatgtgactggaaggtgggtaaccaagttcaccagcaataaaacccagcgcccaggtagcctccagcagtgcggcttcctggcaacaaggtaggccctggtgcagggcaagccgcagcgaccatttcagataccgtccacagccaggaccgctgagaactgggacagtttcctgggatgagtgccagcctgagcctgcatggtgccgccgagcccggggtggaggagggagccaggcttcgcttcaaggcggcctctaccttttctcagaatggtttcctgattgtgtcaatgtgaaagttaaataaaatttatgtgccaaa

SEQ ID NO: 4539 - DNA, 604 bp, Homo sapiens
  source 1..604: mol_type = unassigned DNA
tgggcccctctccccgccgcggggcgcacggaaaaaccggggaacccgcgggttttgtcctggcgagccacatcccgtgacaagaggaaccaagaacctcagttcaggggaaacacagcaaggaaatgtgagccccaggctgcagaaggaagagtcagtgaatggctgcggtgtgacaacatgcaccaccagtggcttctgctggccgcatgcttttgggtgattttcatgttcatggtggctagcaagttcatcacgttgacctttaaagacccagatgtgtacagtgccaaacaggagtttctgttcctgacaaccatgccggaagtgaggaagttgccagaagagaagcacattcctgaggaactgaagccaactgggaaggagcttccagacagccagctcgttcagcccctggtctacatggagcgcctggaactcatcagaaacgtctgcagggatgatgccctgaagaatctctcgcacactcctgtctccaagtttgtcctggaccgaatatttgtctgtgacaagcacaagattcttttctgccagactcccaaagtgggcaacacccagtggaagaaagtgctgattgttctaa

SEQ ID NO: 4540 - DNA, 1338 bp, Homo sapiens
  source 1..1338: mol_type = unassigned DNA
aagaaggagcatgtgcagcttcggtgcgaggggagtcaggggtgggaatgcacgttccctgcctgaggggccccggggtgccctgagcctctgatcttcgctgtcaggaggcctgtccgaagttggaggttgaggcatgcagttctgcacttctggctgggaagtgacaagaggaaccaagaacctcagttcaggggaaacacagcaaggaaatgtgagccccaggctgcagaaggaagagtcagtgaatggctgcggtgtgacaacatgcaccaccagtggcttctgctggccgcatgcttttgggtgattttcatgttcatggtggctagcaagttcatcacgttgacctttaaagacccagatgtgtacagtgccaaacaggagtttctgttcctgacaaccatgccggaagtgaggaagttgccagaagagaagcacattcctgaggaactgaagccaactgggaaggagcttccagacagccagctcgttcagcccctggtctacatggagcgcctggaactcatcagaaacgtctgcagggatgatgccctgaagaatctctcgcacactcctgtctccaagtttgtcctggaccgaatatttgtctgtgacaagcacaagattcttttctgccagactcccaaagtgggcaacacccagtggaagaaagtgctgattgttctaaatggagcattttcttccattgaggagatccccgaaaacgtggtgcacgaccacgagaagaacggccttcctcggctctcttccttcagtgatgcagaaattcagaagcgattgaaaacatacttcaagttttttattgtaagagatcccttcgaaagacttatttctgcatttaaggataaatttgttcacaatccccggtttgagccttggtacaggcatgagattgctcctggcatcatcagaaaatacaggaggaaccggacagagacccgggggatccagtttgaagatttcgtgcgctacctcggcgatccgaaccacagatggctagaccttcagtttggggaccacatcattcactgggtgacgtatgtagagctctgtgctccctgtgagataatgtacagtgtgattggacaccacgagaccctggaggacgatgccccatacatcttaaaagaggctggcattgaccacctggtgtcatacccgactatccctccgggcattaccgtgtataacagaaccaaggtggagcactatttcctgggcatcagcaaacgagacatccgacgcctgtatgcccgtttcgaaggggactttaagctctttgggtaccagaaaccagactttttgctaaactaa

SEQ ID NO: 4541 - DNA, 692 bp, Homo sapiens
  source 1..692: mol_type = unassigned DNA
gggtgggtttcagcgcctgggcccctctccccgccgcggggcgcacggaaaaaccggggaacccgcgggttttgtcctggcgagccacatcccgtgactgggttaaaatgaaaagacacaaagagagaagtggtcttttcccttccctccccattataattaagagcttagtccatcttggctcagaattggaattcagaattcagaattgctcttgaccctgaagaatagaatctcaaagaaatacctgagcagaaaattctcttcttcgctgaaatgaaaattggagtgtttgcaaaactgaacaaagaaaggaaagaatttgtaaacatcacaggcaacttgcagttatattcggatcatttttcagtgtttgaggagttcatacaataaaaagtgacaagaggaaccaagaacctcagttcaggggaaacacagcaaggaaatgtgagccccaggctgcagaaggaagagtcagtgaatggctgcggtgtgacaacatgcaccaccagtggcttctgctggccgcatgcttttgggtgattttcatgttcatggtggctagcaagttcatcacgttgacctttaaagacccagatgtgtacagtgccaaacaggagtttctgttcctgacaaccatgccggaagtgaggaagttgccagaagagaagcacattcctgaggaactgaag

SEQ ID NO: 4542 - DNA, 574 bp, Homo sapiens
  source 1..574: mol_type = unassigned DNA
actatctaggtttatgtaagaacgctctgatgtttgcagaagaacatcgcctaacgatacatttctcagaagtgacaagaggaaccaagaacctcagttcaggggaaacacagcaaggaaatgtgagccccaggctgcagaaggaagagtcagtgaatggctgcggtgtgacaacatgcaccaccagtggcttctgctggccgcatgcttttgggtgattttcatgttcatggtggctagcaagttcatcacgttgacctttaaagacccagatgtgtacagtgccaaacaggagtttctgttcctgacaaccatgccggaagtgaggaagttgccagaagagaagcacattcctgaggaactgaagccaactgggaaggagcttccagacagccagctcgttcagcccctggtctacatggagcgcctggaactcatcagaaacgtctgcagggatgatgccctgaagaatctctcgcacactcctgtctccaagtttgtcctggaccgaatatttgtctgtgacaagcacaagattcttttctgccagactcccaaagtgggcaacacccag

SEQ ID NO: 4543 - DNA, 559 bp, Homo sapiens
  source 1..559: mol_type = unassigned DNA
agcgcctgggcccctctccccgccgcggggcgcacggaaaaaccggggaacccgcgggttttgtcctggcgagccacatcccgtgacaagaggaaccaagaacctcagttcaggggaaacacagcaaggaaatgtgagccccaggctgcagaagaccctactgtcgcattaatttctggcaaccacactgagaaaggtgtagattaagctggaaaatcacgaagagtgccaagggattggtcagtttttactgggggtctgcaccaggccaggaagagtcagtgaatggctgcggtgtgacaacatgcaccaccagtggcttctgctggccgcatgcttttgggtgattttcatgttcatggtggctagcaagttcatcacgttgacctttaaagacccagatgtgtacagtgccaaacaggagtttctgttcctgacaaccatgccggaagtgaggaagttgccagaagagaagcacattcctgaggaactgaagccaactgggaaggagcttccagacagccagctcgttcagcccctggtctacatggagcgcctg

SEQ ID NO: 4544 - DNA, 673 bp, Homo sapiens
  source 1..673: mol_type = unassigned DNA
agtagggtgagctcggggacgcgcaggcgggtgggtttcagcgcctgggcccctctccccgccgcggggcgcacggaaaaaccggggaacccgcgggttttgtcctggcgagccacatcccgatggagagaggaagaaagggttcagcttgggtccaaggagcatgcagaggaaggcagggaagaaggagcatgtgcagcttcggtgcgaggggagtcaggggtgggaatgcacgttccctgcctgaggggccccggggtgccctgagcctctgatcttcgctgtcaggaggcctgtccgaagttggaggttgaggcatgcagttctgcacttctggctgggaaggtgaaccaggttttccaaaatgtcatttttgctttccaagtctgcaaggcaggaaagggttgggcagtgaatggaaagtagtgcagccaggttctggttagctcagcggcaggactgtcataacgtgacaagaggaaccaagaacctcagttcaggggaaacacagcaaggaaatgtgagccccaggctgcagaaggaagagtcagtgaatggctgcggtgtgacaacatgcaccaccagtggcttctgctggccgcatgcttttgggtgattttcatgttcatggtggctagcaagttcatcacgttgacctttaaagacccagatg

SEQ ID NO: 4545 - DNA, 1476 bp, Homo sapiens
  source 1..1476: mol_type = unassigned DNA
atgcaataagaaggcgtccttgtgcgggatgctgtgacccgcggaattattgatattgtgcgagcctacaatttacttctttcatccttggctgagaatttgcgtttgtaattgtagatggagagaggaagaaagggttcagcttgggtccaaggagcatgcagaggaaggcagggaagaaggagcatgtgcagcttcgtgacaagaggaaccaagaacctcagttcaggggaaacacagcaaggaaatgtgagccccaggctgcagaaggaagagtcagtgaatggctgcggtgtgacaacatgcaccaccagtggcttctgctggccgcatgcttttgggtgattttcatgttcatggtggctagcaagttcatcacgttgacctttaaagacccagatgtgtacagtgccaaacaggagtttctgttcctgacaaccatgccggaagtgaggaagttgccagaagagaagcacattcctgaggaactgaagccaactgggaaggagcttccagacagccagctcgttcagcccctggtctacatggagcgcctggaactcatcagaaacgtctgcagggatgatgccctgaagaatctctcgcacactcctgtctccaagtttgtcctggaccgaatatttgtctgtgacaagcacaagattcttttctgccagactcccaaagtgggcaacacccagtggaagaaagtgctgattgttctaaatggagcattttcttccattgaggagatccccgaaaacgtggtgcacgaccacgagaagaacggccttcctcggctctcttccttcagtgatgcagaaattcagaagcgattgaaaacatacttcaagttttttattgtaagagatcccttcgaaagacttatttctgcatttaaggataaatttgttcacaatccccggtttgagccttggtacaggcatgagattgctcctggcatcatcagaaaatacaggaggaaccggacagagacccgggggatccagtttgaagatttcgtgcgctacctcggcgatccgaaccacagatggctagaccttcagtttggggaccacatcattcactgggtgacgtatgtagagctctgtgctccctgtgagataatgtacagtgtgattggacaccacgagaccctggaggacgatgccccatacatcttaaaagaggctggcattgaccacctggtgtcatacccgactatccctccgggcattaccgtgtataacagaaccaaggtggagcactatttcctgggcatcagcaaacgagacatccgacgcctgtatgcccgtttcgaaggggactttaagctctttgggtaccagaaaccagactttttgctaaactaatgcataagacctatgaattcaaatatctttattagacctggggctaaccaggtgaagatctgagcccagaaatgacccttcctccaccacacccctcctttga

SEQ ID NO: 4546 - DNA, 1195 bp, Homo sapiens
  source 1..1195: mol_type = unassigned DNA
gttttccacagaggtagtgaaaagaactggattttcaagttcactttgcaagagaaaaagaaaactcagtagaagataatggcaagtccagactggggatatgatgacaaaaatggtcctgaacaatggagcaagctgtatcccattgccaatggaaataaccagtcccctgttgatattaaaaccagtgaaaccaaacatgacacctctctgaaacctattagtgtctcctacaacccagccacagccaaagaaattatcaatgtggggcattccttccatgtaaattttgaggacaacgataaccgatcagtgctgaaaggtggtcctttctctgacagctacaggctctttcagttccattttcactggggcagtacaaatgagcatggttcagaacatacagtggatggagtcaaatattctgccgagcttcacgtagctcactggaattctgcaaagtactccagccttgctgaagctgcctcaaaggctgatggtttggcagttattggtgttttgatgaaggttggtgaggccaacccaaagctgcagaaagtacttgatgccctccaagcaattaaaaccaagggcaaacgagccccattcacaaattttgacccctctactctccttccttcatccctggatttctggacctaccctggctctctgactcatcctcctctttatgagagtgtaacttggatcatctgtaaggagagcatcagtgtcagctcagagcagctggcacaattccgcagccttctatcaaatgttgaaggtgataacgctgtccccatgcagcacaacaaccgcccaacccaacctctgaagggcagaacagtgagagcttcattttgatgattctgagaagaaacttgtccttcctcaagaacacagccctgcttctgacataatccagtaaaataataatttttaagaaataaatttatttcaatattagcaagacagcatgccttcaaatcaatctgtaaaactaagaaacttaaattttagttcttactgcttaattcaaataataattagtaagctagcaaatagtaatctgtaagcataagcttatgcttaaattcaagtttagtttgaggaattctttaaaattacaactaagtgatttgtatgtctatttttttcagtttatttgaaccaataaaataattttatctctttc

SEQ ID NO: 4547 - DNA, 1232 bp, Homo sapiens
  source 1..1232: mol_type = unassigned DNA
ctcctccctattctagaaatagaagggaggaggacctattttgttccatcctgtaggctgatcctttacacctaggactggaagaaataagaaaaagaaaactcagtagaagataatggcaagtccagactggggatatgatgacaaaaatggtcctgaacaatggagcaagctgtatcccattgccaatggaaataaccagtcccctgttgatattaaaaccagtgaaaccaaacatgacacctctctgaaacctattagtgtctcctacaacccagccacagccaaagaaattatcaatgtggggcattccttccatgtaaattttgaggacaacgataaccgatcagtgctgaaaggtggtcctttctctgacagctacaggctctttcagttccattttcactggggcagtacaaatgagcatggttcagaacatacagtggatggagtcaaatattctgccgagcttcacgtagctcactggaattctgcaaagtactccagccttgctgaagctgcctcaaaggctgatggtttggcagttattggtgttttgatgaaggttggtgaggccaacccaaagctgcagaaagtacttgatgccctccaagcaattaaaaccaagggcaaacgagccccattcacaaattttgacccctctactctccttccttcatccctggatttctggacctaccctggctctctgactcatcctcctctttatgagagtgtaacttggatcatctgtaaggagagcatcagtgtcagctcagagcagctggcacaattccgcagccttctatcaaatgttgaaggtgataacgctgtccccatgcagcacaacaaccgcccaacccaacctctgaagggcagaacagtgagagcttcattttgatgattctgagaagaaacttgtccttcctcaagaacacagccctgcttctgacataatccagtaaaataataatttttaagaaataaatttatttcaatattagcaagacagcatgccttcaaatcaatctgtaaaactaagaaacttaaattttagttcttactgcttaattcaaataataattagtaagctagcaaatagtaatctgtaagcataagcttatgcttaaattcaagtttagtttgaggaattctttaaaattacaactaagtgatttgtatgtctatttttttcagtttatttgaaccaataaaataattttatctctttc

SEQ ID NO: 4548 - DNA, 1196 bp, Homo sapiens
  source 1..1196: mol_type = unassigned DNA
atctcctgcatgcacagttgcagttagttattccaggtattatttttgttttcagaaaaagaaaactcagtagaagataatggcaagtccagactggggatatgatgacaaaaatggtcctgaacaatggagcaagctgtatcccattgccaatggaaataaccagtcccctgttgatattaaaaccagtgaaaccaaacatgacacctctctgaaacctattagtgtctcctacaacccagccacagccaaagaaattatcaatgtggggcattccttccatgtaaattttgaggacaacgataaccgatcagtgctgaaaggtggtcctttctctgacagctacaggctctttcagttccattttcactggggcagtacaaatgagcatggttcagaacatacagtggatggagtcaaatattctgccgagcttcacgtagctcactggaattctgcaaagtactccagccttgctgaagctgcctcaaaggctgatggtttggcagttattggtgttttgatgaaggttggtgaggccaacccaaagctgcagaaagtacttgatgccctccaagcaattaaaaccaagggcaaacgagccccattcacaaattttgacccctctactctccttccttcatccctggatttctggacctaccctggctctctgactcatcctcctctttatgagagtgtaacttggatcatctgtaaggagagcatcagtgtcagctcagagcagctggcacaattccgcagccttctatcaaatgttgaaggtgataacgctgtccccatgcagcacaacaaccgcccaacccaacctctgaagggcagaacagtgagagcttcattttgatgattctgagaagaaacttgtccttcctcaagaacacagccctgcttctgacataatccagtaaaataataatttttaagaaataaatttatttcaatattagcaagacagcatgccttcaaatcaatctgtaaaactaagaaacttaaattttagttcttactgcttaattcaaataataattagtaagctagcaaatagtaatctgtaagcataagcttatgcttaaattcaagtttagtttgaggaattctttaaaattacaactaagtgatttgtatgtctatttttttcagtttatttgaaccaataaaataattttatctctttc

SEQ ID NO: 4549 - DNA, 696 bp, Homo sapiens
  source 1..696: mol_type = unassigned DNA
gtggtacccagtcctcaggtgcaaccccctgcgtggtcctctgtggcagccttctctcattcagagctgggttgcagcagctcagacaatccttaccatgtgaaaggaggaatgactgtcatggcatgaaaaaagcatcactatgaaaaagaaaactcagtagaagataatggcaagtccagactggggatatgatgacaaaaatggtcctgaacaatggagcaagctgtatcccattgccaatggaaataaccagtcccctgttgatattaaaaccagtgaaaccaaacatgacacctctctgaaacctattagtgtctcctacaacccagccacagccaaagaaattatcaatgtggggcattccttccatgtaaattttgaggacaacgataaccgatcagtgctgaaaggtggtcctttctctgacagctacaggctctttcagttccattttcactggggcagtacaaatgagcatggttcagaacatacagtggatggagtcaaatattctgccgagcttcacgtagctcactggaattctgcaaagtactccagccttgctgaagctgcctcaaaggctgatggtttggcagttattggtgttttgatgaaggttggtgaggccaacccaaagctgcagaaagtacttgatgccctccaagcaattaaaaccaagggcaaacgagcccc

SEQ ID NO: 4550 - DNA, 832 bp, Homo sapiens
  source 1..832: mol_type = unassigned DNA
atctcctgcatgcacagttgcagttagttattccaggtattatttttgttttcagaaaaagaaaactcagtagaagataatggcaagtccagactggggatatgatgacaaaaatggtcctgaacaatggagcaagctgtatcccattgccaatggaaataaccagtcccctgttgatattaaaaccagtgaaaccaaacatgacacctctctgaaacctattagtgtctcctacaacccagccacagccaaagaaattatcaatgtggggcattccttccatgtaaattttgaggacaacgataaccgatcagtgctgaaaggtggtcctttctctgacagctacaggctctttcagttccattttcactggggcagtacaaatgagcatggttcagaacatacagtggatggagtcaaatattctgccgagcttcacgtagctcactggaattctgcaaagtactccagccttgctgaagctgcctcaaaggctgatggtttggcagttattggtgttttgatgaaggttggtgaggccaacccaaagctgcagaaagtacttgatgccctccaagcaattaaaaccaagggcaaacgagccccattcacaaattttgacccctctactctccttccttcatccctggatttctggacctaccctggctctctgactcatcctcctctttatgagagtgtaacttggatcatctgtaaggagagcatcagtgtcagctcagagcagctggcacaattccgcagccttctatcaaatgttgaaggtgataacgctgtccccatgcagcacaacaaccgcccaacccaacct

SEQ ID NO: 4551 - DNA, 491 bp, Homo sapiens
  source 1..491: mol_type = unassigned DNA
gtggtacccagtcctcaggtgcaaccccctgcgtggtcctctgtggcagccttctctcattcagagctgttttccacagaggtagtgaaaagaactggattttcaagttcactttgcaagagaaatagaagggaggaggacctattttgttccatcctgtaggctgatcctttacacctaggactggaagaaataagaaacagagtatcactatgtggcccaagctggtctggacctcctaggtgcaagagatcctcccacctcagcctaaaacacagattttaatgcccaattttgttataataagaattaaataagttaatgggttgcagcagctcagacaatccttaccatgtgaaaggaggaatgactgtcatggcatgaaaaaagcatcactatgaaaaagaaaactcagtagaagataatggcaagtccagactggggatatgatgacaaaaatggtcctgaacaatggagcaagctgtatccca

SEQ ID NO: 4552 - DNA, 666 bp, Homo sapiens
  source 1..666: mol_type = unassigned DNA
acccagtcctcaggtgcaaccccctgcgtggtcctctgtggcagccttctctcattcagagctgttttccacagaggtagtgaaaagaactggattttcaagttcactttgcaagaggggttgcagcagctcagacaatccttaccatgtgaaaggaggaatgactgtcatggcatgaaaaaagcatcactatgaaaaagaaaactcagtagaagataatggcaagtccagactggggatatgatgacaaaaatggtcctgaacaatggagcaagctgtatcccattgccaatggaaataaccagtcccctgttgatattaaaaccagtgaaaccaaacatgacacctctctgaaacctattagtgtctcctacaacccagccacagccaaagaaattatcaatgtggggcattccttccatgtaaattttgaggacaacgataaccgatcagtgctgaaaggtggtcctttctctgacagctacaggctctttcagttccattttcactggggcagtacaaatgagcatggttcagaacatacagtggatggagtcaaatattctgccgagcttcacgtagctcactggaattctgcaaagtactccagccttgctgaagctgcctcaaaggctgatggtttggcagttattggtgttttgatga

SEQ ID NO: 4553 - DNA, 614 bp, Homo sapiens
  source 1..614: mol_type = unassigned DNA
gtggtacccagtcctcaggtgcaaccccctgcgtggtcctctgtggcagccttctctcattcagagctaaatagaagggaggaggacctattttgttccatcctgtaggctgatcctttacacctaggactggaagaaataagaaaaagaaaactcagtagaagataatggcaagtccagactggggatatgatgacaaaaatggtcctgaacaatggagcaagctgtatcccattgccaatggaaataaccagtcccctgttgatattaaaaccagtgaaaccaaacatgacacctctctgaaacctattagtgtctcctacaacccagccacagccaaagaaattatcaatgtggggcattccttccatgtaaattttgaggacaacgataaccgatcagtgctgaaaggtggtcctttctctgacagctacaggctctttcagttccattttcactggggcagtacaaatgagcatggttcagaacatacagtggatggagtcaaatattctgccgagcttcacgtagctcactggaattctgcaaagtactccagccttgctgaagctgcctcaaaggctgatggtttggcagttattggtgttttgatg

SEQ ID NO: 4554 - DNA, 501 bp, Homo sapiens
  source 1..501: mol_type = unassigned DNA
gtggtacccagtcctcaggtgcaaccccctgcgtggtcctctgtggcagccttctctcattcagagctatatgtgtacttcctgataagcagagatgatgaaataatggcctattaaaagcaaaaaaagaaaactcagtagaagataatggcaagtccagactggggatatgatgacaaaaatggtcctgaacaatggagcaagctgtatcccattgccaatggaaataaccagtcccctgttgatattaaaaccagtgaaaccaaacatgacacctctctgaaacctattagtgtctcctacaacccagccacagccaaagaaattatcaatgtggggcattccttccatgtaaattttgaggacaacgataaccgatcagtgctgaaaggtggtcctttctctgacagctacaggctctttcagttccattttcactggggcagtacaaatgagcatggttcagaacatacagtggatggagtcaaatattctgccgag

SEQ ID NO: 4555 - DNA, 618 bp, Homo sapiens
  source 1..618: mol_type = unassigned DNA
gtggtacccagtcctcaggtgcaaccccctgcgtggtcctctgtggcagccttctctcattcagagctaattttttacaacaccttttttttagatatgtgtacttcctgataagcagagatgatgaaataatggcctattaaaagcaaaaaaagaaaactcagtagaagataatggcaagtccagactggggatatgatgacaaaaatggtcctgaacaatggagcaagctgtatcccattgccaatggaaataaccagtcccctgttgatattaaaaccagtgaaaccaaacatgacacctctctgaaacctattagtgtctcctacaacccagccacagccaaagaaattatcaatgtggggcattccttccatgtaaattttgaggacaacgataaccgatcagtgctgaaaggtggtcctttctctgacagctacaggctctttcagttccattttcactggggcagtacaaatgagcatggttcagaacatacagtggatggagtcaaatattctgccgagcttcacgtagctcactggaattctgcaaagtactccagccttgctgaagctgcctcaaaggctgatggtttggcagttattggtgttttga

SEQ ID NO: 4556 - DNA, 1208 bp, Homo sapiens
  source 1..1208: mol_type = unassigned DNA
gtggtacccagtcctcaggtgcaaccccctgcgtggtcctctgtggcagccttctctcattcagagctaaaaagaaaactcagtagaagataatggcaagtccagactggggatatgatgacaaaaatggtcctgaacaatggagcaagctgtatcccattgccaatggaaataaccagtcccctgttgatattaaaaccagtgaaaccaaacatgacacctctctgaaacctattagtgtctcctacaacccagccacagccaaagaaattatcaatgtggggcattccttccatgtaaattttgaggacaacgataaccgatcagtgctgaaaggtggtcctttctctgacagctacaggctctttcagttccattttcactggggcagtacaaatgagcatggttcagaacatacagtggatggagtcaaatattctgccgagcttcacgtagctcactggaattctgcaaagtactccagccttgctgaagctgcctcaaaggctgatggtttggcagttattggtgttttgatgaaggttggtgaggccaacccaaagctgcagaaagtacttgatgccctccaagcaattaaaaccaagggcaaacgagccccattcacaaattttgacccctctactctccttccttcatccctggatttctggacctaccctggctctctgactcatcctcctctttatgagagtgtaacttggatcatctgtaaggagagcatcagtgtcagctcagagcagctggcacaattccgcagccttctatcaaatgttgaaggtgataacgctgtccccatgcagcacaacaaccgcccaacccaacctctgaagggcagaacagtgagagcttcattttgatgattctgagaagaaacttgtccttcctcaagaacacagccctgcttctgacataatccagtaaaataataatttttaagaaataaatttatttcaatattagcaagacagcatgccttcaaatcaatctgtaaaactaagaaacttaaattttagttcttactgcttaattcaaataataattagtaagctagcaaatagtaatctgtaagcataagcttatgcttaaattcaagtttagtttgaggaattctttaaaattacaactaagtgatttgtatgtctatttttttcagtttatttgaaccaataaaataattttatctcttt

SEQ ID NO: 4557 - DNA, 518 bp, Homo sapiens
  source 1..518: mol_type = unassigned DNA
gtggtacccagtcctcaggtgcaaccccctgcgtggtcctctgtggcagccttctctcattcagagctgttttccacagaggtagtgaaaagaactggattttcaagttcactttgcaagagaaatagaagggaggaggacctattttgttccatcctgtaggctgatcctttacacctaggactggaagaaataagaaaaagaaaactcagtagaagataatggcaagtccagactggggatatgatgacaaaaatggtcctgaacaatggagcaagctgtatcccattgccaatggaaataaccagtcccctgttgatattaaaaccagtgaaaccaaacatgacacctctctgaaacctattagtgtctcctacaacccagccacagccaaagaaattatcaatgtggggcattccttccatgtaaattttgaggacaacgataaccgatcagtgctgaaaggtggtcctttctctgacagctacaggctctttcagttccattttcactggggc

SEQ ID NO: 4558 - DNA, 2785 bp, Homo sapiens
  source 1..2785: mol_type = unassigned DNA
ctttagcccaacagtcaaaaataattgatgctaccctacaaatgtccaaaactctagtatatcatatttctaagttacagcaaatattagtcctgctaaaccagggagctttggcaaaaatgttttttgacagtaaatttgtccttgattatatattaactagtcaaagaggtgtttgtaacattattagagcttcttgttgtaggtgggttaacaccaccaatcaagaggtcattctaacagaaagcctggatcagaaaaccatcaccctaaaaaaacatgccttacatatttaacacactctgaaatccagtcaaaatatgactaaaggcccttgccatgactgatgtattctcctggccaacgccaaacaaatgggagcctggttacgagtcagccttcagggacttgtcacatttctacttggtttcttccttgttattgtcataataaaatgttttctatgctgtttagtgcaacttaggccctattctgtagaagtctcctctactattcaggccactcaaacaccccaaataattgagttcaaaatcgacatcaagatataaaggaatcagtgactaaatatatttcatatatggtatttttattgattattgtgctgtcttgacctagtatggaggccttggctagaggctggtcagtttcctctcttgagcagctgattaaatccacaccccaaccacttcccttatcaggttctcacactctggggccactatgtacccactctaatcaccacagggccagacatcagacaattaaggacagcgcccatgccccaaagcccgccaaaattatgcaaattattcaaaattattcaacctagctaaccccaccctttttgctgtacataagctgcccattccccctccagcctgtggtacccagtcctcaggtgcaaccccctgcgtggtcctctgtggcagccttctctcattcagagctgttttccacagaggtagtgaaaagaactggattttcaagttcactttgcaagagaaaaagaaaactcagtagaagataatggcaagtccagactggggatatgatgacaaaaatggtcctgaacaatggagcaagctgtatcccattgccaatggaaataaccagtcccctgttgatattaaaaccagtgaaaccaaacatgacacctctctgaaacctattagtgtctcctacaacccagccacagccaaagaaattatcaatgtggggcattccttccatgtaaattttgaggacaacgataaccgatcagtgctgaaaggtggtcctttctctgacagctacaggctctttcagttccattttcactggggcagtacaaatgagcatggttcagaacatacagtggatggagtcaaatattctgccgagcttcacgtagctcactggaattctgcaaagtactccagccttgctgaagctgcctcaaaggctgatggtttggcagttattggtgttttgatgaaggttggtgaggccaacccaaagctgcagaaagtacttgatgccctccaagcaattaaaaccaagggcaaacgagccccattcacaaattttgacccctctactctccttccttcatccctggatttctggacctaccctggctctctgactcatcctcctctttatgagagtgtaacttggatcatctgtaaggagagcatcagtgtcagctcagagcagctggcacaattccgcagccttctatcaaatgttgaaggtgataacgctgtccccatgcagcacaacaaccgcccaacccaacctctgaagggcagaacagtgagagcttcattttgatgattctgagaagaaacttgtccttcctcaagaacacagccctgcttctgacataatccagtaaaataataatttttaagaaataaatttatttcaatattagcaagacagcatgccttcaaatcaatctgtaaaactaagaaacttaaattttagttcttactgcttaattcaaataataattagtaagctagcaaatagtaatctgtaagcataagcttatgcttaaattcaagtttagtttgaggaattctttaaaattacaactaagtgatttgtatgtctatttttttcagtttatttgaaccaataaaataattttatctctttctttctgttgtgcattcagtttctaaaaccattaagtttctactccatttacattcaaaaatcttaaatactttacttgcaagagtattttgcttcaaatacaacaacctaagagcagctggagatgaaatattgggaaattcatttgcttactcctgaagacaaaaatatagctgagatgaccactggatttaatatcgttatgctggcccaacattgctaccatttgtgttgtctgtgatcaaaatgattatcttttatataggaagatgacgcttctggatattgctttcacttcttctccccacgttagcaaggacaatgcttctctgccattattacaactagttagtttgcatggagaatctttactttaaaattggaagaaaagtcacaagtgaatggtttataaaaatgctaaagaagtcattcttgcttagaatcatatagaaacatcatgcaatcttttagtcagatgtgcgcttcaccttatgctatttttatctttaattgacacacaataattgtacatgtttatggagtatagtgtggtgttttctgtttgtttgtttgttttttgagacaaggtctcactctgccagtcagggtggagtgcgatggt

SEQ ID NO: 4559 - DNA, 1236 bp, Homo sapiens
  source 1..1236: mol_type = unassigned DNA
atccctctcttctttcaggggttgcagcagctcagacaatccttaccatgtgaaaggaggaatgactgtcatggcatgaaaaaagcatcactatgaaaaagaaaactcagtagaagataatggcaagtccagactggggatatgatgacaaaaatggtcctgaacaatggagcaagctgtatcccattgccaatggaaataaccagtcccctgttgatattaaaaccagtgaaaccaaacatgacacctctctgaaacctattagtgtctcctacaacccagccacagccaaagaaattatcaatgtggggcattccttccatgtaaattttgaggacaacgataaccgatcagtgctgaaaggtggtcctttctctgacagctacaggctctttcagttccattttcactggggcagtacaaatgagcatggttcagaacatacagtggatggagtcaaatattctgccgagcttcacgtagctcactggaattctgcaaagtactccagccttgctgaagctgcctcaaaggctgatggtttggcagttattggtgttttgatgaaggttggtgaggccaacccaaagctgcagaaagtacttgatgccctccaagcaattaaaaccaagggcaaacgagccccattcacaaattttgacccctctactctccttccttcatccctggatttctggacctaccctggctctctgactcatcctcctctttatgagagtgtaacttggatcatctgtaaggagagcatcagtgtcagctcagagcagctggcacaattccgcagccttctatcaaatgttgaaggtgataacgctgtccccatgcagcacaacaaccgcccaacccaacctctgaagggcagaacagtgagagcttcattttgatgattctgagaagaaacttgtccttcctcaagaacacagccctgcttctgacataatccagtaaaataataatttttaagaaataaatttatttcaatattagcaagacagcatgccttcaaatcaatctgtaaaactaagaaacttaaattttagttcttactgcttaattcaaataataattagtaagctagcaaatagtaatctgtaagcataagcttatgcttaaattcaagtttagtttgaggaattctttaaaattacaactaagtgatttgtatgtctatttttttcagtttatttgaaccaataaaataattttatctctttc

SEQ ID NO: 4560 - DNA, 1688 bp, Homo sapiens
  source 1..1688: mol_type = unassigned DNA
cccggcccgccccgccccgagcgcggggagttcacctccgcccgtcaccacctccccttgtcgcctaggtccacccgagccccctcccccgggccgcccccgagcacgaagttggcgggagcctataaaagctggtgccggcgcgacccgcggacacacagtgcaggcgcccaagccgccgccgccagatcggtgccgattcctgccctgccccgaccgccagcgcgaccatgtcccatcactgggggtacggcaaacacaacggacctgagcactggcataaggacttccccattgccaagggagagcgccagtcccctgttgacatcgacactcatacagccaagtatgacccttccctgaagcccctgtctgtttcctatgatcaagcaacttccctgaggatcctcaacaatggtcatgctttcaacgtggagtttgatgactctcaggacaaagcagtgctcaagggaggacccctggatggcacttacagattgattcagtttcactttcactggggttcacttgatggacaaggttcagagcatactgtggataaaaagaaatatgctgcagaacttcacttggttcactggaacaccaaatatggggattttgggaaagctgtgcagcaacctgatggactggccgttctaggtatttttttgaaggttggcagcgctaaaccgggccttcagaaagttgttgatgtgctggattccattaaaacaaagggcaagagtgctgacttcactaacttcgatcctcgtggcctccttcctgaatccttggattactggacctacccaggctcactgaccacccctcctcttctggaatgtgtgacctggattgtgctcaaggaacccatcagcgtcagcagcgagcaggtgttgaaattccgtaaacttaacttcaatggggagggtgaacccgaagaactgatggtggacaactggcgcccagctcagccactgaagaacaggcaaatcaaagcttccttcaaataagatggtcccatagtctgtatccaaataatgaatcttcgggtgtttccctttagctaagcacagatctaccttggtgatttggaccctggttgctttgtgtctagttttctagacccttcatctcttacttgatagacttactaataaaatgtgaagactagaccaattgtcatgcttgacacaactgctgtggctggttggtgctttgtttatggtagtagtttttctgtaacacagaatataggataagaaataagaataaagtaccttgactttgttcacagcatgtagggtgatgagcactcacaattgttgactaaaatgctgcttttaaaacataggaaagtagaatggttgagtgcaaatccatagcacaagataaattgagctagttaaggcaaatcaggtaaaatagtcatgattctatgtaatgtaaaccagaaaaaataaatgttcatgatttcaagatgttatattaaagaaaaactttaaaaattattatatatttatagcaaagttatcttaaatatgaattctgttgtaatttaatgacttttgaattacagagatataaatgaagtattatctgtaaaaattgttataattagagttgtgatacagagtatatttccattcagacaatatatcataacttaataaatattgtattttaga

SEQ ID NO: 4561 - DNA, 1753 bp, Homo sapiens
  source 1..1753: mol_type = unassigned DNA
acataaaagcgcgggctcgcggcgactctgcaccacgcaggggaagagaaagcaggagccgtccagcacggaggaaggcgaccatggccaaggagtggggctacgccagtcacaacggtcctgaccactggcatgaacttttcccaaatgccaagggggaaaaccagtcgcccgttgagctgcatactaaagacatcaggcatgacccttctctgcagccatggtctgtgtcttatgatggtggctctgccaagaccatcctgaataatgggaagacctgccgagttgtatttgatgatacttatgataggtcaatgctgagagggggtcctctccctggaccctaccgacttcgccagtttcatcttcactggggctcttcggatgatcatggctctgagcacaccgtggatggagtcaagtatgcagcggagcttcatttggttcactggaacccgaagtataacacttttaaagaagccctgaagcagcgcgatgggatcgctgtgattggcatttttctgaagataggacatgagaatggcgagttccagattttccttgatgcattggacaagattaagacaaagggcaaggaggcgcccttcacaaagtttgacccatcctgcctgttcccggcatgccgggactactggacctaccagggctcattcaccacgccgccctgcgaggaatgcattgtgtggctgctgctgaaggagcccatgaccgtgagctctgaccagatggccaagctgcggagcctcctctccagtgctgagaacgagcccccagtgcctcttgtgagcaactggcgacctccacagcctatcaataacagggtggtgagagcttccttcaaatgaggctgctggatcttgccctcttcaggaaaggaaacctaccattggagagcttggttccttgcctccttctggtgctccttactccaagtctatttcatttttccacactgagcaatgaatgtgagagatgtggtcaccaagatctaagttacttgttgaaagaaagttactttcgacaagatctaatatgaaagcatagatttcacatttgatctctgtaataatcatctttcctataaaagtagcatttttggtaaagtttcaaagaagaagaaacagagatggaagagtaaagatatttttaaaatggctagctattgggcaccagtttttctgttatctaaaatttcacacaacttcattgtttttatttttatattatgagttgtccatcttaaagaaatatgagtaattctacatgtagtagaggtgtatgaagatcatataacaattaaacataagccagaaattaaaatgactatagacagcaagaattgagctaataatatgttttaactcttaacaccagcaagaagtcagtcatttattgaagttttagctactaagattacttggttttgattaccagtgaaaagaaaacacaatacaatcaggagttttcaaatttttgattcagtatttgaatttcttcttcataaatgtagttgaatttatcctagtatttttctttacctgaaggagggccatttatttttaatttcactacatttttctttgcatgattattaaaataaaaactgcctctgttgtgtttctcactggaggctggaatgaatgatcactagaacacaaaagagtgaatgatgacacttgaagtcaaagcagttgtactgatcaccagaaccaataaagacataaatggaaaa

SEQ ID NO: 4562 - DNA, 1151 bp, Homo sapiens
  source 1..1151: mol_type = unassigned DNA
accacgcaggggaagagaaagcaggagccgtccagcacggaggaaggcgaccatggccaaggagtggggctacgccagtcacaacggtcctgaccactggcatgaacttttcccaaatgccaagggggaaaaccagtcgccatggtctgtgtcttatgatggtggctctgccaagaccatcctgaataatgggaagacctgccgagttgtatttgatgatacttatgataggtcaatgctgagagggggtcctctccctggaccctaccgacttcgccagtttcatcttcactggggctcttcggatgatcatggctctgagcacaccgtggatggagtcaagtatgcagcggagcttcatttggttcactggaacccgaagtataacacttttaaagaagccctgaagcagcgcgatgggatcgctgtgattggcatttttctgaagataggacatgagaatggcgagttccagattttccttgatgcattggacaagattaagacaaagggcaaggaggcgcccttcacaaagtttgacccatcctgcctgttcccggcatgccgggactactggacctaccagggctcattcaccacgccgccctgcgaggaatgcattgtgtggctgctgctgaaggagcccatgaccgtgagctctgaccagatggccaagctgcggagcctcctctccagtgctgagaacgagcccccagtgcctcttgtgagcaactggcgacctccacagcctatcaataacagggtggtgagagcttccttcaaatgaggctgctggatcttgccctcttcaggaaaggaaacctaccattggagagcttggttccttgcctccttctggtgctccttactccaagtctatttcatttttccacactgagcaatgaatgtgagagatgtggtcaccaagatctaagttacttgttgaaagaaagttactttcgacaagatctaatatgaaagcatagatttcacatttgatctctgtaataatcatctttcctataaaagtagcatttttggtaaagtttcaaagaagaagaaacagagatggaagagtaaagatatttttaaaatggctagctattgggcaccagtttttctgttatctaaaatttcacacaacttcattg

SEQ ID NO: 4563 - DNA, 6050 bp, Homo sapiens
  source 1..6050: mol_type = unassigned DNA
gtagcttcgatggccggacgtgcaggctgcggatccccgtaggcgagcgagcggctaggttcgtgatctggagagacgctcagattattaagttcctgcaacttaactgggaactgatcaagatttcaagctaaagatggtggtgatgaacagcctgagggtcattcttcaagcctctccaggcaaattgctgtggagaaagttccagattccgagattcatgccagcgaggccctgcagcctctatacttgtacttacaaaacccggaaccgagccttgcatccactctgggagagcgtggacctggttcctgggggcgatcgccagtcacccatcaacattcggtggagggacagtgtttatgatcccggcttaaaaccactgaccatctcttatgacccagccacctgcctccacgtctggaataatgggtactctttcctcgtggaatttgaagattctacagataaatcagtgatcaagggaggacccctggaacacaactaccgattgaagcagttccattttcactggggggccatcgatgcctggggttctgagcacaccgtggacagcaaatgcttcccagcagagctgcacttagtgcattggaacgcagtcagatttgaaaactttgaggatgcagcactggaagaaaatggtttggctgtgataggagtatttttaaagctaggcaaacatcataaggagctacagaaattagtggatactttgccgtcaattaagcataaggacgcccttgtggaatttgggtcatttgacccttcctgcctgatgcctacctgcccagattactggacctactcagggtctctgactaccccacccctctccgagtctgtcacctggatcattaagaagcaaccagtagaggttgatcatgatcagcttgagcaatttcggaccctgcttttcacttccgaaggggagaaagagaaaagaatggtggacaacttccgcccccttcagccactgatgaatcgcactgttcgttcatccttccggcatgattatgtgctgaatgtacaagcgaaacccaagccggccaccagccaagcaaccccctaaaacattcatatctaggcagtattttgcttttgctttaatatatactagcttactataaattgttaactagactattctaagtgcctgcatttgataatatttacagatgtgcatttcttagcatgagagtgcttcatcagtctttgaggaaggctattcggtaccagcaagagacacaagtttctcttacagatacctgttggtaattgtaatgccttttttttttctttaagagactaggtcttgctctgctgcccaggctagagtgcagtggccaaatgatagctcactgcagccttgaactcctaggctcaagcagtcctcctgccttagcctctagagtagctggggctacaggtgctggccgcctggcccagcttgtaatatctttttatgtctgacatttttgagctatctttttatgtttatccattagtggttctatagcactatacatagggattataatcaaaatttttaacatgtggtaaggcacagacactgaccagaactcaggccttgcagaaacagcctatgggcccagactggtacttcctggctgaatattggccatggttttagatgtattttattttataacatgaatgtgtattctttcataagggcttatcagtcagtatatttgccccagtgtttagttgttacaaggacatgatatgcttacttactatcagtttatgatgtagaaaatatattttgtaattataagaaaacaagacttttcctatacccagaaatccctttgcatttccgaagatcagatattttgcttaaaggtctgatcatataggaaatatatgcagaacattttaaagaaaatgcctggctgggcacagtggctcacacctgtaatcccagcactttgggaggctgaggcgggtagctcacttgaggtcaggagtttgagaccagcctggccaacatgatgaaaccctgtcactactacaaataaaaaattagccaggcatggtggtgagcacctgtaatgccagctactcgggaagctgaggctggagaatcgcttgaacccaggaggtggtggttgtagtgaaccaagatcacaccactgcactccagcctgggcaacagagtgagactctgtgtctaataaaaaaaaaaaaagaaaagaaaagaaaaaatgcttaaagtgcctagaacttagaattctttcattgcacatttccagaaatatttttcttttcttttttttttttttttttgagatggagtctcgctctgtcccccaggctggagtgcagtggcactatcttggctcactgcaacctccacctcccgggtttaagcgattctcctgcctcagcctcctgagtaactgggactacaggcacatgccaccacgcccagctaatttttgtatttttagtagagatggggtttcactatgttggccaggctggtcttgaactcctgacctcaggtgatccacccgccttggcctcccaaagtgctgggattacaggcgtgagccaccgtgcccggccttccagaaatatttttcaaaggactagtaatctaatagcctatagtttatattattattttgtattatttgcacgctgttacatagtatataatgataatgttttctacagtgaaagagctatcccgtcttccctttacaactgtctgaactttatttactcattagtcaaggttctttgcaaggcaggtgattaacttaaatatctcagtttatacagtggtttaaaagacttttgttatggtaatagggagagaaacttgtcagataggctaaaatctagataattctacatattctgaggaattcatgctcctgtggctcttgcttataaatatcttggaatgtttctgaatgcctctaagcctatgttcagactctgttgcgtcaatgactggtagtatttctttcattaatatgtttgtcatctggtctgcaagatagggttggatgaatatacttaacactactgaactgtacacttaaagatcgttaggaaggaaacgggactacatcaaacttaaaaatgtctgtgtgtcaaaggaagcaatcaacaaagtgaaaacgcaagctctagaatgagagaaaataattgcaaatcgtctatcttataaggagcccaaatccagaatatatgaggaacttctacaactcaacaacaaaaaaccaaataactcaatttttaaaaatgggcaaaggacttgcacagacatttctccaaagaagttatacaattggccaataagaacatgaaaatatgctcaacattgccaattattagggaaatgcaaatcaaaaccacaatgagatatcgtctcacgcccatcatgatggccactatcagaagaacaaaaaaataacaagtattggggaggatgcagagaagttgaaacccttgtgcactgttggtggtaatgtaaaacggtgcagtcattacggaaaacagtacacaggtttcccaaataactgaaaacagaattaccataagaattaccaccaaagcgggatctcaaagagatatttgtacacccatgttcatagcagcattattcacaatagccaagaggttctggaagcatcccaaatgtccatcaacagatgaatagataaaggaaatgtggtatatacagtcaatggaatattattcagcctttaaaaagaaggaaatcctgtcaaatgtacaatgtggatgaaccttgaaggcattatgccaagtgaaataagccagccaacaaaagaacaaatgctatatgattcctccatgtgaagtatgcaaagtagtcaaaatcatacaatagaaagtagaaaggtggttgccaagcaacggttgggggaaggggagagggtgaatttgtatttagtgggtacagagcttgtgttgcaagaattctagagatctgttgcaaaacaagtgtgattgtacttaacactactgaactgtatacgtataagtttgagaaatatctcttttaaaaagggggaaatgtgaaggcttttgcatgtatgccctaggaaatgcatagaattcttagaaaggtaaacatggtaaaaaaagaagtctttgttaactttctgcagttcacctgtttcaaagtatagttacctttaaaagggtaaacacacaagatatgcattttccaaagcatacaggctttcctcctagctgtcttgttttttatttttttttattttttttatttttttgagacagagtcgcgctgtcacccgggctggagtgcagtggcgcgatctcggctcactgcaagctccgcctcccgggttcacgccattctcctgcctcagcctcctgagtagctgggactacaggcgcccgccaccacacccggctattttttgtattttaagtagagacagggtttcaccgtgttaaccaggatggtctcgatctgacctcgtgatccacccgtcttggcctcccaaagtgctgggattacaggtgtgagccactgtgcctggccttcctagctgtcttgtgaaacgataagtcaaaaccctactgcagtgagttttccaaactgaagggagaagcaatgtacagaatgcctgacttgcccttacatcttatacctggtgttctggcatgattattaaccacactctttttcactttgaaccatgtcctggtttgcatggccagcttccctgcagaggtgatagaaactgacttgaggcagtttctttctccatgccttagttagatgaccctcaaaggggcacagcagatttccctggctactgatacaccttaacaagaagcttgtgttttttatgccctcaaaagtgttttacttatactttcctagacataaaggtggaaaatgggcctaaggtctgtcaaaggtcttggaaaagaagattgtattaaaattgctgtccgtcttcattaaataatactagatcgatacaatgctttctttacagtattagtggttggtgaaagacttccttcctattgttacagtatatgtatatatctgtaaaattaatgagatatcctttaacttgtagattagaaagcgactaaaaactcataggggatttactaaagaagcaacaatgggaagaagcagccgatcctcctcagtgcacctttttctgttgcacagtacagtgcacagtgtgctggcatcaccatatagggcaagctgtgaccgcctttctcctttcccagggctacatggtgccaagcaggttcagtgtacactggttaccaacctgtctgattccattgtgacagaacacactcacacccaatacattacatgaagcagatttattacttacagacaggaagcaagggacaaaagaggccctggctccattgtgagccagtcccccagggctcaagaaagctgcccagggcggggctgatggagtcttgattgtacgtgccccacttgcaccacagcctgccttgggttatataccataggagccacataactcattgggcaaagctttaaagtacatcctccttccaggggaaagaggaacacaacctcgctgtctcaaacagttccctaaatcaagatgttacattccctaggagggacaacaacaaggccaacctgtttcaggcagttcctccatatcaggatattgcattcccagtgcattctacagttattcttaagaactacaagcaaggaagaagggagaactgggtcagtccaaggccacctggagaactgtcttgtacatgggttagggtaaagttggctattctaaaactaagcatccgcccaaaagaagtcttggaagatgtctttccctgttaaattcagatgatggtaattatagtttggaagtggaattggcttttagagttacttcctgtaatgaaattaacaagcaattcaggcctatttctgaaaatgaattcagtggttaattgttaaaaataaatgtctaactcct

SEQ ID NO: 4564 - DNA, 2205 bp, Homo sapiens
  source 1..2205: mol_type = unassigned DNA
gattattaagttcctgcaacttaactgggaactgatcaagatttcaagctaaagatggtggtgatgaacagcctgagggtcattcttcaagcctctccaggcaaattgctgtggagaaagttccagattccgagattcatgccagcgaggccctgcagcctctatacttgtacttacaaaacccggaaccgagccttgcatccactctgggagagcgtggacctggttcctgggggcgatcgccagtcacccatcaacattcggtggagggacagtgtttatgatcccggcttaaaaccactgaccatctcttatgacccagccacctgcctccacgtctggaataatgggtactctttcctcgtggaatttgaagattctacagataaatcagtgatcaagggaggacccctggaacacaactaccgattgaagcagttccattttcactggggggccatcgatgcctggggttctgagcacaccgtggacagcaaatgcttcccagcagagctgcacttagtgcattggaacgcagtcagatttgaaaactttgaggatgcagcactggaagaaaatggtttggctgtgataggagtatttttaaagctaggcaaacatcataaggagctacagaaattagtggatactttgccgtcaattaagcataaggacgcccttgtggaatttgggtcatttgacccttcctgcctgatgcctacctgcccagattactggacctactcagggtctctgactaccccacccctctccgagtctgtcacctggatcattaagaagcaaccagtagaggttgatcatgatcagcttgagcaatttcggaccctgcttttcacttccgaaggggagaaagagaaaagaatggtggacaacttccgcccccttcagccactgatgaatcgcactgttcgttcatccttccggcatgattatgtgctgaatgtacaagcgaaacccaagccggccaccagccaagcaaccccctaaaacattcatatctaggcagtattttgcttttgctttaatatatactagcttactataaattgttaactagactattctaagtgcctgcatttgataatatttacagatgtgcatttcttagcatgagagtgcttcatcagtctttgaggaaggctattcggtaccagcaagagacacaagtttctcttacagatacctgttggtaattgtaatgccttttttttttctttaagagactaggtcttgctctgctgcccaggctagagtgcagtggccaaatgatagctcactgcagccttgaactcctaggctcaagcagtcctcctgccttagcctctagagtagctggggctacaggtgctggccgcctggcccagcttgtaatatctttttatgtctgacatttttgagctatctttttatgtttatccattagtggttctatagcactatacatagggattataatcaaaatttttaacatgtggtaaggcacagacactgaccagaactcaggccttgcagaaacagcctatgggcccagactggtacttcctggctgaatattggccatggttttagatgtattttattttataacatgaatgtgtattctttcataagggcttatcagtcagtatatttgccccagtgtttagttgttacaaggacatgatatgcttacttactatcagtttatgatgtagaaaatatattttgtaattataagaaaacaagacttttcctatacccagaaatccctttgcatttccgaagatcagatattttgcttaaaggtctgatcatataggaaatatatgcagaacattttaaagaaaatgcctggccttccagaaatatttttcaaaggactagtaatctaatagcctatagtttatattattattttgtattatttgcacgctgttacatagtatataatgataatgttttctacagtgaaagagctatcccgtcttccctttacaactgtctgaactttatttactcattagtcaaggttctttgcaaggcaggtgattaacttaaatatctcagtttatacagtggtttaaaagacttttgttatggtaatagggagagaaacttgtcagataggctaaaatctagataattctacatattctgaggaattcatgctcctgtggctcttgcttataaatatcttggaatgtt

SEQ ID NO: 4565 - DNA, 529 bp, Homo sapiens
  source 1..529: mol_type = unassigned DNA
agaggtttctccatcatcttaagtttctgttgtttacagctttccctcctctgccctcatccctctagattattaagttcctgcaacttaactgggaactgatcaagatttcaagctaaagatggtggtgatgaacagcctgagggtcattcttcaagcctctccaggcaaattgctgtggagaaagttccagattccgagattcatgccagcgaggccctgcagcctctatacttgtacttacaaaacccggaaccgagccttgcatccactctgggagagcgtggacctggttcctgggggcgatcgccagtcacccatcaacattcggtggagggacagtgtttatgatcccggcttaaaaccactgaccatctcttatgacccagccacctgcctccacgtctggaataatgggtactctttcctcgtggaatttgaagattctacagataaatcagtgatcaagggaggacccctggaacacaactaccgattgaagcagttccattttcactggggggccatc

SEQ ID NO: 4566 - DNA, 488 bp, Homo sapiens
  source 1..488: mol_type = unassigned DNA
ggaatttgaagattctacagataaatcagtggcactatcacaacagagtgacataatggtgggataacatggacacttgtcttcttccttactgtaatgggactatttctactccacataatctgcacagtgctcgacatgagataatcactcactgttccttcagttcaggactggaaatcaatggaaaggaagaacagttaagattattaagttcctgcaacttaactgggaactgatcaagatttcaagctaaagatggtggtgatgaacagcctgagggtcattcttcaagcctctccaggcaaattgctgtggagaaagttccagattccgagattcatgccagcgaggccctgcagcctctatacttgtacttacaaaacccggaaccgagccttgcatccactctgggagagcgtggacctggttcctgggggcgatcgccagtcacccatcaacattcggtggagggacagtgtttatga

SEQ ID NO: 4567 - DNA, 564 bp, Homo sapiens
  source 1..564: mol_type = unassigned DNA
tcttcattacagatgtgcagcaccatgagggccctggtgcttctgctgtccctgttcctgctgggtggccaggcccagcatgtgtctgactggacctactcagaaggggcactggacgaagcgcactggccacagcactaccccgcctgtgggggccagagacagtcgcctatcaacctacagaggacgaaggtgcggtacaacccctccttgaaggggctcaatatgacaggctatgagacccaggcaggggagttccccatggtcaacaatggccacacagattggcaggcggaactcttcctcccctccttgtcctctccttgtggagaaggggcgaagcacaaaggccaaaggcagtggctttgttcaccctccctggacagctggtgggaagcaatcattgatggaggatctctatgggcaacgcttgctgagtgcgggcttcgtgctgagggcccagaagagggaaggcatatggaagagaagagcccagcttcccaaggggcttgcagcggctcccgcctcccaatttccagaggaccctgtaccttcttcctttag

SEQ ID NO: 4568 - DNA, 942 bp, Homo sapiens
  source 1..942: mol_type = unassigned DNA
atgagggccctggtgcttctgctgtccctgttcctgctgggtggccaggcccagcatgtgtctgactggacctactcagaaggggcactggacgaagcgcactggccacagcactaccccgcctgtgggggccagagacagtcgcctatcaacctacagaggacgaaggtgcggtacaacccctccttgaaggggctcaatatgacaggctatgagacccaggcaggggagttccccatggtcaacaatggccacacagtgcagatcagcctgccctccaccatgcgcatgacagtggctgacggcactgtatacatagcccagcagatgcactttcactggggaggtgcgtcctcggagatcagcggctctgagcacaccgtggacgggatcagacatgtgatcgagattcacattgttcactacaattctaaatacaagagctatgatatagcccaagatgcgccggatggtttggctgtactggcagccttcgttgaggtgaagaattaccctgaaaacacttattacagcaacttcatttctcatctggccaacatcaagtacccaggacaaagaacaaccctgactggccttgacgttcaggacatgctgcccaggaacctccagcactactacacctaccatggctcactcaccacgcctccctgcactgagaacgtccactggtttgtgctggcagattttgtcaagctctccaggacacaggtttggaagctggagaattccttactggatcaccgcaacaagaccatccacaacgattaccgcaggacccagcccctgaaccacagagtggtggaatccaacttcccgaatcagggcaagggccacggggggcatcgtgggagaagccaaaatccaagagtacagcccacctcaacacgccaccccttggctctgggcagcttagaagcctga

SEQ ID NO: 4569 - DNA, 1319 bp, Homo sapiens
  source 1..1319: mol_type = unassigned DNA
caccatgagggccctggtgcttctgctgtccctgttcctgctgggtggccaggcccagcatgtgtctgactggacctactcagaaggggcactggacgaagcgcactggccacagcactaccccgcctgtgggggccagagacagtcgcctatcaacctacagaggacgaaggtgcggtacaacccctccttgaaggggctcaatatgacaggctatgagacccaggcaggggagttccccatggtcaacaatggccacacagtgcagatcagcctgccctccaccatgcgcatgacagtggctgacggcactgtatacatagcccagcagatgcactttcactggggaggtgcgtcctcggagatcagcggctctgagcacaccgtggacgggatcagacatgtgatcgagattcacattgttcactacaattctaaatacaagagctatgatatagcccaagatgcgccggatggtttggctgtactggcagccttcgttgaggtgaagaattaccctgaaaacacttattacagcaacttcatttctcatctggccaacatcaagtacccaggacaaagaacaaccctgactggccttgacgttcaggacatgctgcccaggaacctccagcactactacacctaccatggctcactcaccacgcctccctgcactgagaacgtccactggtttgtgctggcagattttgtcaagctctccaggacacaggtttggaagctggagaattccttactggatcaccgcaacaagaccatccacaacgattaccgcaggacccagcccctgaaccacagagtggtggaatccaacttcccgaatcaggaatacactctaggctctgaattccagttttacctacataagattgaggaaattcttgactacttaagaagagcattgaactgaggaaagctaagaggaagattcaatattaactagcttgaagcctgacctagccagaagtgcctgtccgctgcagccgcaccctaccttgtctaagaaaccatgtgtgtctggaacacgctgctccccctggggcagctgttgggattctgattaaaagaggggaaacgatcatcctggacaggaagtgagatggcttcagttcatgagacgggatctgagttagacatcaccagtggaaattgattggaatagaaacttaaaggaaatggaaccctaactattctcccatcaaatcatatatgttgacctgtctgaattataaaccagcctgacctttcctttagcattagatgtaataaaataactttggaaatttgtcatttaaaaa

SEQ ID NO: 4570 - DNA, 1555 bp, Homo sapiens
  source 1..1555: mol_type = unassigned DNA
ccgctgctttaagaggctgctccgcggtagcgagcggggccggagccgcagcccgaacgagcggaccgagccgaccgggcaggtgcacggctgcggggacggcagcggcatgaccggccaccacggctggggctacggccaggacgacggcccctcgcattggcacaagctgtatcccattgcccagggagatcgccaatcacccatcaatatcatctccagccaggctgtgtactctcccagcctgcaaccactggagctttcctatgaggcctgcatgtccctcagcatcaccaacaatggccactctgtccaggtagacttcaatgacagcgatgaccgaaccgtggtgactgggggccccctggaagggccctaccgcctcaagcagtttcacttccactggggcaagaagcacgatgtgggttctgagcacacggtggacggcaagtccttccccagcgagctgcatctggttcactggaatgccaagaagtacagcacttttggggaggcggcctcagcacctgatggcctggctgtggttggtgtttttttggagacaggagacgagcaccccagcatgaatcgtctgacagatgcgctctacatggtccggttcaagggcaccaaagcccagttcagctgcttcaaccccaagtgcctcctgcctgccagccggcactactggacctacccgggctctctgacgactcccccactcagtgagagtgtcacctggattgtgctccgggagcccatctgcatctctgaaaggcagatggggaagttccggagcctgctttttacctcggaggacgatgagaggatccacatggtgaacaacttccggccaccacagccactgaagggccgcgtggtaaaggcctccttccgggcctgagctgcccatctgcctagccggccactagggcaccatcttctcaagggcttccatgtcagcagacaccaaaccatctgaggcttcctccctggggggtgctggggaccctccttcagccagtttgctccttggtcaccctggaggcttctggatgggacccttgagtctggggcacccttcagctgccctggggacaggaaggacaggagctaagcagggtccaagcctggggctgcctctgctctccaagacccaaagaccctgggaacctcctctggtcttccccactggcagtggcagcagccccaccccgagcgcacactgtgatggaggagactgagctccctggggcgggcagctgacactaccagagagactcaagcaataattagaggtgggcagagctgccctctcggcattacctcttctgcaggctctgccatgcacgcacctcactgccaggccattaaaatcagcacccagcatgctggaggtgacgtggccttctccctccagccacctgctgccacgggcaggccctggctatagcttatacagtatctccccttgtccccacccagtcaccaaagccacctacatgacagtccatccctgttgaattaataaattaatgtatccatgcaacaaata

SEQ ID NO: 4571 - DNA, 1713 bp, Homo sapiens
  source 1..1713: mol_type = unassigned DNA
cggcaagtgagcggggacctcgggggagcggggctccgcgtggcaagggcgcagtgtcccccggagagaatttccccgcagaagtggccgagctgccttctcggccggtacgtgagggaagggggcacttgggggcgcaagcatgtgtctgggtgtctacaccgagcagggtgtttgcgcacgtccgggtgtgagtcgtgggagcccgtggcccacaccagcctcctgggctgacgcggaagagagctccttcatcctgcctcagtttccttaggactcagagaaagggagaagaggcagaaggcccctcgcattggcacaagctgtatcccattgcccagggagatcgccaatcacccatcaatatcatctccagccaggctgtgtactctcccagcctgcaaccactggagctttcctatgaggcctgcatgtccctcagcatcaccaacaatggccactctgtccaggtagacttcaatgacagcgatgaccgaaccgtggtgactgggggccccctggaagggccctaccgcctcaagcagtttcacttccactggggcaagaagcacgatgtgggttctgagcacacggtggacggcaagtccttccccagcgagctgcatctggttcactggaatgccaagaagtacagcacttttggggaggcggcctcagcacctgatggcctggctgtggttggtgtttttttggagacaggagacgagcaccccagcatgaatcgtctgacagatgcgctctacatggtccggttcaagggcaccaaagcccagttcagctgcttcaaccccaagtgcctcctgcctgccagccggcactactggacctacccgggctctctgacgactcccccactcagtgagagtgtcacctggattgtgctccgggagcccatctgcatctctgaaaggcagatggggaagttccggagcctgctttttacctcggaggacgatgagaggatccacatggtgaacaacttccggccaccacagccactgaagggccgcgtggtaaaggcctccttccgggcctgagctgcccatctgcctagccggccactagggcaccatcttctcaagggcttccatgtcagcagacaccaaaccatctgaggcttcctccctggggggtgctggggaccctccttcagccagtttgctccttggtcaccctggaggcttctggatgggacccttgagtctggggcacccttcagctgccctggggacaggaaggacaggagctaagcagggtccaagcctggggctgcctctgctctccaagacccaaagaccctgggaacctcctctggtcttccccactggcagtggcagcagccccaccccgagcgcacactgtgatggaggagactgagctccctggggcgggcagctgacactaccagagagactcaagcaataattagaggtgggcagagctgccctctcggcattacctcttctgcaggctctgccatgcacgcacctcactgccaggccattaaaatcagcacccagcatgctggaggtgacgtggccttctccctccagccacctgctgccacgggcaggccctggctatagcttatacagtatctccccttgtccccacccagtcaccaaagccacctacatgacagtccatccctgttgaattaataaattaatgtatccatgcaacaaataccaa

SEQ ID NO: 4572 - DNA, 3812 bp, Homo sapiens
  source 1..3812: mol_type = unassigned DNA
cgctcgctccccaggccacagccgctccctcgctctgctggggcctccggacgcgcttcccacgcgggtctctggaacactcggtccgaacgcacgcctgcttgcactcacactgcggttcacacccggaggcgctctcgcactcacactgccgctcacgcgtgctcacactcccccacgcgcgctccgctccggctccagccccgcgcccagcgaaggcgcaggcactgctgccgagagcgccgaggggccccgcggccttcccatggcggacctgagcttcatcgaagataccgtcgccttccccgagaaggaagaggatgaggaggaagaagaggagggtgtggagtggggctacgaggaaggtgttgagtggggtctggtgtttcctgatgctaatggggaataccagtctcctattaacctaaactcaagagaggctaggtatgacccctcgctgttggatgtccgcctctccccaaattatgtggtgtgccgagactgtgaagtcaccaatgatggacataccattcaggttatcctgaagtcaaaatcagttctttcgggaggaccattgcctcaagggcatgaatttgaactgtacgaagtgagatttcactggggaagagaaaaccagcgtggttctgagcacacggttaatttcaaagcttttcccatggagctccatctgatccactggaactccactctgtttggcagcattgatgaggctgtggggaagccgcacggaatcgccatcattgctctgtttgttcagataggaaaggaacatgttggcttgaaggctgtgactgaaatcctccaagatattcagtataaggggaagtccaaaacaataccttgctttaatcctaacactttattaccagaccctctgctgcgggattactgggtgtatgaaggctctctcaccatcccaccttgcagtgaaggtgtcacctggatattattccgataccctttaactatatcccagctacagatagaagaatttcgaaggctgaggacacatgttaagggggcagaacttgtggaaggctgtgatgggattttgggagacaactttcggcccactcagcctcttagtgacagagtcattagagctgcatttcagtagccaaagaggacaggaacaagtctgtcttcatgagggaggaagacaatggtcctataatgcccttggataagaaaaggaaacttttgagctgcaccttcagtttatcctcaaagcctgcgttgtttgtcttcatctaatccagctttgatggacatctgtgatggttgcctgtacacttgctgaaatgaaatattagaaatggctgtatattccaaagaaaccctatattatatatccacattactgctgctaggattcatagttgcacatactgtttattgcttatgtgtagaaggaatgaaactagtttccagagttgttattaatatgaatatatatcatgtgttaatattgagaaaggaaaaatacattcccggtgttagtagttcttcatttcctgtctccaacagaaaattcactcattttagaactagtgtaattcttgataataaaataagagttttgattaagaacagcatagagcttcaaaatgcaaagtgaatgattagtaaaattatgtctcattttattttttcagcacccataccacaattaatattaggctggattgccatgggaaacattttttggcattaatgcagcaacataatactcactttaggtattactacatagttgaaggatttaactgaatgtatggatcaaatttatttatttgacatattcgaagctgtggtttaataggaatttgagaaaggtgtaagaaataggataaaaagaaggtcagcaccatgtaccaggaatagctttactttccatacatagaaatataaatttagtggtatcctatattactttagtgtcgtacgctttgtaagacttaaatattttattctattgattccactactttggtatgttaagacatttctttaaagatgaccaacaatatccttattttaggtgccactagcagatgtaagcgtatacttagttgccgttagatgtgacagaatgagataatttatgtaaagcagtagagtacctggcacaaagcaaacaataaatattattgttattgttgttataattgtaaaatgaatgacttcaaaaacatagtcccagtttggagggattttgtgatgcagaatatctaagtcatagaaatagaagacaggtggaataagtatatgttcagagtttttagatgtgttgagtagagacggtaataatggaagcattaaatacaaatgaaaatcacaccagatatccctgaaattcaagcaaagaaagttcatcatgtattcttgggcagcaagagaaaggactagggttatggcaatgtgtggaaaagttgaggcttgctaagggttgagatctgttggtagccctggatcacatggggtcagcaccaggcagtgcctctgaaagcggagagaggtcctggacttcccttgtgtataacagttcctagtgtccaacaatgaggaaacggtgaagcatggttacaaaactgtgacaaaaatatttacatctagcactgttaccactcacatgccaaacattggctgcacacgtgcagccttatttgtaattaacatcaaaagactagatctgaagccttccataaatgagaggccattcatatggcattcctggaacaaaacactgcacaggtaccagcctctccactcctgaccgggttggtgctgaacagtcagggattgttcttgaactagacttctgatgcttcttgcaatcttctttcatctttccctgaaatacacaaaataaacaaatacaataacaaatagtaattaaatgactttcaggataacatctagttgttcagacttcacccttcacaggtgtgtgtgtatgtgtgtttatgtctgtatattgaagcaatttgaatttatttactgtatattttctgagtaaaagactgaaatgaactacttggttcagatcatggtgtccattggtgacattgtttggaggcataatattctttatatggaaaatcctttaattccacagttagttacctcagattcagaatatgaatactgtttataatacgcttttgtaggaatgaatttgaaaggtagtttgtcagtaaacgaaagcacaacaactaatctcaaatctgttttgatggtgtgataggaaagaaagtaaaacctatgtgatggaccctgtaattggggcaggaatctcccaaagaaaaaggggagaattaatgacaaatgtcatagatcttgaaatttaatttagggtgcattttgtttatgaaacaatttaataaggcaacaaagtgaaatgatttttcatgtagcttatacacatgtaagtgcctctgattcatggtaactaacgtacctgatggtgtgtaaagtaatactgttgtcagaaggtttgccaattaagataatttgagtttactctttttttgttggttagtttagctgaaggcttgtcaattttattgatttttttcaaggagccaaagtggattttggggttttctctattgtgtttgtattctctatgtcatcaaactctgctcaaatcttacaaaatagtaagattagtaagaaagcagactaacttctgcttgctttgtatttagtttgtgtcttttccagtattttaaggtggaaggttaggttattgatttgaattcttttttgaataaaggcattaacagtta

SEQ ID NO: 4573 - DNA, 3369 bp, Homo sapiens
  source 1..3369: mol_type = unassigned DNA
ttcaattcccctgcatccacactgcaaccgggtgcaagtctttcctaggttatagacagcccgcctccccacgagaccttctgcggactggctgcccctggcctcggcctgggtgggtgggtggtgctcgcgccgcccctactttcccctggggccctggagagccgcgcgctgggtgtgtgtgtgtgtgcgcgcgcgggtttggtggggaaatctccttcagtggaagctgctgagtgtcgttggcggaaagtatcctggagcccagcaaaagcctccaaagcactagagcttccctaaagaaaagcagaataaaagaaagacaagaagggaagcccgttcctctaaagcccgggtttccaatagtcccggatcctcctggagttgggcgaaggcgcagttggcagcagccgctgctggcacccggacttggaaaggcggtgttcccccttttcgggaggagggaggcagggacttgcaggcaagagttgcacctggtctaggaacctgcagagaaaagaactctggggagaagaactgccccggagcgcagcagccaccctccgaccatgccccggtgaggggggcggacttcgagggcaacttgccgcggactgcctgggcttagccagcgagctacgcgctcccgggagcccggaattgcacggcgcagcccggcggggggctatcgtctatgtcttcttggggcgccagacgaatcggggtctcgtttttgctggaagagcccagtgttggtggcttcaggtggctgctgccgccgccgccgccgccgccgctgctagtgcggtttccgccgctggtgcgaagagaagagacacgcgagcggggagacctccaaggcagcgaggcatcggacatgtgtcagcacatctggggcgcacatccgtcgagcccgaggggagatttgccggaacaattcaaactgcgatattgatcttgggggtgactgtccctggccggctgtcgggtgggagtgcgagtgtgcactcgctcggaagtgtgtgcgagtgtgtatgtgtgtgtgccgtgtcgggctccccccttccccccgttttcccgtcgagtgatgcacttggaatgagaatcagaggatggaaatagtctgggaggtgctttttcttcttcaagccaatttcatcgtctgcatatcagctcaacagaattcaccaaaaatccatgaaggctggtgggcatacaaggaggtggtccagggaagctttgttccagttccttctttctggggattggtgaactcagcttggaatctttgctctgtggggaaacggcagtcgccagtcaacatagagaccagtcacatgatcttcgacccctttctgacacctcttcgcatcaacacggggggcaggaaggtcagtgggaccatgtacaacactggaagacacgtatcccttcgcctggacaaggagcacttggtcaacatatctggagggcccatgacatacagccaccggctggaggagatccgactacactttgggagtgaggacagccaagggtcggagcacctcctcaatggacaggccttctctggggaggtgcagctcatccactataaccatgagctatatacgaatgtcacagaagctgcaaagagtccaaatggattggtggtagtttctatatttataaaagtttctgattcatcaaacccatttcttaatcgaatgctcaacagagatactatcacaagaataacatataaaaatgatgcatatttactacaggggcttaatatagaggaactatatccagagacctctagtttcatcacttacgatgggtcgatgactatcccaccctgctatgagacagcaagttggatcataatgaacaaacctgtctatataaccaggatgcagatgcattccttgcgcctgctcagccagaaccagccatctcagatctttctgagcatgagtgacaacttcaggcctgtccagccactcaacaaccgctgcatccgcaccaatatcaacttcagtttacaggggaaggactgtccaaacaaccgagcccagaagcttcagtatagagtaaatgaatggctcctcaagtagggaacaaagccaagaagaatcccacctcagtgaaatgctacaactgtgaattgacgtaacctagaatgtcccccttcttgcttctctctccttctttcccccaagcctcattcattcttgggattggccctttcttcatgaaaagtgtctgcaaaaccatggcagaggaatacatctctcacacatactcacaaacacacacacaagcacttgcacatacatacaaacacatgcaaacatacctacacacacacacactcttacaacctccatcatgggaagtcaagtttcagaaacaaaagtctcattcataagaggtcttagaagaaaataaccagttaacctgatttcaattttgataccgttttcctgaactaataaatctacccaatgagacttttcagcctttgtacatacaaaattcttccaaaagagagaggagaaaatacagctctgatggcatcaaacggactttgcatcaagtaatttcagatagtgtcctaggatcctttgagggtgctggtagcaggtgagcaggacaaagttgaccaaggacacttatttctagattatgattcttctgtttactcaacaatttacaaagaaaaaaaggacagacattgaagagctacacattgtatatatatcaccacagactataaggaaatggaattatttccctctttgtcacatatctgtagtaggatttgccaagatcagaaatgatccatttgctgtttcttgttttccaaaggtcatacattgtgtttggttattgttaccagctcaataaatgtgtttaacgagttaatttcatttttctggctttggtctgttctccttccttacaggctaagccctggctccatgcaactgcattctttgatttcacttgttccttcatctacatgttttgttcatttgcagccagtttttactgagtttgtggcaatcaggaatgcatttgctaagcaagtatgactttaattccactccatggctcaatcattcacatgaggtgagcttcagcctgagatagcaggcgacagacttcttgcgtttcaaaactgccatgcccccctgtgatgctcccgtgaaggaatgcactttgccttgtaagttcctgggaaaggggtatgttttctctccaggtgcagccagatctcacaaagtacaaaacgaatgcctttcttttcttgtttataatggtcactcactgtgtttggttactgtcaagaaatcaataaatgtgtttaacaagttacccagt

SEQ ID NO: 4574 - DNA, 2698 bp, Homo sapiens
  source 1..2698: mol_type = unassigned DNA
acacgcgagcggggagacctccaaggcagcgaggcatcggacatgtgtcagcacatctggggcgcacatccgtcgagcccgaggggagatttgccggaacaattcaaactgcgatattgatcttgggggtgactgtccctggccggctgtcgggtgggagtgcgagtgtgcactcgctcggaagtgtgtgcgagtgtgtatgtgtgtgtgccgtgtcgggctccccccttccccccgttttcccgtcgagtgatgcacttggaatgagaatcagaggatggaaatagtctgggaggtgctttttcttcttcaagccaatttcatcgtctgcatatcaggcgacctcaggagggcagtcaggaggctctggtggcagtctgggttggagatgcaggtaacctgttgaaggtgatggcacacatggagagcaatggccagcatcaggagccgttcaggatgtggattcacagagcctgatgaactgtgtatggtgggggtgagggagaatgctcaacagaattcaccaaaaatccatgaaggctggtgggcatacaaggaggtggtccagggaagctttgttccagttccttctttctggggattggtgaactcagcttggaatctttgctctgtggggaaacggcagtcgccagtcaacatagagaccagtcacatgatcttcgacccctttctgacacctcttcgcatcaacacggggggcaggaaggtcagtgggaccatgtacaacactggaagacacgtatcccttcgcctggacaaggagcacttggtcaacatatctggagggcccatgacatacagccaccggctggaggagatccgactacactttgggagtgaggacagccaagggtcggagcacctcctcaatggacaggccttctctggggaggtgcagctcatccactataaccatgagctatatacgaatgtcacagaagctgcaaagagtccaaatggattggtggtagtttctatatttataaaagtttctgattcatcaaacccatttcttaatcgaatgctcaacagagatactatcacaagaataacatataaaaatgatgcatatttactacaggggcttaatatagaggaactatatccagagacctctagtttcatcacttacgatgggtcgatgactatcccaccctgctatgagacagcaagttggatcataatgaacaaacctgtctatataaccaggatgcagatgcattccttgcgcctgctcagccagaaccagccatctcagatctttctgagcatgagtgacaacttcaggcctgtccagccactcaacaaccgctgcatccgcaccaatatcaacttcagtttacaggggaaggactgtccaaacaaccgagcccagaagcttcagtatagagtaaatgaatggctcctcaagtagggaacaaagccaagaagaatcccacctcagtgaaatgctacaactgtgaattgacgtaacctagaatgtcccccttcttgcttctctctccttctttcccccaagcctcattcattcttgggattggccctttcttcatgaaaagtgtctgcaaaaccatggcagaggaatacatctctcacacatactcacaaacacacacacaagcacttgcacatacatacaaacacatgcaaacatacctacacacacacacactcttacaacctccatcatgggaagtcaagtttcagaaacaaaagtctcattcataagaggtcttagaagaaaataaccagttaacctgatttcaattttgataccgttttcctgaactaataaatctacccaatgagacttttcagcctttgtacatacaaaattcttccaaaagagagaggagaaaatacagctctgatggcatcaaacggactttgcatcaagtaatttcagatagtgtcctaggatcctttgagggtgctggtagcaggtgagcaggacaaagttgaccaaggacacttatttctagattatgattcttctgtttactcaacaatttacaaagaaaaaaaggacagacattgaagagctacacattgtatatatatcaccacagactataaggaaatggaattatttccctctttgtcacatatctgtagtaggatttgccaagatcagaaatgatccatttgctgtttcttgttttccaaaggtcatacattgtgtttggttattgttaccagctcaataaatgtgtttaacgagttaatttcatttttctggctttggtctgttctccttccttacaggctaagccctggctccatgcaactgcattctttgatttcacttgttccttcatctacatgttttgttcatttgcagccagtttttactgagtttgtggcaatcaggaatgcatttgctaagcaagtatgactttaattccactccatggctcaatcattcacatgaggtgagcttcagcctgagatagcaggcgacagacttcttgcgtttcaaaactgccatgcccccctgtgatgctcccgtgaaggaatgcactttgccttgtaagttcctgggaaaggggtatgttttctctccaggtgcagccagatctcacaaagtacaaaacgaatgcctttcttttcttgtttataatggtcactcactgtgtttggttactgtcaagaaatcaataaatgtgtttaacaagtt

SEQ ID NO: 4575 - DNA, 2934 bp, Homo sapiens
  source 1..2934: mol_type = unassigned DNA
acagttcccaatcgggacaagcgcgccgagaaatcctggatcttcccagggattccctctacgctccctcctcttcttcaataaccccaaagaggagaagaactgccccggagcgcagcagccaccctccgaccatgccccggtgaggggggcggacttcgagggcaacttgccgcggactgcctgggcttagccagcgagctacgcgctcccgggagcccggaattgcacggcgcagcccggcggggggctatcgtctatgtcttcttggggcgccagacgaatcggggtctcgtttttgctggaagagcccagtgttggtggcttcaggtggctgctgccgccgccgccgccgccgccgctgctagtgcggtttccgccgctggtgcgaagagaagagacacgcgagcggggagacctccaaggcagcgaggcatcggacatgtgtcagcacatctggggcgcacatccgtcgagcccgaggggagatttgccggaacaattcaaactgcgatattgatcttgggggtgactgtccctggccggctgtcgggtgggagtgcgagtgtgcactcgctcggaagtgtgtgcgagtgtgtatgtgtgtgtgccgtgtcgggctccccccttccccccgttttcccgtcgagtgatgcacttggaatgagaatcagaggatggaaatagtctgggaggtgctttttcttcttcaagccaatttcatcgtctgcatatcagctcaacagaattcaccaaaaatccatgaaggctggtgggcatacaaggaggtggtccagggaagctttgttccagttccttctttctggggattggtgaactcagcttggaatctttgctctgtggggaaacggcagtcgccagtcaacatagagaccagtcacatgatcttcgacccctttctgacacctcttcgcatcaacacggggggcaggaaggtcagtgggaccatgtacaacactggaagacacgtatcccttcgcctggacaaggagcacttggtcaacatatctggagggcccatgacatacagccaccggctggaggagatccgactacactttgggagtgaggacagccaagggtcggagcacctcctcaatggacaggccttctctggggaggtgcagctcatccactataaccatgagctatatacgaatgtcacagaagctgcaaagagtccaaatggattggtggtagtttctatatttataaaagtttctgattcatcaaacccatttcttaatcgaatgctcaacagagatactatcacaagaataacatataaaaatgatgcatatttactacaggggcttaatatagaggaactatatccagagacctctagtttcatcacttacgatgggtcgatgactatcccaccctgctatgagacagcaagttggatcataatgaacaaacctgtctatataaccaggatgcagatgcattccttgcgcctgctcagccagaaccagccatctcagatctttctgagcatgagtgacaacttcaggcctgtccagccactcaacaaccgctgcatccgcaccaatatcaacttcagtttacaggggaaggactgtccaaacaaccgagcccagaagcttcagtatagagtaaatgaatggctcctcaagtagggaacaaagccaagaagaatcccacctcagtgaaatgctacaactgtgaattgacgtaacctagaatgtcccccttcttgcttctctctccttctttcccccaagcctcattcattcttgggattggccctttcttcatgaaaagtgtctgcaaaaccatggcagaggaatacatctctcacacatactcacaaacacacacacaagcacttgcacatacatacaaacacatgcaaacatacctacacacacacacactcttacaacctccatcatgggaagtcaagtttcagaaacaaaagtctcattcataagaggtcttagaagaaaataaccagttaacctgatttcaattttgataccgttttcctgaactaataaatctacccaatgagacttttcagcctttgtacatacaaaattcttccaaaagagagaggagaaaatacagctctgatggcatcaaacggactttgcatcaagtaatttcagatagtgtcctaggatcctttgagggtgctggtagcaggtgagcaggacaaagttgaccaaggacacttatttctagattatgattcttctgtttactcaacaatttacaaagaaaaaaaggacagacattgaagagctacacattgtatatatatcaccacagactataaggaaatggaattatttccctctttgtcacatatctgtagtaggatttgccaagatcagaaatgatccatttgctgtttcttgttttccaaaggtcatacattgtgtttggttattgttaccagctcaataaatgtgtttaacgagttaatttcatttttctggctttggtctgttctccttccttacaggctaagccctggctccatgcaactgcattctttgatttcacttgttccttcatctacatgttttgttcatttgcagccagtttttactgagtttgtggcaatcaggaatgcatttgctaagcaagtatgactttaattccactccatggctcaatcattcacatgaggtgagcttcagcctgagatagcaggcgacagacttcttgcgtttcaaaactgccatgcccccctgtgatgctcccgtgaaggaatgcactttgccttgtaagttcctgggaaaggggtatgttttctctccaggtgcagccagatctcacaaagtacaaaacgaatgcctttcttttcttgtttataatggtcactcactgtgtttggttactgtcaagaaatcaataaatgtgtttaacaagttacccagt

SEQ ID NO: 4576 - DNA, 3243 bp, Homo sapiens
  source 1..3243: mol_type = unassigned DNA
ctctctgagttgggaagcgtagggatccgtaggcgaggaaataacgacccctgcagttgtattgcggaaaatctcgacagcggcgctagttgcgggcgatggaagccaggcaactgggggttctggggagttcaggaaaatagcagaggagcaggaagggcgcgcgcgacctggagagtctgtgtgcccccaccgcgccccagtccccggggcccagcccttcccctcggcgccctggacgcactgccggaacccggctgagaggctgcaggctgcgcgcggacctggggagcagggagggtcggcggaggctgccggcggctggcggtttcgggcaataatccctgcctctctttctctgtgtgtctgctgtgtctgctccttccccgccccccggaagcaggagaagaactgccccggagcgcagcagccaccctccgaccatgccccggtgaggggggcggacttcgagggcaacttgccgcggactgcctgggcttagccagcgagctacgcgctcccgggagcccggaattgcacggcgcagcccggcggggggctatcgtctatgtcttcttggggcgccagacgaatcggggtctcgtttttgctggaagagcccagtgttggtggcttcaggtggctgctgccgccgccgccgccgccgccgctgctagtgcggtttccgccgctggtgcgaagagaagagacacgcgagcggggagacctccaaggcagcgaggcatcggacatgtgtcagcacatctggggcgcacatccgtcgagcccgaggggagatttgccggaacaattcaaactgcgatattgatcttgggggtgactgtccctggccggctgtcgggtgggagtgcgagtgtgcactcgctcggaagtgtgtgcgagtgtgtatgtgtgtgtgccgtgtcgggctccccccttccccccgttttcccgtcgagtgatgcacttggaatgagaatcagaggatggaaatagtctgggaggtgctttttcttcttcaagccaatttcatcgtctgcatatcagctcaacagaattcaccaaaaatccatgaaggctggtgggcatacaaggaggtggtccagggaagctttgttccagttccttctttctggggattggtgaactcagcttggaatctttgctctgtggggaaacggcagtcgccagtcaacatagagaccagtcacatgatcttcgacccctttctgacacctcttcgcatcaacacggggggcaggaaggtcagtgggaccatgtacaacactggaagacacgtatcccttcgcctggacaaggagcacttggtcaacatatctggagggcccatgacatacagccaccggctggaggagatccgactacactttgggagtgaggacagccaagggtcggagcacctcctcaatggacaggccttctctggggaggtgcagctcatccactataaccatgagctatatacgaatgtcacagaagctgcaaagagtccaaatggattggtggtagtttctatatttataaaagtttctgattcatcaaacccatttcttaatcgaatgctcaacagagatactatcacaagaataacatataaaaatgatgcatatttactacaggggcttaatatagaggaactatatccagagacctctagtttcatcacttacgatgggtcgatgactatcccaccctgctatgagacagcaagttggatcataatgaacaaacctgtctatataaccaggatgcagatgcattccttgcgcctgctcagccagaaccagccatctcagatctttctgagcatgagtgacaacttcaggcctgtccagccactcaacaaccgctgcatccgcaccaatatcaacttcagtttacaggggaaggactgtccaaacaaccgagcccagaagcttcagtatagagtaaatgaatggctcctcaagtagggaacaaagccaagaagaatcccacctcagtgaaatgctacaactgtgaattgacgtaacctagaatgtcccccttcttgcttctctctccttctttcccccaagcctcattcattcttgggattggccctttcttcatgaaaagtgtctgcaaaaccatggcagaggaatacatctctcacacatactcacaaacacacacacaagcacttgcacatacatacaaacacatgcaaacatacctacacacacacacactcttacaacctccatcatgggaagtcaagtttcagaaacaaaagtctcattcataagaggtcttagaagaaaataaccagttaacctgatttcaattttgataccgttttcctgaactaataaatctacccaatgagacttttcagcctttgtacatacaaaattcttccaaaagagagaggagaaaatacagctctgatggcatcaaacggactttgcatcaagtaatttcagatagtgtcctaggatcctttgagggtgctggtagcaggtgagcaggacaaagttgaccaaggacacttatttctagattatgattcttctgtttactcaacaatttacaaagaaaaaaaggacagacattgaagagctacacattgtatatatatcaccacagactataaggaaatggaattatttccctctttgtcacatatctgtagtaggatttgccaagatcagaaatgatccatttgctgtttcttgttttccaaaggtcatacattgtgtttggttattgttaccagctcaataaatgtgtttaacgagttaatttcatttttctggctttggtctgttctccttccttacaggctaagccctggctccatgcaactgcattctttgatttcacttgttccttcatctacatgttttgttcatttgcagccagtttttactgagtttgtggcaatcaggaatgcatttgctaagcaagtatgactttaattccactccatggctcaatcattcacatgaggtgagcttcagcctgagatagcaggcgacagacttcttgcgtttcaaaactgccatgcccccctgtgatgctcccgtgaaggaatgcactttgccttgtaagttcctgggaaaggggtatgttttctctccaggtgcagccagatctcacaaagtacaaaacgaatgcctttcttttcttgtttataatggtcactcactgtgtttggttactgtcaagaaatcaataaatgtgtttaacaagttacccagt

SEQ ID NO: 4577 - DNA, 1653 bp, Homo sapiens
  source 1..1653: mol_type = unassigned DNA
aagggacaagagagaagagagactgaaacagggagaagaggcaggagaggaggaggtggggagagcacgaagctggaggccgacactgagggagggcgggaggaggtgaagaaggagagaggggagaagaggcaggagctggaaaggagagagggaggaggaggaggagatgcgggatggagacctggagttaggtggcttgggagagcttaatgaaaagagaacggagaggaggtgtgggttaggaaccaagaggtagccctgggggcagcagaaggctgagaggagtaggaagatcaggagctagagggagactggagggttccgggaaaagagcagaggaaagaggaaagacacagagagacgggagagagaagaagagtgggtttgaagggcggatctcagtccctggctgctttggcatttggggaactgggactccctgtggggaggagaggaaagctggaagtcctggagggacagggtcccagaaggaggggacagaggagctgagagaggggggcagggcgttgggcaggggtccctcggaggcctcctggggatgggggctgcagctcgtctgagcgcccctcgagcgctggtactctgggctgcactgggggcagcagctcacatcggaccagcacctgaccccgaggactggtggagctacaaggataatctccagggaaacttcgtgccagggcctcctttctggggcctggtgaatgcagcgtggagtctgtgtgctgtggggaagcggcagagccccgtggatgtggagctgaagagggttctttatgacccctttctgcccccattaaggctcagcactggaggagagaagctccggggaaccttgtacaacaccggccgacatgtctccttcctgcctgcaccccgacctgtggtcaatgtgtctggaggtcccctcctttacagccaccgactcagtgaactgcggctgctgtttggagctcgcgacggagccggctcggaacatcagatcaaccaccagggcttctctgctgaggtgcagctcattcacttcaaccaggaactctacgggaatttcagcgctgcctcccgcggccccaatggcctggccattctcagcctctttgtcaacgttgccagtacctctaacccattcctcagtcgcctccttaaccgcgacaccatcactcgcatctcctacaagaatgatgcctactttcttcaagacctgagcctggagctcctgttccctgaatccttcggcttcatcacctatcagggctctctcagcaccccgccctgctccgagactgtcacctggatcctcattgaccgggccctcaatatcacctcccttcagatgcactccctgagactcctgagccagaatcctccatctcagatcttccagagcctcagcggtaacagccggcccctgcagcccttggcccacagggcactgaggggcaacagggacccccggcaccccgagaggcgctgccgaggccccaactaccgcctgcatgtggatggtgtcccccatggtcgctgagactccccttcgaggattgcacccgcccgtcctaagcctccccacaaggcgaggggagttacccctaaaacaaagctattaaagggacagaatacttcctgttt

SEQ ID NO: 4578 - DNA, 6413 bp, Homo sapiens
  source 1..6413: mol_type = unassigned DNA
ggaccagtgacagaccaagggcatgccactgaaggaatccctagacgcacccttctggatgtgagacaggcggatctcacccacgcctgccagcagctcctcggagaactgtgttcctgggtcagccctggcccagaggagcgccggggacccgcagagtgctgctgaagtcaaggctacaactcacctaggatctggggcgccagccctccggtgggcagggcgttctcctcccccaccccctccccgcacgatgacatcaagtgtttggcgttgagttgctccataaaagctgcccggggaagccaggagagcgaagggcggacgtactcgccacggcacccaggctgcgcgcacgcggtcccggtgtgcagctggagagcgagcggccaccgggagcccccggcacagcccgcgcccgccccgcaggagcccgcgaagatgccccggcgcagcctgcacgcggcggccgtgctcctgctggtgatcttaaaggaacagccttccagcccggccccagtgaacggttccaagtggacttattttggtcctgatggggagaatagctggtccaagaagtacccgtcgtgtgggggcctgctgcagtcccccatagacctgcacagtgacatcctccagtatgacgccagcctcacgcccctcgagttccaaggctacaatctgtctgccaacaagcagtttctcctgaccaacaatggccattcagtgaagctgaacctgccctcggacatgcacatccagggcctccagtctcgctacagtgccacgcagctgcacctgcactgggggaacccgaatgacccgcacggctctgagcacaccgtcagcggacagcacttcgccgccgagctgcacattgtccattataactcagacctttatcctgacgccagcactgccagcaacaagtcagaaggcctcgctgtcctggctgttctcattgagatgggctccttcaatccgtcctatgacaagatcttcagtcaccttcaacatgtaaagtacaaaggccaggaagcattcgtcccgggattcaacattgaagagctgcttccggagaggaccgctgaatattaccgctaccgggggtccctgaccacacccccttgcaaccccactgtgctctggacagttttccgaaaccccgtgcaaatttcccaggagcagctgctggctttggagacagccctgtactgcacacacatggacgacccttcccccagagaaatgatcaacaacttccggcaggtccagaagttcgatgagaggctggtatacacctccttctcccaagtgcaagtctgtactgcggcaggactgagtctgggcatcatcctctcactggccctggctggcattcttggcatctgtattgtggtggtggtgtccatttggcttttcagaaggaagagtatcaaaaaaggtgataacaagggagtcatttacaagccagccaccaagatggagactgaggcccacgcttgaggtccccggagctcccgggcacatccaggaaggaccttgctttggaccctacacacttcggctctctggacacttgcgacacctcaaggtgttctctgtagctcaatctgcaaacatgccaggcctcagggatcctctgctgggtgcctccttgccttgggaccatggccaccccagagccatccgatcgatggatgggatgcactctcagaccaagcagcaggaattcaaagctgcttgctgtaactgtgtgagattgtgaagtggtctgaattctggaatcacaaaccaagccatgctggtgggccattaatggttggaaaacactttcatccggggctttgccagagcgtgctttcaagtgtcctggaaattctgctgcttctccaagctttcagacaagaatgtgcactctctgcttaggttttgcttgggaaactcaacttctttcctctggagacggggcatctccctctgatttccttctgctatgacaaaacctttaatctgcaccttacaactcggggacaaatggggacaggaaggatcaagttgtagagagaaaaagaaaacaagagatatacattgtgatatattagggacactttcacagtcctgtcctctggatcacagacactgcacagaccttagggaatggcaggttcaagttccacttcttggtggggatgagaagggagagagagctagagggacaaagagaatgagaagacatggatgatctgggagagtctcactttggaatcagaattggaatcacattctgtttatcaagccataatgtaaggacagaataatacaatattaagtccaaatccaacctcctgtcagtggagcagttatgttttatactctacagattttacaaataatgaggctgttccttgaaaatgtgttgttgctgtgtcctggaggagacatgagttccgagatgacccaatctgcctttgaatctggaggaaataggcagaaacaaaatgactgtagaacttattctctgtaggccaaatttcatttcagccacttctgcaggatccctactgccaacctggaatggagacttttatctacttctctctctctgaagatgtcaaatcgtggtttagatcaaatatatttcaagctataaaagcaggaggttatctgtgcagggggctggcatcatgtatttaggggcaagtaataatggaatgctactaagatactccatattcttccccgaatcacacagacagtttctgacaggcgcaactcctccattttcctcccgcaggtgagaaccctgtggagatgagtcagtgccatgactgagaaggaaccgacccctagttgagagcaccttgcagttccccgagaactttctgattcacagtctcattttgacagcatgaaatgtcctcttgaagcatagctttttaaatatctttttccttctactcctccctctgactctaagaattctctcttctggaatcgcttgaacccaggaggcggaggttgcagtaagccaaggtcatgccactgcactctagcctgggtgacagagcgagactccatctcaaaaaaaaaaaaaaaaaaattattctgtaccatcacaacttttcacaacgatggcaagccttatgtcttgggagcctgttttgctaggcaaagttacaagtgacctaatgggagctcaaatgtgtgtgtgtctctctgtgtgtttgtgtgtgtgtgtgcactcaagacctctaacagcctcgaagcctggggtggcatcccggccttgccattagcatgcctcatgcatcatcagatgacaaggacaaccctcatgacgaagcaacatgaattagggggcctcttggccttggtccaaaattgtcaatcagaaatgaacataaaggactccagagcagtgggactgtctgtcaaaagactctgtatatcttttgtggatgagttttgtgagagaacagagagaccattgtacctggcacaagggctgttcatgaaaagggagacttactgggaggtgcaagacagtggcatttctcctctcctcttgctgctcagcacagccctggattgcagccccgaggctgagaccagacaaagcccgggaggcagaaagatgctccaagaaccaacactatcaatgtctttgcaaatcctcacaggattcctgtgggtccagctttggaactgggaaacctttcttcggatccgcactcattccactgatgccagctgcccctgaaggatgccagtactgtggtgtgtgagtctcagcagccgcccacacgctcctaactctgctgcatggcagatgcctaggtggaaatagcaaaaacaaggcccaggctggggccagggccagaggggaaggccctggattctcactcatgtgagatcttgaatctctttctttgttctgtttgtttagttagtatcatctggtaaaatagttaaaaaacaacaaaaaactctgtatctgtttctagcatgtgctgcattgactctattaatcacatttcaaattcaccctacattcctctcctcttcactagcctctctgaaggtgtcctggccagccctggagaagcactggtgtctgcagcacccctcagttcctgtgcctcagcccacaggccactgtgataatggtctgtttagcacttctgtatttattgtaagaatgattataatgaagatacacactgtaactacaagaaattataaatgtttttcacatcaggctgttctttttttttttttggaggcgaggttaaagcattactatttgcaaagcactctgtagctccctgttatggggataggtaactaatcagaataataatgtcactcgcatccacttcttagaacctggctccaaaggaaaataagctgatagactcaatcactttcctgaggatggaggcctatggcatgtgtggctgcaggtcgcgaagctgcttaatggtgctgggaagcctagaggaattaaataaagaccctggaggaggtgggatcggagctgcaccttgaacaaatagctcagatttgaacagatggatggaaaagagggaggtgttcccaaccaaggggacatgatacagggaacaggtcctatgtctctttactcctgagagtattaaacctagtaggtgggcagcccctcttggttgcctgttaccttattttgaattctttttgcaaaacatactatcacccgtccaaataatcttttgtctaaatccagacttcacattctgactggggcaaaaagaggcagtccagtaaaggttataaaataggtaccatcattgtttgccttatttagaaaagcatccaattttcactataatcaccctaagcctgagagaggtgaactgttcaagggtactttggctccagtgggtgacagtacctggcccagctttggaattgaaacatttctgatggtctgtactctgctagaacacaggatgcttctgctctccctgctctggcatcctgccaggtgtcatggccacgcacaggcatgaagacagccgggaagccagagttcccacgaagcactcactccttggacttgctcccaccccactggggagagcactcctggagcaggaaatgagcatctctcatctccctgaattccacatccactggctgaatgatcagggaggcatagcagtgagagccataggtcggcagagggaactcaggccctcctttaggatggccatcacctcatctcaatccagccaaatcaaccatctagagcacacaggccgagagaaatgtaataaaatataacatgagacacgtatgaaatttaaactttccggtagccacactagaaaaaggtaaaaaaaaaaaaaccagtgacattaatttaaatttaattttagataatccaacagatctaaaatactatcatttccacatgtaaccagtattttcatgtgtttttttctgcagtaaatctttgaaatctggtgtgtgttttacactgacagcacactcgattcagatgctagattttccttgtagatatttggtcgttatttagatttcataaaatttacagtttaaaagattccaatatccgagttgctccaaacacacttagaagttgttttccaaataatggaatcaatgatcggcttttagatgtaaacttattaaaataaagtagcgtttctcagttaagtcacattccaagcgctcaagatccatgccctgcgcagacccggacgacgaacccgactttcagagactgagggttctgcctagagagctcccacagaaatcagcccgagaagaaagccttgtgggtgaagccagggagggagacaggagggcaggaggaaaatcaagcctaaatgagcacatcgtggacgccgctcttcctctccccacatctcctcgcctcgccgcagtgggcccggctgtgccccaggtccccgcggtcgggagtgaatggcgctcgggtggcaggcacgtgggcacctggtgaactgcaggaccctggcaccgccaccccctcgcccctacacacacaggagtgcccctcccgttgtcacgtggccttcctgctgggtatctggagcagttgcagcctcgcttccggaaggaaacggggcctctggggcacagggaccacctgccagtgcgttccagccgggctgccatccacactggagaccgccccgcacgtggtcctcgggctcggattcagctgtcgcaggatgtgaggggaaaggtatgtggcccgacaatgccaccgagggtgtccccgggctccaccccgtgcctcttcattatagaatgactgggcagagataagggccagattactttgctgtattgaataattcaccataaaaatgattgcaaccagg

SEQ ID NO: 4579 - DNA, 2744 bp, Homo sapiens
  source 1..2744: mol_type = unassigned DNA
gtactcgccacggcacccaggctgcgcgcacgcggtcccggtgtgcagctggagagcgagcggccaccgggagcccccggcacagcccgcgcccgccccgcaggagcccgcgaagatgccccggcgcagcctgcacgcggcggccgtgctcctgctggtgatcttaaaggaacagccttccagcccggccccagtgaacggttccaagtggacttattttggtcctgatggggagaatagctggtccaagaagtacccgtcgtgtgggggcctgctgcagtcccccatagacctgcacagtgacatcctccagtatgacgccagcctcacgcccctcgagttccaaggctacaatctgtctgccaacaagcagtttctcctgaccaacaatggccattcagtgaagctgaacctgccctcggacatgcacatccagggcctccagtctcgctacagtgccacgcagctgcacctgcactgggggaacccgaatgacccgcacggctctgagcacaccgtcagcggacagcacttcgccgccgagctgcacattgtccattataactcagacctttatcctgacgccagcactgccagcaacaagtcagaaggcctcgctgtcctggctgttctcattgagatgggctccttcaatccgtcctatgacaagatcttcagtcaccttcaacatgtaaagtacaaaggccaggaagcattcgtcccgggattcaacattgaagagctgcttccggagaggaccgctgaatattaccgctaccgggggtccctgaccacacccccttgcaaccccactgtgctctggacagttttccgaaaccccgtgcaaatttcccaggagcagctgctggctttggagacagccctgtactgcacacacatggacgacccttcccccagagaaatgatcaacaacttccggcaggtccagaagttcgatgagaggctggtatacacctccttctcccaaggcatcatcctctcactggccctggctggcattcttggcatctgtattgtggtggtggtgtccatttggcttttcagaaggaagagtatcaaaaaaggtgataacaagggagtcatttacaagccagccaccaagatggagactgaggcccacgcttgaggtccccggagctcccgggcacatccaggaaggaccttgctttggaccctacacacttcggctctctggacacttgcgacacctcaaggtgttctctgtagctcaatctgcaaacatgccaggcctcagggatcctctgctgggtgcctccttgccttgggaccatggccaccccagagccatccgatcgatggatgggatgcactctcagaccaagcagcaggaattcaaagctgcttgctgtaactgtgtgagattgtgaagtggtctgaattctggaatcacaaaccaagccatgctggtgggccattaatggttggaaaacactttcatccggggctttgccagagcgtgctttcaagtgtcctggaaattctgctgcttctccaagctttcagacaagaatgtgcactctctgcttaggttttgcttgggaaactcaacttctttcctctggagacggggcatctccctctgatttccttctgctatgacaaaacctttaatctgcaccttacaactcggggacaaatggggacaggaaggatcaagttgtagagagaaaaagaaaacaagagatatacattgtgatatattagggacactttcacagtcctgtcctctggatcacagacactgcacagaccttagggaatggcaggttcaagttccacttcttggtggggatgagaagggagagagagctagagggacaaagagaatgagaagacatggatgatctgggagagtctcactttggaatcagaattggaatcacattctgtttatcaagccataatgtaaggacagaataatacaatattaagtccaaatccaacctcctgtcagtggagcagttatgttttatactctacagattttacaaataatgaggctgttccttgaaaatgtgttgttgctgtgtcctggaggagacatgagttccgagatgacccaatctgcctttgaatctggaggaaataggcagaaacaaaatgactgtagaacttattctctgtaggccaaatttcatttcagccacttctgcaggatccctactgccaacctggaatggagacttttatctacttctctctctctgaagatgtcaaatcgtggtttagatcaaatatatttcaagctataaaagcaggaggttatctgtgcagggggctggcatcatgtatttaggggcaagtaataatggaatgctactaagatactccatattcttccccgaatcacacagacagtttctgacaggcgcaactcctccattttcctcccgcaggtgagaaccctgtggagatgagtcagtgccatgactgagaaggaaccgacccctagttgagagcaccttgcagttccccgagaactttctgattcacagtctcattttgacagcatgaaatgtcctcttgaagcatagctttttaaatatctttttccttctactcctccctctgactctaagaattctctcttctggaatcgcttgaacccaggaggcggaggttgcagtaagccaaggtcatgccactgcactctagcctgggtgacagagcgagactccatctcaaaaaaaaaaaaaaaaaaa

SEQ ID NO: 4580 - DNA, 2556 bp, Homo sapiens
  source 1..2556: mol_type = unassigned DNA
gaagggcggacgtactcgccacggcacccaggctgcgcgcacgcggtcccggtgtgcagctggagagcgagcggccaccgggagcccccggcacagcccgcgcccgccccgcaggagcccgcgaagatgccccggcgcagcctgcacgcggcggccgtgctcctgctggtgatcttaaaggaacagccttccagcccggccccagtgaacggttccaagtggacttattttgtgaagctgaacctgccctcggacatgcacatccagggcctccagtctcgctacagtgccacgcagctgcacctgcactgggggaacccgaatgacccgcacggctctgagcacaccgtcagcggacagcacttcgccgccgagctgcacattgtccattataactcagacctttatcctgacgccagcactgccagcaacaagtcagaaggcctcgctgtcctggctgttctcattgagatgggctccttcaatccgtcctatgacaagatcttcagtcaccttcaacatgtaaagtacaaaggccaggaagcattcgtcccgggattcaacattgaagagctgcttccggagaggaccgctgaatattaccgctaccgggggtccctgaccacacccccttgcaaccccactgtgctctggacagttttccgaaaccccgtgcaaatttcccaggagcagctgctggctttggagacagccctgtactgcacacacatggacgacccttcccccagagaaatgatcaacaacttccggcaggtccagaagttcgatgagaggctggtatacacctccttctcccaaggcatcatcctctcactggccctggctggcattcttggcatctgtattgtggtggtggtgtccatttggcttttcagaaggaagagtatcaaaaaaggtgataacaagggagtcatttacaagccagccaccaagatggagactgaggcccacgcttgaggtccccggagctcccgggcacatccaggaaggaccttgctttggaccctacacacttcggctctctggacacttgcgacacctcaaggtgttctctgtagctcaatctgcaaacatgccaggcctcagggatcctctgctgggtgcctccttgccttgggaccatggccaccccagagccatccgatcgatggatgggatgcactctcagaccaagcagcaggaattcaaagctgcttgctgtaactgtgtgagattgtgaagtggtctgaattctggaatcacaaaccaagccatgctggtgggccattaatggttggaaaacactttcatccggggctttgccagagcgtgctttcaagtgtcctggaaattctgctgcttctccaagctttcagacaagaatgtgcactctctgcttaggttttgcttgggaaactcaacttctttcctctggagacggggcatctccctctgatttccttctgctatgacaaaacctttaatctgcaccttacaactcggggacaaatggggacaggaaggatcaagttgtagagagaaaaagaaaacaagagatatacattgtgatatattagggacactttcacagtcctgtcctctggatcacagacactgcacagaccttagggaatggcaggttcaagttccacttcttggtggggatgagaagggagagagagctagagggacaaagagaatgagaagacatggatgatctgggagagtctcactttggaatcagaattggaatcacattctgtttatcaagccataatgtaaggacagaataatacaatattaagtccaaatccaacctcctgtcagtggagcagttatgttttatactctacagattttacaaataatgaggctgttccttgaaaatgtgttgttgctgtgtcctggaggagacatgagttccgagatgacccaatctgcctttgaatctggaggaaataggcagaaacaaaatgactgtagaacttattctctgtaggccaaatttcatttcagccacttctgcaggatccctactgccaacctggaatggagacttttatctacttctctctctctgaagatgtcaaatcgtggtttagatcaaatatatttcaagctataaaagcaggaggttatctgtgcagggggctggcatcatgtatttaggggcaagtaataatggaatgctactaagatactccatattcttccccgaatcacacagacagtttctgacaggcgcaactcctccattttcctcccgcaggtgagaaccctgtggagatgagtcagtgccatgactgagaaggaaccgacccctagttgagagcaccttgcagttccccgagaactttctgattcacagtctcattttgacagcatgaaatgtcctcttgaagcatagctttttaaatatctttttccttctactcctccctctgactctaagaattctctcttctggaatcgcttgaacccaggaggcggaggttgcagtaagccaaggtcatgccactgcactctagcctgggtgacagagcgagactccatctc

SEQ ID NO: 4581 - DNA, 1788 bp, Homo sapiens
  source 1..1788: mol_type = unassigned DNA
agcacccccgtccccacatacaccagttcagagccaccttaaaagcaggaggcagttgtaaagtcgctggccagctagtggagtggagactgcagagggagataaagagagagggcaaagaggcagcaagagatttgtcctggggatccagaaacccatgataccctactgaacaccgaatcccctggaagcccacagagacagagacagcaagagaagcagagataaatacactcacgccaggagctcgctcgctctctctctctctctctcactcctccctccctctctctctgcctgtcctagtcctctagtcctcaaattcccagtcccctgcaccccttcctgggacactatgttgttctccgccctcctgctggaggtgatttggatcctggctgcagatgggggtcaacactggacgtatgagggcccacatggtcaggaccattggccagcctcttaccctgagtgtggaaacaatgcccagtcgcccatcgatattcagacagacagtgtgacatttgaccctgatttgcctgctctgcagccccacggatatgaccagcctggcaccgagcctttggacctgcacaacaatggccacacagtgcaactctctctgccctctaccctgtatctgggtggacttccccgaaaatatgtagctgcccagctccacctgcactggggtcagaaaggatccccaggggggtcagaacaccagatcaacagtgaagccacatttgcagagctccacattgtacattatgactctgattcctatgacagcttgagtgaggctgctgagaggcctcagggcctggctgtcctgggcatcctaattgaggtgggtgagactaagaatatagcttatgaacacattctgagtcacttgcatgaagtcaggcataaagatcagaagacctcagtgcctcccttcaacctaagagagctgctccccaaacagctggggcagtacttccgctacaatggctcgctcacaactcccccttgctaccagagtgtgctctggacagttttttatagaaggtcccagatttcaatggaacagctggaaaagcttcaggggacattgttctccacagaagaggagccctctaagcttctggtacagaactaccgagcccttcagcctctcaatcagcgcatggtctttgcttctttcatccaagcaggatcctcgtataccacaggtgaaatgctgagtctaggtgtaggaatcttggttggctgtctctgccttctcctggctgtttatttcattgctagaaagattcggaagaagaggctggaaaaccgaaagagtgtggtcttcacctcagcacaagccacgactgaggcataaattccttctcagataccatggatgtggatgacttcccttcatgcctatcaggaagcctctaaaatggggtgtaggatctggccagaaacactgtaggagtagtaagcagatgtcctccttcccctggacatctcctagagaggaatggacccaggctgtcattccaggaagaactgcagagccttcagcctctccaaacatgtaggaggaaatgaggaaatcgctgtgttgttaatgcagagaacaaactctgtttagttgcaggggaagtttgggatataccccaaagtcctctaccccctcacttttatggccctttccctagatatactgcgggatctctccttaggataaagagttgctgttgaagttgtatatttttgatcaatatatttggaaattaaagtttctgactttaa

SEQ ID NO: 4582 - DNA, 1293 bp, Homo sapiens
  source 1..1293: mol_type = unassigned DNA
agccccgccccgctagggcggggcctgcgcctgcgcgctcagcggccgggcgtgtaacccacgggtgcgcgcccacgaccgccagactcgagcagtctctggaacacgctgcggggctcccgggcctgagccaggtctgttctccacgcaggtgttccgcgcgccccgttcagccatgtcgtccggcatccatgtagcgctggtgactggaggcaacaagggcatcggcttggccatcgtgcgcgacctgtgccggctgttctcgggggacgtggtgctcacggcgcgggacgtgacgcggggccaggcggccgtacagcagctgcaggcggagggcctgagcccgcgcttccaccagctggacatcgacgatctgcagagcatccgcgccctgcgcgacttcctgcgcaaggagtacgggggcctggacgtgctggtcaacaacgcgggcatcgccttcaaggttgctgatcccacaccctttcatattcaagctgaagtgacgatgaaaacaaatttctttggtacccgagatgtgtgcacagaattactccctctaataaaaccccaagggagagtggtgaacgtatctagcatcatgagcgtcagagcccttaaaagctgcagcccagagctgcagcagaagttccgcagtgagaccatcactgaggaggagctggtggggctcatgaacaagtttgtggaggatacaaagaagggagtgcaccagaaggagggctggcccagcagcgcatacggggtgacgaagattggcgtcaccgttctgtccaggatccacgccaggaaactgagtgagcagaggaaaggggacaagatcctcctgaatgcctgctgcccagggtgggtgagaactgacatggcgggacccaaggccaccaagagcccagaagaaggtgcagagacccctgtgtacttggcccttttgcccccagatgctgagggtccccatggacaatttgtttcagagaagagagttgaacagtggtgagctgggctcacagctccatccatgggccccattttgtaccttgtcctgagttggtccaaagggcatttacaatgtcataaatatccttatataagaaaaaaaatgatctcttatcaattagcactcactaatgtactactaattgagcaacctacgcactcagttgactacgtaaatctgtcaggtcttttgtgatttcctctgatgcaggagaggaaaaattgtaattgatgaaaataatgaatgaaaatcaacagatgaataaatggttctttataagtgtc

SEQ ID NO: 4583 - DNA, 1169 bp, Homo sapiens
  source 1..1169: mol_type = unassigned DNA
cggacacctcgcagatcaccccgcggctcagagcccggatcctgaagggcgcagcgtgggcagggggcgggcccgggagttggaacagagggcacagacggcccctcctcggaggggagggaccggagccggggcctttttctttaagactcgcagcactggatcccagaacttagtctgcgcggcggcattgacactagctgggctcctcggggcgcgccccaggtggtccgaagcccggtccgccctccacgcaggtgccccgcgctccccgctcagccatgtcgtcctgcagccgcgtggcgctggtgaccggggccaacaggggcatcggcttggccatcgcgcgcgaactgtgccgacagttctctggggatgtggtgctcaccgcgcgggacgtggcgcggggccaggcggccgtgcagcagctgcaggcggagggcctgagcccgcgcttccaccaactggacatcgacgacttgcagagcatccgcgccctgcgcgacttcctgcgcaaggagtacggggggctcaacgtactggtcaacaacgcggccgtcgccttcaagagtgatgatccaatgccctttgacattaaagctgagatgacactgaagacaaatttttttgccactagaaacatgtgcaacgagttactgccgataatgaaacctcatgggagagtggtgaatatcagtagtttgcagtgtttaagggcttttgaaaactgcagtgaagatctgcaggaaaggttccacagtgagacactcacagaaggagacctggtggatctcatgaaaaagtttgtggaggacacaaaaaatgaggtgcatgagagggaaggctggcccaactcaccttatggggtgtccaagttgggggtcacggtcttatcgaggatcctggccaggcgtctggatgagaagaggaaagctgacaggattctggtgaatgcgtgctgcccaggaccagtgaagacagacatggatgggaaagacagcatcaggactgtggaggagggggctgagacccctgtctacttggccctcttgcctccagatgccactgagccacaaggccagttggtccatgacaaagttgtgcaaaactggtaaacgtctgcttcggagcttgctgcttaataaatgttggtggaatgaatgaatgaa

SEQ ID NO: 4584 - DNA, 2267 bp, Homo sapiens
  source 1..2267: mol_type = unassigned DNA
gatgctcaccatggggcgcctgcaactggttgtgttgggcctcacctgctgctgggcagtggcgagtgccgcgaagctgggcgccgtgtacacagaaggtgggttcgtggaaggcgtcaataagaagctcggcctcctgggtgactctgtggacatcttcaagggcatccccttcgcagctcccaccaaggccctggaaaatcctcagccacatcctggctggcaagggaccctgaaggccaagaacttcaagaagagatgcctgcaggccaccatcacccaggacagcacctacggggatgaagactgcctgtacctcaacatttgggtgccccagggcaggaagcaagtctcccgggacctgcccgttatgatctggatctatggaggcgccttcctcatggggtccggccatggggccaacttcctcaacaactacctgtatgacggcgaggagatcgccacacgcggaaacgtcatcgtggtcaccttcaactaccgtgtcggcccccttgggttcctcagcactggggacgccaatctgccaggtaactatggccttcgggatcagcacatggccattgcttgggtgaagaggaatatcgcggccttcgggggggaccccaacaacatcacgctcttcggggagtctgctggaggtgccagcgtctctctgcagaccctctccccctacaacaagggcctcatccggcgagccatcagccagagcggcgtggccctgagtccctgggtcatccagaaaaacccactcttctgggccaaaaaggtggctgagaaggtgggttgccctgtgggtgatgccgccaggatggcccagtgtctgaaggttactgatccccgagccctgacgctggcctataaggtgccgctggcaggcctggagtaccccatgctgcactatgtgggcttcgtccctgtcattgatggagacttcatccccgctgacccgatcaacctgtacgccaacgccgccgacatcgactatatagcaggcaccaacaacatggacggccacatcttcgccagcatcgacatgcctgccatcaacaagggcaacaagaaagtcacggaggacttctacaagctggtcagtgagttcacaatcaccaaggggctcagaggcgccaagacgacctttgatgtctacaccgagtcctgggcccaggacccatcccaggagaataagaagaagactgtggtggactttgagaccgatgtcctcttcctggtgcccaccgagattgccctagcccagcacagagccaatgccaagagtgccaagacctacgcctacctgttttcccatccctctcggatgcccgtctaccccaaatgggtgggggccgaccatgcagatgacattcagtacgttttcgggaagcccttcgccacccccacgggctaccggccccaagacaggacagtctctaaggccatgatcgcctactggaccaactttgccaaaacaggggaccccaacatgggcgactcggctgtgcccacacactgggaaccctacactacggaaaacagcggctacctggagatcaccaagaagatgggcagcagctccatgaagcggagcctgagaaccaacttcctgcgctactggaccctcacctatctggcgctgcccacagtgaccgaccaggaggccacccctgtgccccccacaggggactccgaggccactcccgtgccccccacgggtgactccgagaccgcccccgtgccgcccacgggtgactccggggccccccccgtgccgcccacgggtgactccggggccccccccgtgccgcccacgggtgactccggggccccccccgtgccgcccacgggtgactccggggccccccccgtgccgcccacgggtgactccggcgccccccccgtgccgcccacgggtgacgccgggcccccccccgtgccgcccacgggtgactccggcgccccccccgtgccgcccacgggtgactccggggccccccccgtgacccccacgggtgactccgagaccgcccccgtgccgcccacgggtgactccggggccccccctgtgccccccacgggtgactctgaggctgcccctgtgccccccacagatgactccaaggaagctcagatgcctgcagtcattaggttttagcgtcccatgagccttggtatcaagaggccacaagagtgggaccccaggggctcccctcccatcttgagctcttcctgaataaagcctcatacccctg

SEQ ID NO: 4585 - DNA, 2186 bp, Homo sapiens
  source 1..2186: mol_type = unassigned DNA
ggccacccagaggctgatgctcaccatggggcgcctgcaactggttgtgttgggcctcacctgctgctgggcagtggcgagtgccgcgaagctgggcgccgtgtacacagaaggtgggttcgtggaaggcgtcaataagaagctcggcctcctgggtgactctgtggacatcttcaagggcatccccttcgcagctcccaccaaggccctggaaaatcctcagccacatcctggctggcaagggaccctgaaggccaagaacttcaagaagagatgcctgcaggccaccatcacccaggacagcacctacggggatgaagactgcctgtacctcaacatttgggtgccccagggcaggaagcaagtctcccgggacctgcccgttatgatctggatctatggaggcgccttcctcatggggtccggccatggggccaacttcctcaacaactacctgtatgacggcgaggagatcgccacacgcggaaacgtcatcgtggtcaccttcaactaccgtgtcggcccccttgggttcctcagcactggggacgccaatctgccaggtaactatggccttcgggatcagcacatggccattgcttgggtgaagaggaatatcgcggccttcgggggggaccccaacaacatcacgctcttcggggagtctgctggaggtgccagcgtctctctgcagaccctctccccctacaacaagggcctcatccggcgagccatcagccagagcggcgtggccctgagtccctgggtcatccagaaaaacccactcttctgggccaaaaaggtggctgagaaggtgggttgccctgtgggtgatgccgccaggatggcccagtgtctgaaggttactgatccccgagccctgacgctggcctataaggtgccgctggcaggcctggagtaccccatgctgcactatgtgggcttcgtccctgtcattgatggagacttcatccccgctgacccgatcaacctgtacgccaacgccgccgacatcgactatatagcaggcaccaacaacatggacggccacatcttcgccagcatcgacatgcctgccatcaacaagggcaacaagaaagtcacggaggaggacttctacaagctggtcagtgagttcacaatcaccaaggggctcagaggcgccaagacgacctttgatgtctacaccgagtcctgggcccaggacccatcccaggagaataagaagaagactgtggtggactttgagaccgatgtcctcttcctggtgcccaccgagattgccctagcccagcacagagccaatgccaaggaccccaacatgggcgactcggctgtgcccacacactgggaaccctacactacggaaaacagcggctacctggagatcaccaagaagatgggcagcagctccatgaagcggagcctgagaaccaacttcctgcgctactggaccctcacctatctggcgctgcccacagtgaccgaccaggaggccacccctgtgccccccacaggggactccgaggccactcccgtgccccccacgggtgactccgagaccgcccccgtgccgcccacgggtgactccggggccccccccgtgccgcccacgggtgactccggggccccccccgtgccgcccacgggtgactccggggccccccccgtgccgcccacgggtgactccggggccccccccgtgccgcccacgggtgactccggggccccccccgtgccgcccacgggtgactccggggccccccccgtgccgcccacgggtgactccggggccccccccgtgccgcccacgggtgactccggcgccccccccgtgccgcccacgggtgacgccgggcccccccccgtgccgcccacgggtgactccggcgccccccccgtgccgcccacgggtgactccggggccccccccgtgacccccacgggtgactccgagaccgcccccgtgccgcccacgggtgactccggggccccccctgtgccccccacgggtgactctgaggctgcccctgtgccccccacagatgactccaaggaagctcagatgcctgcagtcattaggttttagcgtcccatgagccttggtatcaagaggccacaagagtgggaccccaggggctcccctcccatcttgagctcttcctgaataaagcctcatacccctg

SEQ ID NO: 4586 - DNA, 2384 bp, Homo sapiens
  source 1..2384: mol_type = unassigned DNA
ggccacccagaggctgatgctcaccatggggcgcctgcaactggttgtgttgggcctcacctgctgctgggcagtggcgagtgccgcgaagctgggcgccgtgtacacagaaggtgggttcgtggaaggcgtcaataagaagctcggcctcctgggtgactctgtggacatcttcaagggcatccccttcgcagctcccaccaaggccctggaaaatcctcagccacatcctggctggcaagggaccctgaaggccaagaacttcaagaagagatgcctgcaggccaccatcacccaggacagcacctacggggatgaagactgcctgtacctcaacatttgggtgccccagggcaggaagcaagtctcccgggacctgcccgttatgatctggatctatggaggcgccttcctcatggggtccggccatggggccaacttcctcaacaactacctgtatgacggcgaggagatcgccacacgcggaaacgtcatcgtggtcaccttcaactaccgtgtcggcccccttgggttcctcagcactggggacgccaatctgccaggtaactatggccttcgggatcagcacatggccattgcttgggtgaagaggaatatcgcggccttcgggggggaccccaacaacatcacgctcttcggggagtctgctggaggtgccagcgtctctctgcagaccctctccccctacaacaagggcctcatccggcgagccatcagccagagcggcgtggccctgagtccctgggtcatccagaaaaacccactcttctgggccaaaaaggtggctgagaaggtgggttgccctgtgggtgatgccgccaggatggcccagtgtctgaaggttactgatccccgagccctgacgctggcctataaggtgccgctggcaggcctggagtaccccatgctgcactatgtgggcttcgtccctgtcattgatggagacttcatccccgctgacccgatcaacctgtacgccaacgccgccgacatcgactatatagcaggcaccaacaacatggacggccacatcttcgccagcatcgacatgcctgccatcaacaagggcaacaagaaagtcacggaggaggacttctacaagctggtcagtgagttcacaatcaccaaggggctcagaggcgccaagacgacctttgatgtctacaccgagtcctgggcccaggacccatcccaggagaataagaagaagactgtggtggactttgagaccgatgtcctcttcctggtgcccaccgagattgccctagcccagcacagagccaatgccaagagtgccaagacctacgcctacctgttttcccatccctctcggatgcccgtctaccccaaatgggtgggggccgaccatgcagatgacattcagtacgttttcgggaagcccttcgccacccccacgggctaccggccccaagacaggacagtctctaaggccatgatcgcctactggaccaactttgccaaaacaggggaccccaacatgggcgactcggctgtgcccacacactgggaaccctacactacggaaaacagcggctacctggagatcaccaagaagatgggcagcagctccatgaagcggagcctgagaaccaacttcctgcgctactggaccctcacctatctggcgctgcccacagtgaccgaccaggaggccacccctgtgccccccacaggggactccgaggccactcccgtgccccccacgggtgactccgagaccgcccccgtgccgcccacgggtgactccggggccccccccgtgccgcccacgggtgactccggggccccccccgtgccgcccacgggtgactccggggccccccccgtgccgcccacgggtgactccggggccccccccgtgccgcccacgggtgactccggggccccccccgtgccgcccacgggtgactccggggccccccccgtgccgcccacgggtgactccggggccccccccgtgccgcccacgggtgactccggcgccccccccgtgccgcccacgggtgacgccgggcccccccccgtgccgcccacgggtgactccggcgccccccccgtgccgcccacgggtgactccggggccccccccgtgacccccacgggtgactccgagaccgcccccgtgccgcccacgggtgactccggggccccccctgtgccccccacgggtgactctgaggctgcccctgtgccccccacagatgactccaaggaagctcagatgcctgcagtcattaggttttagcgtcccatgagccttggtatcaagaggccacaagagtgggaccccaggggctcccctcccatcttgagctcttcctgaataaagcctcatacccctg

SEQ ID NO: 4587 - DNA, 2010 bp, Homo sapiens
  source 1..2010: mol_type = unassigned DNA
agcgcagggcggtaactctgggcggggctgggctccagggctggacagcacagtccctctgaactgcacagagacctcgcaggccccgagaactgtcgcccttccacgatgtggctccgtgcctttatcctggccactctctctgcttccgcggcttgggcagggcatccgtcctcgccacctgtggtggacaccgtgcatggcaaagtgctggggaagttcgtcagcttagaaggatttgcacagcctgtggccattttcctgggaatcccttttgccaagccgcctcttggacccctgaggtttactccaccgcagcctgcagaaccatggagctttgtgaagaatgccacctcgtaccctcctatgtgcacccaagatcccaaggcggggcagttactctcagagctatttacaaaccgaaaggagaacattcctctcaagctttctgaagactgtctttacctcaatatttacactcctgctgacttgaccaagaaaaacaggctgccggtgatggtgtggatccacggaggggggctgatggtgggtgcggcatcaacctatgatgggctggcccttgctgcccatgaaaacgtggtggtggtgaccattcaatatcgcctgggcatctggggattcttcagcacaggggatgaacacagccgggggaactggggtcacctggaccaggtggctgccctgcgctgggtccaggacaacattgccagctttggagggaacccaggctctgtgaccatctttggagagtcagcgggaggagaaagtgtctctgttcttgttttgtctccattggccaagaacctcttccaccgggccatttctgagagtggcgtggccctcacttctgttctggtgaagaaaggtgatgtcaagcccttggctgagcaaattgctatcactgctgggtgcaaaaccaccacctctgctgtcatggttcactgcctgcgacagaagacggaagaggagctcttggagacgacattgaaaatgaaattcttatctctggacttacagggagaccccagagagagtcaaccccttctgggcactgtgattgatgggatgctgctgctgaaaacacctgaagagcttcaagctgaaaggaatttccacactgtcccctacatggtcggaattaacaagcaggagtttggctggttgattccaatgcagttgatgagctatccactctccgaagggcaactggaccagaagacagccatgtcactcctgtggaagtcctatccccttgtttgcattgctaaggaactgattccagaagccactgagaaatacttaggaggaacagacgacactgtcaaaaagaaagacctgttcctggacttgatagcagatgtgatgtttggtgtcccatctgtgattgtggcccggaaccacagagatgctggagcacccacctacatgtatgagtttcagtaccgtccaagcttctcatcagacatgaaacccaagacggtgataggagaccacggggatgagctcttctccgtctttggggccccatttttaaaagagggtgcctcagaagaggagatcagacttagcaagatggtgatgaaattctgggccaactttgctcgcaatggaaaccccaatggggaagggctgccccactggccagagtacaaccagaaggaagggtatctgcagattggtgccaacacccaggcggcccagaagctgaaggacaaagaagtagctttctggaccaacctctttgccaagaaggcagtggagaagccaccccagacagaacacatagagctgtgaatgaagatccagccggccttgggagcctggaggagcaaagactggggtcttttgcgaaagggattgcaggttcagaaggcatcttaccatggctggggaattgtctggtggtggggggcaggggacagaggccatgaaggagcaagttttgtatttgtgacctcagctttgggaataaaggatcttttgaaggcc

SEQ ID NO: 4588 - DNA, 2007 bp, Homo sapiens
  source 1..2007: mol_type = unassigned DNA
agcgcagggcggtaactctgggcggggctgggctccagggctggacagcacagtccctctgaactgcacagagacctcgcaggccccgagaactgtcgcccttccacgatgtggctccgtgcctttatcctggccactctctctgcttccgcggcttgggggcatccgtcctcgccacctgtggtggacaccgtgcatggcaaagtgctggggaagttcgtcagcttagaaggatttgcacagcctgtggccattttcctgggaatcccttttgccaagccgcctcttggacccctgaggtttactccaccgcagcctgcagaaccatggagctttgtgaagaatgccacctcgtaccctcctatgtgcacccaagatcccaaggcggggcagttactctcagagctatttacaaaccgaaaggagaacattcctctcaagctttctgaagactgtctttacctcaatatttacactcctgctgacttgaccaagaaaaacaggctgccggtgatggtgtggatccacggaggggggctgatggtgggtgcggcatcaacctatgatgggctggcccttgctgcccatgaaaacgtggtggtggtgaccattcaatatcgcctgggcatctggggattcttcagcacaggggatgaacacagccgggggaactggggtcacctggaccaggtggctgccctgcgctgggtccaggacaacattgccagctttggagggaacccaggctctgtgaccatctttggagagtcagcgggaggagaaagtgtctctgttcttgttttgtctccattggccaagaacctcttccaccgggccatttctgagagtggcgtggccctcacttctgttctggtgaagaaaggtgatgtcaagcccttggctgagcaaattgctatcactgctgggtgcaaaaccaccacctctgctgtcatggttcactgcctgcgacagaagacggaagaggagctcttggagacgacattgaaaatgaaattcttatctctggacttacagggagaccccagagagagtcaaccccttctgggcactgtgattgatgggatgctgctgctgaaaacacctgaagagcttcaagctgaaaggaatttccacactgtcccctacatggtcggaattaacaagcaggagtttggctggttgattccaatgcagttgatgagctatccactctccgaagggcaactggaccagaagacagccatgtcactcctgtggaagtcctatccccttgtttgcattgctaaggaactgattccagaagccactgagaaatacttaggaggaacagacgacactgtcaaaaagaaagacctgttcctggacttgatagcagatgtgatgtttggtgtcccatctgtgattgtggcccggaaccacagagatgctggagcacccacctacatgtatgagtttcagtaccgtccaagcttctcatcagacatgaaacccaagacggtgataggagaccacggggatgagctcttctccgtctttggggccccatttttaaaagagggtgcctcagaagaggagatcagacttagcaagatggtgatgaaattctgggccaactttgctcgcaatggaaaccccaatggggaagggctgccccactggccagagtacaaccagaaggaagggtatctgcagattggtgccaacacccaggcggcccagaagctgaaggacaaagaagtagctttctggaccaacctctttgccaagaaggcagtggagaagccaccccagacagaacacatagagctgtgaatgaagatccagccggccttgggagcctggaggagcaaagactggggtcttttgcgaaagggattgcaggttcagaaggcatcttaccatggctggggaattgtctggtggtggggggcaggggacagaggccatgaaggagcaagttttgtatttgtgacctcagctttgggaataaaggatcttttgaaggcc

SEQ ID NO: 4589 - DNA, 2004 bp, Homo sapiens
  source 1..2004: mol_type = unassigned DNA
agcgcagggcggtaactctgggcggggctgggctccagggctggacagcacagtccctctgaactgcacagagacctcgcaggccccgagaactgtcgcccttccacgatgtggctccgtgcctttatcctggccactctctctgcttccgcggcttgggggcatccgtcctcgccacctgtggtggacaccgtgcatggcaaagtgctggggaagttcgtcagcttagaaggatttgcacagcctgtggccattttcctgggaatcccttttgccaagccgcctcttggacccctgaggtttactccaccgcagcctgcagaaccatggagctttgtgaagaatgccacctcgtaccctcctatgtgcacccaagatcccaaggcggggcagttactctcagagctatttacaaaccgaaaggagaacattcctctcaagctttctgaagactgtctttacctcaatatttacactcctgctgacttgaccaagaaaaacaggctgccggtgatggtgtggatccacggaggggggctgatggtgggtgcggcatcaacctatgatgggctggcccttgctgcccatgaaaacgtggtggtggtgaccattcaatatcgcctgggcatctggggattcttcagcacaggggatgaacacagccgggggaactggggtcacctggaccaggtggctgccctgcgctgggtccaggacaacattgccagctttggagggaacccaggctctgtgaccatctttggagagtcagcgggaggagaaagtgtctctgttcttgttttgtctccattggccaagaacctcttccaccgggccatttctgagagtggcgtggccctcacttctgttctggtgaagaaaggtgatgtcaagcccttggctgagcaaattgctatcactgctgggtgcaaaaccaccacctctgctgtcatggttcactgcctgcgacagaagacggaagaggagctcttggagacgacattgaaaatgaaattcttatctctggacttacagggagaccccagagagagtcaaccccttctgggcactgtgattgatgggatgctgctgctgaaaacacctgaagagcttcaagctgaaaggaatttccacactgtcccctacatggtcggaattaacaagcaggagtttggctggttgattccaatgttgatgagctatccactctccgaagggcaactggaccagaagacagccatgtcactcctgtggaagtcctatccccttgtttgcattgctaaggaactgattccagaagccactgagaaatacttaggaggaacagacgacactgtcaaaaagaaagacctgttcctggacttgatagcagatgtgatgtttggtgtcccatctgtgattgtggcccggaaccacagagatgctggagcacccacctacatgtatgagtttcagtaccgtccaagcttctcatcagacatgaaacccaagacggtgataggagaccacggggatgagctcttctccgtctttggggccccatttttaaaagagggtgcctcagaagaggagatcagacttagcaagatggtgatgaaattctgggccaactttgctcgcaatggaaaccccaatggggaagggctgccccactggccagagtacaaccagaaggaagggtatctgcagattggtgccaacacccaggcggcccagaagctgaaggacaaagaagtagctttctggaccaacctctttgccaagaaggcagtggagaagccaccccagacagaacacatagagctgtgaatgaagatccagccggccttgggagcctggaggagcaaagactggggtcttttgcgaaagggattgcaggttcagaaggcatcttaccatggctggggaattgtctggtggtggggggcaggggacagaggccatgaaggagcaagttttgtatttgtgacctcagctttgggaataaaggatcttttgaaggcc

SEQ ID NO: 4590 - DNA, 1813 bp, Homo sapiens
  source 1..1813: mol_type = unassigned DNA
ttccacgatgtggctccgtgcctttatcctggccactctctctgcttccgcggcttgggggcatccgtcctcgccacctgtggtggacaccgtgcatggcaaagtgctggggaagttcgtcagcttagaaggatttgcacagcctgtggccattttcctgggaatcccttttgccaagccgcctcttggacccctgaggtttactccaccgcagcctgcagaaccatggagctttgtgaagaatgccacctcgtaccctcctatgtgcacccaagatcccaaggcggggcagttgaccaagaaaaacaggctgccggtgatggtgtggatccacggaggggggctgatggtgggtgcggcatcaacctatgatgggctggcccttgctgcccatgaaaacgtggtggtggtgaccattcaatatcgcctgggcatctggggattcttcagcacaggggatgaacacagccgggggaactggggtcacctggaccaggtggctgccctgcgctgggtccaggacaacattgccagctttggagggaacccaggctctgtgaccatctttggagagtcagcgggaggagaaagtgtctctgttcttgttttgtctccattggccaagaacctcttccaccgggccatttctgagagtggcgtggccctcacttctgttctggtgaagaaaggtgatgtcaagcccttggctgagcaaattgctatcactgctgggtgcaaaaccaccacctctgctgtcatggttcactgcctgcgacagaagacggaagaggagctcttggagacgacattgaaaatgaaattcttatctctggacttacagggagaccccagagagagtcaaccccttctgggcactgtgattgatgggatgctgctgctgaaaacacctgaagagcttcaagctgaaaggaatttccacactgtcccctacatggtcggaattaacaagcaggagtttggctggttgattccaatgcagttgatgagctatccactctccgaagggcaactggaccagaagacagccatgtcactcctgtggaagtcctatccccttgtttgcattgctaaggaactgattccagaagccactgagaaatacttaggaggaacagacgacactgtcaaaaagaaagacctgttcctggacttgatagcagatgtgatgtttggtgtcccatctgtgattgtggcccggaaccacagagatgctggagcacccacctacatgtatgagtttcagtaccgtccaagcttctcatcagacatgaaacccaagacggtgataggagaccacggggatgagctcttctccgtctttggggccccatttttaaaagagggtgcctcagaagaggagatcagacttagcaagatggtgatgaaattctgggccaactttgctcgcaatggaaaccccaatggggaagggctgccccactggccagagtacaaccagaaggaagggtatctgcagattggtgccaacacccaggcggcccagaagctgaaggacaaagaagtagctttctggaccaacctctttgccaagaaggcagtggagaagccaccccagacagaacacatagagctgtgaatgaagatccagccggccttgggagcctggaggagcaaagactggggtcttttgcgaaagggattgcaggttcagaaggcatcttaccatggctggggaattgtctggtggtggggggcaggggacagaggccatgaaggagcaagttttgtatttgtgacctcagctttgggaataaaggatcttttgaaggcc

SEQ ID NO: 4591 - DNA, 3834 bp, Homo sapiens
  source 1..3834: mol_type = unassigned DNA
gatcggtggtgctgaagggcagggatcttattccaccttctgaagcttctgtcgaaccagttgtaaggagaatggagagagcagtgagagtggagtccggggtcctggtcggggtggtctgtctgctcctggcatgccctgccacagccactgggcccgaagttgctcagcctgaagtagacaccaccctgggtcgtgtgcgaggccggcaggtgggcgtgaagggcacagaccgccttgtgaatgtctttctgggcattccatttgcccagccgccactgggccctgaccggttctcagccccacacccagcacagccctgggagggtgtgcgggatgccagcactgcgcccccaatgtgcctacaagacgtggagagcatgaacagcagcagatttgtcctcaacggaaaacagcagatcttctccgtttcagaggactgcctggtcctcaacgtctatagcccagctgaggtccccgcagggtccggtaggccggtcatggtatgggtccatggaggcgctctgataactggcgctgccacctcctacgatggatcagctctggctgcctatggggatgtggtcgtggttacagtccagtaccgccttggggtccttggcttcttcagcactggagatgagcatgcacctggcaaccagggcttcctagatgtggtagctgctttgcgctgggtgcaagaaaacatcgcccccttcgggggtgacctcaactgtgtcactgtctttggtggatctgccggtgggagcatcatctctggcctggtcctgtccccagtggctgcagggctgttccacagagccatcacacagagtggggtcatcaccaccccagggatcatcgactctcacccttggcccctagctcagaaaatcgcaaacaccttggcctgcagctccagctccccggctgagatggtgcagtgccttcagcagaaagaaggagaagagctggtccttagcaagaagctgaaaaatactatctatcctctcaccgttgatggcactgtcttccccaaaagccccaaggaactcctgaaggagaagcccttccactctgtgcccttcctcatgggtgtcaacaaccatgagttcagctggctcatccccaggggctggggtctcctggatacaatggagcagatgagccgggaggacatgctggccatctcaacacccgtcttgaccagtctggatgtgccccctgagatgatgcccaccgtcatagatgaatacctaggaagcaactcggacgcacaagccaaatgccaggcgttccaggaattcatgggtgacgtattcatcaatgttcccaccgtcagtttttcaagataccttcgagattctggaagccctgtctttttctatgagttccagcatcgacccagttcttttgcgaagatcaaacctgcctgggtgaaggctgatcatggggccgagggtgcttttgtgttcggaggtcccttcctcatggacgagagctcccgcctggcctttccagaggccacagaggaggagaagcagctaagcctcaccatgatggcccagtggacccactttgcccggacaggggaccccaatagcaaggctctgcctccttggccccaattcaaccaggcggaacaatatctggagatcaacccagtgccacgggccggacagaagttcagggaggcctggatgcagttctggtcagagacgctccccagcaagatacaacagtggcaccagaagcagaagaacaggaaggcccaggaggacctctgaggccaggcctgaaccttcttggctggggcaaaccactcttcaagtggtggcagagtcccagcacggcagcccgcctctccccctgctgagactttaatctccaccagcccttaaagtgtcggccgctctgtgactggagttatgctcttttgaaatgtcacaaggccgcctcccacctctggggcattgtacaagttcttccctctccctgaagtgcctttcctgctttcttcgtggtaggttctagcacattcctctagcttcctggaggactcactcccccaggaagccttccctgccttctctgggctgtgcggccccgagtctgcgtccattagagcacagtccacccgaggctagcaccgtgtctgtgtctgtctccccctcagaggagctctctcaaaatggggattagcctaaccccactctgtcacccacaccaggatcgggtgggacctggagctagggggtgtttgctgagtgagtgagtgaaacacagaatatgggaatggcagctgctgaacttgaacccagagccttcaggtgccaaagccatactcaggcccccaccgacattgtccaccctggccagaagggtgcatgccaatggcagagacctgggatgggagaagtcctggggcgccaggggatccagcctagagcagaccttagcccctgactaaggcctcagactagggcgggaggggtctcctcctctctgctgcccagtcctggcccctgcacaagacaacagaatccatcagggccatgagtgtcacccagacctgaccctcaccaattccagccctgaccctcaggacgctggatgccagctcccagccccagtgccgggtcctccctcccttcctggcttggggagaccagtttctggggagcttccaagagcacccaccaagacacagcaggacaggccaggggagggcatctggaccagggcatccgtcgggctattgtcacagagaaaagaagagacccacccactcgggctgcaaaaggtgaaaagcaccaagaggttttcagatggaagtgagaggtgacagtgtgctggcagccctcacagccctcgcttgctctccctgccgcctctgcctgggctcccactttggcagcacttgaggagcccttcaacccgccgctgcactgtaggagcccctttctgggctggccaaggccggagccagctccctcagcttgcggggaggtgcggagggagaggggcgggcaggaaccggggctgcgcgcagcgcttgcgggccagagtgagttccgggtgggcgtgggctcggcggggccccactcagagcagctggccggccccaggcagtgagggccttagcacctgggccagcagctgctgtgctcgatttctcgctgggccttagctgcctccccgcggggcagggctcgggacctgcagccctccatgcctgaccctccccccaccccccgtgggctcctgtgcggccggagcctccccaaggagcgccgccccctgctccacagcgcccagtcccatcgaccacccaagggctgaggagtgcgggtgcacagcgcgggactggcaggcagctccacctgctgccccagtgctggatccactgggtgaagccagctgggctcctgagtctggtggggacttggagaacctttatgtctagctaagggattgtaaatacaccgatgggcactctgtatctagctcaaggtttgtaaacacaccaatcagcaccctgtgtctagctcagtgtttgtgaatgcaccaatccacactctgtatctggctactctggtggggacttggagaacctttgtgtccacactctgtatctagctaatctagtggggatgtggagaacctttgtgtctagctcagggatcgtaaacgcaccaatcagcaccctgtcaaaacagaccacttgactctctgtaaaatggaccaatcagcaggatgtgggtggggcgagacaagagaataaaagcaggctgcctgagccagcagtgacaacccccctcgggtcccctccca

SEQ ID NO: 4592 - DNA, 3178 bp, Homo sapiens
  source 1..3178: mol_type = unassigned DNA
gtgtgactctgtgccagagcaattgactaaaactctcaggttttagatatcaagccaccggggacttcatgagccaagtcccttccattcctttccaggtgcatagaacttcccacaagagtgtcagcactgtgctttcatcccgagcatcttgtttctgtcattcttattcttctacccatcttcacagcaatcattttcttcacttttctttttttttttttttcgtcttggcccattgcacaccctaagacaaagcaatccatttttgttgttgttgttgtttgtgtgtttgtttgttttttgagacagagcctcgatccatcatccaggctgcagtgcagcagcgccatcatgactctctactgcctcaacctctcaggcccgagcaatcctcccagcttcctgagtagctcgggcctcagggctggggtctcctggatacaatggagcagatgagccgggaggacatgctggccatctcaacacccgtcttgaccagtctggatgtgccccctgagatgatgcccaccgtcatagatgaatacctaggaagcaactcggacgcacaagccaaatgccaggcgttccaggaattcatgggtgacgtattcatcaatgttcccaccgtcagtttttcaagataccttcgagattctggaagccctgtctttttctatgagttccagcatcgacccagttcttttgcgaagatcaaacctgcctgggtgaaggctgatcatggggccgagggtgcttttgtgttcggaggtcccttcctcatggacgagagctcccgcctggcctttccagaggccacagaggaggagaagcagctaagcctcaccatgatggcccagtggacccactttgcccggacaggggaccccaatagcaaggctctgcctccttggccccaattcaaccaggcggaacaatatctggagatcaacccagtgccacgggccggacagaagttcagggaggcctggatgcagttctggtcagagacgctccccagcaagatacaacagtggcaccagaagcagaagaacaggaaggcccaggaggacctctgaggccaggcctgaaccttcttggctggggcaaaccactcttcaagtggtggcagagtcccagcacggcagcccgcctctccccctgctgagactttaatctccaccagcccttaaagtgtcggccgctctgtgactggagttatgctcttttgaaatgtcacaaggccgcctcccacctctggggcattgtacaagttcttccctctccctgaagtgcctttcctgctttcttcgtggtaggttctagcacattcctctagcttcctggaggactcactcccccaggaagccttccctgccttctctgggctgtgcggccccgagtctgcgtccattagagcacagtccacccgaggctagcaccgtgtctgtgtctgtctccccctcagaggagctctctcaaaatggggattagcctaaccccactctgtcacccacaccaggatcgggtgggacctggagctagggggtgtttgctgagtgagtgagtgaaacacagaatatgggaatggcagctgctgaacttgaacccagagccttcaggtgccaaagccatactcaggcccccaccgacattgtccaccctggccagaagggtgcatgccaatggcagagacctgggatgggagaagtcctggggcgccaggggatccagcctagagcagaccttagcccctgactaaggcctcagactagggcgggaggggtctcctcctctctgctgcccagtcctggcccctgcacaagacaacagaatccatcagggccatgagtgtcacccagacctgaccctcaccaattccagccctgaccctcaggacgctggatgccagctcccagccccagtgccgggtcctccctcccttcctggcttggggagaccagtttctggggagcttccaagagcacccaccaagacacagcaggacaggccaggggagggcatctggaccagggcatccgtcgggctattgtcacagagaaaagaagagacccacccactcgggctgcaaaaggtgaaaagcaccaagaggttttcagatggaagtgagaggtgacagtgtgctggcagccctcacagccctcgcttgctctccctgccgcctctgcctgggctcccactttggcagcacttgaggagcccttcaacccgccgctgcactgtaggagcccctttctgggctggccaaggccggagccagctccctcagcttgcggggaggtgcggagggagaggggcgggcaggaaccggggctgcgcgcagcgcttgcgggccagagtgagttccgggtgggcgtgggctcggcggggccccactcagagcagctggccggccccaggcagtgagggccttagcacctgggccagcagctgctgtgctcgatttctcgctgggccttagctgcctccccgcggggcagggctcgggacctgcagccctccatgcctgaccctccccccaccccccgtgggctcctgtgcggccggagcctccccaaggagcgccgccccctgctccacagcgcccagtcccatcgaccacccaagggctgaggagtgcgggtgcacagcgcgggactggcaggcagctccacctgctgccccagtgctggatccactgggtgaagccagctgggctcctgagtctggtggggacttggagaacctttatgtctagctaagggattgtaaatacaccgatgggcactctgtatctagctcaaggtttgtaaacacaccaatcagcaccctgtgtctagctcagtgtttgtgaatgcaccaatccacactctgtatctggctactctggtggggacttggagaacctttgtgtccacactctgtatctagctaatctagtggggatgtggagaacctttgtgtctagctcagggatcgtaaacgcaccaatcagcaccctgtcaaaacagaccacttgactctctgtaaaatggaccaatcagcaggatgtgggtggggcgagacaagagaataaaagcaggctgcctgagccagcagtgacaacccccctcgggtcccctcccacgccgtggaagctttgttctttcgctctttgcaataaatcttgctactgccc

SEQ ID NO: 4593 - DNA, 3817 bp, Homo sapiens
  source 1..3817: mol_type = unassigned DNA
gtgctgaagggcagggatcttattccaccttctgaagcttctgtcgaaccagttgtaaggagaatggagagagcagtgagagtggagtccggggtcctggtcggggtggtctgtctgctcctggcatgccctgccacagccactgggcccgaagttgctcagcctgaagtagacaccaccctgggtcgtgtgcgaggccggcaggtgggcgtgaagggcacagaccgccttgtgaatgtctttctgggcattccatttgcccagccgccactgggccctgaccggttctcagccccacacccagcacagccctgggagggtgtgcgggatgccagcactgcgcccccaatgtgcctacaagacgtggagagcatgaacagcagcagatttgtcctcaacggaaaacagcagatcttctccgtttcagaggactgcctggtcctcaacgtctatagcccagctgaggtccccgcagggtccggtaggccggtcatggtatgggtccatggaggcgctctgataactggcgctgccacctcctacgatggatcagctctggctgcctatggggatgtggtcgtggttacagtccagtaccgccttggggtccttggcttcttcagcactggagatgagcatgcacctggcaaccagggcttcctagatgtggtagctgctttgcgctgggtgcaagaaaacatcgcccccttcgggggtgacctcaactgtgtcactgtctttggtggatctgccggtgggagcatcatctctggcctggtcctgtccccagtggctgcagggctgttccacagagccatcacacagagtggggtcatcaccaccccagggatcatcgactctcacccttggcccctagctcagaaaatcgcaaacaccttggcctgcagctccagctccccggctgagatggtgcagtgccttcagcagaaagaaggagaagagctggtccttagcaagaagctgaaaaatactatctatcctctcaccgttgatggcactgtcttccccaaaagccccaaggaactcctgaaggagaagcccttccactctgtgcccttcctcatgggtgtcaacaaccatgagttcagctggctcatccccaggggctggggtctcctggatacaatggagcagatgagccgggaggacatgctggccatctcaacacccgtcttgaccagtctggatgtgccccctgagatgatgcccaccgtcatagatgaatacctaggaagcaactcggacgcacaagccaaatgccaggcgttccaggaattcatgggtgacgtattcatcaatgttcccaccgtcagtttttcaagataccttcgagattctggaagccctgtctttttctatgagttccagcatcgacccagttcttttgcgaagatcaaacctgcctgggtgaaggctgatcatggggccgagggtgcttttgtgttcggaggtcccttcctcatggacgagagctcccgcctggaggccacagaggaggagaagcagctaagcctcaccatgatggcccagtggacccactttgcccggacaggggaccccaatagcaaggctctgcctccttggccccaattcaaccaggcggaacaatatctggagatcaacccagtgccacgggccggacagaagttcagggaggcctggatgcagttctggtcagagacgctccccagcaagatacaacagtggcaccagaagcagaagaacaggaaggcccaggaggacctctgaggccaggcctgaaccttcttggctggggcaaaccactcttcaagtggtggcagagtcccagcacggcagcccgcctctccccctgctgagactttaatctccaccagcccttaaagtgtcggccgctctgtgactggagttatgctcttttgaaatgtcacaaggccgcctcccacctctggggcattgtacaagttcttccctctccctgaagtgcctttcctgctttcttcgtggtaggttctagcacattcctctagcttcctggaggactcactcccccaggaagccttccctgccttctctgggctgtgcggccccgagtctgcgtccattagagcacagtccacccgaggctagcaccgtgtctgtgtctgtctccccctcagaggagctctctcaaaatggggattagcctaaccccactctgtcacccacaccaggatcgggtgggacctggagctagggggtgtttgctgagtgagtgagtgaaacacagaatatgggaatggcagctgctgaacttgaacccagagccttcaggtgccaaagccatactcaggcccccaccgacattgtccaccctggccagaagggtgcatgccaatggcagagacctgggatgggagaagtcctggggcgccaggggatccagcctagagcagaccttagcccctgactaaggcctcagactagggcgggaggggtctcctcctctctgctgcccagtcctggcccctgcacaagacaacagaatccatcagggccatgagtgtcacccagacctgaccctcaccaattccagccctgaccctcaggacgctggatgccagctcccagccccagtgccgggtcctccctcccttcctggcttggggagaccagtttctggggagcttccaagagcacccaccaagacacagcaggacaggccaggggagggcatctggaccagggcatccgtcgggctattgtcacagagaaaagaagagacccacccactcgggctgcaaaaggtgaaaagcaccaagaggttttcagatggaagtgagaggtgacagtgtgctggcagccctcacagccctcgcttgctctccctgccgcctctgcctgggctcccactttggcagcacttgaggagcccttcaacccgccgctgcactgtaggagcccctttctgggctggccaaggccggagccagctccctcagcttgcggggaggtgcggagggagaggggcgggcaggaaccggggctgcgcgcagcgcttgcgggccagagtgagttccgggtgggcgtgggctcggcggggccccactcagagcagctggccggccccaggcagtgagggccttagcacctgggccagcagctgctgtgctcgatttctcgctgggccttagctgcctccccgcggggcagggctcgggacctgcagccctccatgcctgaccctccccccaccccccgtgggctcctgtgcggccggagcctccccaaggagcgccgccccctgctccacagcgcccagtcccatcgaccacccaagggctgaggagtgcgggtgcacagcgcgggactggcaggcagctccacctgctgccccagtgctggatccactgggtgaagccagctgggctcctgagtctggtggggacttggagaacctttatgtctagctaagggattgtaaatacaccgatgggcactctgtatctagctcaaggtttgtaaacacaccaatcagcaccctgtgtctagctcagtgtttgtgaatgcaccaatccacactctgtatctggctactctggtggggacttggagaacctttgtgtccacactctgtatctagctaatctagtggggatgtggagaacctttgtgtctagctcagggatcgtaaacgcaccaatcagcaccctgtcaaaacagaccacttgactctctgtaaaatggaccaatcagcaggatgtgggtggggcgagacaagagaataaaagcaggctgcctgagccagcagtgacaacccccctcgggtcccctccca

SEQ ID NO: 4594 - DNA, 2335 bp, Homo sapiens
  source 1..2335: mol_type = unassigned DNA
accccctctccctgcacctttctttatcttggagcctctcccatctctccctccctcttcctccctaccccaccctccgaccaccccacttcttcccctcccctcacacttccctccctcccttctctcgtctcctccccactgcgcctccctccctcctggccttccttcccttccccgactttgcagatttctcttcccccaggcctccctcctccacctctccgccccctccgggcttggctctcccaggaggctacgactggagccactggtcccgcaggatccccgcgtcctcggtcgccgcgtccacgtccctctcgcgtccccgcccggcgccacgccgcctcctctgggttcggcctccgcgcggtgcagcgcagtctcaggccgcgggacaagcccgacttaaatctctgcaatggctaacgaagcttatccttgtccgtgtgacattggccacagacttgagtatggagggctaggccgtgaagttcaagtcgagcacatcaaggcttatgtcaccaaatcccccgttgatgcaggcaaagctgtgattgtcattcaagatatatttggctggcagttgcccaataccagatatatagctgacatgatctcaggaaatggatacacaaccattgttccagacttctttgtagggcaagagccttgggacccctctggcgactggtctatcttccctgagtggctgaaaacaagaaatgcccagaagatcgatagagagatcagtgctatcttgaagtatctgaaacaacagtgtcatgcccagaaaattggcatcgtgggattctgctggggtggaactgctgtccatcatttgatgatgaaatactcagaattcagggcaggggtgtccgtctatggcattgtcaaggattctgaagacatttacaatttaaagaaccccactttgttcatttttgctgaaaatgatgttgtgattccactcaaggacgtatctttgctgactcagaagttgaaagaacactgcaaagttgaatatcaaattaaaacattttctgggcagactcatgggttcgtgcatcggaagagagaagattgctcacctgcagacaagccctacattgacgaggccagaaggaatttaattgagtggctgaacaagtacatgtagcaagaatcaagggcaagccttcctagaatagctttcatcccaaaatttgcttggaaatagttagatcatttgatttaattttcacttttataaaataagtgtaggaatcctaaaattgattatttcatttgaaacacaaattcagtaggacgtaatgcatgaaataatttaatttttgacatgtacatcgaatcataatttaaaaacaaggtctgaccaggtgtagtgcctcatgcctgtaattccagcactttgggaggccaaagtgggtggatcacctgaggtcaggagtttgagaccagcctggccaacatggtgagaccccatctctacaaaaaatacaaaaattagcctggtgtggtggtgcacgcctgtagtcccagctacttgggaggctgaggcacaagaatcaatagaacccaggaggtggagactgcagtgagccaagattgtgccactactgtactctagcctgggcagcagagtgagaccctgtctcaaaaataaataagtaaataaataaataaataaaataaaaaccaggtcagtacctggagaatttgaatgatagagaatgatagagtaataccctaattattagttaaaacctacaggccgggtgcggtggctcacgcctgtaatcccagcactttgggaggccgaggtgggtggatcacttgaggtcaggagttcaagaccagcctggccaacatggtgaaaccccatctctactaaaaatataaaaatcagccgggcatggtggcatgtgcctgtaatcccagctactcaggagtctgaggaggagaatcacttgaacctggaggcagaggttgcagtgagtcgaggttgcgctactgcactccagcctggacaacagagggagactctgtctcaaaaaaaaaaaaaaacctacagctgttcaaggaccagctgacaggtcaagtgtggccttttctggtctttgaacacatcatagaaagtgacaaatgctgcaaagccatgaagaacatgaactataaacgggtagactaactgcccagcttagacacttatctatgccacaaaacagctgaatttgtcacatttatatattgcaatatgggaagtattgagatcaaaacaggattccattgacctaattatattaagctaataaactaattttttgaatttttg

SEQ ID NO: 4595 - DNA, 1487 bp, Homo sapiens
  source 1..1487: mol_type = unassigned DNA
agaactcccaccccagcctccccgtgggacaggacccaggtgctgggggagaacagacctcgggagcagccaggagtcctcggtcctgggagggtttaaaagccagggggccgtctcgacctcagtctgaccttccctcccggcagcagcatgcgggggttgctggtgttgagtgtcctgttgggggctgtctttggcaaggaggactttgtggggcatcaggtgctccgaatctctgtagccgatgaggcccaggtacagaaggtgaaggagctggaggacctggagcacctgcagctggacttctggcgggggcctgcccaccctggctcccccatcgacgtccgagtgcccttccccagcatccaggcggtcaagatctttctggagtcccacggcatcagctatgagaccatgatcgaggacgtgcagtcgctgctggacgaggagcaggagcagatgttcgccttccggtcccgggcgcgctccaccgacacttttaactacgccacctaccacaccctggaggagatctatgacttcctggacctgctggtggcggagaacccgcaccttgtcagcaagatccagattggcaacacctatgaagggcgtcccatttacgtgctgaagttcagcacggggggcagtaagcgtccagccatctggatcgacacgggcatccattcccgggagtgggtcacccaggccagtggggtctggtttgcaaagaagatcactcaagactacgggcaggatgcagctttcaccgccattctcgacaccttggacatcttcctggagatcgtcaccaaccctgatggctttgccttcacgcacagcacgaatcgcatgtggcgcaagactcggtcccacacagcaggctccctctgtattggcgtggaccccaacaggaactgggacgctggctttgggttgtccggagccagcagtaacccctgctcggagacttaccacggcaagtttgccaattccgaagtggaggtcaagtccattgtagactttgtgaaggaccatgggaacatcaaggccttcatctccatccacagctactcccagctcctcatgtatccctatggctacaaaacagaaccagtccctgaccaggatgagctggatcagctttccaaggctgctgtgacagccctggcctctctctacgggaccaagttcaactatggcagcatcatcaaggcaatttatcaagccagtggaagcactattgactggacctacagccagggcatcaagtactccttcaccttcgagctccgggacactgggcgctatggcttcctgctgccagcctcccagatcatccccacagccaaggagacgtggctggcgcttctgaccatcatggagcacaccctgaatcacccctactgagctgaccctttgacacccttcttgtcctcctctctggccccatccaggcaaccaaataaagtttgagtgtaccagga

SEQ ID NO: 4596 - DNA, 1366 bp, Homo sapiens
  source 1..1366: mol_type = unassigned DNA
atccctacaaataaagttcaggaaggactctgaattctggactccaggaaaacccatggccatgaggttgatcctgttttttggtgccctttttgggcatatctactgtctagaaacatttgtgggagaccaagttcttgagattgtaccaagcaatgaagaacaaattaaaaatctgctacaattggaggctcaagaacatctccagcttgatttttggaaatcacccaccaccccaggggagacagcccacgtccgagttcccttcgtcaacgtccaggcagtcaaagtgttcttggagtcccagggaattgcctattccatcatgattgaagacgtgcaggtcctgttggacaaagagaatgaagaaatgctttttaataggagaagagaacggagtggtaacttcaattttggggcctaccataccctggaagagatttcccaagaaatggataacctcgtggctgagcaccctggtctagtgagcaaagtgaatattggctcttcttttgagaaccggcctatgaacgtgctcaagttcagcaccggaggagacaagccagctatctggctggatgctgggatccatgctcgagagtgggttacacaagctacggcactttggacagcaaataagattgtttctgattatggaaaggacccatccatcacttccattctggatgccctggatatcttcctcctgccagtcacaaaccctgatggatacgtgttctctcaaaccaaaaatcgtatgtggcggaagacccggtccaaggtatctggaagcctctgtgttggtgtggatcctaaccggaactgggatgcaggttttggaggacctggagccagcagcaacccttgctctgattcataccacggacccagtgccaactctgaagttgaagtgaaatccatagtggacttcatcaagagtcatggaaaagtcaaggccttcattaccctccacagctattcccagctgctgatgttcccctatgggtacaaatgtaccaagttagatgactttgatgagctgagtgaagtggcccaaaaggctgcccaatctctgagaagcctgcatggcaccaagtacaaagtgggaccaatctgctctgtcatctaccaagccagtggaggaagcattgactggtcctatgattatggcatcaagtactcatttgcctttgaactgagagacacagggcgctacggcttcctcttgccagcccgtcagatcctgcccacagccgaggagacctggcttggcttgaaggcaatcatggagcatgtgcgagaccacccctattagggccctggggaagaaacaagagccattaaaatctctttggtttgaagcaaa

SEQ ID NO: 4597 - DNA, 1795 bp, Homo sapiens
  source 1..1795: mol_type = unassigned DNA
agggctgaggcataaaactgccagagggtctcaaggcaggcaaagaagaaccatgaggctcatcctgcctgtgggtttgattgctaccactcttgcaattgctcctgtccgctttgacagggagaaggtgttccgcgtgaagccccaggatgaaaaacaagcagacatcataaaggacttggccaaaaccaatgagcttgacttctggtatccaggtgccacccaccacgtagctgctaatatgatggtggatttccgagttagtgagaaggaatcccaagccatccagtctgccttggatcaaaataaaatgcactatgaaatcttgattcatgatctacaagaagagattgagaaacagtttgatgttaaagaagatatcccaggcaggcacagctacgcaaaatacaataattgggaaaagattgtggcttggactgaaaagatgatggataagtatcctgaaatggtctctcgtattaaaattggatctactgttgaagataatccactatatgttctgaagattggggaaaagaatgaaagaagaaaggctatttttacggattgtggcattcacgcacgagaatgggtctccccagcattctgccagtggtttgtctatcaggcaaccaaaacttatgggagaaacaaaattatgaccaaactcttggaccgaatgaatttttacattcttcctgtgttcaatgttgatggatatatttggtcatggacaaagaaccgcatgtggagaaaaaatcgttccaagaaccaaaactccaaatgcatcggcactgacctcaacaggaattttaatgcttcatggaactccattcctaacaccaatgacccatgtgcagataactatcggggctctgcaccagagtccgagaaagagacgaaagctgtcactaatttcattagaagccacctgaatgaaatcaaggtttacatcaccttccattcctactcccagatgctattgtttccctatggatatacatcaaaactgccacctaaccatgaggacttggccaaagttgcaaagattggcactgatgttctatcaactcgatatgaaacccgctacatctatggcccaatagaatcaacaatttacccgatatcaggttcttctttagactgggcttatgacctgggcatcaaacacacatttgcctttgagctccgagataaaggcaaatttggttttctccttccagaatcccggataaagccaacgtgcagagagaccatgctagctgtcaaatttattgccaagtatatcctcaagcatacttcctaaagaactgccctctgtttggaataagccaattaatccttttttgtgcctttcatcagaaagtcaatcttcagttatccccaaatgcagcttctatttcacctgaatccttctcttgctcatttaagtcccatgttactgctgtttgcttttacttactttcagtagcaccataacgaagtagctttaagtgaaaccttttaactacctttctttgctccaagtgaagtttggacccagcagaaagcattattttgaaaggtgatatacagtggggcacagaaaacaaatgaaaaccttcagtttctcacagattttcaccatgtggcttcatcaatttatgtgctaatacaataaaataaaatgcacttaatgctttaaaattcatctttttatgataaactatattctctgtatttctctatagcattaataatcaatattaatgccattcattcagtctgttaataagaaataatatcttcaattttc

SEQ ID NO: 4598 - DNA, 2797 bp, Homo sapiens
  source 1..2797: mol_type = unassigned DNA
gccactgtatgactgactccccggggacatgaggtggatactgttcattggggcccttattgggtccagcatctgtggccaagaaaaattttttggggaccaagttttgaggattaatgtcagaaatggagacgagatcagcaaattgagtcaactagtgaattcaaacaacttgaagctcaatttctggaaatctccctcctccttcaatcggcctgtggatgtcctggtcccatctgtcagtctgcaggcatttaaatccttcctgagatcccagggcttagagtacgcagtgacaattgaggacctgcaggcccttttagacaatgaagatgatgaaatgcaacacaatgaagggcaagaacggagcagtaataacttcaactacggggcttaccattccctggaagctatttaccacgagatggacaacattgccgcagactttcctgacctggcgaggagggtgaagattggacattcgtttgaaaaccggccgatgtatgtactgaagttcagcactgggaaaggcgtgaggcggccggccgtttggctgaatgcaggcatccattcccgagagtggatctcccaggccactgcaatctggacggcaaggaagattgtatctgattaccagagggatccagctatcacctccatcttggagaaaatggatattttcttgttgcctgtggccaatcctgatggatatgtgtatactcaaactcaaaaccgattatggaggaagacgcggtcccgaaatcctggaagctcctgcattggtgctgacccaaatagaaactggaacgctagttttgcaggaaagggagccagcgacaacccttgctccgaagtgtaccatggaccccacgccaattcggaagtggaggtgaaatcagtggtagatttcatccaaaaacatgggaatttcaagggcttcatcgacctgcacagctactcgcagctgctgatgtatccatatgggtactcagtcaaaaaggccccagatgccgaggaactcgacaaggtggcgaggcttgcggccaaagctctggcttctgtgtcgggcactgagtaccaagtgggtcccacctgcaccactgtctatccagctagcgggagcagcatcgactgggcatatgacaacggcatcaaatttgcattcacatttgagttgagagataccgggacctatggcttcctcctgccagctaaccagatcatccccactgcagaggagacgtggctggggctgaagaccatcatggagcatgtgcgggacaacctctactaggcgatggctctgctctgtctacatttatttgtacccacacgtgcacgcactgaggccattgttaaaggagctctttcctacctgtgtgagtcagagccctctgggtttgtggagcacacaggcctgcccctctccagccagctccctggagtcgtgtgtcctggcagtgtccctgcaagaactggttctgccagcctgctcaattttggtcctgctgtttttgatgagccttttgtctgtttctccttccaccctgctggctgggcggctgcactcagcatcaccccttcctgggtggcatgtctctctctacctcatttttagaaccaaagaacatctgagatgattctctaccctcatccacatctagccaagccagtgaccttgctctggtggcactgtgggagacaccacttgtctttaggtgggtctcaaagatgatgtagaatttcctttaatttctcgcagtcttcctggaaaatattttcctttgagcagcaaatcttgtagggatatcagtgaaggtctctccctccctcctctcctgtttttttttttttgagacagagttttgctcttgttgcccaggctggagtgtgatggctcgatcttggctcaccacaacctctgcctcctgggttcaagcaattctcctgcctcagcctcttgagtagcttggtttataggcgcatgccaccatgcctggctaattttgtgtttttagtagagacagggtttctccatgttggtcaggctggtctcaaactcccaacctcaggtgatctgccctccttggcctcccagagtgctgggattacaggtgtgagccactgtgccgggcccgtcccctccttttttaggcctgaatacaaagtagaagatcactttccttcactgtgctgagaatttctagatactacagttcttactcctctcttccctttgttattcagtgtgaccaggatggcgggaggggatctgtgtcactgtaggtactgtgcccaggaaggctgggtgaagtgaccatctaaattgcaggatggtgaaattatccccatctgtcctaatgggcttacctcctctttgccttttgaactcacttcaaagatctaggcctcatcttacaggtcctaaatcactcatctggcctggataatctcactgccctggcacattcccatttgtgctgtggtgtatcctgtgtttccttgtcctggtttgtgtgtgtgtgtgtgtgtgtgtgtgtgtgtgtgtgtgtgtttgtgtgtgtgtgtctgtctattttgtatcctggaccacaagttcctaagtagagcaagaattcatcaaccagctgcctcttgtttcatttcacctcagcacgtaccatctgtccttttgttgttgttttgtttttgtttttttgcttttaccaaacatgtctgtaaatcttaacctcctgcctaggatttgtacagcatctggtgtgtgcttataagccaataaatattcaatgtgagtttc

SEQ ID NO: 4599 - DNA, 2718 bp, Homo sapiens
  source 1..2718: mol_type = unassigned DNA
ataaatacagcttgactcagccactgtatgactgactccccggggacatgaggtggatactgttcattggggcccttattgggtccagcatctgtggccaagaaaaattttttggggaccaagttttgaggattaatgtcagaaatggagacgagatcagcaaattgagtcaactagtgaattcaaacaacttgaagctcaatttctggaaatctccctcctccttcaatcggcctgtggatgtcctggtcccatctgtcagtctgcaggcatttaaatccttcctgagatcccagggcttagagtacgcagtgacaattgaggacctgcagatttaccacgagatggacaacattgccgcagactttcctgacctggcgaggagggtgaagattggacattcgtttgaaaaccggccgatgtatgtactgaagttcagcactgggaaaggcgtgaggcggccggccgtttggctgaatgcaggcatccattcccgagagtggatctcccaggccactgcaatctggacggcaaggaagattgtatctgattaccagagggatccagctatcacctccatcttggagaaaatggatattttcttgttgcctgtggccaatcctgatggatatgtgtatactcaaactcaaaaccgattatggaggaagacgcggtcccgaaatcctggaagctcctgcattggtgctgacccaaatagaaactggaacgctagttttgcaggaaagggagccagcgacaacccttgctccgaagtgtaccatggaccccacgccaattcggaagtggaggtgaaatcagtggtagatttcatccaaaaacatgggaatttcaagggcttcatcgacctgcacagctactcgcagctgctgatgtatccatatgggtactcagtcaaaaaggccccagatgccgaggaactcgacaaggtggcgaggcttgcggccaaagctctggcttctgtgtcgggcactgagtaccaagtgggtcccacctgcaccactgtctatccagctagcgggagcagcatcgactgggcatatgacaacggcatcaaatttgcattcacatttgagttgagagataccgggacctatggcttcctcctgccagctaaccagatcatccccactgcagaggagacgtggctggggctgaagaccatcatggagcatgtgcgggacaacctctactaggcgatggctctgctctgtctacatttatttgtacccacacgtgcacgcactgaggccattgttaaaggagctctttcctacctgtgtgagtcagagccctctgggtttgtggagcacacaggcctgcccctctccagccagctccctggagtcgtgtgtcctggcagtgtccctgcaagaactggttctgccagcctgctcaattttggtcctgctgtttttgatgagccttttgtctgtttctccttccaccctgctggctgggcggctgcactcagcatcaccccttcctgggtggcatgtctctctctacctcatttttagaaccaaagaacatctgagatgattctctaccctcatccacatctagccaagccagtgaccttgctctggtggcactgtgggagacaccacttgtctttaggtgggtctcaaagatgatgtagaatttcctttaatttctcgcagtcttcctggaaaatattttcctttgagcagcaaatcttgtagggatatcagtgaaggtctctccctccctcctctcctgtttttttttttttgagacagagttttgctcttgttgcccaggctggagtgtgatggctcgatcttggctcaccacaacctctgcctcctgggttcaagcaattctcctgcctcagcctcttgagtagcttggtttataggcgcatgccaccatgcctggctaattttgtgtttttagtagagacagggtttctccatgttggtcaggctggtctcaaactcccaacctcaggtgatctgccctccttggcctcccagagtgctgggattacaggtgtgagccactgtgccgggcccgtcccctccttttttaggcctgaatacaaagtagaagatcactttccttcactgtgctgagaatttctagatactacagttcttactcctctcttccctttgttattcagtgtgaccaggatggcgggaggggatctgtgtcactgtaggtactgtgcccaggaaggctgggtgaagtgaccatctaaattgcaggatggtgaaattatccccatctgtcctaatgggcttacctcctctttgccttttgaactcacttcaaagatctaggcctcatcttacaggtcctaaatcactcatctggcctggataatctcactgccctggcacattcccatttgtgctgtggtgtatcctgtgtttccttgtcctggtttgtgtgtgtgtgtgtgtgtgtgtgtgtgtgtgtgtgtgtgtttgtgtgtgtgtgtctgtctattttgtatcctggaccacaagttcctaagtagagcaagaattcatcaaccagctgcctcttgtttcatttcacctcagcacgtaccatctgtccttttgttgttgttttgtttttgtttttttgcttttaccaaacatgtctgtaaatcttaacctcctgcctaggatttgtacagcatctggtgtgtgcttataagccaataaatattcaatgtgagtttca

SEQ ID NO: 4600 - DNA, 1621 bp, Homo sapiens
  source 1..1621: mol_type = unassigned DNA
tgactgactccccggggacatgaggtggatactgttcattggggcccttattgggtccagcatctgtggccaagaaaaattttttggggaccaagttttgaggattaatgtcagaaatggagacgagatcagcaaattgagtcaactagtgaattcaaacaacttgaagctcaatttctggaaatctccctcctccttcaatcggcctgtggatgtcctggtcccatctgtcagtctgcaggcatttaaatccttcctgagatcccagggcttagagtacgcagtgacaattgaggacctgcaggcccttttagacaatgaagattgtatctgattaccagagggatccagctatcacctccatcttggagaaaatggatattttcttgttgcctgtggccaatcctgatggatatgtgtatactcaaactcaaaaccgattatggaggaagacgcggtcccgaaatcctggaagctcctgcattggtgctgacccaaatagaaactggaacgctagttttgcaggaaagggagccagcgacaacccttgctccgaagtgtaccatggaccccacgccaattcggaagtggaggtgaaatcagtggtagatttcatccaaaaacatgggaatttcaagggcttcatcgacctgcacagctactcgcagctgctgatgtatccatatgggtactcagtcaaaaaggccccagatgccgaggaactcgacaaggtggcgaggcttgcggccaaagctctggcttctgtgtcgggcactgagtaccaagtgggtcccacctgcaccactgtctatccagctagcgggagcagcatcgactgggcatatgacaacggcatcaaatttgcattcacatttgagttgagagataccgggacctatggcttcctcctgccagctaaccagatcatccccactgcagaggagacgtggctggggctgaagaccatcatggagcatgtgcgggacaacctctactaggcgatggctctgctctgtctacatttatttgtacccacacgtgcacgcactgaggccattgttaaaggagctctttcctacctgtgtgagtcagagccctctgggtttgtggagcacacaggcctgcccctctccagccagctccctggagtcgtgtgtcctggcagtgtccctgcaagaactggttctgccagcctgctcaattttggtcctgctgtttttgatgagccttttgtctgtttctccttccaccctgctggctgggcggctgcactcagcatcaccccttcctgggtggcatgtctctctctacctcatttttagaaccaaagaacatctgagatgattctctaccctcatccacatctagccaagccagtgaccttgctctggtggcactgtgggagacaccacttgtctttaggtgggtctcaaagatgatgtagaatttcctttaatttctcgcagtcttcctggaaaatattttcctttgagcagcaaatcttgtagggatatcagtgaaggtctctccctccctcctctcctgtttttttttttttgagacagagttttgctcttgttgcccaggctggagtgtgatggctcgatcttggctcaccaca

SEQ ID NO: 4601 - DNA, 1616 bp, Homo sapiens
  source 1..1616: mol_type = unassigned DNA
aagatcaggctcagctgctgctgctgctgctgctgcttgtcccaagaccaagtcgtaatagcaacttcccttcctcagctgcctgaactttttttttcccttgtagctggagagaagtgtcacattttgctcactctcaaccttcctcgcccacccccttcccggagaacctgtgcggtgtgtagagggtgctgtgagccacctccagcctcgggtggctgcttaagtaactttcaactcctctcttcttaacactatgaagtgtctcgggaagcgcaggggccaggcagctgctttcctgcctctttgctggctctttttgaagattctgcaaccggggcacagccacctttataacaaccgctatgctggtgataaagtgataagatttattcccaaaacagaagaggaagcatatgcactgaagaaaatatcctatcaacttaaggtggacctgtggcagcccagcagtatctcctatgtatcagagggaacagttactgatgtccatatcccccaaaatggttcccgagccctgttagccttcttacaggaagccaacatccagtacaaggtcctcatagaagatcttcagaaaacactggagaagggaagcagcttgcacacccagagaaaccgaagatccctctctggatataattatgaagtttatcactccttagaagaaattcaaaattggatgcatcatctgaataaaactcactcaggcctcattcacatgttctctattggaagatcatatgagggaagatctctttttattttaaagctgggcagacgatcacgactcaaaagagctgtttggatagactgtggtattcatgcaagagaatggattggtcctgccttttgtcagtggtttgtaaaagaagctcttctaacatataagagtgacccagccatgagaaaaatgttgaatcatctatatttctatatcatgcctgtgtttaacgtcgatggataccattttagttggaccaatgatcgattttggagaaaaacaaggtcaaggaactcaaggtttcgctgccgtggagtggatgccaatagaaactggaaagtgaagtggtgtgatgtgagctctggtagctcaatggattgggcctacaaaaatggaataccttatgcatttgctttcgaactacgtgacactggatattttggatttttactcccagagatgctcatcaaacccacctgtacagaaactatgctggctgtgaaaaatatcacaatgcacctgctaaagaaatgtccctgagacagcccaaggctcaggtcaactgccataggattctgagcaaggcctacttggccctggatagaaattgttttcaaagagaagggcagctgcttagagtgaacatgtctatggactttaaaaagaccccacgcaatttgactttgtggcaatagaaaacagtaaaaaacagggcatagcctagtttgttataagaaaaagcatccattttctatccttttagagtcttatttgattatggtgggagggaatgttttcaaatttcccatttctcaagaaatgttcatattaattgaggatttcccttcaataaatctcatgtcctcaattagga

SEQ ID NO: 4602 - DNA, 1861 bp, Homo sapiens
  source 1..1861: mol_type = unassigned DNA
cccaagaccaagtcgtaatagcaacttcccttcctcagctgcctgaactttttttttcccttgtagctggagagaagtgtcacattttgctcactctcaaccttcctcgcccacccccttcccggagaacctgtgcggtgtgtagagggtgctgtgagccacctccagcctcgggtggctgcttaagtaactttcaactcctctcttcttaacactatgaagtgtctcgggaagcgcaggggccaggcagctgctttcctgcctctttgctggctctttttgaagattctgcaaccggggcacagccacctttataacaaccgctatgctggtgataaagtgataagatttattcccaaaacagaagaggaagcatatgcactgaagaaaatatcctatcaacttaaggtggacctgtggcagcccagcagtatctcctatgtatcagagggaacagttactgatgtccatatcccccaaaatggttcccgagccctgttagccttcttacaggaagccaacatccagtacaaggtcctcatagaagatcttcagaaaacactggagaagggaagcagcttgcacacccagagaaaccgaagatccctctctggatataattatgaagtttatcactccttagaagaaattcaaaattggatgcatcatctgaataaaactcactcaggcctcattcacatgttctctattggaagatcatatgagggaagatctctttttattttaaagctgggcagacgatcacgactcaaaagagctgtttggatagactgtggtattcatgcaagagaatggattggtcctgccttttgtcagtggtttgtaaaagaagctcttctaacatataagagtgacccagccatgagaaaaatgttgaatcatctatatttctatatcatgcctgtgtttaacgtcgatggataccattttagttggaccaatgatcgattttggagaaaaacaaggtcaaggaactcaaggtttcgctgccgtggagtggatgccaatagaaactggaaagtgaagtggtgtgatgaaggagcttctatgcacccttgtgatgacacatactgtggcccttttccagaatctgagccggaagtgaaggctgtagctaacttccttcgaaaacacagaaagcacattagggcttatctctcctttcatgcatatgctcagatgttactgtatccctattcttacaaatatgcaacaattcccaattttagatgtgtggaatctgcagcttataaagctgtgaatgcacttcagtcagtatacggggtacgatacagatatggaccagcctccacaacgttgtatgtgagctctggtagctcaatggattgggcctacaaaaatggaataccttatgcatttgctttcgaactacgtgacactggatattttggatttttactcccagagatgctcatcaaacccacctgtacagaaactatgctggctgtgaaaaatatcacaatgcacctgctaaagaaatgtccctgagacagcccaaggctcaggtcaactgccataggattctgagcaaggcctacttggccctggatagaaattgttttcaaagagaagggcagctgcttagagtgaacatgtctatggactttaaaaagaccccacgcaatttgactttgtggcaatagaaaacagtaaaaaacagggcatagcctagtttgttataagaaaaagcatccattttctatccttttagagtcttatttgattatggtgggagggaatgttttcaaatttcccatttctcaagaaatgttcatattaattgaggatttcccttcaataaatctcatgtcctcaatta

SEQ ID NO: 4603 - DNA, 1538 bp, Homo sapiens
  source 1..1538: mol_type = unassigned DNA
caagaccaagtcgtaatagcaacttcccttcctcagctgcctgaactttttttttcccttgtagctggagagaagtgtcacattttgctcactctcaaccttcctcgcccacccccttcccggagaacctgtgcggtgtgtagagggtgctgtgagccacctccagcctcgggtggctgcttaagtaactttcaactcctctcttcttaacactatgaagtgtctcgggaagcgcaggggccaggcagctgctttcctgcctctttgctggctctttttgaagattctgcaaccggggcacagccacctttataacaaccgctatgctggtgataaagtgataagatttattcccaaaacagaagaggaagcatatgcactgaagaaaatatcctatcaacttaaggtggacctgtggcagcccagcagtatctcctatgtatcagagggaacagttactgatgtccatatcccccaaaatggttcccgagccctgttagccttcttacaggaagccaacatccagtacaaggtcctcatagaagatcttcagaaaacactggagaagggaagcagcttgcacacccagagaaaccgaagatccctctctggatataattatgaagtttatcactccttagaagaaattcaaaattggatgcatcatctgaataaaactcactcaggcctcattcacatgttctctattggaagatcatatgagggaagatctctttttattttaaagctgggcagacgatcacgactcaaaagagctgtttggatagactgtggtattcatgcaagagaatggattggtcctgccttttgtcagtggtttgtaaaagaagctcttctaacatataagagtgacccagccatgagaaaaatgttgaatcatctatatttctatatcatgcctgtgtttaacgtcgatggataccattttagttggaccaatgatcgattttggagaaaaacaaggtcaaggaactcaaggtttcgctgccgtggagtggatgccaatagaaactggaaagtgaagtggtgtggtaagtttgggaccaactgggatccagatccaaaggtttctgcaggttttactctgcaaaatatgagtccagaggactctcatgggagactcatgtttttctgtatgtgaaaacctggtagagaaaggtacagatacgtacatgatagctgtaattggcaaaagaaaatgaaaggattcttttttaatatataaaaatcaaggattttaaatatgtcaattcggtcctgaaaactgaaaatttaaatacatatgtaaaagcagcaaactgaggaatatttgtcattccccaaattaaaacatgaaccgtggtgtagtataattctggttaaatctttttatccttttcatacaagcaccactgatgctgcattcggctgtctgtcgtggtcagagctgtcatgaccttgtctatattctaccactctgctggtcatacgtggattgaccatgcacattgggaatgtatttctgctgcattccatgt

SEQ ID NO: 4604 - DNA, 1717 bp, Homo sapiens
  source 1..1717: mol_type = unassigned DNA
agaaaattgctgttgggatgaagctttgcagccttgcagtccttgtacccattgttctcttctgtgagcagcatgtcttcgcgtttcagagtggccaagttctagctgctcttcctagaacctctaggcaagttcaagttctacagaatcttactacaacatatgagattgttctctggcagccggtaacagctgaccttattgtgaagaaaaaacaagtccatttttttgtaaatgcatctgatgtcgacaatgtgaaagcccatttaaatgtgagcggaattccatgcagtgtcttgctggcagatgtggaagatcttattcaacagcagatttccaacgacacagtcagcccccgagcctccgcatcgtactatgaacagtatcactcactaaatgaaatctattcttggatagaatttataactgagaggcatcctgatatgcttacaaaaatccacattggatcctcatttgagaagtacccactctatgttttaaaggtttctggaaaagaacaagcagccaaaaatgccatatggattgactgtggaatccatgccagagaatggatctctcctgctttctgcttgtggttcataggccatataactcaattctatgggataatagggcaatataccaatctcctgaggcttgtggatttctatgttatgccagtggttaatgtggatggttatgactactcatggaaaaagaatcgaatgtggagaaagaaccgttctttctatgcgaacaatcattgcatcggaacagacctgaataggaactttgcttccaaacactggtgtgaggaaggtgcatccagttcctcatgctcggaaacctactgtggactttatcctgagtcagaaccagaagtgaaggcagtggctagtttcttgagaagaaatatcaaccagattaaagcatacatcagcatgcattcatactcccagcatatagtgtttccatattcctatacacgaagtaaaagcaaagaccatgaggaactgtctctagtagccagtgaagcagttcgtgctattgagaaaattagtaaaaataccaggtatacacatggccatggctcagaaaccttatacctagctcctggaggtggggacgattggatctatgatttgggcatcaaatattcgtttacaattgaacttcgagatacgggcacatacggattcttgctgccggagcgttacatcaaacccacctgtagagaagcttttgccgctgtctctaaaatagcttggcatgtcattaggaatgtttaatgcccctgattttatcattctgcttccgtattttaatttactgattccagcaagaccaaatcattgtatcaaattatttttaagttttatccgtagttttgataaaagattttcctattccttggttctgtcagagaacctaataagtgctactttgccattaaggcagactagggttcatgtctttttaccctttaaaaaaaattgtaaaagtctagttacctactttttctttgattttcgacgtttgactagccatctcaagcaagtttcgacgtttgactagccatctcaagcaagtttaatcaatgatcatctcacgctgatcattggatcctactcaacaaaaggaagggtggtcagaagtacattaaagatttctgctccaaattttcaataaatttctgcttgtgcctttagaaatacaa

SEQ ID NO: 4605 - DNA, 1544 bp, Homo sapiens
  source 1..1544: mol_type = unassigned DNA
agaaaattgctgttgggatgaagctttgcagccttgcagtccttgtacccattgttctcttctgtgagcagcatgtcttcgcgtttcagagtggccaagttctagctgctcttcctagaacctctaggcaagttcaagttctacagaatcttactacaacatatgagattgttctctggcagccggtaacagctgaccttattgtgaagaaaaaacaagtccatttttttgtaaatgcatctgatgtcgacaatgtgaaagcccatttaaatgtgagcggaattccatgcagtgtcttgctggcagatgtggaagatcttattcaacagcagatttccaacgacacagtcagcccccgagcctccgcatcgtactatgaacagtatcactcactaaatgaaatctattcttggatagaatttataactgagaggcatcctgatatgcttacaaaaatccacattggatcctcatttgagaagtacccactctatgttttaaaggtttctggaaaagaacaagcagccaaaaatgccatatggattgactgtggaatccatgccagagaatggatctctcctgctttctgcttgtggttcataggccataatcgaatgtggagaaagaaccgttctttctatgcgaacaatcattgcatcggaacagacctgaataggaactttgcttccaaacactggtgtgaggaaggtgcatccagttcctcatgctcggaaacctactgtggactttatcctgagtcagaaccagaagtgaaggcagtggctagtttcttgagaagaaatatcaaccagattaaagcatacatcagcatgcattcatactcccagcatatagtgtttccatattcctatacacgaagtaaaagcaaagaccatgaggaactgtctctagtagccagtgaagcagttcgtgctattgagaaaattagtaaaaataccaggtatacacatggccatggctcagaaaccttatacctagctcctggaggtggggacgattggatctatgatttgggcatcaaatattccgttacatcaaacccacctgtagagaagcttttgccgctgtctctaaaatagcttggcatgtcattaggaatgtttaatgcccctgattttatcattctgcttccgtattttaatttactgattccagcaagaccaaatcattgtatcaaattatttttaagttttatccgtagttttgataaaagattttcctattccttggttctgtcagagaacctaataagtgctactttgccattaaggcagactagggttcatgtctttttaccctttaaaaaaaattgtaaaagtctagttacctactttttctttgattttcgacgtttgactagccatctcaagcaagtttcgacgtttgactagccatctcaagcaagtttaatcaatgatcatctcacgctgatcattggatcctactcaacaaaaggaagggtggtcagaagtacattaaagatttctgctccaaattttcaataaatttctgcttgtgccttt

SEQ ID NO: 4606 - DNA, 9098 bp, Homo sapiens
  source 1..9098: mol_type = unassigned DNA
gccgcccggagcgctgagccgcgggagcggagccggggttagcggcgctgctggaagatggcgagcggccgggacgagcggccgccttggcggctagggcggctcctgttgctcatgtgcctgctgctgctggggagctcggcccgggcggctcacatcaagaaggcggaggcgactaccacaactacgagcgcgggcgccgaggcggccgagggccagttcgaccgctactaccacgaagaggagttggagtcggcgctgagggaggcggcggccgcgggcctccccggcctggcccgcctctttagcatcggccgctcggtggaaggccggccgctgtgggtgcttcgcctcaccgccggcctggggtcgctaatccctgagggcgacgcggggcctgacgctgccgggcccgacgctgcggggccgctgctgcccggccggccccaggtgaagctggtgggcaacatgcatggcgacgagaccgtgtcgcgccaggtgttgatctacttggcccgcgagctggcggccggctaccgccgcggggacccgcgcctggtccgcctgctcaacaccaccgacgtgtacctgctgcccagcctcaaccccgatggcttcgagcgtgcccgcgagggcgactgtggcttcggcgacggcggcccgtccggggccagcggccgcgacaatagtcgcggccgcgacctcaaccgaagctttcccgaccagtttagcaccggcgaaccccccgccctggacgaggtgcccgaggtgcgcgccctcatcgagtggatccgcaggaacaagtttgtgctttctggaaatctgcatggtggctcagtggtagcaagctatccttttgatgattctccagaacataaggccactggaatctatagcaaaacctcagatgatgaagtatttaaatacttggcaaaagcttatgcttcaaaccaccccataatgaaaactggtgagcctcattgtccaggagatgaagacgagactttcaaagatggaatcacaaacggcgcacattggtatgatgtggaaggtggtatgcaagattacaattatgtgtgggccaactgttttgagatcacattagaactgtcttgttgcaagtacccacctgcttcacagcttcgacaggaatgggagaacaatcgtgagtctttgatcacattgattgaaaaggttcacattggagtgaaaggatttgttaaagattccataacaggatctgggttagagaatgcaaccatctcagtggctggtattaatcataatatcacaacaggcagatttggtgatttctaccgattacttgttcctggaacttacaaccttacagtagttttaactgggtatatgccattgactgttactaatgtagtggtgaaagaaggaccagccacagaggtggatttttctcttaggccaactgtaacttcagtaatccctgacacgacagaggctgtatcaactgctagcacagttgctatacctaatattctttctggaacatcatcctcctaccagccaattcagccaaaggactttcaccaccaccatttccctgatatggaaatcttcttgagaaggtttgccaatgaatatcctaacattacccggctttattccttgggaaaatcagtagagtcaagagaactttatgtgatggagatatctgataatccgggtgtccatgaaccaggtgaaccagaatttaagtacattggaaatatgcatggaaatgaagtggttggaagagaactgctgttgaacctcatagaatacctttgtaagaactttggaacagaccctgaagtcacagatttggttcataacactagaattcaccttatgccatccatgaatcctgatgggtatgaaaagtcccaggaaggagattcaataagtgtaattggcagaaacaacagcaacaactttgacctgaaccgaaatttcccagaccagtttgttcagatcacagatcctacgcaaccagaaactattgctgtaatgagctggatgaagtcctatccatttgtactttcagcaaacctgcatggaggttctttggtggttaactacccttttgatgatgatgaacaaggacttgccacatatagtaaatcaccagatgatgctgtgttccaacaaatagcactttcttattccaaggaaaattcccagatgtttcaaggtagaccttgcaagaatatgtatcctaatgaatattttcctcatggaataacaaatggagctagttggtataatgtgccaggaggaatgcaggactggaactatttacaaacaaattgctttgaagtgactattgaactaggttgtgtgaaatatccacttgagaaagagctgccaaacttttgggaacagaatcgaagatcactaatccagtttatgaaacaggttcatcagggcgtcagaggatttgttctagatgccacagatggcaggggtatattaaatgccaccattagtgttgctgagattaatcacccagtgactacttacaaaactggagattactggcgtctcttggttccaggaacttataaaatcacagcatctgctcgagggtataatccagttaccaagaatgtgactgtcaagagtgaaggcgctattcaggtcaacttcacacttgttcgatcctcaacagattcaaacaatgaatcaaagaaaggaaaaggggctagcagcagcaccaatgatgccagtgatccaactactaaagagtttgaaactttaattaaagacctttcagcggagaatggtttggaaagcctcatgttacgctcctcctcaaatctggctctggctctttatcgataccattcctacaaagacttatcagagtttctgagaggacttgtaatgaactatccacatattacaaatcttaccaatttgggacagagcactgaatatcgtcacatttggtcccttgaaatctccaataagcccaatgtatctgagcctgaagaaccaaagattcgttttgttgctggtatccatggaaatgcgccagttggaactgaactgcttttggctctggcagaatttctctgcctgaactacaaaaagaacccagctgttacccaattggttgacaggactaggattgtgattgtcccttctctaaatccagatgggcgagagagagctcaagagaaagactgtacttcaaaaataggacaaacaaatgctcgtggcaaagatttggatacagacttcacaaataatgcctcccaacctgagaccaaagccatcattgaaaatttgattcaaaaacaggactttagtctttctgttgccttagatggtggttccatgctggtcacatatccttatgacaagccagtacagacagtggaaaataaagagactctgaagcatttggcatctctttatgcaaataatcatccatccatgcacatgggtcagcccagttgcccaaataaatcagatgagaatattccaggaggagtaatgcgtggagcagaatggcatagtcacctgggcagcatgaaggattatagtgtcacctatggccattgtccggaaatcacagtatacacaagctgctgttactttcctagtgctgcacgactcccttccttgtgggcagacaataagagatctcttcttagtatgttagtggaggttcacaagggagttcatggatttgttaaagataagactggaaagccaatctctaaagcagtcattgtacttaatgaaggaataaaggtacaaacaaaagagggaggttatttccatgtactcttagcgccaggtgtccataacattattgccatcgctgatgggtaccagcaacaacattcacaggtctttgtgcatcatgatgcagctagttctgtggtgatagtctttgacacagataaccggatatttggtttgccaagggagcttgtggtaactgtatcaggtgctactatgtcggcattgatcctaacagcttgcattatttggtgcatctgctcaatcaagtctaatagacacaaggatggctttcatcggctcaggcagcatcatgatgagtatgaagatgaaattcgcatgatgtctaccggctccaagaagtccctcctaagccatgagttccaggatgaaacagacactgaagaggaaacattatattctagcaaacattgaaaaacacattttgcatatctcccagcataagtaccaagcaaaattacagttcctcttgggagaacactgcattaagaagagagactctcttgcttcttcaaagagctttgggaaattaaattgctaaatttgtattctctgtgaatttcactggcagttttgaacttcccttccttaaagtactctaaacctttaaaaaaaaatctgatttatgcagcagagatgggacagccactttttctttttaatttaagatgagctatttggagcttatgtaataatggcataaagccaactagaggatgttgtattttgcacatcagatgtttactagtggctttagtatttttctttgttttaaatggccaaaagaatccagaaacattaaggcagggacagcagtcagaatcgacataaagctttaaaaactcaaggttttttcaacctactgaggagtacttttctctagttgttaaatagctggagtttttcttattcaggtttaatggaggttgaattgatttttaaacacatataacagtaggaaatgaataaatgggcttctgcatttggctttctacctgttccaaggctagatcggaactggtagactacgctgtaagcaggatttcactacctctcttaaggtttagcaaacttctaaatagcccattttaagggagaacttactaactttattgtgaaaggtctaaatgcccacttgaatgaagctgagagagagatctagcaaaagctaaaactcatgttgtctatctttgaacttggtaaaaacccacaggtgctgctgcttatatctgtgaagcactagcttattctaggaatgcctgattctttaatattgcctaaatcggaacctttttctatgttgcacacatggttttcagatgacccagccatctacaagatctgaattctactgaaaatatctagaaatgtggaagagacctacttgcacattcttaacctgtatttgaacacaaaatatctatacttcatgctccagcccaagcctataccctgtaatagcatactattattgaaatcgcttgaccggtcttgttcacataggcctctgggagtgatttggttctttgccctaatgtttcatttgacggtctctttttgatcaaccaatttttctaaaagttcagtcgaaagcttttaagtatagcttcctcccttgaaaaaaaatgtaaactatgactgctgagtgataaaacactgtggtgtgaaagtgtcatcttcactgccaatcaggcaaagaccggaaagatttgcattttattatgtctgtcttatcatgcaatggaaatgatgctttttgtaagtatgcatcttaccaatgatgtaacggtttaatacctttgaatgttttaataaccaagttgctgctgaacttatactaaatcaggggaccaaaaaacttgctcttatcttctcaaattgtattctatatccattaatgtatcagttatcccaaagccttcaggtggaggggtttaccaccttcctaggtcgttcaaccaggttttgtgaggaatgcattcaaagtggctttataaaagaagattttctttagcaagaataatgaggtcatgtcatttgttaataagtatctgtgataaatccgtggttcaaggttaagccattctggtattctggtattagcaactgtaaattctgccacctcatacatggaacagagcttgtgggatgctaatagttagtgaagtatacatgatttaatttctaataatctttatgttttctttaaggatggtggtgtattgctctttttcagctttatttttaagagtacagtcaggaaaccaacaaggggcctaagagtggctgcccctgcttgggacattacagcaagtgaaacaaagttaatgtgacaagctttgctttgttatcattggtcttcactagaggataccttttacatgtacttctctcttggatcaaatatgtctttaactgtacatctcagtggctggaggccatgccttttaagcatgtgtaaaatttttaaagaaatgaacatacacatagttattttagtaatatttcctgaaagaaaaaccaaattctgctataagtcttgatcttcaatgaacttttaaataatgcatttagctggaaaacaagactttcccagcttgtattacctagaagcgtgaatgtataggatacctgactactaagactatattctcagccctgccctgtcttttatttgcgggtctaatctaatattagaatatattaaccgcttaaggcattgaagccatatgggatggggaatgcatttcttcagtgtttctccgagagactttccatttccttggagttatggcggcaagtaagtatcatagtattaagaaatttgcctaaatctgagttgtgcctttctttactcacaaggcatgggctttgtcctggtgatcagtttgtaagccttcttccttcccagctccttaataaaagcaaagtgattgagtaggtaatgttcaaagtgtctgcctgtgtacatgtacttgtattgattatgtagttcagtaagatgtgcccaagtcatttcagaaagaaagacccttcagttttgatgcattttgctgaacacttgggtagtgagtgggatcctatccagttgaggaatgcttgcaatgctcattgaagggatttgctttgggactttgtcatcttccagaaaggaaacatattgtatatttggcccagtgtgattgattgctttatctttggtaacttttacttgaatgggatttgctgaattaatgactattgaatttaaaactaattatgagttgacaaataaataaaaggtagtgtttatgtctgagcttattgtgtttgagctaacaccaggttactcagtaaccatgacctgctcctccatttccatttattctcaacattaaatagttttatcttgttgttgccagaaatgcacttgtgccaggtattgtccctgctgtatgaaaagcttcttggcaatgaattctgtaatagtgccctacattatggttttctggtggaattgttttaacagtgacaacccaggatttccaatatatttttgttttattgttattaccaaaaattccactatgattgatgttcagtgattttctatagcaacttttttggtaactctttgggtttctgatttgttttagctaaaattttggggatatgatttgggtctttgattaatgtcagctgaacttggatttctagttcatgaagaaatctctcccaatacccatttatcctatttttagcaataattcgttaatgattccacttgattttcagaatattgtcctggttgattttgatttgacagcatacattatgaaatttgaaagtaggttaccattttgaggcagttggatataaattatgtaaatatgtatgattatgatttttataaatggcataacatgagtgtactaactaccttctatgctggccatgctacagattttctggaggtatgacaatagtatttttttatgctcagattaaaaatcagcttttcacctctccagtttttccaagtgatactcccagttctagagcaatctacagctgtttatgtgaggtgcccaacacccattcatctcaagtgcttcagtctttggtttatttcatgcactgtgccttcaaaatgaaatttttaaaagggactttaaatgaagttgaatagtagtttttaaaagtcaatttgtaatttatgtgaaatctaactgtaatgaggtcctttctgttttttatatgtaaacagatctactaatcctgtataaaagttattttacgatgtttgtctttctttgtgttttgtctcataatcttttttcagatgcaatatgccggaaaaagttataggtccagtttgaaaattatttagtttttctgcctatgctagtggaaaaatagtaccaggatcagaatacagggtatcacctatggaatgtttctgtatttatgaattgactcaaaagaaagctttgtttctgaaatcgcattatgtagtagccacagttttctgtttgtagctcagctagattgttatatatgttcaatcatttcacaataacaacacaaaactggtcattgaaaggtttttatgtacgcattttaaacttgttcgttaaaaatttggtcctttttccaggtgaggcccagttagaataatgtgtcccggcacttttaggcacagcaaggatgaattcaatatccccttttcacttagcaacaatgtgttacttctaccctaataggaattgggaaagcaaagttgtatgagaaacagactctgctgataaagtactcatagtccagaccagagaaatataaatggaaataggttatatttcaatagtgattggttcatctaaaagtctctgctgtaaaggaaataaagcatagaggtttgagcatggactttggagttggaccaatctgtgactgattcttcgttctgctacttgcttccaatgtgaccttgtacaagtttcttgacattctctgagcctcagtttctctactggttgaataatccttgataggattgcagtggaaaattaaatgaaataatgttagcaaaggtcccaacataatatttgacttggaattgaatgcccatggtaaccagcatcattttccttcatgtgatgtcttcttatgcctttgaaagaaagttactttatcaaatgtataaataaagatctgtttataggtgatctttttaatttagaagaaattctgagacacaaataaaaaaagaaattttttattatgtggttcaatagattgtctaaagcatggcagtaaagttttaattatgccaa

SEQ ID NO: 4607 - DNA, 3953 bp, Homo sapiens
  source 1..3953: mol_type = unassigned DNA
agtgtggctgggacttagaattaggcaatctgattcccgatagtcctcttagccacggagggacactggagcccaaaaatggcagatgatattcccaggatcttccccttgcctatttgacagaagctgatttttctccaatttttacctctgactcagcttaagaagatatggacttagctggagaacttgcacagatctgtgagccgcttcattttagactctgaagggtttgtgatgtcatttgtgcaccttattagcctgggcagaatggctaatggtcacacttctaatacacactttaagtgttattaagcattgcatgaggtttaaaaaattacaaagtagaagaaggaggacctcaagaaattagtataaaacaagagaatgttataaatatttatgaggtttgtgctttctggaaatctgcatggtggctcagtggtagcaagctatccttttgatgattctccagaacataaggccactggaatctatagcaaaacctcagatgatgaagtatttaaatacttggcaaaagcttatgcttcaaaccaccccataatgaaaactggtgagcctcattgtccaggagatgaagacgagactttcaaagatggaatcacaaacggcgcacattggtatgatgtggaaggtggtatgcaagattacaattatgtgtgggccaactgttttgagatcacattagaactgtcttgttgcaagtacccacctgcttcacagcttcgacaggaatgggagaacaatcgtgagtctttgatcacattgattgaaaaggttcacattggagtgaaaggatttgttaaagattccataacaggatctgggttagagaatgcaaccatctcagtggctggtattaatcataatatcacaacaggcagatttggtgatttctaccgattacttgttcctggaacttacaaccttacagtagttttaactgggtatatgccattgactgttactaatgtagtggtgaaagaaggaccagccacagaggtggatttttctcttaggccaactgtaacttcagtaatccctgacacgacagaggctgtatcaactgctagcacagttgctatacctaatattctttctggaacatcatcctcctaccagccaattcagccaaaggactttcaccaccaccatttccctgatatggaaatcttcttgagaaggtttgccaatgaatatcctaacattacccggctttattccttgggaaaatcagtagagtcaagagaactttatgtgatggagatatctgataatccgggtgtccatgaaccaggtgaaccagaatttaagtacattggaaatatgcatggaaatgaagtggttggaagagaactgctgttgaacctcatagaatacctttgtaagaactttggaacagaccctgaagtcacagatttggttcataacactagaattcaccttatgccatccatgaatcctgatgggtatgaaaagtcccaggaaggagattcaataagtgtaattggcagaaacaacagcaacaactttgacctgaaccgaaatttcccagaccagtttgttcagatcacagatcctacgcaaccagaaactattgctgtaatgagctggatgaagtcctatccatttgtactttcagcaaacctgcatggaggttctttggtggttaactacccttttgatgatgatgaacaaggacttgccacatatagtaaatcaccagatgatgctgtgttccaacaaatagcactttcttattccaaggaaaattcccagatgtttcaaggtagaccttgcaagaatatgtatcctaatgaatattttcctcatggaataacaaatggagctagttggtataatgtgccaggaggaatgcaggactggaactatttacaaacaaattgctttgaagtgactattgaactaggttgtgtgaaatatccacttgagaaagagctgccaaacttttgggaacagaatcgaagatcactaatccagtttatgaaacaggttcatcagggcgtcagaggatttgttctagatgccacagatggcaggggtatattaaatgccaccattagtgttgctgagattaatcacccagtgactacttacaaaactggagattactggcgtctcttggttccaggaacttataaaatcacagcatctgctcgagggtataatccagttaccaagaatgtgactgtcaagagtgaaggcgctattcaggtcaacttcacacttgttcgatcctcaacagattcaaacaatgaatcaaagaaaggaaaaggggctagcagcagcaccaatgatgccagtgatccaactactaaagagtttgaaactttaattaaagacctttcagcggagaatggtttggaaagcctcatgttacgctcctcctcaaatctggctctggctctttatcgataccattcctacaaagacttatcagagtttctgagaggacttgtaatgaactatccacatattacaaatcttaccaatttgggacagagcactgaatatcgtcacatttggtcccttgaaatctccaataagcccaatgtatctgagcctgaagaaccaaagattcgttttgttgctggtatccatggaaatgcgccagttggaactgaactgcttttggctctggcagaatttctctgcctgaactacaaaaagaacccagctgttacccaattggttgacaggactaggattgtgattgtcccttctctaaatccagatgggcgagagagagctcaagagaaagactgtacttcaaaaataggacaaacaaatgctcgtggcaaagatttggatacagacttcacaaataatgcctcccaacctgagaccaaagccatcattgaaaatttgattcaaaaacaggactttagtctttctgttgccttagatggtggttccatgctggtcacatatccttatgacaagccagtacagacagtggaaaataaagagactctgaagcatttggcatctctttatgcaaataatcatccatccatgcacatgggtcagcccagttgcccaaataaatcagatgagaatattccaggaggagtaatgcgtggagcagaatggcatagtcacctgggcagcatgaaggattatagtgtcacctatggccattgtccggaaatcacagtatacacaagctgctgttactttcctagtgctgcacgactcccttccttgtgggcagacaataagagatctcttcttagtatgttagtggaggttcacaagggagttcatggatttgttaaagataagactggaaagccaatctctaaagcagtcattgtacttaatgaaggaataaaggtacaaacaaaagagggaggttatttccatgtactcttagcgccaggtgtccataacattattgccatcgctgatgggtaccagcaacaacattcacaggtctttgtgcatcatgatgcagctagttctgtggtgatagtctttgacacagataaccggatatttggtttgccaagggagcttgtggtaactgtatcaggtgctactatgtcggcattgatcctaacagcttgcattatttggtgcatctgctcaatcaagtctaatagacacaaggatggctttcatcggctcaggcagcatcatgatgagtatgaagatgaaattcgcatgatgtctaccggctccaagaagtccctcctaagccatgagttccaggatgaaacagacactgaagaggaaacattatattctagcaaacattgaaaaacacattttgcatatctcccagcataagtaccaagcaaaattacagttcctcttgggagaacactgcattaagaagagagactctcttgcttcttcaaagagctttgggaaattaaattgctaaatttgtattctctgtgaatttc

SEQ ID NO: 4608 - DNA, 2189 bp, Homo sapiens
  source 1..2189: mol_type = unassigned DNA
agtgcgcgggctgacactcattcagccggggaaggtgaggcgagtagaggctggtgcggaacttgccgcccccagcagcgccggcgggctaagcccagggccgggcagacaaaagaggccgcccgcgtaggaaggcacggccggcggcggcggagcgcagcgatggccgggcatgaggcggcgccggcggctgcagcaagaggacggcatctccttcgagtaccaccgctaccccgagctgcgcgaggcgctcgtgtccgtgtggctgcagtgcaccgccatcagcaggatttacacggtggggcgcagcttcgagggccgggagctcctggtcatcgagctgtccgacaaccctggcgtccatgagcctggtgagcctgaatttaaatacattgggaatatgcatgggaatgaggctgttggacgagaactgctcattttcttggcccagtacctatgcaacgaataccagaaggggaacgagacaattgtcaacctgatccacagtacccgcattcacatcatgccttccctgaacccagatggctttgagaaggcagcgtctcagcctggtgaactcaaggactggtttgtgggtcgaagcaatgcccagggaatagatctgaaccggaactttccagacctggataggatagtgtacgtgaatgagaaagaaggtggtccaaataatcatctgttgaaaaatatgaagaaaattgtggatcaaaacacaaagcttgctcctgagaccaaggctgtcattcattggattatggatattccttttgtgctttctgccaatctccatggaggagaccttgtggccaattatccatatgatgagacgcggagtggtagtgctcacgaatacagctcctccccagatgacgccattttccaaagcttggcccgggcatactcttctttcaacccggccatgtctgaccccaatcggccaccatgtcgcaagaatgatgatgacagcagctttgtagatggaaccaccaacggtggtgcttggtacagcgtacctggagggatgcaagacttcaattaccttagcagcaactgttttgagatcaccgtggagcttagctgtgagaagttcccacctgaagagactctgaagacctactgggaggataacaaaaactccctcattagctaccttgagcagatacaccgaggagttaaaggatttgtccgagaccttcaaggtaacccaattgcgaatgccaccatctccgtggaaggaatagaccacgatgttacatccgcaaaggatggtgattactggagattgcttacctggaaactataaacttacagcctcagctccaggctatctggcaataacaaagaaagtggcagttccttacagccctgctgctggggttgattttgaactggagtcattttctgaaaggaaagaagaggagaaggaagaattgatggaatggtggaaaatgatgtcagaaactttaaatttttaaaaaggcttctagttagctgctttaaatctatctatataatgtagtatgatgtaatgtggtcttttttttagattttgtgcagttaatacttaacattgatttattttttaatcatttaaatattaatcaactttccttaaaataaatagcctcttaggtaaaaatataagaacttgatatatttcattctcttatatagtattcattttcctacctatattacacaaaaaagtatagaaaagatttaagtaattttgccatcctaggcttaaatgcaatattcctggtattatttacaatgcagaattttttgagtaattctagctttcaaaaattagtgaagttcttttactgtaattggtgacaatgtcacataatgaatgctattgaaaaggttaacagatacagctcggagttgtgagcactctactgcaagacttaaatagttcagtataaattgtcgtttttttcttgtgctgactaactataagcatgatcttgttaatgcatttttgatgggaagaaaaggtacatgtttacaaagaggttttatgaaaagaataaaaattgacttcttgcttgtacatataggagcaatactattatattatgtagtccgttaacactacttaaaagtttagggttttctcttggttgtagagtggcccagaattgcattctgaatgaataaaggtt

SEQ ID NO: 4609 - DNA, 2421 bp, Homo sapiens
  source 1..2421: mol_type = unassigned DNA
gcccgtctctccgccggccccctcctcgcagtggtttctcctgcagctcccctgggctccgcggccagtagtgcagcccgtggagccgcggctttgcccgtctcctctgggtggccccagtgcgcgggctgacactcattcagccggggaaggtgaggcgagtagaggctggtgcggaacttgccgcccccagcagcgccggcgggctaagcccagggccgggcagacaaaagaggccgcccgcgtaggaaggcacggccggcggcggcggagcgcagcgatggccgggcgagggggcagcgcgctgctggctctgtgcggggcactggctgcctgcgggtggctcctgggcgccgaagcccaggagcccggggcgcccgcggcgggcatgaggcggcgccggcggctgcagcaagaggacggcatctccttcgagtaccaccgctaccccgagctgcgcgaggcgctcgtgtccgtgtggctgcagtgcaccgccatcagcaggatttacacggtggggcgcagcttcgagggccgggagctcctggtcatcgagctgtccgacaaccctggcgtccatgagcctggtgagcctgaatttaaatacattgggaatatgcatgggaatgaggctgttggacgagaactgctcattttcttggcccagtacctatgcaacgaataccagaaggggaacgagacaattgtcaacctgatccacagtacccgcattcacatcatgccttccctgaacccagatggctttgagaaggcagcgtctcagcctggtgaactcaaggactggtttgtgggtcgaagcaatgcccagggaatagatctgaaccggaactttccagacctggataggatagtgtacgtgaatgagaaagaaggtggtccaaataatcatctgttgaaaaatatgaagaaaattgtggatcaaaacacaaagcttgctcctgagaccaaggctgtcattcattggattatggatattccttttgtgctttctgccaatctccatggaggagaccttgtggccaattatccatatgatgagacgcggagtggtagtgctcacgaatacagctcctccccagatgacgccattttccaaagcttggcccgggcatactcttctttcaacccggccatgtctgaccccaatcggccaccatgtcgcaagaatgatgatgacagcagctttgtagatggaaccaccaacggtggtgcttggtacagcgtacctggagggatgcaagacttcaattaccttagcagcaactgttttgagatcaccgtggagcttagctgtgagaagttcccacctgaagagactctgaagacctactgggaggataacaaaaactccctcattagctaccttgagcagatacaccgaggagttaaaggatttgtccgagaccttcaaggtaacccaattgcgaatgccaccatctccgtggaaggaatagaccacgatgttacatccgcaaaggatggtgattactggagattgcttatacctggaaactataaacttacagcctcagctccaggctatctggcaataacaaagaaagtggcagttccttacagccctgctgctggggttgattttgaactggagtcattttctgaaaggaaagaagaggagaaggaagaattgatggaatggtggaaaatgatgtcagaaactttaaatttttaaaaaggcttctagttagctgctttaaatctatctatataatgtagtatgatgtaatgtggtcttttttttagattttgtgcagttaatacttaacattgatttattttttaatcatttaaatattaatcaactttccttaaaataaatagcctcttaggtaaaaatataagaacttgatatatttcattctcttatatagtattcattttcctacctatattacacaaaaaagtatagaaaagatttaagtaattttgccatcctaggcttaaatgcaatattcctggtattatttacaatgcagaattttttgagtaattctagctttcaaaaattagtgaagttcttttactgtaattggtgacaatgtcacataatgaatgctattgaaaaggttaacagatacagctcggagttgtgagcactctactgcaagacttaaatagttcagtataaattgtcgtttttttcttgtgctgactaactataagcatgatcttgttaatgcatttttgatgggaagaaaaggtacatgtttacaaagaggttttatgaaaagaataaaaattgacttcttgcttgtacatataggagcaatactattatattatgtagtccgttaacactacttaaaagtttagggttttctcttggttgtagagtggcccagaattgcattctgaatgaataaaggttaaaaaaaaatcccc

SEQ ID NO: 4610 - DNA, 6636 bp, Homo sapiens
  source 1..6636: mol_type = unassigned DNA
ccctcatgtgttctcaggttcttcttatttttattcatctctagaacatggacttcccgtgcctctggctagggctgttgctgcctttggtagctgcgctggatttcaactaccaccgccaggaagggatggaagcgtttttgaagactgttgcccaaaactacagttctgtcactcacttacacagtattgggaaatctgtgaaaggtagaaacctgtgggttcttgttgtggggcggtttccaaaggaacacagaattgggattccagagttcaaatacgtggcaaatatgcatggagatgagactgttgggcgggagctgctgctccatctgattgactatctcgtaaccagtgatggcaaagaccctgaaatcacaaatctgatcaatagtacccggatacacatcatgccttccatgaacccagatggatttgaagccgtcaaaaagcctgactgttattacagcatcggaagggaaaattataaccagtatgacttgaatcgaaatttccccgatgcttttgaatataataatgtctcaaggcagcctgaaactgtggcagtcatgaagtggctgaaaacagagacgtttgtcctctctgcaaacctccatggtggtgccctcgtggccagttacccatttgataatggtgttcaagcaactggggcattatactcccgaagcttaacgcctgatgatgatgtttttcaatatcttgcacatacctatgcttcaagaaatcccaacatgaagaaaggagacgagtgtaaaaacaaaatgaactttcctaatggtgttacaaatggatactcttggtatccactccaaggtggaatgcaagattacaactacatctgggcccagtgttttgaaattacgttggagctgtcatgctgtaaatatcctcgtgaggagaagcttccatccttttggaataataacaaagcctcattaattgaatatataaagcaggtgcacctaggtgtaaagggtcaagtttttgatcagaatggaaatccattacccaatgtaattgtggaagtccaagacagaaaacatatctgcccctatagaaccaacaaatatggagagtattatctccttctcttgcctgggtcttatataataaatgttacagtccctggacatgatccacacatcacaaaggtgattattccggagaaatcccagaacttcagtgctcttaaaaaggatattctacttccattccaagggcaattggattctatcccagtatcaaatccttcatgcccaatgattcctctatacagaaatttgccagaccactcagctgcaacaaagcctagtttgttcttatttttagtgagtcttttgcacatattcttcaaataaagtaaaatgtgaaactcaacccacatcaccacctggaatcagggattgctcactccaggttactgcaaccctaactcactctagtgggaccttgactggagaaactccacgatcttcctgaagaagagaaatggatgtttccaaattccacaataagcaatatgtggtgataatgaaaagaatgattcagtcttgacggtgaatggaagacacttacctaacaagtactgctcatttacactcaaattaatcttgaagtagtcttaaaatgtgtaagaagttaaaacttgagaagcaaaaaaatgcctgcaaaaagaagatcattttgtatacagagaaccggatgaatataagcaatgaagatgaacatttattgatcttctacatacaagacttcaccataaggccaggagcagtggctcacaccttgtaatcccagcactttgggaggccaaggtgggcggatcaccctgaggttaggagttcaaaaccagcctgaccaacatggtgaaaccctgtctctactaaatattagcggggtgtggtggcgggcacctgtaatcgcagcctttcaggaggctgagacaggagaatcgcttgaaccctagaggcggagtttgcagtgagccgagatagtgccattgtactccagcttgggcaacagagtaagactctgtctcaaaaaaaaaaaaacaaaaacaaacaaacaaaaaaaacacctcaccatgagtgctacatgtgaatagatattaagtgccatatataattagttctcagaagaagggagaaatgatcataggactgggaattgttttgcaaacgttctaggagatgtgagagaaaatatgtaaccacatcttagtggcccaagaaaatacaggcctgaagggataagattgtgtctctatagagcttcaaagcatacaggtcaattaagaaagcccctctctctccagagccgtttccctagcttttggcacctggatgccacagtcctccattaggctgatgactccaaagatgtaactctagcctcttgcctgagcttcagactcgcgtcccactgcccacaggacacatccacctggatgtgactcacaggtacctccaacccatcatgtggagatactcatcctgttccccctagagctgctcttcctgctgcattctctctctcaattactgggaccaccaagctaggaacctgggagtcatccttgatactttctcttcctccttaatcctgtgtattcagcaagtaactaaaggttggtgttggccaggcatggtggctcatgcctgtaatcccagcattttgggaggccaaggcgggcggatcacttgaggtcaggagctcaagaccagcctggccaacatggtgaaaccccatctctactaaaaaaaaaaaaaaaattagtcgggcgtggtggtgcatgcctgtaatcccagctactggggaggctgaggcaggagaatcgcttgaacctgggaggcagaggttgcagtgagccgggattgcgccattgtactccagcctgggtgaagaagtgagactctgtcttaaaaaaaaaaattggtgctgataaatattgatgaattctgctctctgctctctatggttgtcaacactgcagagttgaggcctcatatctcacctgcactgctgcaacagcttactggtcccttgctcccagccttctcctcttcagtccatcgtccacacagcactggggaaggggagccacttgaaacaaaagtcaacaactggttgtagttcataaacacagagctgtttgtgtcccctgtatctggaatgccattatgacccactacattttttctttcctacccctcttaaaactcagttcaggtagcagctccactaggaagccttggctgaccataatcccattcaattccatttcacctcttcgcaggcagtctggggttagggaccctttctctttgctccccaaaataaactggttatctctactattggatttacaacattgtattataatcttctccatgtgtgccttctctagtagaatgtgagctctttgaggccaaggtctatttaatttgtttgaaaaattcattgttatatcctcaaagcctagcacatagtaggtactgaatgaatgaatgaacaaggggtgccaggagactgctactcccagtccttcccagaaactgcctagggctttgagtcattttatgaagctaggtcttaatgcgtaggcaacctcccagctcactatgaacgctgacagaagagtgttttcatgtctataatcaagaattccagatacattccttttactgaaccttgaattgatcctaagattggtagtaaaggtattatgttacctcctaacagcactacaaagtacctttttttatcagaaaaaaattttaccattaggactcaatttgaagtactaatgcttctcaagttctccactatgagagttaccctgtattagaccgttacctataagaattaaggggtaaagcactaaacagaaaagaaaaaaaaaatagcaactctggtgagcagatttctttcctttcttccttccttctcctcttcctaccttcctccctcctttccctctcctccccttctctccctttccctccccttcccttccttttcttctttcctccgctcccctccccttccctccccttcccatccttctttctcttttttttacttaatccccagtgtgacagtaatataggctgatttctagaagtgtggtgtattactcatggaaagtgagttgccttggttattactttcaattgaaagttctatgggatctagaaatgagacatactggcatggagagtgagaacgacaaaggaatgaagagctacaggagcatttaggccatttctatgccaagcttattctacatgcacaaaatcatacatgttaataaatataaacaaattggaggcttatttaaaccaattatgaaatctggtaatttgtgcagcagcaatagatgataaccaaaaaaaactcataataatctgaatatcttgatcatttgtatttaaagaagcagtaattatatacttgaaagtacataatatagtattgcaaaaatgactttggtatattacaaattaaaagtatataagatgaaacttgatttgctatcaagccccaagcaatttttcaactgggcattgaattctaacttttctaagatagcaatttttgaagagacacgaacaaaaatctgaattagttcatgagccttaatgtaaatctcttgctgaaatagtttttaaaatcagaatttagttatctatcagactcaaaatcatttaaagactaacaaaacacaatcatgatattctaactgtggtcaaaccaggtacccaagccacctccctgcccaacgcctttccggcttttcccctccctcttgggctggtggttatgctcctccagctctagttcagctataattccttttatagagaaaccaacctgatacacactttcatgatgggagaaaaatgtgggagtgaaatggtatttagaaagcagcagtcaggcacggtggctcatgcctgtaatcccagcactttgggaggctgaggcaggcggatcacttgaggtcaggagctcgagaccagcctggccaacacggtgaaaccccatctctactaaaaaaaaatacaaaaattagccgggcgtggtggcaggcacctgtaatcccagctacttgggaggctgaggcaggagaaatcgcctgaacccagaaggcagaggttgcagtgagccaagatcacatcactgcactgcactccagccggggtgacagagcgaacctctgtctcaaaaaaaaaaaaagaaaaaagaaagaaagaaaaaaggcagaagccctggattcaaatccgccacacattcagtttctttatctgtaaaatggagaccaccccccgccacgctgaacggtgattctgtgactggtaagagatgctacatttttggtgcttgttcaggtggaggaaagatgatagttaacactcaggtaataagtattttgaaggcagtataatataccttcttaaagagtatacctactcaaatgttggtaaatgttgacatgattgaatctaaatggcaaagagtattttagaaaaacattaagtccctgcagataaatgacagtgttgatttggatgcttaattacattcagacatgaactgttggatgtatctgaaatgttaaaagctttttctcaacatttccaaaagtctttccaagaaatcaatgttatgttttgttccagaagcaaatttgcatttgtgatctgtttctaaaaatggtacaagttagctctgtttagaaagtaaaaatatctgatgttagattggaagtatctcttcctggggaatccagaaagataagcatagcatattgtcttactgcaatagataagttgcttattgagaagtctggttgttattctatatggtaacaatacagttgatgtatattttatgatagatcctttatattttcctcatgactttagaagggggaagggggagaaaattatgatgaccagactagttaaagagcattgaaagtccacagtactgtagctaaagtagaagtttgggtttgttatagactttacattatatcaactaataagcagatactgtacagtattgctcaccattttatcatacttttgcatatgaactactccattgccttttatagatgttttatagctgatcttaccagttttcctggtaactttttttatttcttttttttttttttgagacggagtctcgccctaacacccaggttggagtgcagtgccgtgatctcggctcactgcaacctctgcctcccgggttcaagcaattctcctgtctcagcctcccgagtacctgggactaccggtgcctgtctccacgcccggctaattttttgtatttgtagtagagacggggtttcaccgtgttagccaggatggtctcgatctcctgacctcatgatctgcctgcctctgcctggacctcccaaagtgctgggattacaggcgtgagcccccgcgcccagccactttctttaatactataactaagaatttattaaaatgcacaaattgtctaagactgtaaagtttattggggagaggccatgactacctctgaatttagtaaatttaaaatatttctgattctcaataaagaactaatatccat

SEQ ID NO: 4611 - DNA, 2116 bp, Homo sapiens
  source 1..2116: mol_type = unassigned DNA
gtctagattcttcttggcctctctgagcagcatttcttccttctgcgtatgggacaggaccctttctggaatgggggtcttatgacctacaatcaaacaagaacatggacttcccgtgcctctggctagggctgttgctgcctttggtagctgcgctggatttcaactaccaccgccaggaagggatggaagcgtttttgaagactgttgcccaaaactacagttctgtcactcacttacacagtattgggaaatctgtgaaaggtagaaacctgtgggttcttgttgtggggcggtttccaaaggaacacagaattgggattccagagttcaaatacgtggcaaatatgcatggagatgagactgttgggcgggagctgctgctccatctgattgactatctcgtaaccagtgatggcaaagaccctgaaatcacaaatctgatcaatagtacccggatacacatcatgccttccatgaacccagatggatttgaagccgtcaaaaagcctgactgttattacagcatcggaagggaaaattataaccagtatgacttgaatcgaaatttccccgatgcttttgaatataataatgtctcaaggcagcctgaaactgtggcagtcatgaagtggctgaaaacagagacgtttgtcctctctgcaaacctccatggtggtgccctcgtggccagttacccatttgataatggtgttcaagcaactggggcattatactcccgaagcttaacgcctgatgatgatgtttttcaatatcttgcacatacctatgcttcaagaaatcccaacatgaagaaaggagacgagtgtaaaaacaaaatgaactttcctaatggtgttacaaatggatactcttggtatccactccaaggtggaatgcaagattacaactacatctgggcccagtgttttgaaattacgttggagctgtcatgctgtaaatatcctcgtgaggagaagcttccatccttttggaataataacaaagcctcattaattgaatatataaagcaggtgcacctaggtgtaaagggtcaagtttttgatcagaatggaaatccattacccaatgtaattgtggaagtccaagacagaaaacatatctgcccctatagaaccaacaaatatggagagtattatctccttctcttgcctgggtcttatataataaatgttacagtccctggacatgatccacacatcacaaaggtgattattccggagaaatcccagaacttcagtgctcttaaaaaggatattctacttccattccaagggcaattggattctatcccagtatcaaatccttcatgcccaatgattcctctatacagaaatttgccagaccactcagctgcaacaaagcctagtttgttcttatttttagtgagtcttttgcacatattcttcaaataaagtaaaatgtgaaactcaacccacatcaccacctggaatcagggattgctcactccaggttactgcaaccctaactcactctagtgggaccttgactggagaaactccacgatcttcctgaagaagagaaatggatgtttccaaattccacaataagcaatatgtggtgataatgaaaagaatgattcagtcttgacggtgaatggaagacacttacctaacaagtactgctcatttacactcaaattaatcttgaagtagtcttaaaatgtgtaagaagttaaaacttgagaagcaaaaaaatgcctgcaaaaagaagatcattttgtatacagagaaccggatgaatataagcaatgaagatgaacatttattgatcttctacatacaagacttcaccataaggccaggagcagtggctcacaccttgtaatcccagcactttgggaggccaaggtgggcggatcaccctgaggttaggagttcaaaaccagcctgaccaacatggtgaaaccctgtctctactaaatattagcggggtgtggtggcgggcacctgtaatcgcagcctttcaggaggctgagacaggagaatcgcttgaaccctagaggcggagtttgcagtgagccgagatagtgccattgtactccagcttgggcaacagagtaagactctgtctc

SEQ ID NO: 4612 - DNA, 2196 bp, Homo sapiens
  source 1..2196: mol_type = unassigned DNA
gaacatggacttcccgtgcctctggctagggctgttgctgcctttggtagctgcgctggatttcaactaccaccgccaggaagggatggaagcgtttttgaagactgttgcccaaaactacagttctgtcactcacttacacagtattgggaaatctgtgaaaggtagaaacctgtgggttcttgttgtggggcggtttccaaaggaacacagaattgggattccagagttcaaatacgtggcaaatatgcatggagatgagactgttgggcgggagctgctgctccatctgattgactatctcgtaaccagtgatggcaaagaccctgaaatcacaaatctgatcaatagtacccggatacacatcatgccttccatgaacccagatggatttgaagccgtcaaaaagcctgactgttattacagcatcggaagggaaaattataaccagtatgacttgaatcgaaatttccccgatgcttttgaatataataatgtctcaaggcagcctgaaactgtggcagtcatgaagtggctgaaaacagagacgtttgtcctctctgcaaacctccatggtggtgccctcgtggccagttacccatttgataatggtgttcaagcaactggggcattatactcccgaagcttaacgcctgatgatgatgtttttcaatatcttgcacatacctatgcttcaagaaatcccaacatgaagaaaggagacgagtgtaaaaacaaaatgaactttcctaatggtgttacaaatggatactcttggtatccactccaaggtggaatgcaagattacaactacatctgggcccagtgttttgaaattacgttggagctgtcatgctgtaaatatcctcgtgaggagaagcttccatccttttggaataataacaaagcctcattaattgaatatataaagcaggtgcacctaggtgtaaagggtcaagtttttgatcagaatggaaatccattacccaatgtaattgtggaagtccaagacagaaaacatatctgcccctatagaaccaacaaatatggagagtattatctccttctcttgcctgggtcttatataataaatgttacagtccctggacatgatccacacatcacaaaggtgattattccggagaaatcccagaacttcagtgctcttaaaaaggatattctacttccattccaagggcaattggattctatcccagtatcaaatccttcatgcccaatgattcctctatacagaaatttgccagaccactcagctgcaacaaagcctagtttgttcttatttttagtgagtcttttgcacatattcttcaaataaagtaaaatgtgaaactcaacccacatcaccacctggaatcagggattgctcactccaggttactgcaaccctaactcactctagtgggaccttgactggagaaactccacgatcttcctgaagaagagaaatggatgtttccaaattccacaataagcaatatgtggtgataatgaaaagaatgattcagtcttgacggtgaatggaagacacttacctaacaagtactgctcatttacactcaaattaatcttgaagtagtcttaaaatgtgtaagaagttaaaacttgagaagcaaaaaaatgcctgcaaaaagaagatcattttgtatacagagaaccggatgaatataagcaatgaagatgaacatttattgatcttctacatacaagacttcaccataaggccaggagcagtggctcacaccttgtaatcccagcactttgggaggccaaggtgggcggatcaccctgaggttaggagttcaaaaccagcctgaccaacatggtgaaaccctgtctctactaaatattagcggggtgtggtggcgggcacctcaattctcctgtctcagcctcccgagtacctgggactaccggtgcctgtctccacgcccggctaattttttgtatttgtagtagagacggggtttcaccgtgttagccaggatggtctcgatctcctgacctcatgatctgcctgcctctgcctggacctcccaaagtgctgggattacaggcgtgagcccccgcgcccagccactttctttaatactataactaagaatttattaaaatgcacaaattgtctaagactgtaaagtttattggggagaggccatgactacctctgaatttagt

SEQ ID NO: 4613 - DNA, 454 bp, Homo sapiens
  source 1..454: mol_type = unassigned DNA
gggtgggtagaggtgcgcgcctgggacctggtgaggctggggaacatggacttcccgtgcctctggctagggctgttgctgcctttggtagctgcgctggatttcaactaccaccgccaggaagggatggaagcgtttttgaagactgttgcccaaaactacagttctgtcactcacttacacagtattgggaaatctgtgaaaggtagaaacctgtgggttcttgttgtggggcggtttccaaaggaacacagaattgggattccagagttcaaatacgtggcaaatatgcatggagatgagactgttgggcgggagctgctgctccatctgattgactatctcgtaaccagtgatggcaaagaccctgaaatcacaaatctgatcaatagtacccggatacacatcatgccttccatgaacccagatggatttgaagccgtcaaaaagcctg

SEQ ID NO: 4614 - DNA, 794 bp, Homo sapiens
  source 1..794: mol_type = unassigned DNA
gctataacacccggccccgccgggcggccgcgggtgggtagagaacatggacttcccgtgcctctggctagggctgttgctgcctttggtagctgcgctggatttcaactaccaccgccaggaagggatggaagcgtttttgaagactgttgcccaaaactacagttctgtcactcacttacacagtattgggaaatctgtgaaaggtagaaacctgtgggttcttgttgtggggcggtttccaaaggaacacagaattgggattccagagttcaaatacgtggcaaatatgcatggagatgagactgttgggcgggagctgctgctccatctgattgactatctcgtaaccagtgatggcaaagaccctgaaatcacaaatctgatcaatagtacccggatacacatcatgccttccatgaacccagatggatttgaagccgtcaaaaagcctgactgttattacagcatcggaagggaaaattataaccagtatgacttgaatcgaaatttccccgatgcttttgaatataataatgtctcaaggcagcctgaaactgtggcagtcatgaagtggctgaaaacagagacgtttgtcctctctgcaaacctccatggtggtgccctcgtggccagttacccatttgataatggtgttcaagcaactggggcattatactcccgaagcttaacgcctgatgatgatgtttttcaatatcttgcacatacctatgcttcaagaaatcccaacatgaagaaaggagacgagtgtaaaaacaaaatgaactttccta

SEQ ID NO: 4615 - DNA, 6655 bp, Homo sapiens
  source 1..6655: mol_type = unassigned DNA
ataacacccggccccgccgggcggccgcgggtgggtagaggtgcgcgcctgggacctgaacatggacttcccgtgcctctggctagggctgttgctgcctttggtagctgcgctggatttcaactaccaccgccaggaagggatggaagcgtttttgaagactgttgcccaaaactacagttctgtcactcacttacacagtattgggaaatctgtgaaaggtagaaacctgtgggttcttgttgtggggcggtttccaaaggaacacagaattgggattccagagttcaaatacgtggcaaatatgcatggagatgagactgttgggcgggagctgctgctccatctgattgactatctcgtaaccagtgatggcaaagaccctgaaatcacaaatctgatcaatagtacccggatacacatcatgccttccatgaacccagatggatttgaagccgtcaaaaagcctgactgttattacagcatcggaagggaaaattataaccagtatgacttgaatcgaaatttccccgatgcttttgaatataataatgtctcaaggcagcctgaaactgtggcagtcatgaagtggctgaaaacagagacgtttgtcctctctgcaaacctccatggtggtgccctcgtggccagttacccatttgataatggtgttcaagcaactggggcattatactcccgaagcttaacgcctgatgatgatgtttttcaatatcttgcacatacctatgcttcaagaaatcccaacatgaagaaaggagacgagtgtaaaaacaaaatgaactttcctaatggtgttacaaatggatactcttggtatccactccaaggtggaatgcaagattacaactacatctgggcccagtgttttgaaattacgttggagctgtcatgctgtaaatatcctcgtgaggagaagcttccatccttttggaataataacaaagcctcattaattgaatatataaagcaggtgcacctaggtgtaaagggtcaagtttttgatcagaatggaaatccattacccaatgtaattgtggaagtccaagacagaaaacatatctgcccctatagaaccaacaaatatggagagtattatctccttctcttgcctgggtcttatataataaatgttacagtccctggacatgatccacacatcacaaaggtgattattccggagaaatcccagaacttcagtgctcttaaaaaggatattctacttccattccaagggcaattggattctatcccagtatcaaatccttcatgcccaatgattcctctatacagaaatttgccagaccactcagctgcaacaaagcctagtttgttcttatttttagtgagtcttttgcacatattcttcaaataaagtaaaatgtgaaactcaacccacatcaccacctggaatcagggattgctcactccaggttactgcaaccctaactcactctagtgggaccttgactggagaaactccacgatcttcctgaagaagagaaatggatgtttccaaattccacaataagcaatatgtggtgataatgaaaagaatgattcagtcttgacggtgaatggaagacacttacctaacaagtactgctcatttacactcaaattaatcttgaagtagtcttaaaatgtgtaagaagttaaaacttgagaagcaaaaaaatgcctgcaaaaagaagatcattttgtatacagagaaccggatgaatataagcaatgaagatgaacatttattgatcttctacatacaagacttcaccataaggccaggagcagtggctcacaccttgtaatcccagcactttgggaggccaaggtgggcggatcaccctgaggttaggagttcaaaaccagcctgaccaacatggtgaaaccctgtctctactaaatattagcggggtgtggtggcgggcacctgtaatcgcagcctttcaggaggctgagacaggagaatcgcttgaaccctagaggcggagtttgcagtgagccgagatagtgccattgtactccagcttgggcaacagagtaagactctgtctcaaaaaaaaaaaaacaaaaacaaacaaacaaaaaaaacacctcaccatgagtgctacatgtgaatagatattaagtgccatatataattagttctcagaagaagggagaaatgatcataggactgggaattgttttgcaaacgttctaggagatgtgagagaaaatatgtaaccacatcttagtggcccaagaaaatacaggcctgaagggataagattgtgtctctatagagcttcaaagcatacaggtcaattaagaaagcccctctctctccagagccgtttccctagcttttggcacctggatgccacagtcctccattaggctgatgactccaaagatgtaactctagcctcttgcctgagcttcagactcgcgtcccactgcccacaggacacatccacctggatgtgactcacaggtacctccaacccatcatgtggagatactcatcctgttccccctagagctgctcttcctgctgcattctctctctcaattactgggaccaccaagctaggaacctgggagtcatccttgatactttctcttcctccttaatcctgtgtattcagcaagtaactaaaggttggtgttggccaggcatggtggctcatgcctgtaatcccagcattttgggaggccaaggcgggcggatcacttgaggtcaggagctcaagaccagcctggccaacatggtgaaaccccatctctactaaaaaaaaaaaaaaaattagtcgggcgtggtggtgcatgcctgtaatcccagctactggggaggctgaggcaggagaatcgcttgaacctgggaggcagaggttgcagtgagccgggattgcgccattgtactccagcctgggtgaagaagtgagactctgtcttaaaaaaaaaaattggtgctgataaatattgatgaattctgctctctgctctctatggttgtcaacactgcagagttgaggcctcatatctcacctgcactgctgcaacagcttactggtcccttgctcccagccttctcctcttcagtccatcgtccacacagcactggggaaggggagccacttgaaacaaaagtcaacaactggttgtagttcataaacacagagctgtttgtgtcccctgtatctggaatgccattatgacccactacattttttctttcctacccctcttaaaactcagttcaggtagcagctccactaggaagccttggctgaccataatcccattcaattccatttcacctcttcgcaggcagtctggggttagggaccctttctctttgctccccaaaataaactggttatctctactattggatttacaacattgtattataatcttctccatgtgtgccttctctagtagaatgtgagctctttgaggccaaggtctatttaatttgtttgaaaaattcattgttatatcctcaaagcctagcacatagtaggtactgaatgaatgaatgaacaaggggtgccaggagactgctactcccagtccttcccagaaactgcctagggctttgagtcattttatgaagctaggtcttaatgcgtaggcaacctcccagctcactatgaacgctgacagaagagtgttttcatgtctataatcaagaattccagatacattccttttactgaaccttgaattgatcctaagattggtagtaaaggtattatgttacctcctaacagcactacaaagtacctttttttatcagaaaaaaattttaccattaggactcaatttgaagtactaatgcttctcaagttctccactatgagagttaccctgtattagaccgttacctataagaattaaggggtaaagcactaaacagaaaagaaaaaaaaaatagcaactctggtgagcagatttctttcctttcttccttccttctcctcttcctaccttcctccctcctttccctctcctccccttctctccctttccctccccttcccttccttttcttctttcctccgctcccctccccttccctccccttcccatccttctttctcttttttttacttaatccccagtgtgacagtaatataggctgatttctagaagtgtggtgtattactcatggaaagtgagttgccttggttattactttcaattgaaagttctatgggatctagaaatgagacatactggcatggagagtgagaacgacaaaggaatgaagagctacaggagcatttaggccatttctatgccaagcttattctacatgcacaaaatcatacatgttaataaatataaacaaattggaggcttatttaaaccaattatgaaatctggtaatttgtgcagcagcaatagatgataaccaaaaaaaactcataataatctgaatatcttgatcatttgtatttaaagaagcagtaattatatacttgaaagtacataatatagtattgcaaaaatgactttggtatattacaaattaaaagtatataagatgaaacttgatttgctatcaagccccaagcaatttttcaactgggcattgaattctaacttttctaagatagcaatttttgaagagacacgaacaaaaatctgaattagttcatgagccttaatgtaaatctcttgctgaaatagtttttaaaatcagaatttagttatctatcagactcaaaatcatttaaagactaacaaaacacaatcatgatattctaactgtggtcaaaccaggtacccaagccacctccctgcccaacgcctttccggcttttcccctccctcttgggctggtggttatgctcctccagctctagttcagctataattccttttatagagaaaccaacctgatacacactttcatgatgggagaaaaatgtgggagtgaaatggtatttagaaagcagcagtcaggcacggtggctcatgcctgtaatcccagcactttgggaggctgaggcaggcggatcacttgaggtcaggagctcgagaccagcctggccaacacggtgaaaccccatctctactaaaaaaaaatacaaaaattagccgggcgtggtggcaggcacctgtaatcccagctacttgggaggctgaggcaggagaaatcgcctgaacccagaaggcagaggttgcagtgagccaagatcacatcactgcactgcactccagccggggtgacagagcgaacctctgtctcaaaaaaaaaaaaagaaaaaagaaagaaagaaaaaaggcagaagccctggattcaaatccgccacacattcagtttctttatctgtaaaatggagaccaccccccgccacgctgaacggtgattctgtgactggtaagagatgctacatttttggtgcttgttcaggtggaggaaagatgatagttaacactcaggtaataagtattttgaaggcagtataatataccttcttaaagagtatacctactcaaatgttggtaaatgttgacatgattgaatctaaatggcaaagagtattttagaaaaacattaagtccctgcagataaatgacagtgttgatttggatgcttaattacattcagacatgaactgttggatgtatctgaaatgttaaaagctttttctcaacatttccaaaagtctttccaagaaatcaatgttatgttttgttccagaagcaaatttgcatttgtgatctgtttctaaaaatggtacaagttagctctgtttagaaagtaaaaatatctgatgttagattggaagtatctcttcctggggaatccagaaagataagcatagcatattgtcttactgcaatagataagttgcttattgagaagtctggttgttattctatatggtaacaatacagttgatgtatattttatgatagatcctttatattttcctcatgactttagaagggggaagggggagaaaattatgatgaccagactagttaaagagcattgaaagtccacagtactgtagctaaagtagaagtttgggtttgttatagactttacattatatcaactaataagcagatactgtacagtattgctcaccattttatcatacttttgcatatgaactactccattgccttttatagatgttttatagctgatcttaccagttttcctggtaactttttttatttcttttttttttttttgagacggagtctcgccctaacacccaggttggagtgcagtgccgtgatctcggctcactgcaacctctgcctcccgggttcaagcaattctcctgtctcagcctcccgagtacctgggactaccggtgcctgtctccacgcccggctaattttttgtatttgtagtagagacggggtttcaccgtgttagccaggatggtctcgatctcctgacctcatgatctgcctgcctctgcctggacctcccaaagtgctgggattacaggcgtgagcccccgcgcccagccactttctttaatactataactaagaatttattaaaatgcacaaattgtctaagactgtaaagtttattggggagaggccatgactacctctgaatttagtaaatttaaaatatttctgattctcaataaagaactaatatccatataaa

SEQ ID NO: 4616 - DNA, 1863 bp, Homo sapiens
  source 1..1863: mol_type = unassigned DNA
tgcaaaaaacctttcaaaaggctttcctggattagagaaagaaagggagtgagggaggagagatgagtggctattccagaacgacataaagaatttccagccttggacggacagctgggaacgtcttccaatttggactggtgtttacaagcgggaagctaggtggaccttggattttggcgggtgaagaggctaggttgtttaaggaggtggggcgcgtttcagtggctctctttgaaaaagcccagcaagatgtcagacctgctctcagtcttcctccacctcctccttctcttcaagttggttgccccggtgacctttcgccaccaccgctatgatgatcttgtgcggacgctgtacaaggtgcaaaacgaatgccccggcatcacgcgggtctacagcattgggcgcagcgtggaggggagacacctctacgtgctggagttcagcgaccaccctggaatccacgagcccttggaaccagaggtcaagtatgtggggaacatgcacggcaacgaagcgttgggccgcgagctgatgctgcagctgtcggagtttctgtgcgaggagttccggaacaggaaccagcgcatcgtccagctcatccaggacacgcgcattcacatcctgccatccatgaaccccgacggctacgaggtggctgctgcccagggcccaaacaagcctgggtatctagttggcaggaacaatgcaaatggagtggacctgaaccgcaacttccctgatctcaatacctatatctactataacgagaagtacggaggccccaaccaccacctgccccttccagacaactggaaaagtcaggtggaacccgagacccgggcggtgatccggtggatgcactccttcaactttgttctttcagccaatctccacggaggggcggtggtggccaattacccgtatgacaagtcctttgagcaccgggtccgaggggtccgccgcaccgccagcacccccacgcctgacgacaagctcttccagaagctggccaaggtctactcctatgcacatggatggatgttccaaggttggaactgcggagattacttcccagatggcatcaccaatggggcttcctggtattctctcagcaagggaatgcaagactttaattatctccataccaactgctttgagatcacgctggaactgagttgcgacaagtttccccccgaagaggagttacagcgggagtggctgggtaatcgggaagccctaatccagttcctggaacaggttcaccagggcatcaagggaatggtgcttgatgagaattacaataatctcgccaatgctgtcatttctgtcagtgggattaaccatgatgtcacttcaggtgaccatggtgattacttccggctgctgcttccaggtatctacactgttagtgccacagcacctgggtatgacccagagacagtaactgtgaccgtgggtcctgcggaaccaacgttggttaacttccacctcaaaagaagcatccctcaagtaagccctgtgaggagagctcccagcagaaggcacggagtcagagccaaagtgcagccccaagccagaaagaaagaaatggagatgaggcagctgcagagaggccctgcctgaaacccacagtgccaggcaacccttcagaaaggctttgctcctgctctcagatcagatcaagcattctttctattttattatctgggacatatttaaatacaaacatattcagaacaattcagaatggtctccatctgttccaggggtaagccatctctaggtcatcatgaaaaaaattaggatctattgaaaggtgatgtggtggccgggtgtggtggctcacatctgtaatcc

SEQ ID NO: 4617 - DNA, 669 bp, Homo sapiens
  source 1..669: mol_type = unassigned DNA
cgccaacctctcgcctcctcccaggtggaacccgagacccgggcggtgatccggtggatgcactccttcaactttgttctttcagccaatctccacggaggggcggtggtggccaattacccgtatgacaagtcctttgagcaccgggtccgaggggtccgccgcaccgccagcacccccacgcctgacgacaagctcttccagaagctggccaaggtctactcctatgcacatggatggatgttccaaggttggaactgcggagattacttcccagatggcatcaccaatggggcttcctggtattctctcagcaagggaatgcaagactttaattatctccataccaactgctttgagatcacgctggaactgagttgcgacaagtttccccccgaagaggagttacagcgggagtggctgggtaatcgggaagccctaatccagttcctggaacaggttcaccagggcatcaagggaatggtgcttgatgagaattacaataatctcgccaatgctgtcatttctgtcagtgggattaaccatgatgtcacttcaggtgaccatggtgattacttccggctgctgcttccaggtatctacactgttagtgccacagcacctgggtatgacccagagacagtaactgtgaccgtgggtcctgcggaa

SEQ ID NO: 4618 - DNA, 3028 bp, Homo sapiens
  source 1..3028: mol_type = unassigned DNA
ggattgagctgaccacaggccacaccagactcctctctgctcctgaggaagacagggcagcccggcgccacccgctcggccctcacgaagatgctccctggagcctggctgctctggacctccctcctgctcctggccaggcctgcccagccctgtcccatgggttgtgactgcttcgtccaggaggtgttctgctcagatgaggagcttgccaccgtcccactggacatcccgccatatacgaaaaacatcatctttgtggagacctcgttcaccacattggaaaccagagcttttggcagtaaccccaacttgaccaaggtggtcttcctcaacactcagctctgccagtttaggccggatgccttcggggggctgcccaggctggaggacctggaggtcacaggcagtagcttcttgaacctcagcaccaacatcttctccaacctgacctcgctgggcaagctcaccctcaacttcaacatgctggaggctctgcccgagggtcttttccagcacctggctgccctggagtccctccacctgcaggggaaccagctccaggccctgcccaggaggctcttccagcctctgacccatctgaagacactcaacctggcccagaacctcctggcccagctcccggaggagctgttccacccactcaccagcctgcagaccctgaagctgagcaacaacgcgctctctggtctcccccagggtgtgtttggcaaactgggcagcctgcaggagctcttcctggacagcaacaacatctcggagctgccccctcaggtgttctcccagctcttctgcctagagaggctgtggctgcaacgcaacgccatcacgcacctgccgctctccatctttgcctccctgggtaatctgacctttctgagcttgcagtggaacatgcttcgggtcctgcctgccggcctctttgcccacaccccgtgcctggttggcctgtctctgacccataaccagctggagactgtcgctgagggcacctttgcccacctgtccaacctgcgttccctcatgctctcatacaatgccattacccacctcccagctggcatcttcagagacctggaggagttggtcaaactctacctgggcagcaacaaccttacggcgctgcacccagccctcttccagaacctgtccaagctggagctgctcagcctctccaagaaccagctgaccacacttccggagggcatcttcgacaccaactacaacctgttcaacctggccctgcacggtaacccctggcagtgcgactgccacctggcctacctcttcaactggctgcagcagtacaccgatcggctcctgaacatccagacctactgcgctggccctgcctacctcaaaggccaggtggtgcccgccttgaatgagaagcagctggtgtgtcccgtcacccgggaccacttgggcttccaggtcacgtggccggacgaaagcaaggcagggggcagctgggatctggctgtgcaggaaagggcagcccggagccagtgcacctacagcaaccccgagggcaccgtggtgctcgcctgtgaccaggcccagtgtcgctggctgaacgtccagctctctcctcagcagggctccctgggactgcagtacaatgctagtcaggagtgggacctgaggtcgagctgcggttctctgcggctcaccgtgtctatcgaggctcgggcagcagggccctagtagcagcgcatacaggagctggggaagggggcctctggggcctgaccaggcgacaggtaggggcggaggggagctgagtctccgaagccttggcttttcacatgcaagggacagggttacatccccaaggtgagggggtggagtctggtctgctccactaaccagggtctcctcctcctcttccttcatcgcttctcctggagtgtgcggcctaacaaggccatccttatgccttgcaaagcaccctcaaaagctgcaccacagcctggagaataaaatatcctcagccctgatgcctccccattatgtaacacccaaccgctctcacctacaccctgaggtctattcactgcatcccagtgatacaaagtggaggccactgccttctgacatctggctcaaaagcccagtgtctgtttccatttatttccctggaatttcatttaaaattggtatagagaaaaaaaggatgtgacagaagcagagatgaccagaaagcacaggggcagggttctgactggcgtgtgggagaccctgtggccggcacccacctccacacgaggactaagctctgatttttttatcttgcccaaattcctacctaaggggtctagggagtcgcgccttacaaatcataaattctcatcagatgggttttatttgaccctgtatatcatgacttatttttaatctgactatggcataacattacaagacgaggcaaaaatatttaacccccaaatatatttccttgccctaccttgaacttgccctgcagagtctcttgtgaggagaatccacatcctataaagaagcccctttcccctttgttttccttcctttctttccagtccaggagatcatcaactaagagccaggcaccccttttaagtcgataagaaacagtttacaacctgctctctctctctctgaagtctgctgagagcttcccctgcacaataaaacttggcctccacgatcctttatcttaacctgaacattcctttccattgatcccaggtcttcagctaagctcaaccaattgtcaaccagaaaatgtttaaatttacctacagcctggaagcacccacccccgctgcttcgagttgtcctgcctttctgaactcaaccaatgtatttcttaaatgtatttgattgatgcctcattcctccctaaaatgtataaaaccaagctgtacctcgaccaccttgggcacatgttcccaggccctcctgaggtctgtgtcacgggccatggccactcatatttggctcagaataaatctcttcaaatatttta

SEQ ID NO: 4619 - DNA, 2008 bp, Homo sapiens
  source 1..2008: mol_type = unassigned DNA
gaccacaggccacaccagactcctctctgctcctgaggaagacagggcagcccggcgccacccgctcggccctcacgatgctccctggagcctggctgctctggacctccctcctgctcctggccaggcctgcccagccctgtcccatgggttgtgactgcttcgtccaggaggtgttctgctcagatgaggagcttgccaccgtcccactggacatcccgccatatacgaaaaacatcatctttgtggagacctcgttcaccacattggaaaccagagcttttggcagtaaccccaacttgaccaaggtggtcttcctcaacactcagctctgccagtttaggccggatgccttcggggggctgcccaggctggaggacctggaggtcacaggcagtagcttcttgaacctcagcaccaacatcttctccaacctgacctcgctgggcaagctcaccctcaacttcaacatgctggaggctctgcccgagggtcttttccagcacctggctgccctggagtccctccacctgcaggggaaccagctccaggccctgcccaggaggctcttccagcctctgacccatctgaagacactcaacctggcccagaacctcctggcccagctcccggaggagctgttccacccactcaccagcctgcagaccctgaagctgagcaacaacgcgctctctggtctcccccagggtgtgtttggcaaactgggcagcctgcaggagctcttcctggacagcaacaacatctcggagctgccccctcaggtgttctcccagctcttctgcctagagaggctgtggctgcaacgcaacgccatcacgcacctgccgctctccatctttgcctccctgggtaatctgacctttctgagcttgcagtggaacatgcttcgggtcctgcctgccggcctctttgcccacaccccgtgcctggttggcctgtctctgacccataaccagctggagactgtcgctgagggcacctttgcccacctgtccaacctgcgttccctcatgctctcatacaatgccattacccacctcccagctggcatcttcagagacctggaggagttggtcaaactctacctgggcagcaacaaccttacggcgctgcacccagccctcttccagaacctgtccaagctggagctgctcagcctctccaagaaccagctgaccacacttccggagggcatcttcgacaccaactacaacctgttcaacctggccctgcacggtaacccctggcagtgcgactgccacctggcctacctcttcaactggctgcagcagtacaccgatcggctcctgaacatccagacctactgcgctggccctgcctacctcaaaggccaggtggtgcccgccttgaatgagaagcagctggtgtgtcccgtcacccgggaccacttgggcttccaggtcacgtggccggacgaaagcaaggcagggggcagctgggatctggctgtgcaggaaagggcagcccggagccagtgcacctacagcaaccccgagggcaccgtggtgctcgcctgtgaccaggcccagtgtcgctggctgaacgtccagctctctcctcagcagggctccctgggactgcagtacaatgctagtcaggagtgggacctgaggtcgagctgcggttctctgcggctcaccgtgtctatcgaggctcgggcagcagggccctagtagcagcgcatacaggagctggggaagggggcctctggggcctgaccaggcgacaggtaggggcggaggggagctgagtctccgaagccttggcttttcacatgcaagggacagggttacatccccaaggtgagggggtggagtctggtctgctccactaaccagggtctcctcctcctcttccttcatcgcttctcctggagtgtgcggcctaacaaggccatccttatgccttgcaaagcaccctcaaaagctgcaccacagcctggagaataaaatatcctcagccctga

SEQ ID NO: 4620 - DNA, 2091 bp, Homo sapiens
  source 1..2091: mol_type = unassigned DNA
gtgactgggtggggctgcctcacttctgcctgatttgggaagcgctgcaaggacaaccggctggggtccttgcgcgccgcggctcagggaggagcaccgactgcgccgcaccctgagagatggttggtgccatgtggaaggtgattgtttcgctggtcctgttgatgcctggcccctgtgatgggctgtttcgctccctatacagaagtgtttccatgccacctaagggagactcaggacagccattatttctcaccccttacattgaagctgggaagatccaaaaaggaagagaattgagtttggtcggccctttcccaggactgaacatgaagagttatgccggcttcctcaccgtgaataagacttacaacagcaacctcttcttctggttcttcccagctcagatacagccagaagatgccccagtagttctctggctacagggtgggccgggaggttcatccatgtttggactctttgtggaacatgggccttatgttgtcacaagtaacatgaccttgcgtgacagagacttcccctggaccacaacgctctccatgctttacattgacaatccagtgggcacaggcttcagttttactgatgatacccacggatatgcagtcaatgaggacgatgtagcacgggatttatacagtgcactaattcagtttttccagatatttcctgaatataaaaataatgacttttatgtcactggggagtcttatgcagggaaatatgtgccagccattgcacacctcatccattccctcaaccctgtgagagaggtgaagatcaacctgaacggaattgctattggagatggatattctgatcccgaatcaattatagggggctatgcagaattcctgtaccaaattggcttgttggatgagaagcaaaaaaagtacttccagaagcagtgccatgaatgcatagaacacatcaggaagcagaactggtttgaggcctttgaaatactggataaactactagatggcgacttaacaagtgatccttcttacttccagaatgttacaggatgtagtaattactataactttttgcggtgcacggaacctgaggatcagctttactatgtgaaatttttgtcactcccagaggtgagacaagccatccacgtggggaatcagacttttaatgatggaactatagttgaaaagtacttgcgagaagatacagtacagtcagttaagccatggttaactgaaatcatgaataattataaggttctgatctacaatggccaactggacatcatcgtggcagctgccctgacagagcgctccttgatgggcatggactggaaaggatcccaggaatacaagaaggcagaaaaaaaagtttggaagatctttaaatctgacagtgaagtggctggttacatccggcaagcgggtgacttccatcaggtaattattcgaggtggaggacatattttaccctatgaccagcctctgagagcttttgacatgattaatcgattcatttatggaaaaggatgggatccttatgttggataaactaccttcccaaaagagaacatcagaggttttcattgctgaaaagaaaatcgtaaaaacagaaaatgtcataggaataaaaaaattatcttttcatatctgcaagatttttttcatcaataaaaattatccttgaaacaagtgagcttttgtttttggggggagatgtttactacaaaattaacatgagtacatgagtaagaattacattatttaacttaaaggatgaaaggtatggatgatgtgacactgagacaagatgtataaatgaaattttagggtcttgaataggaagttttaatttcttctaagagtaagtgaaaagtgcagttgtaacaaacaaagctgtaacatctttttctgccaataacagaagtttggcatgccgtgaaggtgtttggaaatattattggataagaatagctcaattatcccaaataaatggatgaagctataatagttttggggaaaagattctcaaatgtataaagtcttagaacaaaagaattctttgaaataaaaatattatatataaaagtaa

SEQ ID NO: 4621 - DNA, 1739 bp, Homo sapiens
  source 1..1739: mol_type = unassigned DNA
agcgctgcaaggacaaccggctggggtccttgcgcgccgcggctcagggaggagcaccgactgcgccgcgtaagtgccgcctgccctgcgtgggtcgtgccagctcagcgggacaggtcctcgcctcggtccctcggacttagggagcgcggggcagaccctgagagatggttggtgccatgtggaaggtgattgtttcgctggtcctgttgatgcctggcccctgtgatgggctgtttcgctccctatacagaagtgtttccatgccacctaagggagactcaggacagccattatttctcaccccttacattgaagctgggaagatccaaaaaggaagagaattgagtttggtcggccctttcccaggactgaacatgaagagttatgccggcttcctcaccgtgaataagacttacaacagcaacctcttcttctggttcttcccagctcagatacagccagaagatgccccagtagttctctggctacagggtgggccgggaggttcatccatgtttggactctttgtggaacatgggccttatgttgtcacaagtaacatgaccttgcgtgacagagacttcccctggaccacaacgctctccatgctttacattgacaatccagtgggcacaggcttcagttttactgatgatacccacggatatgcagtcaatgaggacgatgtagcacgggatttatacagtgcactaattcagtttttccagatatttcctgaatataaaaataatgacttttatgtcactggggagtcttatgcagggaaatatgtgccagccattgcacacctcatccattccctcaaccctgtgagagaggtgaagatcaacctgaacggaattgctattggagatggatattctgatcccgaatcaattatagggggctatgcagaattcctgtaccaaattggcttgttggatgagaagcaaaaaaagtacttccagaagcagtgccatgaatgcatagaacacatcaggaagcagaactggtttgaggcctttgaaatactggataaactactagatggcgacttaacaagtgatccttcttacttccagaatgttacaggatgtagtaattactataactttttgcggtgcacggaacctgaggatcagctttactatgtgaaatttttgtcactcccagaggtgagacaagccatccacgtggggaatcagacttttaatgatggaactatagttgaaaagtacttgcgagaagatacagtacagtcagttaagccatggttaactgaaatcatgaataattataaggttctgatctacaatggccaactggacatcatcgtggcagctgccctgacagagcgctccttgatgggcatggactggaaaggatcccaggaatacaagaaggcagaaaaaaaagtttggaagatctttaaatctgacagtgaagtggctggttacatccggcaagcgggtgacttccatcaggtaattattcgaggtggaggacatattttaccctatgaccagcctctgagagcttttgacatgattaatcgattcatttatggaaaaggatgggatccttatgttggataaactaccttcccaaaagagaacatcagaggttttcattgctgaaaagaaaatcgtaaaaacagaaaatgtcataggaataaaaaaattatcttttcatatctgcaagatttttttcatcaataaaaattatccttgaaacaa

SEQ ID NO: 4622 - DNA, 2213 bp, Homo sapiens
  source 1..2213: mol_type = unassigned DNA
gctcctttcgcttttcgctcgctgcactccaagccccggaacacccgcgtccgcacactaagggcaccaccgctctcccacctctgcgctgtcagatgtcaggcgcggaggtgctctgggcaccgaggtgctggcgaaccaaacaagtatcaccccggacgcctgcccccattccgagagagcgggcgggatggccacaggctgcaatacagtgacacgatcacagctcactgctacagcctctacctcctgggcttaatccatcctccctcctcagcctcccaagcagctgggactacaggtgattttgatatgctgctaaggtttgataagagaaatgagattcagagaacagattatattgttgaagagcttgactggaaatgatccaaacggaaacattggctcttcctggggttccagcctgctgtcttgacaggaactataccatcagctctcctgggtctcttacatgccaagtcatcctgcagatctgggactcactccgtaatcagcttgattgctgtaagttgaacacgtcagtggcatgggcaccagctgcacaaccctaggagccaccaaacacagtatattctatataaatgttgctgccaggagccccagttcaaactacaataccctgagagatggttggtgccatgtggaaggtgattgtttcgctggtcctgttgatgcctggcccctgtgatgggctgtttcgctccctatacagaagtgtttccatgccacctaagggagactcaggacagccattatttctcaccccttacattgaagctgggaagatccaaaaaggaagagaattgagtttggtcggccctttcccaggactgaacatgaagagttatgccggcttcctcaccgtgaataagacttacaacagcaacctcttcttctggttcttcccagctcagatacagccagaagatgccccagtagttctctggctacagggtgggccgggaggttcatccatgtttggactctttgtggaacatgggccttatgttgtcacaagtaacatgaccttgcgtgacagagacttcccctggaccacaacgctctccatgctttacattgacaatccagtgggcacaggcttcagttttactgatgatacccacggatatgcagtcaatgaggacgatgtagcacgggatttatacagtgcactaattcagtttttccagatatttcctgaatataaaaataatgacttttatgtcactggggagtcttatgcagggaaatatgtgccagccattgcacacctcatccattccctcaaccctgtgagagaggtgaagatcaacctgaacggaattgctattggagatggatattctgatcccgaatcaattatagggggctatgcagaattcctgtaccaaattggcttgttggatgagaagcaaaaaaagtacttccagaagcagtgccatgaatgcatagaacacatcaggaagcagaactggtttgaggcctttgaaatactggataaactactagatggcgacttaacaagtgatccttcttacttccagaatgttacaggatgtagtaattactataactttttgcggtgcacggaacctgaggatcagctttactatgtgaaatttttgtcactcccagaggtgagacaagccatccacgtggggaatcagacttttaatgatggaactatagttgaaaagtacttgcgagaagatacagtacagtcagttaagccatggttaactgaaatcatgaataattataaggttctgatctacaatggccaactggacatcatcgtggcagctgccctgacagagcgctccttgatgggcatggactggaaaggatcccaggaatacaagaaggcagaaaaaaaagtttggaagatctttaaatctgacagtgaagtggctggttacatccggcaagcgggtgacttccatcaggtaattattcgaggtggaggacatattttaccctatgaccagcctctgagagcttttgacatgattaatcgattcatttatggaaaaggatgggatccttatgttggataaactaccttcccaaaagagaacatcagaggttttcattgctgaaaagaaaatcgtaaaaacagaaaatgtcataggaataaaaaaattatcttttcatatctgcaagatttttttcatcaataaaaattatccttg

SEQ ID NO: 4623 - DNA, 524 bp, Homo sapiens
  source 1..524: mol_type = unassigned DNA
aaagaaaatcaagtctgcgaggagcgagggtttgctcccctctgctccggatttgggtgtccagggtagcgggcgcggcacggcaaacaggtcggggcgctctgcttcaccccaaccttctccgccccgccagcccccgctccagctgcgccagaaagtgcgagcctgcccgctcctttcgcttttcgctcgctgcactccaagccccggaacacccgcgtccgcacactaagggcaccaccgctctcccacctctgcgctgtcagatgtcaggcgcggaggtgctctgggcaccgaggtgctggcgaaccaaacaagtatcaccccggacgcctgcccccattccgagagagcgggcgggatggccacaggcttgattgctgtaagttgaacacgtcagtggcatgggcaccagctgcacaaccctaggagccaccaaacacagtatattctatataaatgttgctgccaggagccccagttcaaactacaataccctgagagatggttggtgccatgtggaa

SEQ ID NO: 4624 - DNA, 528 bp, Homo sapiens
  source 1..528: mol_type = unassigned DNA
gtcagatgtcaggcgcggaggtgctctgggcaccgaggtgctggcgaaccaaacaagtatcaccccggacgcctgcccccattccgagagagcgggcgggatggccacagatccaaacggaaacattggctcttcctggggttccagcctgctgtcttgacaggaactataccatcagctctcctgggtctcttacatgccaagtcatcctgcagatctgggactcactccgtaatcagcttgattgctgtaagttgaacacgtcagtggcatgggcaccagctgcacaaccctaggagccaccaaacacagtatattctatataaatgttgctgccaggagccccagttcaaactacaataccctgagagatggttggtgccatgtggaaggtgattgtttcgctggtcctgttgatgcctggcccctgtgatgggctgtttcgctccctatacagaagtgtttccatgccacctaagggagactcaggacagccattatttctcaccccttacattgaagctggga

SEQ ID NO: 4625 - DNA, 571 bp, Homo sapiens
  source 1..571: mol_type = unassigned DNA
aaacaaagaaaatcaagtctgcgaggagcgagggtttgctcccctctgctccggatttgggtgtccagggtagcgggcgcggcacggcaaacaggtgattttgatatgctgctaaggtttgataagagaaatgagattcagagaacagattatattgttgaagagcttgactggaaatgatccaaacggaaacattggctcttcctggggttccagcctgctgtcttgacaggaactataccatcagctctcctgggtctcttacatgccaagtcatcctgcagatctgggactcactccgtaatcagcttgattgctgtaagttgaacacgtcagtggcatgggcaccagctgcacaaccctaggagccaccaaacacagtatattctatataaatgttgctgccaggagccccagttcaaactacaataccctgagagatggttggtgccatgtggaaggtgattgtttcgctggtcctgttgatgcctggcccctgtgatgggctgtttcgctccctatacagaagtgtttccatgccacctaagggagactcaggacagccattatt

SEQ ID NO: 4626 - DNA, 1086 bp, Homo sapiens
  source 1..1086: mol_type = unassigned DNA
ggctcagggaggagcaccgactgcgccgcaccctgagagatggttggtgccatgtggaaggtgattgtttcgctggtcctgttgatgcctggcccctgtgatgggctgtttcgctccctatacagaagtgtttccatgccacctaagggagactcaggacagccattatttctcaccccttacattgaagctgggaagatccaaaaaggaagagaattgagtttggtcggccctttcccaggactgaacatgaagagttatgccggcttcctcaccgtgaataagacttacaacagcaacctcttcttctggttcttcccagctcagatacagccagaagatgccccagtagttctctggctacagggtgggccgggaggttcatccatgtttggactctttgtggaacatgggccttatgttgtcacaagtaacatgaccttgcgtgacagagacttcccctggaccacaacgctctccatgctttacattgacaatccagtgggcacaggcttcagttttactgatgatacccacggatatgcagtcaatgaggacgatgtagcacgggatttatacagtgcactaattcagtttttccagatatttcctgaatataaaaataatgacttttatgtcactggggagtcttatgcagggaaatatgtgccagccattgcacacctcatccattccctcaaccctgtgagagaggtgaagatcaacctgaacggaattgctattggagatggatattctgatcccgaatcaattatagggggctatgcagaattcctgtaccaaattggcttgttggatgagaagcaaaaaaagtacttccagaagcagtgccatgaatgcatagaacacatcaggaagcagaactggtttgaggcctttgaaatactggataaactactagatggcgacttaacaagtgatccttcttacttccagaatgttacaggatgtagtaattactataactttttgcggtgcacggaacctgaggatcagctttactatgtgaaatttttgtcactcccagaggtgagacaagccccacgtggggaatcagacttttaa

SEQ ID NO: 4627 - DNA, 3519 bp, Homo sapiens
  source 1..3519: mol_type = unassigned DNA
aaagctctgggccccagggaggaggctcagcacagagagtggaaaacagcagaggtgacagagcagccgtgctcgaagcgttcctggagcccaagctctcctccacaggtgaagacagggccagcaggagacaccatggggcacctctcagccccacttcacagagtgcgtgtaccctggcaggggcttctgctcacagcctcacttctaaccttctggaacccgcccaccactgcccagctcactactgaatccatgccattcaatgttgcagaggggaaggaggttcttctccttgtccacaatctgccccagcaactttttggctacagctggtacaaaggggaaagagtggatggcaaccgtcaaattgtaggatatgcaataggaactcaacaagctaccccagggcccgcaaacagcggtcgagagacaatataccccaatgcatccctgctgatccagaacgtcacccagaatgacacaggattctacaccctacaagtcataaagtcagatcttgtgaatgaagaagcaactggacagttccatgtatacccggagctgcccaagccctccatctccagcaacaactccaaccctgtggaggacaaggatgctgtggccttcacctgtgaacctgagactcaggacacaacctacctgtggtggataaacaatcagagcctcccggtcagtcccaggctgcagctgtccaatggcaacaggaccctcactctactcagtgtcacaaggaatgacacaggaccctatgagtgtgaaatacagaacccagtgagtgcgaaccgcagtgacccagtcaccttgaatgtcacctatggcccggacacccccaccatttccccttcagacacctattaccgtccaggggcaaacctcagcctctcctgctatgcagcctctaacccacctgcacagtactcctggcttatcaatggaacattccagcaaagcacacaagagctctttatccctaacatcactgtgaataatagtggatcctatacctgccacgccaataactcagtcactggctgcaacaggaccacagtcaagacgatcatagtcactgagctaagtccagtagtagcaaagccccaaatcaaagccagcaagaccacagtcacaggagataaggactctgtgaacctgacctgctccacaaatgacactggaatctccatccgttggttcttcaaaaaccagagtctcccgtcctcggagaggatgaagctgtcccagggcaacaccaccctcagcataaaccctgtcaagagggaggatgctgggacgtattggtgtgaggtcttcaacccaatcagtaagaaccaaagcgaccccatcatgctgaacgtaaactataatgctctaccacaagaaaatggcctctcacctggggccattgctggcattgtgattggagtagtggccctggttgctctgatagcagtagccctggcatgttttctgcatttcgggaagaccggcagggcaagcgaccagcgtgatctcacagagcacaaaccctcagtctccaaccacactcaggaccactccaatgacccacctaacaagatgaatgaagttacttattctaccctgaactttgaagcccagcaacccacacaaccaacttcagcctccccatccctaacagccacagaaataatttattcagaagtaaaaaagcagtaatgaaacctgtcctgctcactgcagtgctgatgtatttcaagtctctcaccctcatcactaggagattcctttcccctgtaggggtagaggggtggggacagaaacaactttctcctactcttccttcctaataggcatctccaggctgcctggtcactgcccctctctcagtgtcaatagatgaaagtacattgggagtctgtaggaaacccaaccttcttgtcattgaaatttggcaaagctgactttgggaaagagggaccagaacttcccctcccttccccttttcccaacctggacttgttttaaacttgcctgttcagagcactcattccttcccacccccagtcctgtcctatcactctaattcggatttgccatagccttgaggttatgtccttttccattaagtacatgtgccaggaaacaagagagagagaaagtaaaggcagtaatgccttctcctatttctccaaagccttgtgtgaactcaccaaacacaagaaaatcaaatatataaccaatagtgaaatgccacacctttgtccactgtcagggttgtctacctgtaggatcagggtctaagcaccttggtgcttagctagaataccacctaatccttctggcaagcctgtcttcagagaacccactagaagcaactaggaaaatcacttgccaaaatccaaggcaattcctgatggaaaatgcaaaagcacatatatgttttaatatctttatgggctctgttcaaggcagtgctgagagggaggggttatagcttcaggagggaaccagcttctgataaacacaatctgctaggaacttgggaaaggaatcagagagctgcccttcagcgattatttaaattattgttaaagaatacacaatttggggtattgggatttttctccttttctctgagacattccaccattttaatttttgtaactgcttatttatgtgaaaagggttatttttacttagcttagctatgtcagccaatccgattgccttaggtgaaagaaaccaccgaaatccctcaggtcccttggtcaggagcctctcaagattttttttgtcagaggctccaaatagaaaataagaaaaggttttcttcattcatggctagagctagatttaactcagtttctaggcacctcagaccaatcatcaactaccattctattccatgtttgcacctgtgcattttctgtttgcccccattcactttgtcaggaaaccttggcctctgctaaggtgtatttggtccttgagaagtgggagcaccctacagggacactatcactcatgctggtggcattgtttacagctagaaagctgcactggtgctaatgccccttggggaaatggggctgtgaggaggaggattataacttaggcctagcctcttttaacagcctctgaaatttatcttttcttctatggggtctataaatgtatcttataataaaaaggaaggacaggaggaagacaggcaaatgtacttctcacccagtcttctacacagatggaatctctttggggctaagagaaaggttttattctatattgcttacctgatctcatgttaggcctaagaggctttctccaggaggattagcttggagttctctatactcaggtacctctttcagggttttctaaccctgacacggactgtgcatactttccctcatccatgctgtgctgtgttatttaatttttcctggctaagatcatgtctgaattatgtatgaaaattattctatgtttttataataaaaataatatatcagacatcga

SEQ ID NO: 4628 - DNA, 1427 bp, Homo sapiens
  source 1..1427: mol_type = unassigned DNA
agcacagagagtggaaaacagcagaggtgacagagcagccgtgctcgaagcgttcctggagcccaagctctcctccacaggtgaagacagggccagcaggagacaccatggggcacctctcagccccacttcacagagtgcgtgtaccctggcaggggcttctgctcacagcctcacttctaaccttctggaacccgcccaccactgcccagctcactactgaatccatgccattcaatgttgcagaggggaaggaggttcttctccttgtccacaatctgccccagcaactttttggctacagctggtacaaaggggaaagagtggatggcaaccgtcaaattgtaggatatgcaataggaactcaacaagctaccccagggcccgcaaacagcggtcgagagacaatataccccaatgcatccctgctgatccagaacgtcacccagaatgacacaggattctacaccctacaagtcataaagtcagatcttgtgaatgaagaagcaactggacagttccatgtatacccggagctgcccaagccctccatctccagcaacaactccaaccctgtggaggacaaggatgctgtggccttcacctgtgaacctgagactcaggacacaacctacctgtggtggataaacaatcagagcctcccggtcagtcccaggctgcagctgtccaatggcaacaggaccctcactctactcagtgtcacaaggaatgacacaggaccctatgagtgtgaaatacagaacccagtgagtgcgaaccgcagtgacccagtcaccttgaatgtcacctatggcccggacacccccaccatttccccttcagacacctattaccgtccaggggcaaacctcagcctctcctgctatgcagcctctaacccacctgcacagtactcctggcttatcaatggaacattccagcaaagcacacaagagctctttatccctaacatcactgtgaataatagtggatcctatacctgccacgccaataactcagtcactggctgcaacaggaccacagtcaagacgatcatagtcactgagatggcgtttcaccatgttgccaaggctggtctcaaactcctgagctcaagcaatccacccgcctccacctcccaaagtgctaagattacagataatgctctaccacaagaaaatggcctctcacctggggccattgctggcattgtgattggagtagtggccctggttgctctgatagcagtagccctggcatgttttctgcatttcgggaagaccggcagctcaggaccactccaatgacccacctaacaagatgaatgaagttacttattctaccctgaactttgaagcccagcaacccacacaaccaacttcagcctccccatccctaacagccacagaaataatttattcagaagt

SEQ ID NO: 4629 - DNA, 1619 bp, Homo sapiens
  source 1..1619: mol_type = unassigned DNA
gagcagccgtgctcgaagcgttcctggagcccaagctctcctccacaggtgaagacagggccagcaggagacaccatggggcacctctcagccccacttcacagagtgcgtgtaccctggcaggggcttctgctcacagcctcacttctaaccttctggaacccgcccaccactgcccagctcactactgaatccatgccattcaatgttgcagaggggaaggaggttcttctccttgtccacaatctgccccagcaactttttggctacagctggtacaaaggggaaagagtggatggcaaccgtcaaattgtaggatatgcaataggaactcaacaagctaccccagggcccgcaaacagcggtcgagagacaatataccccaatgcatccctgctgatccagaacgtcacccagaatgacacaggattctacaccctacaagtcataaagtcagatcttgtgaatgaagaagcaactggacagttccatgtatacccggagctgcccaagccctccatctccagcaacaactccaaccctgtggaggacaaggatgctgtggccttcacctgtgaacctgagactcaggacacaacctacctgtggtggataaacaatcagagcctcccggtcagtcccaggctgcagctgtccaatggcaacaggaccctcactctactcagtgtcacaaggaatgacacaggaccctatgagtgtgaaatacagaacccagtgagtgcgaaccgcagtgacccagtcaccttgaatgtcacctatggcccggacacccccaccatttccccttcagacacctattaccgtccaggggcaaacctcagcctctcctgctatgcagcctctaacccacctgcacagtactcctggcttatcaatggaacattccagcaaagcacacaagagctctttatccctaacatcactgtgaataatagtggatcctatacctgccacgccaataactcagtcactggctgcaacaggaccacagtcaagacgatcatagtcactgagtctcccgtcctcggagaggatgaagctgtcccagggcaacaccaccctcagcataaaccctgtcaagagggaggatgctgggacgtattggtgtgaggtcttcaacccaatcagtaagaaccaaagcgaccccatcatgctgaacgtaaactgtaagtgactcctcaccccttcctatatgtccctctaggattactctgtcaatggtgtgcaaaatggataaaactcacaggaggcagaatatcaatgaagagaccattatagcaaacagaattgcaaagtggttaagagctcagctcaggccgggcacagtggctcacgcctgtaatcccagcagtttgggaggccaaggcgggcggatcacgagggcaggagatcgagaccatcctggctaatatggtgaaaccccgtgtctactaaaaatacaaaaaaaaattagccgggcatggtggcgggcgcctgtagtcccagctactcgggaggctgaggcgggagaatggcgtgaacctgggaggcggagctttcagtgagccgagatggtgccactgcactccagtctaggcaacagagcaagactctgtctc

SEQ ID NO: 4630 - DNA, 2675 bp, Homo sapiens
  source 1..2675: mol_type = unassigned DNA
aggctcagcacagagagtggaaaacagcagaggtgacagagcagccgtgctcgaagcgttcctggagcccaagctctcctccacaggtgaagacagggccagcaggagacaccatggggcacctctcagccccacttcacagagtgcgtgtaccctggcaggggcttctgctcacagcctcacttctaaccttctggaacccgcccaccactgcccagctcactactgaatccatgccattcaatgttgcagaggggaaggaggttcttctccttgtccacaatctgccccagcaactttttggctacagctggtacaaaggggaaagagtggatggcaaccgtcaaattgtaggatatgcaataggaactcaacaagctaccccagggcccgcaaacagcggtcgagagacaatataccccaatgcatccctgctgatccagaacgtcacccagaatgacacaggattctacaccctacaagtcataaagtcagatcttgtgaatgaagaagcaactggacagttccatgtataccataatgctctaccacaagaaaatggcctctcacctggggccattgctggcattgtgattggagtagtggccctggttgctctgatagcagtagccctggcatgttttctgcatttcgggaagaccggcagggcaagcgaccagcgtgatctcacagagcacaaaccctcagtctccaaccacactcaggaccactccaatgacccacctaacaagatgaatgaagttacttattctaccctgaactttgaagcccagcaacccacacaaccaacttcagcctccccatccctaacagccacagaaataatttattcagaagtaaaaaagcagtaatgaaacctgtcctgctcactgcagtgctgatgtatttcaagtctctcaccctcatcactaggagattcctttcccctgtaggggtagaggggtggggacagaaacaactttctcctactcttccttcctaataggcatctccaggctgcctggtcactgcccctctctcagtgtcaatagatgaaagtacattgggagtctgtaggaaacccaaccttcttgtcattgaaatttggcaaagctgactttgggaaagagggaccagaacttcccctcccttccccttttcccaacctggacttgttttaaacttgcctgttcagagcactcattccttcccacccccagtcctgtcctatcactctaattcggatttgccatagccttgaggttatgtccttttccattaagtacatgtgccaggaaacaagagagagagaaagtaaaggcagtaatgccttctcctatttctccaaagccttgtgtgaactcaccaaacacaagaaaatcaaatatataaccaatagtgaaatgccacacctttgtccactgtcagggttgtctacctgtaggatcagggtctaagcaccttggtgcttagctagaataccacctaatccttctggcaagcctgtcttcagagaacccactagaagcaactaggaaaatcacttgccaaaatccaaggcaattcctgatggaaaatgcaaaagcacatatatgttttaatatctttatgggctctgttcaaggcagtgctgagagggaggggttatagcttcaggagggaaccagcttctgataaacacaatctgctaggaacttgggaaaggaatcagagagctgcccttcagcgattatttaaattattgttaaagaatacacaatttggggtattgggatttttctccttttctctgagacattccaccattttaatttttgtaactgcttatttatgtgaaaagggttatttttacttagcttagctatgtcagccaatccgattgccttaggtgaaagaaaccaccgaaatccctcaggtcccttggtcaggagcctctcaagattttttttgtcagaggctccaaatagaaaataagaaaaggttttcttcattcatggctagagctagatttaactcagtttctaggcacctcagaccaatcatcaactaccattctattccatgtttgcacctgtgcattttctgtttgcccccattcactttgtcaggaaaccttggcctctgctaaggtgtatttggtccttgagaagtgggagcaccctacagggacactatcactcatgctggtggcattgtttacagctagaaagctgcactggtgctaatgccccttggggaaatggggctgtgaggaggaggattataacttaggcctagcctcttttaacagcctctgaaatttatcttttcttctatggggtctataaatgtatcttataataaaaaggaaggacaggaggaagacaggcaaatgtacttctcacccagtcttctacacagatggaatctctttggggctaagagaaaggttttattctatattgcttacctgatctcatgttaggcctaagaggctttctccaggaggattagcttggagttctctatactcaggtacctctttcagggttttctaaccctgacacggactgtgcatactttccctcatccatgctgtgctgtgttatttaatttttcctggctaagatcatgtctgaattatgtatgaaaattattctatgtttttataataaaaataatatatcagacatcga

SEQ ID NO: 4631 - DNA, 3230 bp, Homo sapiens
  source 1..3230: mol_type = unassigned DNA
aaagctctgggccccagggaggaggctcagcacagagagtggaaaacagcagaggtgacagagcagccgtgctcgaagcgttcctggagcccaagctctcctccacaggtgaagacagggccagcaggagacaccatggggcacctctcagccccacttcacagagtgcgtgtaccctggcaggggcttctgctcacagcctcacttctaaccttctggaacccgcccaccactgcccagctcactactgaatccatgccattcaatgttgcagaggggaaggaggttcttctccttgtccacaatctgccccagcaactttttggctacagctggtacaaaggggaaagagtggatggcaaccgtcaaattgtaggatatgcaataggaactcaacaagctaccccagggcccgcaaacagcggtcgagagacaatataccccaatgcatccctgctgatccagaacgtcacccagaatgacacaggattctacaccctacaagtcataaagtcagatcttgtgaatgaagaagcaactggacagttccatgtatacccggagctgcccaagccctccatctccagcaacaactccaaccctgtggaggacaaggatgctgtggccttcacctgtgaacctgagactcaggacacaacctacctgtggtggataaacaatcagagcctcccggtcagtcccaggctgcagctgtccaatggcaacaggaccctcactctactcagtgtcacaaggaatgacacaggaccctatgagtgtgaaatacagaacccagtgagtgcgaaccgcagtgacccagtcaccttgaatgtcacctatggcccggacacccccaccatttccccttcagacacctattaccgtccaggggcaaacctcagcctctcctgctatgcagcctctaacccacctgcacagtactcctggcttatcaatggaacattccagcaaagcacacaagagctctttatccctaacatcactgtgaataatagtggatcctatacctgccacgccaataactcagtcactggctgcaacaggaccacagtcaagacgatcatagtcactgataatgctctaccacaagaaaatggcctctcacctggggccattgctggcattgtgattggagtagtggccctggttgctctgatagcagtagccctggcatgttttctgcatttcgggaagaccggcagggcaagcgaccagcgtgatctcacagagcacaaaccctcagtctccaaccacactcaggaccactccaatgacccacctaacaagatgaatgaagttacttattctaccctgaactttgaagcccagcaacccacacaaccaacttcagcctccccatccctaacagccacagaaataatttattcagaagtaaaaaagcagtaatgaaacctgtcctgctcactgcagtgctgatgtatttcaagtctctcaccctcatcactaggagattcctttcccctgtaggggtagaggggtggggacagaaacaactttctcctactcttccttcctaataggcatctccaggctgcctggtcactgcccctctctcagtgtcaatagatgaaagtacattgggagtctgtaggaaacccaaccttcttgtcattgaaatttggcaaagctgactttgggaaagagggaccagaacttcccctcccttccccttttcccaacctggacttgttttaaacttgcctgttcagagcactcattccttcccacccccagtcctgtcctatcactctaattcggatttgccatagccttgaggttatgtccttttccattaagtacatgtgccaggaaacaagagagagagaaagtaaaggcagtaatgccttctcctatttctccaaagccttgtgtgaactcaccaaacacaagaaaatcaaatatataaccaatagtgaaatgccacacctttgtccactgtcagggttgtctacctgtaggatcagggtctaagcaccttggtgcttagctagaataccacctaatccttctggcaagcctgtcttcagagaacccactagaagcaactaggaaaatcacttgccaaaatccaaggcaattcctgatggaaaatgcaaaagcacatatatgttttaatatctttatgggctctgttcaaggcagtgctgagagggaggggttatagcttcaggagggaaccagcttctgataaacacaatctgctaggaacttgggaaaggaatcagagagctgcccttcagcgattatttaaattattgttaaagaatacacaatttggggtattgggatttttctccttttctctgagacattccaccattttaatttttgtaactgcttatttatgtgaaaagggttatttttacttagcttagctatgtcagccaatccgattgccttaggtgaaagaaaccaccgaaatccctcaggtcccttggtcaggagcctctcaagattttttttgtcagaggctccaaatagaaaataagaaaaggttttcttcattcatggctagagctagatttaactcagtttctaggcacctcagaccaatcatcaactaccattctattccatgtttgcacctgtgcattttctgtttgcccccattcactttgtcaggaaaccttggcctctgctaaggtgtatttggtccttgagaagtgggagcaccctacagggacactatcactcatgctggtggcattgtttacagctagaaagctgcactggtgctaatgccccttggggaaatggggctgtgaggaggaggattataacttaggcctagcctcttttaacagcctctgaaatttatcttttcttctatggggtctataaatgtatcttataataaaaaggaaggacaggaggaagacaggcaaatgtacttctcacccagtcttctacacagatggaatctctttggggctaagagaaaggttttattctatattgcttacctgatctcatgttaggcctaagaggctttctccaggaggattagcttggagttctctatactcaggtacctctttcagggttttctaaccctgacacggactgtgcatactttccctcatccatgctgtgctgtgttatttaatttttcctggctaagatcatgtctgaattatgtatgaaaattattctatgtttttataataaaaataatatatcagacatcg

SEQ ID NO: 4632 - DNA, 3302 bp, Homo sapiens
  source 1..3302: mol_type = unassigned DNA
aggctcagcacagagagtggaaaacagcagaggtgacagagcagccgtgctcgaagcgttcctggagcccaagctctcctccacaggtgaagacagggccagcaggagacaccatggggcacctctcagccccacttcacagagtgcgtgtaccctggcaggggcttctgctcacagcctcacttctaaccttctggaacccgcccaccactgcccagctcactactgaatccatgccattcaatgttgcagaggggaaggaggttcttctccttgtccacaatctgccccagcaactttttggctacagctggtacaaaggggaaagagtggatggcaaccgtcaaattgtaggatatgcaataggaactcaacaagctaccccagggcccgcaaacagcggtcgagagacaatataccccaatgcatccctgctgatccagaacgtcacccagaatgacacaggattctacaccctacaagtcataaagtcagatcttgtgaatgaagaagcaactggacagttccatgtatacccggagctgcccaagccctccatctccagcaacaactccaaccctgtggaggacaaggatgctgtggccttcacctgtgaacctgagactcaggacacaacctacctgtggtggataaacaatcagagcctcccggtcagtcccaggctgcagctgtccaatggcaacaggaccctcactctactcagtgtcacaaggaatgacacaggaccctatgagtgtgaaatacagaacccagtgagtgcgaaccgcagtgacccagtcaccttgaatgtcacctatggcccggacacccccaccatttccccttcagacacctattaccgtccaggggcaaacctcagcctctcctgctatgcagcctctaacccacctgcacagtactcctggcttatcaatggaacattccagcaaagcacacaagagctctttatccctaacatcactgtgaataatagtggatcctatacctgccacgccaataactcagtcactggctgcaacaggaccacagtcaagacgatcatagtcactgagagacagaatctcaccatgttacccaggctggactcgaactcctgggctcaagcaatcctcccatctgtttcccaaagtgctgagattacagataatgctctaccacaagaaaatggcctctcacctggggccattgctggcattgtgattggagtagtggccctggttgctctgatagcagtagccctggcatgttttctgcatttcgggaagaccggcagggcaagcgaccagcgtgatctcacagagcacaaaccctcagtctccaaccacactcaggaccactccaatgacccacctaacaagatgaatgaagttacttattctaccctgaactttgaagcccagcaacccacacaaccaacttcagcctccccatccctaacagccacagaaataatttattcagaagtaaaaaagcagtaatgaaacctgtcctgctcactgcagtgctgatgtatttcaagtctctcaccctcatcactaggagattcctttcccctgtaggggtagaggggtggggacagaaacaactttctcctactcttccttcctaataggcatctccaggctgcctggtcactgcccctctctcagtgtcaatagatgaaagtacattgggagtctgtaggaaacccaaccttcttgtcattgaaatttggcaaagctgactttgggaaagagggaccagaacttcccctcccttccccttttcccaacctggacttgttttaaacttgcctgttcagagcactcattccttcccacccccagtcctgtcctatcactctaattcggatttgccatagccttgaggttatgtccttttccattaagtacatgtgccaggaaacaagagagagagaaagtaaaggcagtaatgccttctcctatttctccaaagccttgtgtgaactcaccaaacacaagaaaatcaaatatataaccaatagtgaaatgccacacctttgtccactgtcagggttgtctacctgtaggatcagggtctaagcaccttggtgcttagctagaataccacctaatccttctggcaagcctgtcttcagagaacccactagaagcaactaggaaaatcacttgccaaaatccaaggcaattcctgatggaaaatgcaaaagcacatatatgttttaatatctttatgggctctgttcaaggcagtgctgagagggaggggttatagcttcaggagggaaccagcttctgataaacacaatctgctaggaacttgggaaaggaatcagagagctgcccttcagcgattatttaaattattgttaaagaatacacaatttggggtattgggatttttctccttttctctgagacattccaccattttaatttttgtaactgcttatttatgtgaaaagggttatttttacttagcttagctatgtcagccaatccgattgccttaggtgaaagaaaccaccgaaatccctcaggtcccttggtcaggagcctctcaagattttttttgtcagaggctccaaatagaaaataagaaaaggttttcttcattcatggctagagctagatttaactcagtttctaggcacctcagaccaatcatcaactaccattctattccatgtttgcacctgtgcattttctgtttgcccccattcactttgtcaggaaaccttggcctctgctaaggtgtatttggtccttgagaagtgggagcaccctacagggacactatcactcatgctggtggcattgtttacagctagaaagctgcactggtgctaatgccccttggggaaatggggctgtgaggaggaggattataacttaggcctagcctcttttaacagcctctgaaatttatcttttcttctatggggtctataaatgtatcttataataaaaaggaaggacaggaggaagacaggcaaatgtacttctcacccagtcttctacacagatggaatctctttggggctaagagaaaggttttattctatattgcttacctgatctcatgttaggcctaagaggctttctccaggaggattagcttggagttctctatactcaggtacctctttcagggttttctaaccctgacacggactgtgcatactttccctcatccatgctgtgctgtgttatttaatttttcctggctaagatcatgtctgaattatgtatgaaaattattctatgtttttataataaaaataatatatcagacatcga

SEQ ID NO: 4633 - DNA, 1773 bp, Homo sapiens
  source 1..1773: mol_type = unassigned DNA
ggaaaacagcagaggtgacagagcagccgtgctcgaagcgttcctggagcccaagctctcctccacaggtgaagacagggccagcaggagacaccatggggcacctctcagccccacttcacagagtgcgtgtaccctggcaggggcttctgctcacagcctcacttctaaccttctggaacccgcccaccactgcccagctcactactgaatccatgccattcaatgttgcagaggggaaggaggttcttctccttgtccacaatctgccccagcaactttttggctacagctggtacaaaggggaaagagtggatggcaaccgtcaaattgtaggatatgcaataggaactcaacaagctaccccagggcccgcaaacagcggtcgagagacaatataccccaatgcatccctgctgatccagaacgtcacccagaatgacacaggattctacaccctacaagtcataaagtcagatcttgtgaatgaagaagcaactggacagttccatgtatacccggagctgcccaagccctccatctccagcaacaactccaaccctgtggaggacaaggatgctgtggccttcacctgtgaacctgagactcaggacacaacctacctgtggtggataaacaatcagagcctcccggtcagtcccaggctgcagctgtccaatggcaacaggaccctcactctactcagtgtcacaaggaatgacacaggaccctatgagtgtgaaatacagaacccagtgagtgcgaaccgcagtgacccagtcaccttgaatgtcacctatggcccggacacccccaccatttccccttcagacacctattaccgtccaggggcaaacctcagcctctcctgctatgcagcctctaacccacctgcacagtactcctggcttatcaatggaacattccagcaaagcacacaagagctctttatccctaacatcactgtgaataatagtggatcctatacctgccacgccaataactcagtcactggctgcaacaggaccacagtcaagacgatcatagtcactgagctaagtccagtagtagcaaagccccaaatcaaagccagcaagaccacagtcacaggagataaggactctgtgaacctgacctgctccacaaatgacactggaatctccatccgttggttcttcaaaaaccagagtctcccgtcctcggagaggatgaagctgtcccagggcaacaccaccctcagcataaaccctgtcaagagggaggatgctgggacgtattggtgtgaggtcttcaacccaatcagtaagaaccaaagcgaccccatcatgctgaacgtaaactgtaagtgactcctcaccccttcctatatgtccctctaggattactctgtcaatggtgtgcaaaatggataaaactcacaggaggcagaatatcaatgaagagaccattatagcaaacagaattgcaaagtggttaagagctcagctcaggccgggcacagtggctcacgcctgtaatcccagcagtttgggaggccaaggcgggcggatcacgagggcaggagatcgagaccatcctggctaatatggtgaaaccccgtgtctactaaaaatacaaaaaaaaattagccgggcatggtggcgggcgcctgtagtcccagctactcgggaggctgaggcgggagaatggcgtgaacctgggaggcggagctttcagtgagccgagatggtgccactgcactccagtctaggcaacagagcaagactctgtctc

SEQ ID NO: 4634 - DNA, 3677 bp, Homo sapiens
  source 1..3677: mol_type = unassigned DNA
aggctcagcacagagagtggaaaacagcagaggtgacagagcagccgtgctcgaagcgttcctggagcccaagctctcctccacaggtgaagacagggccagcaggagacaccatggggcacctctcagccccacttcacagagtgcgtgtaccctggcaggggcttctgctcacagcctcacttctaaccttctggaacccgcccaccactgcccagctcactactgaatccatgccattcaatgttgcagaggggaaggaggttcttctccttgtccacaatctgccccagcaactttttggctacagctggtacaaaggggaaagagtggatggcaaccgtcaaattgtaggatatgcaataggaactcaacaagctaccccagggcccgcaaacagcggtcgagagacaatataccccaatgcatccctgctgatccagaacgtcacccagaatgacacaggattctacaccctacaagtcataaagtcagatcttgtgaatgaagaagcaactggacagttccatgtatacccggagctgcccaagccctccatctccagcaacaactccaaccctgtggaggacaaggatgctgtggccttcacctgtgaacctgagactcaggacacaacctacctgtggtggataaacaatcagagcctcccggtcagtcccaggctgcagctgtccaatggcaacaggaccctcactctactcagtgtcacaaggaatgacacaggaccctatgagtgtgaaatacagaacccagtgagtgcgaaccgcagtgacccagtcaccttgaatgtcacctatggcccggacacccccaccatttccccttcagacacctattaccgtccaggggcaaacctcagcctctcctgctatgcagcctctaacccacctgcacagtactcctggcttatcaatggaacattccagcaaagcacacaagagctctttatccctaacatcactgtgaataatagtggatcctatacctgccacgccaataactcagtcactggctgcaacaggaccacagtcaagacgatcatagtcactgagctaagtccagtagtagcaaagccccaaatcaaagccagcaagaccacagtcacaggagataaggactctgtgaacctgacctgctccacaaatgacactggaatctccatccgttggttcttcaaaaaccagagtctcccgtcctcggagaggatgaagctgtcccagggcaacaccaccctcagcataaaccctgtcaagagggaggatgctgggacgtattggtgtgaggtcttcaacccaatcagtaagaaccaaagcgaccccatcatgctgaacgagatggcgtttcaccatgttgccaaggctggtctcaaactcctgagctcaagcaatccacccgcctccacctcccaaagtgctaagattacagagagacagaatctcaccatgttacccaggctggactcgaactcctgggctcaagcaatcctcccatctgtttcccaaagtgctgagattacagataatgctctaccacaagaaaatggcctctcacctggggccattgctggcattgtgattggagtagtggccctggttgctctgatagcagtagccctggcatgttttctgcatttcgggaagaccggcagggcaagcgaccagcgtgatctcacagagcacaaaccctcagtctccaaccacactcaggaccactccaatgacccacctaacaagatgaatgaagttacttattctaccctgaactttgaagcccagcaacccacacaaccaacttcagcctccccatccctaacagccacagaaataatttattcagaagtaaaaaagcagtaatgaaacctgtcctgctcactgcagtgctgatgtatttcaagtctctcaccctcatcactaggagattcctttcccctgtaggggtagaggggtggggacagaaacaactttctcctactcttccttcctaataggcatctccaggctgcctggtcactgcccctctctcagtgtcaatagatgaaagtacattgggagtctgtaggaaacccaaccttcttgtcattgaaatttggcaaagctgactttgggaaagagggaccagaacttcccctcccttccccttttcccaacctggacttgttttaaacttgcctgttcagagcactcattccttcccacccccagtcctgtcctatcactctaattcggatttgccatagccttgaggttatgtccttttccattaagtacatgtgccaggaaacaagagagagagaaagtaaaggcagtaatgccttctcctatttctccaaagccttgtgtgaactcaccaaacacaagaaaatcaaatatataaccaatagtgaaatgccacacctttgtccactgtcagggttgtctacctgtaggatcagggtctaagcaccttggtgcttagctagaataccacctaatccttctggcaagcctgtcttcagagaacccactagaagcaactaggaaaatcacttgccaaaatccaaggcaattcctgatggaaaatgcaaaagcacatatatgttttaatatctttatgggctctgttcaaggcagtgctgagagggaggggttatagcttcaggagggaaccagcttctgataaacacaatctgctaggaacttgggaaaggaatcagagagctgcccttcagcgattatttaaattattgttaaagaatacacaatttggggtattgggatttttctccttttctctgagacattccaccattttaatttttgtaactgcttatttatgtgaaaagggttatttttacttagcttagctatgtcagccaatccgattgccttaggtgaaagaaaccaccgaaatccctcaggtcccttggtcaggagcctctcaagattttttttgtcagaggctccaaatagaaaataagaaaaggttttcttcattcatggctagagctagatttaactcagtttctaggcacctcagaccaatcatcaactaccattctattccatgtttgcacctgtgcattttctgtttgcccccattcactttgtcaggaaaccttggcctctgctaaggtgtatttggtccttgagaagtgggagcaccctacagggacactatcactcatgctggtggcattgtttacagctagaaagctgcactggtgctaatgccccttggggaaatggggctgtgaggaggaggattataacttaggcctagcctcttttaacagcctctgaaatttatcttttcttctatggggtctataaatgtatcttataataaaaaggaaggacaggaggaagacaggcaaatgtacttctcacccagtcttctacacagatggaatctctttggggctaagagaaaggttttattctatattgcttacctgatctcatgttaggcctaagaggctttctccaggaggattagcttggagttctctatactcaggtacctctttcagggttttctaaccctgacacggactgtgcatactttccctcatccatgctgtgctgtgttatttaatttttcctggctaagatcatgtctgaattatgtatgaaaattattctatgtttttataataaaaataatatatcagacatcga

SEQ ID NO: 4635 - DNA, 1778 bp, Homo sapiens
  source 1..1778: mol_type = unassigned DNA
ggaaaacagcagaggtgacagagcagccgtgctcgaagcgttcctggagcccaagctctcctccacaggtgaagacagggccagcaggagacaccatggggcacctctcagccccacttcacagagtgcgtgtaccctggcaggggcttctgctcacagcctcacttctaaccttctggaacccgcccaccactgcccagctcactactgaatccatgccattcaatgttgcagaggggaaggaggttcttctccttgtccacaatctgccccagcaactttttggctacagctggtacaaaggggaaagagtggatggcaaccgtcaaattgtaggatatgcaataggaactcaacaagctaccccagggcccgcaaacagcggtcgagagacaatataccccaatgcatccctgctgatccagaacgtcacccagaatgacacaggattctacaccctacaagtcataaagtcagatcttgtgaatgaagaagcaactggacagttccatgtatacccggagctgcccaagccctccatctccagcaacaactccaaccctgtggaggacaaggatgctgtggccttcacctgtgaacctgagactcaggacacaacctacctgtggtggataaacaatcagagcctcccggtcagtcccaggctgcagctgtccaatggcaacaggaccctcactctactcagtgtcacaaggaatgacacaggaccctatgagtgtgaaatacagaacccagtgagtgcgaaccgcagtgacccagtcaccttgaatgtcacctatggcccggacacccccaccatttccccttcagacacctattaccgtccaggggcaaacctcagcctctcctgctatgcagcctctaacccacctgcacagtactcctggcttatcaatggaacattccagcaaagcacacaagagctctttatccctaacatcactgtgaataatagtggatcctatacctgccacgccaataactcagtcactggctgcaacaggaccacagtcaagacgatcatagtcactggtaagtaattcctggagcatcaacactaagatctggggtacaagctttctggttttcaaataggagcagagaagaaattttcttttgcagcctgtatccaacaggcacaaacaagtccaaattctcccctgaaccctctcaattcatctgtgcagactctcttccctttgtttttctgatttctcacagctgaccttaggtccagcctggaatgtggggagggggttctctcagccccagaaagccccgtgtagcaggaggggcttcacagagggggaagcagaaagggtcctcaaggtcaatttgcttctgtcactaacatgtccctttctgtaacttcttggccttcttttacctattccatgagatataaggaatatgtgaggttttaaaacagactcacaatagttttccctaaatgagagaaggaaatgcccttcatcagggatgagcagctcagactctgctccctgctctactcccggcttgcccggtgattggctctgccctgatcccatgtggggtaggacgcaggtgtgtgcagaaggtgtccaggtggcctgtcatgaatccagctaaatcaagatggcagtcaatggctgggcgctgtggttcatgcctgtgatcccagtactttggaaggccgaggtgagaggatcacctgaggtcaggagttcgagaccagcctgaccaacatggcaaaactccatctctactaaaaatac

SEQ ID NO: 4636 - DNA, 3465 bp, Homo sapiens
  source 1..3465: mol_type = unassigned DNA
agaggtgacagagcagccgtgctcgaagcgttcctggagcccaagctctcctccacaggtgaagacagggccagcaggagacaccatggggcacctctcagccccacttcacagagtgcgtgtaccctggggcttctgctcacagcctcacttctaaccttctggaacccgcccaccactgcccagctcactactgaatccatgccattcaatgttgcagaggggaaggaggttcttctccttgtccacaatctgccccagcaactttttggctacagctggtacaaaggggaaagagtggatggcaaccgtcaaattgtaggatatgcaataggaactcaacaagctaccccagggcccgcaaacagcggtcgagagacaatataccccaatgcatccctgctgatccagaacgtcacccagaatgacacaggattctacaccctacaagtcataaagtcagatcttgtgaatgaagaagcaactggacagttccatgtatacccggagctgcccaagccctccatctccagcaacaactccaaccctgtggaggacaaggatgctgtggccttcacctgtgaacctgagactcaggacacaacctacctgtggtggataaacaatcagagcctcccggtcagtcccaggctgcagctgtccaatggcaacaggaccctcactctactcagtgtcacaaggaatgacacaggaccctatgagtgtgaaatacagaacccagtgagtgcgaaccgcagtgacccagtcaccttgaatgtcacctatggcccggacacccccaccatttccccttcagacacctattaccgtccaggggcaaacctcagcctctcctgctatgcagcctctaacccacctgcacagtactcctggcttatcaatggaacattccagcaaagcacacaagagctctttatccctaacatcactgtgaataatagtggatcctatacctgccacgccaataactcagtcactggctgcaacaggaccacagtcaagacgatcatagtcactgagctaagtccagtagtagcaaagccccaaatcaaagccagcaagaccacagtcacaggagataaggactctgtgaacctgacctgctccacaaatgacactggaatctccatccgttggttcttcaaaaaccagagtctcccgtcctcggagaggatgaagctgtcccagggcaacaccaccctcagcataaaccctgtcaagagggaggatgctgggacgtattggtgtgaggtcttcaacccaatcagtaagaaccaaagcgaccccatcatgctgaacgtaaactataatgctctaccacaagaaaatggcctctcacctggggccattgctggcattgtgattggagtagtggccctggttgctctgatagcagtagccctggcatgttttctgcatttcgggaagaccggcagggcaagcgaccagcgtgatctcacagagcacaaaccctcagtctccaaccacactcaggaccactccaatgacccacctaacaagatgaatgaagttacttattctaccctgaactttgaagcccagcaacccacacaaccaacttcagcctccccatccctaacagccacagaaataatttattcagaagtaaaaaagcagtaatgaaacctgtcctgctcactgcagtgctgatgtatttcaagtctctcaccctcatcactaggagattcctttcccctgtaggggtagaggggtggggacagaaacaactttctcctactcttccttcctaataggcatctccaggctgcctggtcactgcccctctctcagtgtcaatagatgaaagtacattgggagtctgtaggaaacccaaccttcttgtcattgaaatttggcaaagctgactttgggaaagagggaccagaacttcccctcccttccccttttcccaacctggacttgttttaaacttgcctgttcagagcactcattccttcccacccccagtcctgtcctatcactctaattcggatttgccatagccttgaggttatgtccttttccattaagtacatgtgccaggaaacaagagagagagaaagtaaaggcagtaatgccttctcctatttctccaaagccttgtgtgaactcaccaaacacaagaaaatcaaatatataaccaatagtgaaatgccacacctttgtccactgtcagggttgtctacctgtaggatcagggtctaagcaccttggtgcttagctagaataccacctaatccttctggcaagcctgtcttcagagaacccactagaagcaactaggaaaatcacttgccaaaatccaaggcaattcctgatggaaaatgcaaaagcacatatatgttttaatatctttatgggctctgttcaaggcagtgctgagagggaggggttatagcttcaggagggaaccagcttctgataaacacaatctgctaggaacttgggaaaggaatcagagagctgcccttcagcgattatttaaattattgttaaagaatacacaatttggggtattgggatttttctccttttctctgagacattccaccattttaatttttgtaactgcttatttatgtgaaaagggttatttttacttagcttagctatgtcagccaatccgattgccttaggtgaaagaaaccaccgaaatccctcaggtcccttggtcaggagcctctcaagattttttttgtcagaggctccaaatagaaaataagaaaaggttttcttcattcatggctagagctagatttaactcagtttctaggcacctcagaccaatcatcaactaccattctattccatgtttgcacctgtgcattttctgtttgcccccattcactttgtcaggaaaccttggcctctgctaaggtgtatttggtccttgagaagtgggagcaccctacagggacactatcactcatgctggtggcattgtttacagctagaaagctgcactggtgctaatgccccttggggaaatggggctgtgaggaggaggattataacttaggcctagcctcttttaacagcctctgaaatttatcttttcttctatggggtctataaatgtatcttataataaaaaggaaggacaggaggaagacaggcaaatgtacttctcacccagtcttctacacagatggaatctctttggggctaagagaaaggttttattctatattgcttacctgatctcatgttaggcctaagaggctttctccaggaggattagcttggagttctctatactcaggtacctctttcagggttttctaaccctgacacggactgtgcatactttccctcatccatgctgtgctgtgttatttaatttttcctggctaagatcatgtctgaattatgtatgaaaattattctatgtttttataataaaaataatatatcagacatcga

SEQ ID NO: 4637 - DNA, 3427 bp, Homo sapiens
  source 1..3427: mol_type = unassigned DNA
acagagagtggaaaacagcagaggtgacagagcagccgtgctcgaagcgttcctggagcccaagctctcctccacaggtgaagacagggccagcaggagacaccatggggcacctctcagccccacttcacagagtgcgtgtaccctggcaggggcttctgctcacagcctcacttctaaccttctggaacccgcccaccactgcccagctcactactgaatccatgccattcaatgttgcagaggggaaggaggttcttctccttgtccacaatctgccccagcaactttttggctacagctggtacaaaggggaaagagtggatggcaaccgtcaaattgtaggatatgcaataggaactcaacaagctaccccagggcccgcaaacagcggtcgagagacaatataccccaatgcatccctgctgatccagaacgtcacccagaatgacacaggattctacaccctacaagtcataaagtcagatcttgtgaatgaagaagcaactggacagttccatgtatacccggagctgcccaagccctccatctccagcaacaactccaaccctgtggaggacaaggatgctgtggccttcacctgtgaacctgagactcaggacacaacctacctgtggtggataaacaatcagagcctcccggtcagtcccaggctgcagctgtccaatggcaacaggaccctcactctactcagtgtcacaaggaatgacacaggaccctatgagtgtgaaatacagaacccagtgagtgcgaaccgcagtgacccagtcaccttgaatgtcacctatggcccggacacccccaccatttccccttcagacacctattaccgtccaggggcaaacctcagcctctcctgctatgcagcctctaacccacctgcacagtactcctggcttatcaatggaacattccagcaaagcacacaagagctctttatccctaacatcactgtgaataatagtggatcctatacctgccacgccaataactcagtcactggctgcaacaggaccacagtcaagacgatcatagtcactgagctaagtccagtagtagcaaagccccaaatcaaagccagcaagaccacagtcacaggagataaggactctgtgaacctgacctgctccacaaatgacactggaatctccatccgttggttcttcaaaaaccagagtctcccgtcctcggagaggatgaagctgtcccagggcaacaccaccctcagcataaaccctgtcaagagggaggatgctgggacgtattggtgtgaggtcttcaacccaatcagtaagaaccaaagcgaccccatcatgctgaacgtaaactataatgctctaccacaagaaaatggcctctcacctggggccattgctggcattgtgattggagtagtggccctggttgctctgatagcagtagccctggcatgttttctgcatttcgggaagaccggcagctcaggaccactccaatgacccacctaacaagatgaatgaagttacttattctaccctgaactttgaagcccagcaacccacacaaccaacttcagcctccccatccctaacagccacagaaataatttattcagaagtaaaaaagcagtaatgaaacctgtcctgctcactgcagtgctgatgtatttcaagtctctcaccctcatcactaggagattcctttcccctgtaggggtagaggggtggggacagaaacaactttctcctactcttccttcctaataggcatctccaggctgcctggtcactgcccctctctcagtgtcaatagatgaaagtacattgggagtctgtaggaaacccaaccttcttgtcattgaaatttggcaaagctgactttgggaaagagggaccagaacttcccctcccttccccttttcccaacctggacttgttttaaacttgcctgttcagagcactcattccttcccacccccagtcctgtcctatcactctaattcggatttgccatagccttgaggttatgtccttttccattaagtacatgtgccaggaaacaagagagagagaaagtaaaggcagtaatgccttctcctatttctccaaagccttgtgtgaactcaccaaacacaagaaaatcaaatatataaccaatagtgaaatgccacacctttgtccactgtcagggttgtctacctgtaggatcagggtctaagcaccttggtgcttagctagaataccacctaatccttctggcaagcctgtcttcagagaacccactagaagcaactaggaaaatcacttgccaaaatccaaggcaattcctgatggaaaatgcaaaagcacatatatgttttaatatctttatgggctctgttcaaggcagtgctgagagggaggggttatagcttcaggagggaaccagcttctgataaacacaatctgctaggaacttgggaaaggaatcagagagctgcccttcagcgattatttaaattattgttaaagaatacacaatttggggtattgggatttttctccttttctctgagacattccaccattttaatttttgtaactgcttatttatgtgaaaagggttatttttacttagcttagctatgtcagccaatccgattgccttaggtgaaagaaaccaccgaaatccctcaggtcccttggtcaggagcctctcaagattttttttgtcagaggctccaaatagaaaataagaaaaggttttcttcattcatggctagagctagatttaactcagtttctaggcacctcagaccaatcatcaactaccattctattccatgtttgcacctgtgcattttctgtttgcccccattcactttgtcaggaaaccttggcctctgctaaggtgtatttggtccttgagaagtgggagcaccctacagggacactatcactcatgctggtggcattgtttacagctagaaagctgcactggtgctaatgccccttggggaaatggggctgtgaggaggaggattataacttaggcctagcctcttttaacagcctctgaaatttatcttttcttctatggggtctataaatgtatcttataataaaaaggaaggacaggaggaagacaggcaaatgtacttctcacccagtcttctacacagatggaatctctttggggctaagagaaaggttttattctatattgcttacctgatctcatgttaggcctaagaggctttctccaggaggattagcttggagttctctatactcaggtacctctttcagggttttctaaccctgacacggactgtgcatactttccctcatccatgctgtgctgtgttatttaatttttcctggctaagatcatgtctgaattatgtatgaaaattattctatgtttttataataaaaataatatatca

SEQ ID NO: 4638 - DNA, 1263 bp, Homo sapiens
  source 1..1263: mol_type = unassigned DNA
gacaccatggggcacctctcagccccacttcacagagtgcgtgtaccctggcaggggcttctgctcacagcctcacttctaaccttctggaacccgcccaccactgcccagctcactactgaatccatgccattcaatgttgcagaggggaaggaggttcttctccttgtccacaatctgccccagcaactttttggctacagctggtacaaaggggaaagagtggatggcaaccgtcaaattgtaggatatgcaataggaactcaacaagctaccccagggcccgcaaacagcggtcgagagacaatataccccaatgcatccctgctgatccagaacgtcacccagaatgacacaggattctacaccctacaagtcataaagtcagatcttgtgaatgaagaagcaactggacagttccatgtatacccggagctgcccaagccctccatctccagcaacaactccaaccctgtggaggacaaggatgctgtggccttcacctgtgaacctgagactcaggacacaacctacctgtggtggataaacaatcagagcctcccggtcagtcccaggctgcagctgtccaatggcaacaggaccctcactctactcagtgtcacaaggaatgacacaggaccctatgagtgtgaaatacagaacccagtgagtgcgaaccgcagtgacccagtcaccttgaatgtcacctatggcccggacacccccaccatttccccttcagacacctattaccgtccaggggcaaacctcagcctctcctgctatgcagcctctaacccacctgcacagtactcctggcttatcaatggaacattccagcaaagcacacaagagctctttatccctaacatcactgtgaataatagtggatcctatacctgccacgccaataactcagtcactggctgcaacaggaccacagtcaagacgatcatagtcactgataatgctctaccacaagaaaatggcctctcacctggggccattgctggcattgtgattggagtagtggccctggttgctctgatagcagtagccctggcatgttttctgcatttcgggaagaccggcagctcaggaccactccaatgacccacctaacaagatgaatgaagttacttattctaccctgaactttgaagcccagcaacccacacaaccaacttcagcctccccatccctaacagccacagaaataatttattcagaagtaaaaaagcagtaatgaaacctgtcctgctc

SEQ ID NO: 4639 - DNA, 3958 bp, Homo sapiens
  source 1..3958: mol_type = unassigned DNA
tgtataagtggagtgtgctggggtgtgtaaagtagtatggaggcagcggtagcccagtgtctgagtggttgccgggtctccatggagaagcggctcgccagtgtcccaggctgctgagctctcgccgcccgagaccccgcggcgcggccgcagggccatgctagccttgcgcgtggcgcgcggctcgtggggggccctgcgcggcgccgcttgggctccgggaacgcggccgagtaagcgacgcgcctgctgggccctgctgccgcccgtgccctgctgcttgggctgcctggccgaacgctggaggctgcgtccggccgctcttggcttgcggctgcccgggatcggccagcggaaccactgttcgggcgcggggaaggcggctcccaggccagcggccggagcgggcgccgctgccgaagccccgggcggccagtggggcccggcgagcacccccagcctgtatgaaaacccatggacaatcccgaatatgttgtcaatgacgagaattggcttggccccagttctgggctatttgattattgaagaagattttaatattgcactaggagtttttgctttagctggactaacagatttgttggatggatttattgctcgaaactgggccaatcaaagatcagctttgggaagtgctcttgatccacttgctgataaaatacttatcagtatcttatatgttagcttgacctatgcagatcttattccagttccacttacttacatgatcatttcgagagatgtaatgttgattgctgctgttttttatgtcagataccgaactcttccaacaccacgaacacttgccaagtatttcaatccttgctatgccactgctaggttaaaaccaacattcatcagcaaggtgaatacagcagtccagttaatcttggtggcagcttctttggcagctccagttttcaactatgctgacagcatttatcttcagatactatggtgttttacagctttcaccacagctgcatcagcttatagttactatcattatggccggaagactgttcaggtgataaaagactgatgaaagtcatccctcactgttagtaaggaagcagtatacatcaatgggaacagggcccatggaaatgtacaggagtttccctattttggtgttcagcttgaaaaaggacttgtcagaatcaactgtgtcatcaaaatttaagtaatgtgcattgaaaataaggttgatcatgggaatatgcagaatttccaatgtatttttaaatacaaataaaattgtaatttagaatttttaatcttaggtttcttgattaatttataagagatcaattattgtcagtcttttttgtatgttttttaaaaacatagtccagagcatgggcagaattgacacctctcttttaagtgaaatttggattgctcacaaagcactaggaaatgtcatggggttcaaatatatatcctacacaactgggcaatacatttttgtttgatttttaggtctgtgtatacattaacagttcatgtaattaatacctgatcatttgggataatgaaagtgaagttagttgtagatgaagtaaagttataaaagagattaaaaatgcggtaactttttaagataataatcatacagaaggtatgaagttcattttcggtagtcttccaacctctcaggtgcctaataatttatgtttgaggataacaggtaacaaagatagtcgagataggagaacgtgtctattagtctttgcatctaaaaggcagtgagttacgttcctgccttccactgtgtttctgacatagcaatgtttgtttgatattggaacctggattcatattttatgtaaataatatcaagctgtatatttttcaaaggttttttaaactttggagactctttcttttgttaagcagttaaaggaataaaagagctggaaaaaaaattgtaccttcaactcaggttgttccatataacatacgtattctctgctgttacgtaagttttccgattcacagagtccattcatgtacatcacttacacttaaattgtaaaaataattagtctgaccatctgactttaaaagactgttgctacacgtacatcatgtttaggagaatgtgggatatggggaaggggagaagaagacagtccagtggtgactagttgctgctgcttaacctatggcctattgctgcccattgtccctggttttaatccaagcctattatggaatactgcagtgagattatccattctcagcctgttgagctgcattaaattagaatgggaggctgtaagtaaaactcatgcctcttggccaggcattctgcaccagcgtgtccctctgtggcttgctggtcctggttgttctcagactggcagctgagctgcgcttggcttgaagcatactgaagcctgcagccagggacaccgccattgaatcagatggagggggatgaaaaagcagagaagggggcatgtggctggctattcttgctctctggagaacagcttcattgttaggagtagttaggctgaaagtggacttcccactgctgagccacccaagaggcacactgagcattagtgacgggtgagccacataagaataatgtttaaaaaagagaggacttgaagtagctatgcgaaaatttagaactttgcactttgttaacgcttatttatggtttagtgttgatgccatttggagtgacctatgggttggacccatatctttttattattaaggtctcaatctggctctggttaataaacgtttcccgcttcatcccttaggaaaatggtccaagtctcctcaggcttttggatactgaattgttataaaacacatcaattctgccagtttataaaacactggaattgtattagacatgtctgagtatgtacttgtttatagactcaaaacatgatgaaaattcatttcattgtcttcactgaatagacttaaccttgacagtaagcttaaagcattagtgtcatttaattacatgtctgaggaatttatgctaactagattttgggcttttgcagcgaattttagtcggggcctcattcctgagcccaagtgaccctttcacctcagcttcccaagtagctgggattacaggtgcacaccaactgtgctttgcagttttgtttgtgtgtgtgtgtgtgtgtgtgtgtgtgtgtgtgtgtgtgtgtattttgttttttttacaagcccacaacatcatagctttgcagtttttaaccaggagctggtggagatctttgaaatcatttaggccaattcttttagttacatttatgatgaaactagggatctaccttaaagttttgggaagctctttcaaaacttcagacacctagaaatatatatagtgcagttcagttttagtttctgcagcatggtttggaaacaaaagatacataggatttaaactcgatttgttttcttcttacagtagaagtaaatgctcttgtggcttgaatcgcatctcccaagaaagatacgttcacgttcaaacccccagtactgtacatgtgaccttatttggaaatagggtctttttagatgcagtcaagatagaattagatcatactggattacagtgggccccaataactaggtttttttgttaaaaaaaaaaaaaaaggaaatgtgaacagagagagaatgccgtgagatgatggagggatagattggaatgatgtctgcgagctaaggaatactgaggattgctgccaaccatccgaagctgggagaggagatggaacaactccctcggagcctccaagaggaaccaaccccactgatgctttgatttgggatttccggcctgaactgtaggaaaataaatttctgttcttttaagccatttttaccagtttgtggtaacttgttacagcagctgcaggaaattaataaatgccaatgttgaaaattaaaa

SEQ ID NO: 4640 - DNA, 3650 bp, Homo sapiens
  source 1..3650: mol_type = unassigned DNA
agttgtacagcatgggttgaggtggccagatcctggcaggggtctcaactccactgatagctaaagcatgttggggtttgaatgctggatactttgaagttgccatatcctgactgaagtccttcccagaacggcagtagttggtcgagtatgccacagtatgaaaacccatggacaatcccgaatatgttgtcaatgacgagaattggcttggccccagttctgggctatttgattattgaagaagattttaatattgcactaggagtttttgctttagctggactaacagatttgttggatggatttattgctcgaaactgggccaatcaaagatcagctttgggaagtgctcttgatccacttgctgataaaatacttatcagtatcttatatgttagcttgacctatgcagatcttattccagttccacttacttacatgatcatttcgagagatgtaatgttgattgctgctgttttttatgtcagataccgaactcttccaacaccacgaacacttgccaagtatttcaatccttgctatgccactgctaggttaaaaccaacattcatcagcaaggtgaatacagcagtccagttaatcttggtggcagcttctttggcagctccagttttcaactatgctgacagcatttatcttcagatactatggtgttttacagctttcaccacagctgcatcagcttatagttactatcattatggccggaagactgttcaggtgataaaagactgatgaaagtcatccctcactgttagtaaggaagcagtatacatcaatgggaacagggcccatggaaatgtacaggagtttccctattttggtgttcagcttgaaaaaggacttgtcagaatcaactgtgtcatcaaaatttaagtaatgtgcattgaaaataaggttgatcatgggaatatgcagaatttccaatgtatttttaaatacaaataaaattgtaatttagaatttttaatcttaggtttcttgattaatttataagagatcaattattgtcagtcttttttgtatgttttttaaaaacatagtccagagcatgggcagaattgacacctctcttttaagtgaaatttggattgctcacaaagcactaggaaatgtcatggggttcaaatatatatcctacacaactgggcaatacatttttgtttgatttttaggtctgtgtatacattaacagttcatgtaattaatacctgatcatttgggataatgaaagtgaagttagttgtagatgaagtaaagttataaaagagattaaaaatgcggtaactttttaagataataatcatacagaaggtatgaagttcattttcggtagtcttccaacctctcaggtgcctaataatttatgtttgaggataacaggtaacaaagatagtcgagataggagaacgtgtctattagtctttgcatctaaaaggcagtgagttacgttcctgccttccactgtgtttctgacatagcaatgtttgtttgatattggaacctggattcatattttatgtaaataatatcaagctgtatatttttcaaaggttttttaaactttggagactctttcttttgttaagcagttaaaggaataaaagagctggaaaaaaaattgtaccttcaactcaggttgttccatataacatacgtattctctgctgttacgtaagttttccgattcacagagtccattcatgtacatcacttacacttaaattgtaaaaataattagtctgaccatctgactttaaaagactgttgctacacgtacatcatgtttaggagaatgtgggatatggggaaggggagaagaagacagtccagtggtgactagttgctgctgcttaacctatggcctattgctgcccattgtccctggttttaatccaagcctattatggaatactgcagtgagattatccattctcagcctgttgagctgcattaaattagaatgggaggctgtaagtaaaactcatgcctcttggccaggcattctgcaccagcgtgtccctctgtggcttgctggtcctggttgttctcagactggcagctgagctgcgcttggcttgaagcatactgaagcctgcagccagggacaccgccattgaatcagatggagggggatgaaaaagcagagaagggggcatgtggctggctattcttgctctctggagaacagcttcattgttaggagtagttaggctgaaagtggacttcccactgctgagccacccaagaggcacactgagcattagtgacgggtgagccacataagaataatgtttaaaaaagagaggacttgaagtagctatgcgaaaatttagaactttgcactttgttaacgcttatttatggtttagtgttgatgccatttggagtgacctatgggttggacccatatctttttattattaaggtctcaatctggctctggttaataaacgtttcccgcttcatcccttaggaaaatggtccaagtctcctcaggcttttggatactgaattgttataaaacacatcaattctgccagtttataaaacactggaattgtattagacatgtctgagtatgtacttgtttatagactcaaaacatgatgaaaattcatttcattgtcttcactgaatagacttaaccttgacagtaagcttaaagcattagtgtcatttaattacatgtctgaggaatttatgctaactagattttgggcttttgcagcgaattttagtcggggcctcattcctgagcccaagtgaccctttcacctcagcttcccaagtagctgggattacaggtgcacaccaactgtgctttgcagttttgtttgtgtgtgtgtgtgtgtgtgtgtgtgtgtgtgtgtgtgtgtgtattttgttttttttacaagcccacaacatcatagctttgcagtttttaaccaggagctggtggagatctttgaaatcatttaggccaattcttttagttacatttatgatgaaactagggatctaccttaaagttttgggaagctctttcaaaacttcagacacctagaaatatatatagtgcagttcagttttagtttctgcagcatggtttggaaacaaaagatacataggatttaaactcgatttgttttcttcttacagtagaagtaaatgctcttgtggcttgaatcgcatctcccaagaaagatacgttcacgttcaaacccccagtactgtacatgtgaccttatttggaaatagggtctttttagatgcagtcaagatagaattagatcatactggattacagtgggccccaataactaggtttttttgttaaaaaaaaaaaaaaaggaaatgtgaacagagagagaatgccgtgagatgatggagggatagattggaatgatgtctgcgagctaaggaatactgaggattgctgccaaccatccgaagctgggagaggagatggaacaactccctcggagcctccaagaggaaccaaccccactgatgctttgatttgggatttccggcctgaactgtaggaaaataaatttctgttcttttaagccatttttaccagtttgtggtaacttgttacagcagctgcaggaaattaataaatgccaatgttgaaaatt

SEQ ID NO: 4641 - DNA, 1150 bp, Homo sapiens
  source 1..1150: mol_type = unassigned DNA
ctgagtggttgccgggtctccatggagaagcggctcgccagtgtcccaggctgctgagctctcgccgcccgagaccccgcggcgcggccgcagggccatgctagccttgcgcgtggcgcgcggctcgtggggggccctgcgcggcgccgcttgggctccgggaacgcggccgagtaagcgacgcgcctgctgggccctgctgccgcccgtgccctgctgcttgggctgcctggccgaacgctggaggctgcgtccggccgctcttggcttgcggctgcccgggatcggccagcggaaccactgttcgggcgcggggaaggcggctcccaggccagcggccggagcgggcgccgctgccgaagccccgggcggccagtggggcccggcgagcacccccagcctgtatgaaaacccatggacaatcccgaatatgttgtcaatgacgagaattggcttggccccagttctgggctatttgattattgaagaagattttaatattgcactaggagtttttgctttagctggactaacagatttgttggatggatttattgctcgaaactgggccaatcaaagatcagctttgggaagtgctcttgatccacttgctgataaaatacttatcagtatcttatatgttagcttgacctatgcagatcttattccagcgaacacttgccaagtatttcaatccttgctatgccactgctaggttaaaaccaacattcatcagcaaggtgaatacagcagtccagttaatcttggtggcagcttctttggcagctccagttttcaactatgctgacagcatttatcttcagatactatggtgttttacagctttcaccacagctgcatcagcttatagttactatcattatggccggaagactgttcaggtgataaaagactgatgaaagtcatccctcactgttagtaaggaagcagtatacatcaatgggaacagggcccatggaaatgtacaggagtttccctattttggtgttcagcttgaaaaaggacttgtcagaatcaactgtgtcatcaaaatttaagtaatgtgcattgaaaataaggttgatcatgggaatatgcagaatttccaatgtatttttaaatacaaataaaattgtaatttagaattttt

SEQ ID NO: 4642 - DNA, 12847 bp, Homo sapiens
  source 1..12847: mol_type = unassigned DNA
ctccggccccggcccaggcccgggagaggcgatggcgagccgcgatagcaaccacgctggcgagagctttctcggctccgacggggacgaggaggcgacccgggagctggagaccgaggaggagtcggagggcgaggaggacgagacggcggcggagtcggaggaggagccggactccaggttatcagaccaggatgaagagggaaagatcaagcaggagtatatcatatctgacccctccttttccatggtgacagtccaaagggaagatagtgggataacctgggaaaccaattcaagtagatcttctactccttgggcttcagaagaaagtcagacttctggtgtgtgtagtcgggaagggtcaactgtgaattctcctcctggaaatgtttcctttattgtggatgaagtgaaaaaggttcggaaaaggactcataagtcaaagcatggttcaccatcattacgccggaaaggcaacagaaaaagaaattcttttgaatcccaagatgttccaacaaacaaaaaaggcagtcctttaacttcagcaagccaggtactaaccacggagaaagagaagtcatatactggcatttatgataaagcaagaaaaaagaagaccacttcaaatacacctccgattactggggcaatatacaaagaacacaagccattagtgttaagaccagtctacataggaacagtacaatataaaattaagatgtttaattcggttaaagaagaattaattcctctacaattttatggaacattgccaaagggttatgtaattaaagaaatacattataggaaagggaaagatgcatccattagtctagagccagatttggacaatagtggttctaatacagtgtccaaaacacgcaaattagtagcccaaagcatagaggataaagtaaaagaggtttttccaccctggagaggcgcactctccaaaggatcagagtccctaaccttaatgttcagtcatgaagatcaaaagaaaatttatgctgattctcccctaaatgccacatctgcattggagcacacagttccctcttattcaagtagtggcagagcagaacaaggaatacagctcaggcattcacagtcagtgccacaacagccagaagatgaagcaaaaccacatgaagtggaacctccatctgtgacacccgacacacctgcaactatgttcctgagaacaacaaaggaagaatgtgagcttgcttcaccaggaactgcagcttcagagaatgactcttcagtctcaccatcatttgctaatgaggtaaagaaggaagatgtgtattctgctcaccattccatttctctggaggcagcgtcaccaggtctggcagcatctacccaggatggtttggacccagaccaagaacagccggacctgacttcaatagaaagggcagaaccagtctccgcaaaactgacccctacccatcccagtgtcaaaggagagaaggaggaaaacatgcttgagccatccatttctctttctgaacctctaatgttagaagaaccagagaaagaagaaatagaaacttccctacccatagctattacccctgaacctgaagattctaatttagtagaagaagagatcgtagaacttgattacccagaaagcccattggtttccgagaagcccttcccaccacatatgtcccctgaagtggagcacaaagaagaagagcttattctaccattattggcagcatcatctcctgaacatgttgctttgtctgaggaagaaagagaggaaattgcatctgtttctactggttctgcttttgtatcagagtattcagtaccacaggatttgaaccatgaattacaggagcaagaaggtgagccagttcccccatccaatgtagaagctatagctgaacatgcagttttgtcagaagaagagaatgaggaatttgaggcttattccccagctgcagcccctacatctgagagctctctctcaccatccacaactgagaagacttcagagaaccagtctccactgttttcaacagttacaccagaatacatggtcctatcaggagacgaggcctcagaaagtgggtgttacacaccagactccacatctgcttctgaatattcagttccatcactggcaacaaaagagtcactgaagaaaacaattgaccgtaagtccccgttaatattgaaaggtgtttctgagtacatgattccatcagaagagaaggaagacactggatcgtttactccagctgtggcccctgcttctgagccctctctctcaccatccacaaccgaaaagacttctgaatgccagtcaccactgccttctactgccacatcagaacacgtggtcccatcagaaggagaggacctaggaagtgaacgtttcacaccggattcaaagttgatctccaaatatgcagccccactcaatgcaacacaggaatctcaaaagaaaataatcaatgaggcatcccaattcaaaccaaaaggtatttctgagcacacagttctgtcagtagacggcaaggaggtcattggaccatcttccccagatttggttgttgcatctgaacactctttcccaccacacacaaccgagatgacttctgaatgccaggccccaccactttcagccaccccatctgaatatgttgttctatcagacgaagaggcagtcgagttggaacgatacacaccctcttctacatctgcttctgaattttcagtaccaccatatgcaacaccggaggcacaggaggaagaaattgtccatagatctctaaatctaaaaggtgcatcctcacccatgaatttatcagaagaagatcaagaagacattggacctttttctccagattctgcatttgtgtcagaattctcatttccaccgtatgcaacccaggaagcagagaaaagagaatttgagtgcgattctccaatatgtttaacatcaccatctgagcacactattttgtcagatgaagacactgaagaagcggaactgttctctccagactcagcatcacaagtttcaatccctccctttagaatctcagaaacagagaaaaatgaacttgagcctgattcactattaactgcagtgtctgcttcaggttattcctgcttttcagaagcagatgaggaagacattggatccacagctgctacacctgtatctgagcagttcagttcatcacagaagcaaaaagctgaaactttccctttgatgtctccgcttgaagacttaagtctgccgccttcaacagataaatcagagaaagcagaaattaagccagagattccaacaacctcaacatctgtatctgaatatctcattttggcacagaagcagaaaactcaagcatatttagagcctgagtctgaagacttgattccttcacatttaaccagtgaagtggagaagggagaaagggaggcaagttcatcagtagctgcaatacctgctgctttacctgcacaatcatctatagtaaaggaagaaaccaaacctgcatctccacattcagttttacctgattcagtccctgcaatcaagaaagaacaggaacccacagcagcactcactctaaaagctgcagatgaacagatggctttgtcaaaagtcagaaaggaagaaattgtgcctgattctcaagaagctacagcacatgtatcacaggatcaaaaaatggagcctcagcctccaaatgttccagagtctgagatgaaatattcagttttgcctgacatggtagatgagccaaagaagggtgtcaagcccaaattagttctaaatgtgacttctgaactagaacagagaaagttgtccaagaatgagcctgaagtaataaaaccatattcacctctaaaggaaacatctttatctggacctgaggctttatcagcagtgaaaatggagatgaaacatgattccaaaataacaactacacctatagtgcttcattcagcttcctcaggagtggaaaagcaagttgaacatggtccacctgcactagcattttcagctttgtcagaagaaattaaaaaagaaattgaacccagttcctcaacaactacagcatctgtaactaagcttgattcaaacttaaccagagcagtaaaagaagaaatcccaacagattcatctcttatcactcctgtagatcgtccagtcttaacaaaagtaggaaagggtgaattaggaagtggtttgccaccactggtaacatctgcagatgaacattcagttcttgcagaagaagacaaggtggcaattaaaggtgcttctcccattgaaacttcatccaaacatttagcttggtcagaagcagagaaggaaattaaatttgattcacttccaagtgtctcctctatagcagagcattctgttttgtcagaagtagaagccaaagaagttaaagctgggttgccagtaatcaaaacatcatcttctcagcattcagataaatctgaggaagcaagggtagaagacaaacaagatcttttattttctacagtctgtgactctgaacgtttggtttcatcacagaagaagagcttgatgtctacctcagaggtgttagagcctgaacatgagcttccactcagcctatggggtgagataaagaagaaagaaactgaacttccttcatcacaaaatgtgtcacctgcatccaaacatataatcccaaaaggcaaagatgaggaaacagcaagttcatctcctgagttggaaaatttagcatcaggtttagccccaacattactgctcctcagtgatgataagaacaaaccggcagtggaggtatcttctacagctcagggagacttcccatcagaaaaacaagatgttgctttggcagagctgtctttggaacctgagaagaaagacaagccacaccaaccgttggaattaccaaatgctgggtcagaattttctagtgatttaggtagacaaagtggatccataggtacaaaacaagcaaagtctcccataactgaaacagaggattctgttttagaaaaaggcccagctgagcttaggagcagagaaggaaaagaagaaaatagagagctttgtgcatcttctacgatgcctgcaatttcagagctttcatcattgcttagggaggaatctcagaatgaagaaattaaacctttctctcccaagatcatcagcctagagtcgaaagaaccacctgcctctgtagctgaaggaggcaacccagaagaatttcagccatttactttttctttaaaaggattatcagaggaggttagccatccagccgactttaaaaagggaggaaatcaagaaataggcccattaccaccaactggaaatttgaaggcacaagtcatgggagatattttagataagctaagtgaagaaacaggccacccaaattcatcccaggtactccagagtataacagaaccatcaaagattgctccttctgacctccttgtagaacaaaaaaagacagaaaaagcacttcattcagatcaaactgttaaattacctgatgtaagcacctcttctgaagataaacaagatctgggtattaagcagttttcacttatgagagagaatttgcctttggaacaatcaaaatcatttatgacaaccaagcctgcggatgtcaaagaaacaaaaatggaagaattctttatttctccaaaggatgaaaactggatgttgggaaagccagaaaatgtggctagtcaacacgaacagagaatagcaggatctgtgcagctggattcctctagcagcaatgagctgaggccagggcagctcaaggctgctgtgtccagtaaggaccatacatgtgaagtgagaaagcaggtcctgccgcattctgctgaagaatctcatttgtcatcacaagaagcagtatctgctcttgatacttccagtggtaatacagagaccttatcaagtaaaagttactcttctgaagaagtaaagctggctgaagaaccaaagtctttagtcctagctggaaatgtagagagaaacatagcagaggggaaggagattcattctttgatggagagtgaaagtttgctattggagaaagcaaacacagagctttcctggccttccaaagaagatagccaggaaaaaattaaactacctcctgaaagattcttccagaaaccagtgtctggcctatcagtggaacaggtgaagtcagaaacaatctcctcttctgtcaaaacagcccatttcccggcagaaggtgtggaacctgcattgggcaatgaaaaagaagcacacaggagcacacctccttttcctgaagagaagccattggaagaatcaaaaatggttcagtcaaaggttattgatgatgctgatgagggaaagaaaccatcacctgaagtaaaaatacccacacaaagaaaacccatctcctcaatccatgcaagagagcctcaatccccagagtcacctgaggtgacacaaaatccacctacacaaccaaaggtggctaagccggaccttcctgaggaaaagggaaagaaaggaatttcatctttcaaatcgtggatgtccagcttgttttttggatcgagcactccagataacaaagttgctgaacaagaagacttagaaacacagccaagtccatccgtagaaaaagcagtgactgtgatagatcctgaaggtacaattcccaccaattttaatgtagctgagaaaccagctgatcattcattatcagaggtaaaacttaaaactgctgatgaacccagaggtactttagtaaaatctggtgacggtcaaaacgttaaagaaaaatccatgattttatcaaatgtagaagatttacaacagccaaaattcatttctgaggtgtctagggaagattatggaaaaaaagaaatctcaggcgattcagaggaaatgaacataaactcagtagttacttctgctgatggtgagaaccttgaaattcaatcttattcactaatcggtgagaaattggttatggaagaagccaaaactattgttcctcctcatgttactgatagtaaaagagtccagaagccagcaatcgctcctccatctaaatggaatatttctatttttaaggaagagccaagaagtgatcaaaaacaaaaatcactcctttcatttgatgtagtagataaggtgccacaacagccaaaatcagcttcctccaactttgcaagtaaaaatatcacaaaggaatcagagaaaccagagtcaattattttgccagtagaagaatcaaaaggcagtttaattgatttcagtgaagacagactcaagaaagaaatgcaaaatcctacttccttgaaaatttctgaagaggaaacaaaactcaggtctgttagtccaactgagaagaaagataatttggaaaacagatcatataccttggcagaaaagaaggtgctggcagaaaaacaaaactctgtggccccattagagcttagagatagtaatgaaatagggaagacacaaattacacttggatctagatctactgaactgaaagaatcaaaagccgatgctatgccacagcacttctatcaaaatgaagactacaatgaaagacccaaaatcattgttggttctgaaaaggagaaaggtgaagaaaaagaaaatcaggtatatgtgctttcagaaggaaagaagcagcaggaacatcagccttattctgtgaatgtagccgagtctatgagtagagaatcagatatctctttaggtcattctttgggtgaaactcaatcattttcattagttaaagctacatcagttactgaaaaatcagaagccatgctcgcagaggctcacccagaaatcagagaagcaaaggcagtaggaacccaaccacatcctttagaagaaagtaaagttttggtggagaaaaccaagactttcctgccggtggctctttcttgtcgtgatgaaatagagaaccactctttatctcaggaaggaaatctagtattagaaaagtcaagcagagatatgccagatcacagtgaagaaaaagaacagttcagagagtcagagctatcgaaaggcggttcagtagatatcacaaaagaaactgtgaaacaaggatttcaagaaaaggcagtaggaacccaaccacgtcctttagaagaaagtaaagttttggtggagaaaactaagactttcctgccagtggttctttcttgtcatgatgaaatagagaaccactctttgtctcaggaaggaaatctagtgttagaaaagtcaagcagagatatgccagatcacagtgaagaaaaagaacagttcaaagagtcagagctatggaaaggtggttcagtagatatcacaaaagaaagtatgaaagaaggatttccatctaaagaatccgaaaggactttagctcgtccttttgatgaaactaagagctcagaaacaccgccatatttgctgtcacctgtaaaaccacaaactcttgcttcaggagcttctccagaaattaacgcagtgaagaaaaaagaaatgccacgatcagaattgactccagaaaggcatacagttcatactattcagacatctaaagatgacacatccgatgtgcctaaacaatctgttcttgtttcaaagcaccacttggaggctgcggaagatacccgtgtaaaggaaccactgtcttcagcaaaaagcaactatgctcaatttatatctaatacatcagcaagcaatgctgataaaatggtttctaataaagaaatgcccaaggaacctgaagacacatatgcaaaaggtgaagactttacagtgactagtaagccagccggactttcagaagatcagaagactgcctttagtatcatttctgaaggctgtgagatattgaatattcatgctccggcctttatttcttcaatcgatcaggaagaaagtgaacaaatgcaagataaattagaatatttggaagagaaagcctcatttaaaaccataccactccctgatgatagtgaaacagttgcttgtcataaaacattaaagagcaggttagaagatgaaaaagttaccccattgaaagaaaataaacaaaaggaaactcataagacaaaagaagagatatccacagattcagaaactgatttatcatttattcagcccacaattcccagtgaagaggattattttgaaaaatatactttgattgattataacatctccccagacccagaaaaacagaaagctccacagaaattaaatgttgaagagaaactctcaaaggaagttacagaagaaactatctctttcccagtaagttcagtggaaagtgcactagaacatgaatatgacttggtgaaattagatgaaagtttttatggaccagaaaagggccacaacatattatctcatccagagacccaaagccaaaactcagctgacaggaatgtttcaaaggacacaaagagagatgtggactcaaagtcaccggggatgcctttatttgaagcagaggaaggagttctatcacgaacccagatatttcctaccactattaaagtcattgatccagaatttctggaggagccacctgcacttgcatttttatataaggatctgtatgaagaagcagttggagagaaaaagaaggaagaggagacagcttctgaaggtgacagtgtgaattctgaggcatcatttcccagcagaaattctgacactgatgatggaacaggaatatattttgagaagtacatactcaaagatgacattctccatgacacatctctaactcaaaaggaccagggccaaggtctggaagaaaaacgagttggtaaggatgattcataccaaccgatagctgcagaaggggaaatttggggaaagtttggaactatttgcagggagaagagtctggaagaacagaaaggtgtttatggggaaggagaatcagtagaccatgtggagaccgttggtaacgtagcgatgcagaagaaagctcccatcacagaggacgtcagagtggctacccagaaaataagttatgcggttccatttgaagacacccatcatgttctggagcgtgcagatgaagcaggcagtcacggtaatgaagtcggaaatgcaagtccagaggtcaatctgaatgtcccagtacaagtgtccttcccggaggaagaatttgcatctggtgcaactcatgttcaagaaacatcactagaagaacctaaaatcctggtcccacctgagccaagtgaagagaggctccgtaatagccctgttcaggatgagtatgaatttacagaatccctgcataatgaagtggttcctcaagacatattatcagaagaactgtcttcagaatccacacctgaagatgtcttatctcaaggaaaggaatcctttgagcacatcagtgaaaatgaatttgcgagtgaggcagaacaaagtacacctgctgaacaaaaagagttgggcagcgagaggaaagaagaagaccaattatcatctgaggtagtaactgaaaaggcacaaaaagagctgaaaaagtcccagattgacacatactgttacacctgcaaatgtccaatttctgccactgacaaggtgtttggcacccacaaagaccatgaagtttcaacgcttgacacagctataagtgctgtaaaggttcaattagcagaatttctagaaaatttacaagaaaagtccttgaggattgaagcctttgttagtgagatagaatccttttttaataccattgaggaaaactgtagtaaaaatgagaaaaggctagaagaacagaatgaggaaatgatgaagaaggttttagcacagtatgatgagaaagcccagagctttgaggaagtgaagaagaagaagatggagttcctgcatgagcagatggtccactttctgcagagcatggacactgccaaagacaccctggagaccatcgtgagagaagcagaggagcttgatgaggccgtcttcctgacttcgtttgaggaaatcaatgaaaggttgctttctgcaatggagagcactgcttctttagagaaaatgcctgctgcgttttcccttttcgaacattatgatgacagctcggcaagaagtgaccagatgttaaaacaagtggctgttccacagcctcctagattagaacctcaggaaccaaattctgccaccagcacaacaattgcagtttactggagcatgaacaaggaagatgtcattgattcatttcaggtttactgcatggaggagccacaagatgatcaagaagtaaatgagttggtagaagaatacagactgacagtgaaagaaagctactgcatttttgaagatctggaacctgaccgatgctatcaagtgtgggtgatggctgtgaacttcactggatgtagcctgcccagtgaaagggccatctttaggacagcaccctccacccctgtgatccgcgctgaggactgtactgtgtgttggaacacagccactatccgatggcggcccaccaccccagaggccacggagacctacactctggagtactgcagacagcactctcctgagggagagggcctcagatctttctctggaatcaaaggactccagctgaaagttaacctccaacccaatgataactactttttctatgtgagggccatcaatgcatttgggacaagtgaacagagtgaagctgctctcatctccaccagaggaaccagatttctcttgttgagagaaacagctcatcctgctctacacatttcctcaagtgggacagtgatcagctttggtgagaggagacggctgacggaaatcccgtcagtgctgggtgaggagctgccttcctgtggccagcattactgggaaaccacagtcacagactgcccagcatatcgactcggcatctgctccagctcggctgtgcaggcaggtgccctaggacaaggggagacctcatggtacatgcactgctctgagccacagagatacacatttttctacagtggtattgtgagtgatgttcatgtgactgagcgtccagccagagtgggcatcctgctggactacaacaaccagagacttatcttcatcaacgcagagagcgagcagttgctcttcatcatcaggcacaggtttaatgagggtgtccaccctgcctttgccctggagaaacctggaaaatgtactttgcacctggggatagagcccccggattctgtaaggcacaagtgatccttggctttcagaatttgcaagaacagcgatttgaattttgggggggtctgctgttcattcctttaggtgctatacattattcaaaaagtctcccgcgcatttgcactaatgatggctgcatgcatagcaatcagcatgtgagcaaaatcgacaagaaaaccttgactttacagagcagtgtgtgagtaaacagaatgaaaacaacaacctccactctttagtttatataagtttgagttctttcctaaattaaaagatctacacttgagttgggaaccgaaagagaaaaatggacttccatctgttttactggtaaaggaaatcctctgatggacaggtcagagtgaaggaaggttgtgctggtaagacatctctgacgaagagccatggatgctttccacaaaatgtcacctcgctgcactaaaggatgatgaatcctaatcattaaaggaattgtttcagctgatttaaatttataatgaactcttttgtaataatgtatactgtagaacatgagtctctcctccctaaaattttaaatgtagaaatgtgctatatattagaaatttccattttgttaaataaatggttagagtctataaa

SEQ ID NO: 4643 - DNA, 1844 bp, Homo sapiens
  source 1..1844: mol_type = unassigned DNA
acacgtcagaaaaaaaaaaaaaaagtttgcagaatgtcccacaccgaaaaaaaaaaaaaatccgaaaccgagcgaaaaaaacctgcgagtgggcctggcggatgggattattaaagcttcgccggagccgcggctcgccctcccactccgccagcctccgggagaggagccgcacccggccggcccggccccagccccatggacctccgagcaggggactcgtgggggatgttagcgtgcctgtgcacggtgctctggcacctccctgcagtgccagctctcaatcgcacaggggacccagggcctggcccctccatccagaaaacctatgacctcacccgctacctggagcaccaactccgcagcttggctgggacctatctgaactacctgggcccccctttcaacgagccagacttcaaccctccccgcctgggggcagagactctgcccagggccactgttgacttggaggtgtggcgaagcctcaatgacaaactgcggctgacccagaactacgaggcctacagccaccttctgtgttacttgcgtggcctcaaccgtcaggctgccactgctgagctgcgccgcagcctggcccacttctgcaccagcctccagggcctgctgggcagcattgcgggcgtcatggcagctctgggctacccactgccccagccgctgcctgggactgaacccacttggactcctggccctgcccacagtgacttcctccagaagatggacgacttctggctgctgaaggagctgcagacctggctgtggcgctcggccaaggacttcaaccggctcaagaagaagatgcagcctccagcagctgcagtcaccctgcacctgggggctcatggcttctgacttctgaccttctcctcttcgctcccccttcaaaccctgctcccactttgtgagagccagccctgtatgccaacacctgttgagccaggagacagaagctgtgagcctctggccctttcctggaccggctgggcgtgtgatgcgatcagccctgtctcctccccacctcccaaaggtctaccgagctggggaggaggtacagtaggccctgtcctgtcctgtttctacaggaagtcatgctcgagggagtgtgaagtggttcaggttggtgcagaggcgctcatggcctcctgcttcttgcctaccacttggccagtgcccacccagcccctcaggtggcacatctggagggcaggggttgaggggccaccaccacacatgcctttctggggtgaagccctttggctgccccactctccttggatgggtgttgctcccttatccccaaatcactctatacatccaattcaggaaacaaacatggtggcaattctacacaaaaagagatgagattaacagtgcagggttggggtctgcattggaggtgccctataaaccagaagagaaaatactgaaagcacaggggcagggacagaccagaccagacccaggagtctccaaagcacagagtggcaaacaaaacccgagctgagcatcaggaccttgcctcgaattgtcttccagtattacggtgcctcttctctgccccctttcccagggtatctgtgggttgccaggctggggagggcaaccatagccacaccacaggatttcctgaaagtttacaatgcagtagcattttggggtgtagggtggcagctccccaaggccctgccccccagccccacccactcatgactctaagtgtgttgtattaatatttatttatttggagatgttatttattagatgatatttattgcagaatttctattcttgtattaacaaataaaatgcttgccccagaa

SEQ ID NO: 4644 - DNA, 781 bp, Homo sapiens
  source 1..781: mol_type = unassigned DNA
cctgcccacaggggactcgtgggggatgttagcgtgcctgtgcacggtgctctggcacctccctgcagtgccagctctcaatcgcacaggggacccagggcctggcccctccatccagaaaacctatgacctcacccgctacctggagcaccaactccgcagcttggctgggacctatctgaactacctgggcccccctttcaacgagccagacttcaaccctccccgcctgggggcagagactctgcccagggccactgttgacttggaggtgtggcgaagcctcaatgacaaactgcggctgacccagaactacgaggcctacagccaccttctgtgttacttgcgtggcctcaaccgtcaggctgccactgctgagctgcgccgcagcctggcccacttctgcaccagcctccagggcctgctgggcagcattgcgggcgtcatggcagctctgggctacccactgccccagccgctgcctgggactgaacccacttggactcctggccctgcccacagtgacttcctccagaagatggacgacttctggctgctgaaggagctgcagacctggctgtggcgctcggccaaggacttcaaccggctcaagaagaagatgcagcctccagcagctgcagtcaccctgcacctgggggctcatggcttctgacttctgaccttctcctcttcgctcccccttcaaaccctgctcccactttgtgagagccagccctgtatgccaacacctgttgagccaggagacagaagctgtgagcct

SEQ ID NO: 4645 - DNA, 967 bp, Homo sapiens
  source 1..967: mol_type = unassigned DNA
acttgctcccaggccagctcgctggcatttgggagaatgtgtcattgcatttactcaagggggaggaggagggaaggttagagatgaggaggcagaggtagggtgggagcagggacctcgcacaggcagaggggactcgtgggggatgttagcgtgcctgtgcacggtgctctggcacctccctgcagtgccagctctcaatcgcacaggggacccagggcctggcccctccatccagaaaacctatgacctcacccgctacctggagcaccaactccgcagcttggctgggacctatctgaactacctgggcccccctttcaacgagccagacttcaaccctccccgcctgggggcagagactctgcccagggccactgttgacttggaggtgtggcgaagcctcaatgacaaactgcggctgacccagaactacgaggcctacagccaccttctgtgttacttgcgtggcctcaaccgtcaggctgccactgctgagctgcgccgcagcctggcccacttctgcaccagcctccagggcctgctgggcagcattgcgggcgtcatggcagctctgggctacccactgccccagccgctgcctgggactgaacccacttggactcctggccctgcccacagtgacttcctccagaagatggacgacttctggctgctgaaggagctgcagacctggctgtggcgctcggccaaggacttcaaccggctcaagaagaagatgcagcctccagcagctgcagtcaccctgcacctgggggctcatggcttctgacttctgaccttctcctcttcgctcccccttcaaaccctgctcccactttgtgagagccagccctgtatgccaacacctgttgagccaggagacagaagctgtgagcctctggccctttcctggaccggctgggcgtgtgatgcgatcagccctgtctcctccccacctcccaaa

SEQ ID NO: 4646 - DNA, 2763 bp, Homo sapiens
  source 1..2763: mol_type = unassigned DNA
atcgatgccccgtccccgccccacagccaacctcccgggcaccgttgcccgcccggggcccgctaccggcccaggccccgcctcgcgagtcctcctccccgggtgccttcccgcagcccgctcggcccagagggtgggcgcggggctgcctctaccggctggcggctgtaactcagcgaccttggcccgaaggctctagcaaggacccaccgaccccagccgcggcggcggcggcgcggactttgcccggtgtgtggggcggagcggactgcgtgtccgcggacgggcagcgaagatgttagccttcgctgccaggaccgtggtgaagcctctgggcttcctgaagcccttctccttgatgaaggcttccagccgcttcaaggcacaccaggatgcactgccacggctgcccgtgccccctctccagcagtccctggaccactacctgaaggcgctgcagcccatcgtgagtgaggaggagtgggcccacaccaagcagctggtggatgagtttcaggcctcaggaggtgtaggggagcgcctgcagaaggggctggagcgtcgggccaggaagacggagaactggctgtctgagtggtggctcaagaccgcctacctccagtaccgccagcctgtggtcatctactcgagcccaggcgtgatgctacccaagcaggacttcgtggacctgcagggtcagctccgatttgctgccaaactcattgagggtgtgttggatttcaaggtcatgattgacaacgagaccctgcccgtggagtacctgggggggaagccactgtgcatgaaccagtactatcagatcttgtcctcctgccgagtgccgggccccaagcaggacacagtcagcaacttcagcaagaccaagaagcctcccacgcacatcaccgtggtacacaactaccagttttttgagctggatgtgtaccacagtgacgggacacccctcactgcggatcagatctttgtgcagctggagaagatctggaactcatccctacagaccaacaaggagcctgtgggcatcctcacctccaaccaccgcaactcctgggccaaggcatacaacaccctcatcaaagacaaggtgaaccgggattccgtgcgctccatccagaagagcatcttcaccgtgtgcctagatgcaaccatgcccagggtctcagaagacgtgtaccgcagccacgtggcaggccagatgctgcatgggggcggcagcaggctcaacagcggcaaccgctggttcgacaagacgctgcagttcatcgtggcagaagatggctcctgtgggcttgtgtacgagcatgctgcagcggaggggccccctattgtcacccttctggactatgtcatcgagtacacgaagaaacccgagcttgtgcggtctcccctggtgcccctgcccatgcccaagaagctgcggttcaacatcacccccgagatcaagagcgacatcgagaaggccaagcagaacctcagcatcatgatccaggacctggatatcaccgtgatggtgttccaccattttggaaaagacttccccaagtcggagaagctaagcccagatgccttcatccagatggctttgcagctggcctactacaggatctacggacaggcatgtgccacctatgaaagtgcctccctgcgcatgtttcacctgggccgcaccgacaccatccgctcggcttccatggactcactcacctttgtcaaggccatggatgactccagcgtcacggagcaccagaaggtggagctgctgcggaaggccgtgcaggcccaccgaggctacaccgaccgggccatccgcggggaggcctttgatcgacacctgctgggcctgaagctgcaggccatcgaggacctggtgagcatgcccgacatcttcatggacacctcctacgccatcgccatgcacttccacctctccaccagccaggtccctgccaagacagactgtgtcatgttcttcgggcccgtggtccccgacggctacggtgtctgctataaccccatggaggcccacatcaacttctccctgtcggcctacaacagctgcgcggagaccaacgccgcccgcctggcgcattacctggagaaggcgctcctggacatgcgtgccctgctgcagagccacccccgggccaagctctgagcccctaggactcaggcctgccaatgccacagccaagcccaccctgggatgggccacccaccagggctcagctccttggttccctcttccttggttccctcttccctggtccccccaaatctactgagccacggaccgcatcctccagggggcctgcaggccccagccaagtgccttccgtgggtcatcccagcacctgccagggcccgacctggggctgagtgcagaggctgagcaggacgttaggcccgggcccctggcacgtcctccaccggtgcctcctctggggaagggaaccagccctccagagcaggagactggcaagagctctttgtctcaccagctcagccccggccactccctgccaactccatgaccaggccaccatctgtaccctgcttcccaaactcccaggacctggagacaggattgtctggggccgaggggccagggtgtgaggtttcacctccgttgcggctgtgctcctgtggataacattgctagcgagccgcctctggttccactcagcttggttcctgcccccgccctgctgtatgatattaatgtggaaggtcatcaataaaggg

SEQ ID NO: 4647 - DNA, 2523 bp, Homo sapiens
  source 1..2523: mol_type = unassigned DNA
ccccgccccacagccaacctcccgggcaccgttgcccgcccggggcccgctaccggcccaggccccgcctcgcgagtcctcctccccgggtgccttcccgcagcccgctcggcccagagggtgggcgcggggctgcctctaccggctggcggctgtaactcagcgaccttggcccgaaggctctagcaaggacccaccgaccccagccgcggcggcggcggcgcggactttgcccggtgtgtggggcggagcggactgcgtgtccgcggacgggcagcgaagatgttagccttcgctgccaggaccgtggtgaagcctctgggcttcctgaagcccttctccttgatgaaggcttccagccgcttcaaggcacaccaggatgcactgccacggctgcccgtgccccctctccagcagtccctggaccactacctgaaggcgctgcagcccatcgtgagtgaggaggagtgggcccacaccaagcagctggtggatgagtttcaggcctcaggaggtgtaggggagcgcctgcagaaggggctggagcgtcgggccaggaagacggagaactggctgtctgagtggtggctcaagaccgcctacctccagtaccgccagcctgtggtcatctactcgagcccaggcgtgatgctacccaagcaggacttcgtggacctgcagggtcagctccgatttgctgccaaactcattgagggtgtgttggatttcaaggtcatgattgacaacgagaccctgcccgtggagtacctgggggggaagccactgtgcatgaaccagtactatcagatcttgtcctcctgccgagtgccgggccccaagcaggacacagtcagcaacttcagcaagaccaagaagcctcccacgcacatcaccgtggtacacaactaccagttttttgagctggatgtgtaccacagtgacgggacacccctcactgcggatcagatctttgtgcagctggagaagatctggaactcatccctacagaccaacaaggagcctgtgggcatcctcacctccaaccaccgcaactcctgggccaaggcatacaacaccctcatcaaagacaaggtgaaccgggattccgtgcgctccatccagaagaagaaacccgagcttgtgcggtctcccctggtgcccctgcccatgcccaagaagctgcggttcaacatcacccccgagatcaagagcgacatcgagaaggccaagcagaacctcagcatcatgatccaggacctggatatcaccgtgatggtgttccaccattttggaaaagacttccccaagtcggagaagctaagcccagatgccttcatccagatggctttgcagctggcctactacaggatctacggacaggcatgtgccacctatgaaagtgcctccctgcgcatgtttcacctgggccgcaccgacaccatccgctcggcttccatggactcactcacctttgtcaaggccatggatgactccagcgtcacggagcaccagaaggtggagctgctgcggaaggccgtgcaggcccaccgaggctacaccgaccgggccatccgcggggaggcctttgatcgacacctgctgggcctgaagctgcaggccatcgaggacctggtgagcatgcccgacatcttcatggacacctcctacgccatcgccatgcacttccacctctccaccagccaggtccctgccaagacagactgtgtcatgttcttcgggcccgtggtccccgacggctacggtgtctgctataaccccatggaggcccacatcaacttctccctgtcggcctacaacagctgcgcggagaccaacgccgcccgcctggcgcattacctggagaaggcgctcctggacatgcgtgccctgctgcagagccacccccgggccaagctctgagcccctaggactcaggcctgccaatgccacagccaagcccaccctgggatgggccacccaccagggctcagctccttggttccctcttccttggttccctcttccctggtccccccaaatctactgagccacggaccgcatcctccagggggcctgcaggccccagccaagtgccttccgtgggtcatcccagcacctgccagggcccgacctggggctgagtgcagaggctgagcaggacgttaggcccgggcccctggcacgtcctccaccggtgcctcctctggggaagggaaccagccctccagagcaggagactggcaagagctctttgtctcaccagctcagccccggccactccctgccaactccatgaccaggccaccatctgtaccctgcttcccaaactcccaggacctggagacaggattgtctggggccgaggggccagggtgtgaggtttcacctccgttgcggctgtgctcctgtggataacattgctagcgagccgcctctggttccactcagcttggttcctgcccccgccctgctgtatgatattaatgtggaaggtcatcaataaaggggaattgtgttggtgaa

SEQ ID NO: 4648 - DNA, 5249 bp, Homo sapiens
  source 1..5249: mol_type = unassigned DNA
ggacccgcctcagccaatccgctgctgccggcgtcgggtgcgctcggcctcgcccgcggccctccttccccggctcccgctcgccgctcgttcactccaccgccgccgccgccgccgccgctgccgctgccgctgccgcacctccgtagctgactcggtactctctgaagatggcagaagctcaccaagctgtggcctttcagttcacggtcactccggacgggattgacctgcggctgagccatgaagctcttagacaaatctatctctctggacttcattcctggaaaaagaagttcatcagattcaagaacggcatcatcactggcgtgtacccggcaagcccctccagttggcttatcgtggtggtgggcgtgatgacaacgatgtacgccaagatcgacccctcgttaggaataattgcaaaaatcaatcggactctggaaacggccaactgcatgtccagccagacgaagaacgtggtcagcggcgtgctgtttggcaccggcctgtgggtggccctcatcgtcaccatgcgctactccctgaaagtgctgctctcctaccacgggtggatgttcactgagcacggcaagatgagtcgtgccaccaagatctggatgggtatggtcaagatcttttcaggccgaaaacccatgttgtacagcttccagacatcgctgcctcgcctgccggtcccggctgtcaaagacactgtgaacaggtatctacagtcggtgaggcctcttatgaaggaagaagacttcaaacggatgacagcacttgctcaagattttgctgtcggtcttggaccaagattacagtggtatttgaagttaaaatcctggtgggctacaaattacgtgagcgactggtgggaggagtacatctacctccgaggacgagggccgctcatggtgaacagcaactattatgccatggatctgctgtatatccttccaactcacattcaggcagcaagagccggcaacgccatccatgccatcctgctttacaggcgcaaactggaccgggaggaaatcaaaccaattcgtcttttgggatccacgattccactctgctccgctcagtgggagcggatgtttaatacttcccggatcccaggagaggagacagacaccatccagcacatgagagacagcaagcacatcgtcgtgtaccatcgaggacgctacttcaaggtctggctctaccatgatgggcggctgctgaagccccgggagatggagcagcagatgcagaggatcctggacaatacctcggagcctcagcccggggaggccaggctggcagccctcaccgcaggagacagagttccctgggccaggtgtcgtcaggcctattttggacgtgggaaaaataagcagtctcttgatgctgtggagaaagcagcgttctttgtgacgttagatgaaactgaagaaggatacagaagtgaagacccggatacgtcaatggacagctacgccaaatctctactacacggccgatgttacgacaggtggtttgacaagtcgttcacgtttgttgtcttcaaaaacgggaagatgggcctcaacgctgaacactcctgggcagatgcgccgatcgtggcccacctttgggagtacgtcatgtccattgacagcctccagctgggctatgcggaggatgggcactgcaaaggcgacatcaatccgaacattccgtaccccaccaggctgcagtgggacatcccgggggaatgtcaagaggttatagagacctccctgaacaccgcaaatcttctggcaaacgacgtggatttccattccttcccattcgtagcctttggtaaaggaatcatcaagaaatgtcgcacgagcccagacgcctttgtgcagctggccctccagctggcgcactacaaggacatgggcaagttttgcctcacatacgaggcctccatgacccggctcttccgagaggggaggacggagaccgtgcgctcctgcaccactgagtcatgcgacttcgtgcgggccatggtggacccggcccagacggtggaacagaggctgaagttgttcaagttggcgtctgagaagcatcagcatatgtatcgcctcgccatgaccggctctgggatcgatcgtcacctcttctgcctttacgtggtgtctaaatatctcgctgtggagtcccctttccttaaggaagttttatctgagccttggagattatcaacaagccagacccctcagcagcaagtggagctgtttgacttggagaataacccagagtacgtgtccagcggagggggctttggaccggttgctgatgacggctatggtgtgtcgtacatccttgtgggagagaacctcatcaatttccacatttcttccaagttctcttgccctgagacggattctcatcgctttggaaggcacctgaaagaagcaatgactgacatcatcactttgtttggtctcagttctaattccaaaaagtaattccactggagctgctgggaaggaaaacgagctcttctgatgcaaaccaaatgaaaaataggcattaatcctgaccttagctcgggatgaaacactgctcttaaaaaaactcagttttccttccagaaaatgtgggtgtttttttttcctagaacagtatctctcccctgtgaagcataaccccactacttccagacttgccctcccttgggggacatctgataaagtctcccctgatgtctccgcatcggcttggatttattaagggatgcaaatcttgttgagttaatgaaggaattagtagggttgtggcttcacacacagtggaatggaaatggtgtgctttctcagtggcaaccgaaggcctagtgcttaagggcatttagcatcatccaagcagggtaaacttttgttttgttaaaagaaaaatgtgttattcaagttggtgtccccagttgtagctaacacatctggaatgcactaaccaaaatgctgtgctttggagacctgcttttgtcaccgtgggtaaccgttcccgtctggtccagtagcctgtgtttgcctctccacatttgaagcaagcaggatgcaaggtcttcagttttactgaccttgtatgtcttcaagtcttcacaacccagtgccttaaaaatgaaaggccctaaatgtaagggagatggagagaaagatttattttgtagagtctttgggtggaattgtgggtatactgttcccttcacaattgactgagtatggataaccgtacataagcatttgctacaccccaccagccccctccccctcagaaacaccagttccttcccaagggcagctgtgccagactcccctcccgggactgccttcttgtcatcataagcaacaaaagaaataacaggcacatgtcataaaaggggagcaagggccgtgatggtcagataattcactcaagaataaaacatgacacgtgcctcaggaggatctctttcccaaagtgacagcaaggagggcagggcatcggccaccaagcggggactagcaagtgaggaaggggagggcagcccaccgtggtgaggagagagtggctccacgaccccaagggatggccttctcctcccacccggtgaggggaaagactcaccagagggtgatggagacagtatgccggctcaccttggtgaccagccaagatgtctcaagtgacagtgctaggtgttcacccagcctgtccttcagataggagtgccttcacgaaagcgtctcatggaccacaaagcaattatgcactgagtcatcttcagtatttaatgcaaaaatgaagcatcatggaatgaaattcccactgtctgtcatgacaagcttagctgtccattgttttaaattgtgtatttatttttttgaccacttggttctagttgggcctgactccttcagagtgctgcaccccgatagtacaacagcgatggctgaactgttggagtcgatggaaggtgcttgccggagaacacgtgcctttttttttttttttttttttgagatggagtttcactcttgttgcccaggctggagtgcagtggtgcaatctcggctcactgcagcatctgccttgcaggttcaagcgattctcctgtctcagcctcccaagtagctgggattacacgcccaacaccatgccctgctaatttttgtatttttagtagagacggggtttcatcatattggtcaggctggtctcgaactcctgacctcaggtgatccacctgcctcagcctcccaaagtgctgggattacaggcatgagccaccatgcgcggcccacatgcatgttttatgtatgtatacttcatgatgtaaaaatcccacctttatgggccaaagattttttttctcctgaaagcaagaaaaaatgaaaacaaaagacaaaaaaaaaaaaaaaagcgtccaggcgcggtggctcatgcgtgtaatcccagcactttgggaggccaaggcgggcggatcacgaggtcaggagatggagaccatcctggctaacacggtgaaaccccgtctctactaaaaattcaaaaaatgagccgggcgtggtggcgggcgcctgtagtcccagctactcaggaggctgaggcaggagaatggcgtgaacccgggaggcggagcttgcagtgagccgagatcgctccactgcactccagcctgggcgacagagcgagactccgtctaaaaaaaaaagcaaaaacaaaccaacaacaaaagcccctgactgtccgtcaagcaggcagcggggatgtagctctctctgccctgggcaagaatagcacttcccgttaaaagccagcagccggcgtcagtccctatcagagccagctagatcatgcactgttgaccactgagcaatctgtgttacactagagttcacagggcattttgagtgtagacgtgagtgcttaaacatatttgggtttctctctcaggttttaaatgtttcaaatgtaattgttgctcatcagtgcagttatcaatgcaattttatattccttgaggggagaaagaggggtcttattgtacatgtccaaggggggtgataagagtattatctgtttaatttaattggaacaaaccattgtcttaacgcagccatggtttgaatttgttatcttgggctgaccggtgcatgtaaatacagtatgctctttggatgtaaatcttagaaatgcagtgtgaatgtaggttatcattaataaaacattaaccccagtctact

SEQ ID NO: 4649 - DNA, 2635 bp, Homo sapiens
  source 1..2635: mol_type = unassigned DNA
ggacccgcctcagccaatccgctgctgccggcgtcgggtgcgctcggcctcgcccgcggccctccttccccggctcccgctcgccgctcgttcactccaccgccgccgccgccgccgccgctgccgctgccgctgccgcacctccgtagctgactcggtactctctgaagatggcagaagctcaccaagctgtggcctttcagttcacggtcactccggacgggattgacctgcggctgagccatgaagctcttagacaaatctatctctctggacttcattcctggaaaaagaagttcatcagattcaagaacggcatcatcactggcgtgtacccggcaagcccctccagttggcttatcgtggtggtgggcgtgatgacaacgatgtacgccaagatcgacccctcgttaggaataattgcaaaaatcaatcggactctggaaacggccaactgcatgtccagccagacgaagaacgtggtcagcggcgtgctgtttggcaccggcctgtgggtggccctcatcgtcaccatgcgctactccctgaaagtgctgctctcctaccacgggtggatgttcactgagcacggcaagatgagtcgtgccaccaagatctggatgggtatggtcaagatcttttcaggccgaaaacccatgttgtacagcttccagacatcgctgcctcgcctgccggtcccggctgtcaaagacactgtgaacaggtatctacagtcggtgaggcctcttatgaaggaagaagacttcaaacggatgacagcacttgctcaagattttgctgtcggtcttggaccaagattacagtggtatttgaagttaaaatcctggtgggctacaaattacgtgagcgactggtgggaggagtacatctacctccgaggacgagggccgctcatggtgaacagcaactattatgccatggatctgctgtatatccttccaactcacattcaggcagcaagagccggcaacgccatccatgccatcctgctttacaggcgcaaactggaccgggaggaaatcaaaccaattcgtcttttgggatccacgattccactctgctccgctcagtgggagcggatgtttaatacttcccggatcccaggagaggagacagacaccatccagcacatgagagacagcaagcacatcgtcgtgtaccatcgaggacgctacttcaaggtctggctctaccatgatgggcggctgctgaagccccgggagatggagcagcagatgcagaggatcctggacaatacctcggagcctcagcccggggaggccaggctggcagccctcaccgcaggagacagagttccctgggccaggtgtcgtcaggcctattttggacgtgggaaaaataagcagtctcttgatgctgtggagaaagcagcgttctttgtgacgttagatgaaactgaagaaggatacagaagtgaagacccggatacgtcaatggacagctacgccaaatctctactacacggccgatgttacgacaggtggtttgacaagtcgttcacgtttgttgtcttcaaaaacgggaagatgggcctcaacgctgaacactcctgggcagatgcgccgatcgtggcccacctttgggagtacgtcatgtccattgacagcctccagctgggctatgcggaggatgggcactgcaaaggcgacatcaatccgaacattccgtaccccaccaggctgcagtgggacatcccgggggaatgtcaagaggttatagagacctccctgaacaccgcaaatcttctggcaaacgacgtggatttccattccttcccattcgtagcctttggtaaaggaatcatcaagaaatgtcgcacgagcccagacgcctttgtgcagctggccctccagctggcgcactacaaggacatgggcaagttttgcctcacatacgaggcctccatgacccggctcttccgagaggggaggacggagaccgtgcgctcctgcaccactgagtcatgcgacttcgtgcgggccatggtggacccggcccagacggtggaacagaggctgaagttgttcaagttggcgtctgagaagcatcagcatatgtatcgcctcgccatgaccggctctgggatcgatcgtcacctcttctgcctttacgtggtgtctaaatatctcgctgtggagtcccctttccttaaggaagttttatctgagccttggagattatcaacaagccagacccctcagcagcaagtggagctgtttgacttggagaataacccagagtacgtgtccagcggagggggctttggaccggttgctgatgacggctatggtgtgtcgtacatccttgtgggagagaacctcatcaatttccacatttcttccaagttctcttgccctgagacggggattataagtcaaggaccaagttcagatacttgagacaaagtggaaagtctcagcatatggaaacaaggccttggaggagaccatggacatcaccaagttcatgtgctgggctggaaagaaaagcctgttgattttcacttgctgtgcatttattcatccattccattgcctcaatgctgagaacagtgcctgacacataaaagatgctcaataaatatgttaaaagt

SEQ ID NO: 4650 - DNA, 4594 bp, Homo sapiens
  source 1..4594: mol_type = unassigned DNA
aatccgctgctgccggcgtcgggtgcgctcggcctcgcccgcggccctccttccccggctcccgctcgccgctcgttcactccaccgccgccgccgccgccgccgctgccgctgccgctgccgcacctccgtagctgactcggtactctctgaagatggcagaagctcaccaagctgtggcctttcagttcacggtcactccggacgggattgacctgcggctgagccatgaagctcttagacaaatctatctctctggacttcattcctggaaaaagaagttcatcagattcaagaacggcatcatcactggcgtgtacccggcaagcccctccagttggcttatcgtggtggtgggcgtgatgacaacgatgtacgccaagatcgacccctcgttaggaataattgcaaaaatcaatcggactctggaaacggccaactgcatgtccagccagacgaagaacgtggtcagcggcgtgctgtttggcaccggcctgtgggtggccctcatcgtcaccatgcgctactccctgaaagtgctgctctcctaccacgggtggatgttcactgagcacggcaagatgagtcgtgccaccaagatctggatgggtatggtcaagatcttttcaggccgaaaacccatgttgtacagcttccagacatcgctgcctcgcctgccggtcccggctgtcaaagacactgtgaacaggtatctacagtcggtgaggcctcttatgaaggaagaagacttcaaacggatgacagcacttgctcaagattttgctgtcggtcttggaccaagattacagtggtatttgaagttaaaatcctggtgggctacaaattacgtgagcgactggtgggaggagtacatctacctccgaggacgagggccgctcatggtgaacagcaactattatgccatggatctgctgtatatccttccaactcacattcaggcagcaagagccggcaacgccatccatgccatcctgctttacaggcgcaaactggaccgggaggaaatcaaaccaattcgtcttttgggatccacgattccactctgctccgctcagtgggagcggatgtttaatacttcccggatcccaggagaggagacagacaccatccagcacatgagagacagcaagcacatcgtcgtgtaccatcgaggacgctacttcaaggtctggctctaccatgatgggcggctgctgaagccccgggagatggagcagcagatgcagaggatcctggacaatacctcggagcctcagcccggggaggccaggctggcagccctcaccgcaggagacagagttccctgggccaggtgtcgtcaggcctattttggacgtgggaaaaataagcagtctcttgatgctgtggagaaagcagcgttctttgtgacgttagatgaaactgaagaaggatacagaagtgaagacccggatacgtcaatggacagctacgccaaatctctactacacggccgatgttacgacaggtggtttgacaagtcgttcacgtttgttgtcttcaaaaacgggaagatgggcctcaacgctgaacactcctgggcagatgcgccgatcgtggcccacctttgggagtacgtcatgtccattgacagcctccagctgggctatgcggaggatgggcactgcaaaggcgacatcaatccgaacattccgtaccccaccaggctgcagtgggacatcccgggggaatgtcaagaggttatagagacctccctgaacaccgcaaatcttctggcaaacgacgtggatttccattccttcccattcgtagcctttggtaaaggaatcatcaagaaatgtcgcacgagcccagacgcctttgtgcagctggccctccagctggcgcactacaaggacatgggcaagttttgcctcacatacgaggcctccatgacccggctcttccgagaggggaggacggagaccgtgcgctcctgcaccactgagtcatgcgacttcgtgcgggccatggtggacccggcccagacggtggaacagaggctgaagttgttcaagttggcgtctgagaagcatcagcatatgtatcgcctcgccatgaccggctctgggatcgatcgtcacctcttctgcctttacgtggtgtctaaatatctcgctgtggagtcccctttccttaaggaagttttatctgagccttggagattatcaacaagccagacccctcagcagcaagtggagctgtttgacttggagaataacccagagtacgtgtccagcggagggggctttggaccggttgctgatgacggctatggtgtgtcgtacatccttgtgggagagaacctcatcaatttccacatttcttccaagttctcttgccctgagacggattctcatcgctttggaaggcacctgaaagaagcaatgactgacatcatcactttgtttggtctcagttctaattccaaaaagtaattccactggagctgctgggaaggaaaacgagctcttctgatgcaaaccaaatgaaaaataggcattaatcctgaccttagctcgggatgaaacactgctcttaaaaaaactcagttttccttccagaaaatgtgggtgtttttttttcctagaacagtatctctcccctgtgaagcataaccccactacttccagacttgccctcccttgggggacatctgataaagtctcccctgatgtctccgcatcggcttggatttattaagggatgcaaatcttgttgagttaatgaaggaattagtagggttgtggcttcacacacagtggaatggaaatggtgtgctttctcagtggcaaccgaaggcctagtgcttaagggcatttagcatcatccaagcagggtaaacttttgttttgttaaaagaaaaatgtgttattcaagttggtgtccccagttgtagctaacacatctggaatgcactaaccaaaatgctgtgctttggagacctgcttttgtcaccgtgggtaaccgttcccgtctggtccagtagcctgtgtttgcctctccacatttgaagcaagcaggatgcaaggtcttcagttttactgaccttgtatgtcttcaagtcttcacaacccagtgccttaaaaatgaaaggccctaaatgtaagggagatggagagaaagatttattttgtagagtctttgggtggaattgtgggtatactgttcccttcacaattgactgagtatggataaccgtacataagcatttgctacaccccaccagccccctccccctcagaaacaccagttccttcccaagggcagctgtgccagactcccctcccgggactgccttcttgtcatcataagcaacaaaagaaataacaggcacatgtcataaaaggggagcaagggccgtgatggtcagataattcactcaagaataaaacatgacacgtgcctcaggaggatctctttcccaaagtgacagcaaggagggcagggcatcggccaccaagcggggactagcaagtgaggaaggggagggcagcccaccgtggtgaggagagagtggctccacgaccccaagggatggccttctcctcccacccggtgaggggaaagactcaccagagggtgatggagacagtatgccggctcaccttggtgaccagccaagatgtctcaagtgacagtgctaggtgttcacccagcctgtccttcagataggagtgccttcacgaaagcgtctcatggaccacaaagcaattatgcactgagtcatcttcagtatttaatgcaaaaatgaagcatcatggaatgaaattcccactgtctgtcatgacaagcttagctgtccattgttttaaattgtgtatttatttttttgaccacttggttctagttgggcctgactccttcagagtgctgcaccccgatagtacaacagcgatggctgaactgttggagtcgatggaaggtgcttgccggagaacacgtgcctttttttttttttttttttttgagatggagtttcactcttcctgggcgacagagcgagactccgtctaaaaaaaaaagcaaaaacaaaccaacaacaaaagcccctgactgtccgtcaagcaggcagcggggatgtagctctctctgccctgggcaagaatagcacttcccgttaaaagccagcagccggcgtcagtccctatcagagccagctagatcatgcactgttgaccactgagcaatctgtgttacactagagttcacagggcattttgagtgtagacgtgagtgcttaaacatatttgggtttctctctcaggttttaaatgtttcaaatgtaattgttgctcatcagtgcagttatcaatgcaattttatattccttgaggggagaaagaggggtcttattgtacatgtccaaggggggtgataagagtattatctgtttaatttaattggaacaaaccattgtcttaacgcagccatggtttgaatttgttatcttgggctgaccggtgcatgtaaatacagtatgctctttggatgtaaatcttagaaatgcagtgtgaatgtaggttatcattaataaaacattaaccccagtcta

SEQ ID NO: 4651 - DNA, 2382 bp, Homo sapiens
  source 1..2382: mol_type = unassigned DNA
ctccttctccttccaggtactctctgaagatggcagaagctcaccaagctgtggcctttcagttcacggtcactccggacgggattgacctgcggctgagccatgaagctcttagacaaatctatctctctggacttcattcctggaaaaagaagttcatcagattcaagaacggcatcatcactggcgtgtacccggcaagcccctccagttggcttatcgtggtggtgggcgtgatgacaacgatgtacgccaagatcgacccctcgttaggaataattgcaaaaatcaatcggactctggaaacggccaactgcatgtccagccagacgaagaacgtggtcagcggcgtgctgtttggcaccggcctgtgggtggccctcatcgtcaccatgcgctactccctgaaagtgctgctctcctaccacgggtggatgttcactgagcacggcaagatgagtcgtgccaccaagatctggatgggtatggtcaagatcttttcaggccgaaaacccatgttgtacagcttccagacatcgctgcctcgcctgccggtcccggctgtcaaagacactgtgaacaggtatctacagtcggtgaggcctcttatgaaggaagaagacttcaaacggatgacagcacttgctcaagattttgctgtcggtcttggaccaagattacagtggtatttgaagttaaaatcctggtgggctacaaattacgtgagcgactggtgggaggagtacatctacctccgaggacgagggccgctcatggtgaacagcaactattatgccatggatctgctgtatatccttccaactcacattcaggcagcaagagccggcaacgccatccatgccatcctgctttacaggcgcaaactggaccgggaggaaatcaaaccaattcgtcttttgggatccacgattccactctgctccgctcagtgggagcggatgtttaatacttcccggatcccaggagaggagacagacaccatccagcacatgagagacagcaagcacatcgtcgtgtaccatcgaggacgctacttcaaggtctggctctaccatgatgggcggctgctgaagccccgggagatggagcagcagatgcagaggatcctggacaatacctcggagcctcagcccggggaggccaggctggcagccctcaccgcaggagacagagttccctgggccaggtgtcgtcaggcctattttggacgtgggaaaaataagcagtctcttgatgctgtggagaaagcagcgttctttgtgacgttagatgaaactgaagaaggatacagaagtgaagacccggatacgtcaatggacagctacgccaaatctctactacacggccgatgttacgacaggtggtttgacaagtcgttcacgtttgttgtcttcaaaaacgggaagatgggcctcaacgctgaacactcctgggcagatgcgccgatcgtggcccacctttgggagtacgtcatgtccattgacagcctccagctgggctatgcggaggatgggcactgcaaaggcgacatcaatccgaacattccgtaccccaccaggctgcagtgggacatcccgggggaatgtcaagaggttatagagacctccctgaacaccgcaaatcttctggcaaacgacgtggatttccattccttcccattcgtagcctttggtaaaggaatcatcaagaaatgtcgcacgagcccagacgcctttgtgcagctggccctccagctggcgcactacaaggacatgggcaagttttgcctcacatacgaggcctccatgacccggctcttccgagaggggaggacggagaccgtgcgctcctgcaccactgagtcatgcgacttcgtgcgggccatggtggacccggcccagacggtggaacagaggctgaagttgttcaagttggcgtctgagaagcatcagcatatgtatcgcctcgccatgaccggctctgggatcgatcgtcacctcttctgcctttacgtggtgtctaaatatctcgctgtggagtcccctttccttaaggaagttttatctgagccttggagattatcaacaagccagacccctcagcagcaagtggagctgtttgacttggagaataacccagagtacgtgtccagcggagggggctttggaccggttgctgatgacggctatggtgtgtcgtacatccttgtgggagagaacctcatcaatttccacatttcttccaagttctcttgccctgagacggattctcatcgctttggaaggcacctgaaagaagcaatgactgacatcatcactttgtttggtctcagttctaattccaaaaagtaattccactggagctgctgggaaggaaaacgag

SEQ ID NO: 4652 - DNA, 2496 bp, Homo sapiens
  source 1..2496: mol_type = unassigned DNA
ctccttctccttccaggtactctctgaagatggcagaagctcaccaagctgtggcctttcagttcacggtcactccggacgggattgacctgcggctgagccatgaagctcttagacaaatctatctctctggacttcattcctggaaaaagaagttcatcagattcaagaacggcatcatcactggcgtgtacccggcaagcccctccagttggcttatcgtggtggtgggcgtgatgacaacgatgtacgccaagatcgacccctcgttaggaataattgcaaaaatcaatcggactctggaaacggccaactgcatgtccagccagacgaagaacgtggtcagcggcgtgctgtttggcaccggcctgtgggtggccctcatcgtcaccatgcgctactccctgaaagtgctgctctcctaccacgggtggatgttcactgagcacggcaagatgagtcgtgccaccaagatctggatgggtatggtcaagatcttttcaggccgaaaacccatgttgtacagcttccagacatcgctgcctcgcctgccggtcccggctgtcaaagacactgtgaacaggtatctacagtcggtgaggcctcttatgaaggaagaagacttcaaacggatgacagcacttgctcaagattttgctgtcggtcttggaccaagattacagtggtatttgaagttaaaatcctggtgggctacaaattacgtgagcgactggtgggaggagtacatctacctccgaggacgagggccgctcatggtgaacagcaactattatgccatggatctgctgtatatccttccaactcacattcaggcagcaagagccggcaacgccatccatgccatcctgctttacaggcgcaaactggaccgggaggaaatcaaaccaattcgtcttttgggatccacgattccactctgctccgctcagtgggagcggatgtttaatacttcccggatcccaggagaggagacagacaccatccagcacatgagagacagcaagcacatcgtcgtgtaccatcgaggacgctacttcaaggtctggctctaccatgatgggcggctgctgaagccccgggagatggagcagcagatgcagaggatcctggacaatacctcggagcctcagcccggggaggccaggctggcagccctcaccgcaggagacagagttccctgggccaggtgtcgtcaggcctattttggacgtgggaaaaataagcagtctcttgatgctgtggagaaagcagcgttctttgtgacgttagatgaaactgaagaaggatacagaagtgaagacccggatacgtcaatggacagctacgccaaatctctactacacggccgatgttacgacaggtggtttgacaagtcgttcacgtttgttgtcttcaaaaacgggaagatgggcctcaacgctgaacactcctgggcagatgcgccgatcgtggcccacctttgggagtacgtcatgtccattgacagcctccagctgggctatgcggaggatgggcactgcaaaggcgacatcaatccgaacattccgtaccccaccaggctgcagtgggacatcccgggggaatgtcaagaggttatagagacctccctgaacaccgcaaatcttctggcaaacgacgtggatttccattccttcccattcgtagcctttggtaaaggaatcatcaagaaatgtcgcacgagcccagacgcctttgtgcagctggccctccagctggcgcactacaaggacatgggcaagttttgcctcacatacgaggcctccatgacccggctcttccgagaggggaggacggagaccgtgcgctcctgcaccactgagtcatgcgacttcgtgcgggccatggtggacccggcccagacggtggaacagaggctgaagttgttcaagttggcgtctgagaagcatcagcatatgtatcgcctcgccatgaccggctctgggatcgatcgtcacctcttctgcctttacgtggtgtctaaatatctcgctgtggagtcccctttccttaaggaagttttatctgagccttggagattatcaacaagccagacccctcagcagcaagtggagctgtttgacttggagaataacccagagtacgtgtccagcggagggggctttggaccggttgctgatgacggctatggtgtgtcgtacatccttgtgggagagaacctcatcaatttccacatttcttccaagttctcttgccctgagacggggattataagtcaaggaccaagttcagatacttgagacaaagtggaaagtctcagcatatggaaacaaggccttggaggagaccatggacatcaccaagttcatgtgctgggctggaaagaaaagcctgttgattttcacttgctgtgcatttattcatccattccattgcctcaatgctgagaacagtgcctgacacataaaagatgctcaataaatatgttaaaagtaa

SEQ ID NO: 4653 - DNA, 2592 bp, Homo sapiens
  source 1..2592: mol_type = unassigned DNA
gccccacgcacggacaggagtgaacccgagctgtgccgaccaacccccaggatggcggaagctcaccaggccgtggccttccagttcacggtgaccccagacggggtcgacttccggctcagtcgggaggccctgaaacacgtctacctgtctgggatcaactcctggaagaaacgcctgatccgcatcaagaatggcatcctcaggggcgtgtaccctggcagccccaccagctggctggtcgtcatcatggcaacagtgggttcctccttctgcaacgtggacatctccttggggctggtcagttgcatccagagatgcctccctcaggggtgtggcccctaccagaccccgcagacccgggcacttctcagcatggccatcttctccacgggcgtctgggtgacgggcatcttcttcttccgccaaaccctgaagctgcttctctgctaccatgggtggatgtttgagatgcatggcaagaccagcaacttgaccaggatctgggctatgtgtatccgccttctatccagccggcaccctatgctctacagcttccagacatctctgcccaagcttcctgtgcccagggtgtcagccacaattcagcggtacctagagtctgtgcgccccttgttggatgatgaggaatattaccgcatggagttgctggccaaagaattccaggacaagactgcccccaggctgcagaaatacctggtgctcaagtcatggtgggcaagtaactatgtgagtgactggtgggaagagtacatctaccttcgaggcaggagccctctcatggtgaacagcaactattatgtcatggaccttgtgctcatcaagaatacagacgtgcaggcagcccgcctgggaaacatcatccacgccatgatcatgtatcgccgtaaactggaccgtgaagaaatcaagcctgtgatggcactgggcatagtgcctatgtgctcctaccagatggagaggatgttcaacaccactcggatcccgggcaaggacacagatgtgctacagcacctctcagacagccggcacgtggctgtctaccacaagggacgcttcttcaagctgtggctctatgagggcgcccgtctgctcaagcctcaggatctggagatgcagttccagaggatcctggacgacccctccccacctcagcctggggaggagaagctggcagccctcactgcaggaggaagggtggagtgggcgcaggcacgccaggccttctttagctctggaaagaataaggctgccttggaggccatcgagcgtgccgctttcttcgtggccctggatgaggaatcctactcctatgaccccgaagatgaggccagcctcagcctctatggcaaggccctgctacatggcaactgctacaacaggtggtttgacaaatccttcactctcatttccttcaagaatggccagttgggtctcaatgcagagcatgcgtgggcagatgctcccatcattgggcacctctgggagtttgtcctgggcacagacagcttccacctgggctacacggagaccgggcactgcctgggcaaaccgaaccctgcgctcgcacctcctacacggctgcagtgggacattccaaaacagtgccaggcggtcatcgagagttcctaccaggtggccaaggcgttggcagacgacgtggagttgtactgcttccagttcctgccctttggcaaaggcctcatcaagaagtgccggaccagccctgatgcctttgtgcagatcgcgctgcagctggctcacttccgggacaggggtaagttctgcctgacctatgaggcctcaatgaccagaatgttccgggagggacggactgagactgtgcgttcctgtaccagcgagtccacagcctttgtgcaggccatgatggaggggtcccacacaaaagcagacctgcgagatctcttccagaaggctgctaagaagcaccagaatatgtaccgcctggccatgaccggggcagggatcgacaggcacctcttctgcctttacttggtctccaagtacctaggagtcagctctcctttccttgctgaggtgctctcggaaccctggcgtctctccaccagccagatcccccaatcccagatccgcatgttcgacccagagcagcaccccaatcacctgggcgctggaggtggctttggccctgtagcagatgatggctatggagtttcctacatgattgcaggcgagaacacgatcttcttccacatctccagcaagttctcaagctcagagacgaacgcccagcgctttggaaaccacatccgcaaagccctgctggacattgctgatcttttccaagttcccaaggcctacagctgaagcccttaggtacctgtgttttgtttgggaactcggaggccctccccctcccccagctcagaccacagaggtggcaagagaagggctgaagctggaagactgttcatgagggacttgtgtgacctgctttgaaatgtgtgactctgctgagtgacgtaggctctgagatagctgtccacgcccacgtgtttgcttggaataaatacttgcctcagaaccttc

SEQ ID NO: 4654 - DNA, 2933 bp, Homo sapiens
  source 1..2933: mol_type = unassigned DNA
atttttagctctaaagccaccatcctcacgagactctggggccccccaggctcccagacctttgagcaaccttcaccgcacagaaacccagccgcgccctgcaattcccaccgcggaaggtgccgaccaacccccaggatggcggaagctcaccaggccgtggccttccagttcacggtgaccccagacggggtcgacttccggctcagtcgggaggccctgaaacacgtctacctgtctgggatcaactcctggaagaaacgcctgatccgcatcaagaatggcatcctcaggggcgtgtaccctggcagccccaccagctggctggtcgtcatcatggcaacagtgggttcctccttctgcaacgtggacatctccttggggctggtcagttgcatccagagatgcctccctcaggggtgtggcccctaccagaccccgcagacccgggcacttctcagcatggccatcttctccacgggcgtctgggtgacgggcatcttcttcttccgccaaaccctgaagctgcttctctgctaccatgggtggatgtttgagatgcatggcaagaccagcaacttgaccaggatctgggctatgtgtatccgccttctatccagccggcaccctatgctctacagcttccagacatctctgcccaagcttcctgtgcccagggtgtcagccacaattcagcggtacctagagtctgtgcgccccttgttggatgatgaggaatattaccgcatggagttgctggccaaagaattccaggacaagactgcccccaggctgcagaaatacctggtgctcaagtcatggtgggcaagtaactatgtgagtgactggtgggaagagtacatctaccttcgaggcaggagccctctcatggtgaacagcaactattatgtcatggaccttgtgctcatcaagaatacagacgtgcaggcagcccgcctgggaaacatcatccacgccatgatcatgtatcgccgtaaactggaccgtgaagaaatcaagcctgtgatggcactgggcatagtgcctatgtgctcctaccagatggagaggatgttcaacaccactcggatcccgggcaaggacacagatgtgctacagcacctctcagacagccggcacgtggctgtctaccacaagggacgcttcttcaagctgtggctctatgagggcgcccgtctgctcaagcctcaggatctggagatgcagttccagaggatcctggacgacccctccccacctcagcctggggaggagaagctggcagccctcactgcaggaggaagggtggagtgggcgcaggcacgccaggccttctttagctctggaaagaataaggctgccttggaggccatcgagcgtgccgctttcttcgtggccctggatgaggaatcctactcctatgaccccgaagatgaggccagcctcagcctctatggcaaggccctgctacatggcaactgctacaacaggtggtttgacaaatccttcactctcatttccttcaagaatggccagttgggtctcaatgcagagcatgcgtgggcagatgctcccatcattgggcacctctgggagtttgtcctgggcacagacagcttccacctgggctacacggagaccgggcactgcctgggcaaaccgaaccctgcgctcgcacctcctacacggctgcagtgggacattccaaaacagtgccaggcggtcatcgagagttcctaccaggtggccaaggcgttggcagacgacgtggagttgtactgcttccagttcctgccctttggcaaaggcctcatcaagaagtgccggaccagccctgatgcctttgtgcagatcgcgctgcagctggctcacttccgggacaggggtaagttctgcctgacctatgaggcctcaatgaccagaatgttccgggagggacggactgagactgtgcgttcctgtaccagcgagtccacagcctttgtgcaggccatgatggaggggtcccacacaaaagcagacctgcgagatctcttccagaaggctgctaagaagcaccagaatatgtaccgcctggccatgaccggggcagggatcgacaggcacctcttctgcctttacttggtctccaagtacctaggagtcagctctcctttccttgctgaggtgctctcggaaccctggcgtctctccaccagccagatcccccaatcccagatccgcatgttcgacccagagcagcaccccaatcacctgggcgctggaggtggctttggccctgtagcagatgatggctatggagtttcctacatgattgcaggcgagaacacgatcttcttccacatctccagcaagttctcaagctcagagacgaacgcccagcgctttggaaaccacatccgcaaagccctgctggacattgctgatcttttccaagttcccaaggcctacagctgaaggttggagaaatgccagctgccctttcgtccccacactgtggaggaagggacctgtggcagctcacaggcatgaggggtggccgtgcacaggtgcccaggctccaaggacagctccggcagcaggtcctcgctgggcagatgctgctccctgagggcccaggtggtggaggtggggttggagcaggaagggaattttgatttttttttttcttgatagatactaataaaaataaggctgtgtaattttctctcagcccttaggtacctgtgttttgtttgggaactcggaggccctccccctcccccagctcagaccacagaggtggcaagagaagggctgaagctggaagactgttcatgagggacttgtgtgacctgctttgaaatgtgtgactctgctgagtgacgtaggctctgagatagctgtccacgcccacgtgtttgcttggaataaatacttgcctcagaaccttc

SEQ ID NO: 4655 - DNA, 2662 bp, Homo sapiens
  source 1..2662: mol_type = unassigned DNA
aggcctgaaggacgtggggacacgggccagagtggctggccccacgcacggacaggagtgaacccgagctgtgccgaccaacccccaggatggcggaagctcaccaggccgtggccttccagttcacggtgaccccagacggggtcgacttccggctcagtcgggaggccctgaaacacgtctacctgtctgggatcaactcctggaagaaacgcctgatccgcatcaagaatggcatcctcaggggcgtgtaccctggcagccccaccagctggctggtcgtcatcatggcaacagtgggttcctccttctgcaacgtggacatctccttggggctggtcagttgcatccagagatgcctccctcaggggtgtggcccctaccagaccccgcagacccgggcacttctcagcatggccatcttctccacgggcgtctgggtgacgggcatcttcttcttccgccaaaccctgaagctgcttctctgctaccatgggtggatgtttgagatgcatggcaagaccagcaacttgaccaggatctgggctatgtgtatccgccttctatccagccggcaccctatgctctacagcttccagacatctctgcccaagcttcctgtgcccagggtgtcagccacaattcagcggtacctagagtctgtgcgccccttgttggatgatgaggaatattaccgcatggagttgctggccaaagaattccaggacaagactgcccccaggctgcagaaatacctggtgctcaagtcatggtgggcaagtaactatgtgagtgactggtgggaagagtacatctaccttcgaggcaggagccctctcatggtgaacagcaactattatgtcatggaccttgtgctcatcaagaatacagacgtgcaggcagcccgcctgggaaacatcatccacgccatgatcatgtatcgccgtaaactggaccgtgaagaaatcaagcctgtgatggcactgggcatagtgcctatgtgctcctaccagatggagaggatgttcaacaccactcggatcccgggcaaggacacagatgtgctacagcacctctcagacagccggcacgtggctgtctaccacaagggacgcttcttcaagctgtggctctatgagggcgcccgtctgctcaagcctcaggatctggagatgcagttccagaggatcctggacgacccctccccacctcagcctggggaggagaagctggcagccctcactgcaggaggaagggtggagtgggcgcaggcacgccaggccttctttagctctggaaagaataaggctgccttggaggccatcgagcgtgccgctttcttcgtggccctggatgaggaatcctactcctatgaccccgaagatgaggccagcctcagcctctatggcaaggccctgctacatggcaactgctacaacaggtggtttgacaaatccttcactctcatttccttcaagaatggccagttgggtctcaatgcagagcatgcgtgggcagatgctcccatcattgggcacctctgggagtttgtcctgggcacagacagcttccacctgggctacacggagaccgggcactgcctgggcaaaccgaaccctgcgctcgcacctcctacacggctgcagtgggacattccaaaacagtgccaggcggtcatcgagagttcctaccaggtggccaaggcgttggcagacgacgtggagttgtactgcttccagttcctgccctttggcaaaggcctcatcaagaagtgccggaccagccctgatgcctttgtgcagatcgcgctgcagctggctcacttccgggacaggggtaagttctgcctgacctatgaggcctcaatgaccagaatgttccgggagggacggactgagactgtgcgttcctgtaccagcgagtccacagcctttgtgcaggccatgatggaggggtcccacacaaaagcagacctgcgagatctcttccagaaggctgctaagaagcaccagaatatgtaccgcctggccatgaccggggcagggatcgacaggcacctcttctgcctttacttggtctccaagtacctaggagtcagctctcctttccttgctgaggtgctctcggaaccctggcgtctctccaccagccagatcccccaatcccagatccgcatgttcgacccagagcagcaccccaatcacctgggcgctggaggtggctttggccctgtagcagatgatggctatggagtttcctacatgattgcaggcgagaacacgatcttcttccacatctccagcaagttctcaagctcagagacgaacgcccagcgctttggaaaccacatccgcaaagccctgctggacattgctgatcttttccaagttcccaaggcctacagctgaaggttggagaaatgccagctgccctttcgtccccacactgtggaggaagggacctgtggcagctcacaggcatgaggggtggccgtgcacaggtgcccaggctccaaggacagctccggcagcaggtcctcgctgggcagatgctgctccctgagggcccaggtggtggaggtggggttggagcaggaagggaattttgatttttttttttcttgatagatactaataaaaataaggctgtgtaattttctctc

SEQ ID NO: 4656 - DNA, 2647 bp, Homo sapiens
  source 1..2647: mol_type = unassigned DNA
gtcgcggactggctgggggcgtctcggcgcggctggcggcggggccggcctaagcgcgcccgcgcacccatctgcccccgtcctaggtgccgaccaacccccaggatggcggaagctcaccaggccgtggccttccagttcacggtgaccccagacggggtcgacttccggctcagtcgggaggccctgaaacacgtctacctgtctgggatcaactcctggaagaaacgcctgatccgcatcaagaatggcatcctcaggggcgtgtaccctggcagccccaccagctggctggtcgtcatcatggcaacagtgggttcctccttctgcaacgtggacatctccttggggctggtcagttgcatccagagatgcctccctcaggggtgtggcccctaccagaccccgcagacccgggcacttctcagcatggccatcttctccacgggcgtctgggtgacgggcatcttcttcttccgccaaaccctgaagctgcttctctgctaccatgggtggatgtttgagatgcatggcaagaccagcaacttgaccaggatctgggctatgtgtatccgccttctatccagccggcaccctatgctctacagcttccagacatctctgcccaagcttcctgtgcccagggtgtcagccacaattcagcggtacctagagtctgtgcgccccttgttggatgatgaggaatattaccgcatggagttgctggccaaagaattccaggacaagactgcccccaggctgcagaaatacctggtgctcaagtcatggtgggcaagtaactatgtgagtgactggtgggaagagtacatctaccttcgaggcaggagccctctcatggtgaacagcaactattatgtcatggaccttgtgctcatcaagaatacagacgtgcaggcagcccgcctgggaaacatcatccacgccatgatcatgtatcgccgtaaactggaccgtgaagaaatcaagcctgtgatggcactgggcatagtgcctatgtgctcctaccagatggagaggatgttcaacaccactcggatcccgggcaaggacacagatgtgctacagcacctctcagacagccggcacgtggctgtctaccacaagggacgcttcttcaagctgtggctctatgagggcgcccgtctgctcaagcctcaggatctggagatgcagttccagaggatcctggacgacccctccccacctcagcctggggaggagaagctggcagccctcactgcaggaggaagggtggagtgggcgcaggcacgccaggccttctttagctctggaaagaataaggctgccttggaggccatcgagcgtgccgctttcttcgtggccctggatgaggaatcctactcctatgaccccgaagatgaggccagcctcagcctctatggcaaggccctgctacatggcaactgctacaacaggtggtttgacaaatccttcactctcatttccttcaagaatggccagttgggtctcaatgcagagcatgcgtgggcagatgctcccatcattgggcacctctgggagtttgtcctgggcacagacagcttccacctgggctacacggagaccgggcactgcctgggcaaaccgaaccctgcgctcgcacctcctacacggctgcagtgggacattccaaaacagtgccaggcggtcatcgagagttcctaccaggtggccaaggcgttggcagacgacgtggagttgtactgcttccagttcctgccctttggcaaaggcctcatcaagaagtgccggaccagccctgatgcctttgtgcagatcgcgctgcagctggctcacttccgggacaggggtaagttctgcctgacctatgaggcctcaatgaccagaatgttccgggagggacggactgagactgtgcgttcctgtaccagcgagtccacagcctttgtgcaggccatgatggaggggtcccacacaaaagcagacctgcgagatctcttccagaaggctgctaagaagcaccagaatatgtaccgcctggccatgaccggggcagggatcgacaggcacctcttctgcctttacttggtctccaagtacctaggagtcagctctcctttccttgctgaggtgctctcggaaccctggcgtctctccaccagccagatcccccaatcccagatccgcatgttcgacccagagcagcaccccaatcacctgggcgctggaggtggctttggccctgtagcagatgatggctatggagtttcctacatgattgcaggcgagaacacgatcttcttccacatctccagcaagttctcaagctcagagacgaacgcccagcgctttggaaaccacatccgcaaagccctgctggacattgctgatcttttccaagttcccaaggcctacagctgaagcccttaggtacctgtgttttgtttgggaactcggaggccctccccctcccccagctcagaccacagaggtggcaagagaagggctgaagctggaagactgttcatgagggacttgtgtgacctgctttgaaatgtgtgactctgctgagtgacgtaggctctgagatagctgtccacgcccacgtgtttgcttggaataaatacttgcctcagaaccttca

SEQ ID NO: 4657 - DNA, 558 bp, Homo sapiens
  source 1..558: mol_type = unassigned DNA
acttccaggggcgcctctctcccctgcccgcgccctcgctgacgccccccaactccaggctgcccttcgccgtccttggggctcctggagctttcaaggcccaaatcccctgcaccacagtggctgtgcccacccggaaggctggcgcgaggatttggcggcggtgccgaccaacccccaggatggcggaagctcaccaggccgtggccttccagttcacggtgaccccagacggggtcgacttccggctcagtcgggaggccctgaaacacgtctacctgtctgggatcaactcctggaagaaacgcctgatccgcatcaagaatggcatcctcaggggcgtgtaccctggcagccccaccagctggctggtcgtcatcatggcaacagtgggttcctccttctgcaacgtggacatctccttggggctggtcagttgcatccagagatgcctccctcaggggtgtggcccctaccagaccccgcagacccgggcacttctcagcatggccatcttctccacgggcgtctgggtgacgggcatcttcttcttccgcc

SEQ ID NO: 4658 - DNA, 2753 bp, Homo sapiens
  source 1..2753: mol_type = unassigned DNA
tccatcctccaggcatccatgtccaccatagaatttggttacttggactatgcccagtctcggttccagttctacttccagcagaaggggcagctgaccagtgtccactcctcatcctgactccaccctcccactccttggatttctcctggagcctccagggcaggaccttggagggaggaacaacgagcagaaggccctggcgactgggctgagcccccaagtgaaactgaggttcaggagaccggcctgttcctgagtttgactctaaagccaccatcctcacgagactctggggccccccaggctcccagacctttgagcaaccttcaccgcacagaaacccagccgcgccctgcaattcccaccgcggaaggtgccgaccaacccccaggatggcggaagctcaccaggccgtggccttccagttcacggtgaccccagacggggtcgacttccggctcagtcgggaggccctgaaacacgtctacctgtctgggatcaactcctggaagaaacgcctgatccgcatcaagaatggcatcctcaggggcgtgtaccctggcagccccaccagctggctggtcgtcatcatggcaacagtgggttcctccttctgcaacgtggacatctccttggggctggtcagttgcatccagagatgcctccctcaggggtgtggcccctaccagaccccgcagacccgggcacttctcagcatggccatcttctccacgggcgtctgggtgacgggcatcttcttcttccgccaaaccctgaagctgcttctctgctaccatgggtggatgtttgagatgcatggcaagaccagcaacttgaccaggatctgggctcttccagacatctctgcccaagcttcctgtgcccagggtgtcagccacaattcagcggtacctagagtctgtgcgccccttgttggatgatgaggaatattaccgcatggagttgctggccaaagaattccaggacaagactgcccccaggctgcagaaatacctggtgctcaagtcatggtgggcaagtaactatgtgagtgactggtgggaagagtacatctaccttcgaggcaggagccctctcatggtgaacagcaactattatgtcatggaccttgtgctcatcaagaatacagacgtgcaggcagcccgcctgggaaacatcatccacgccatgatcatgtatcgccgtaaactggaccgtgaagaaatcaagcctgtgatggcactgggcatagtgcctatgtgctcctaccagatggagaggatgttcaacaccactcggatcccgggcaaggacacagatgtgctacagcacctctcagacagccggcacgtggctgtctaccacaagggacgcttcttcaagctgtggctctatgagggcgcccgtctgctcaagcctcaggatctggagatgcagttccagaggatcctggacgacccctccccacctcagcctggggaggagaagctggcagccctcactgcaggaggaagggtggagtgggcgcaggcacgccaggccttctttagctctggaaagaataaggctgccttggaggccatcgagcgtgccgctttcttcgtggccctggatgaggaatcctactcctatgaccccgaagatgaggccagcctcagcctctatggcaaggccctgctacatggcaactgctacaacaggtggtttgacaaatccttcactctcatttccttcaagaatggccagttgggtctcaatgcagagcatgcgtgggcagatgctcccatcattgggcacctctgggagtttgtcctgggcacagacagcttccacctgggctacacggagaccgggcactgcctgggcaaaccgaaccctgcgctcgcacctcctacacggctgcagtgggacattccaaaacaggcggtcatcgagagttcctaccaggtggccaaggcgttggcagacgacgtggagttgtactgcttccagttcctgccctttggcaaaggcctcatcaagaagtgccggaccagccctgatgcctttgtgcagatcgcgctgcagctggctcacttccgggacaggggtaagttctgcctgacctatgaggcctcaatgaccagaatgttccgggagggacggactgagactgtgcgttcctgtaccagcgagtccacagcctttgtgcaggccatgatggaggggtcccacacaaaagcagacctgcgagatctcttccagaaggctgctaagaagcaccagaatatgtaccgcctggccatgaccggggcagggatcgacaggcacctcttctgcctttacttggtctccaagtacctaggagtcagctctcctttccttgctgaggtgctctcggaaccctggcgtctctccaccagccagatcccccaatcccagatccgcatgttcgacccagagcagcaccccaatcacctgggcgctggaggtggctttggccctgtagcagatgatggctatggagtttcctacatgattgcaggcgagaacacgatcttcttccacatctccagcaagttctcaagctcagagacgaacgcccagcgctttggaaaccacatccgcaaagccctgctggacattgctgatcttttccaagttcccaaggcctacagctgaagcccttaggtacctgtgttttgtttgggaactcggaggccctccccctcccccagctcagaccacagaggtggcaagagaagggctga

SEQ ID NO: 4659 - DNA, 2436 bp, Homo sapiens
  source 1..2436: mol_type = unassigned DNA
atttttagctctaaagccaccatcctcacgagactctggggccccccaggctcccagacctttgagcaaccttcaccgcacagaaacccagccgcgccctgcaattcccaccgcggaaggtgccgaccaacccccaggatggcggaagctcaccaggccgtggccttccagttcacggtgaccccagacggggtcgacttccggctcagtcgggaggccctgaaacacgtctacctgtctgggatcaactcctggaagaaacgcctgatccgcatcaagaatggcatcctcaggggcgtgtaccctggcagccccaccagctggctggtcgtcatcatggcaacagtgggttcctccttctgcaacgtggacatctccttggggctggtcagttgcatccagagatgcctccctcaggggtgtggcccctaccagaccccgcagacccgggcacttctcagcatggccatcttctccacgggcgtctgggtgacgggcatcttcttcttccgccaaaccctgaagctgcttctctgctaccatgggtggatgtttgagatgcatggcaagaccagcaacttgaccaggatctgggctatgtgtatccgccttctatccagccggcaccctatgctctacagcttccagacatctctgcccaagcttcctgtgcccagggtgtcagccacaattcagcggtacctagagtctgtgcgccccttgttggatgatgaggaatattaccgcatggagttgctggccaaagaattccaggacaagactgcccccaggctgcagaaatacctggtgctcaagtcatggtgggcaagtaactatgtgagtgactggtgggaagagtacatctaccttcgaggcaggagccctctcatggtgaacagcaactattatgtcatggaccttgtgctcatcaagaatacagacgtgcaggcagcccgcctgggaaacatcatccacgccatgatcatgtatcgccgtaaactggaccgtgaagaaatcaagcctgtgatggcactgggcatagtgcctatgtgctcctaccagatggagaggatgttcaacaccactcggatcccgggcaaggacacagatgtgctacagcacctctcagacagccggcacgtggctgtctaccacaagggacgcttcttcaagctgtggctctatgagggcgcccgtctcctcagcctctatggcaaggccctgctacatggcaactgctacaacaggtggtttgacaaatccttcactctcatttccttcaagaatggccagttgggtctcaatgcagagcatgcgtgggcagatgctcccatcattgggcacctctgggagtttgtcctgggcacagacagcttccacctgggctacacggagaccgggcactgcctgggcaaaccgaaccctgcgctcgcacctcctacacggctgcagtgggacattccaaaacagtgccaggcggtcatcgagagttcctaccaggtggccaaggcgttggcagacgacgtggagttgtactgcttccagttcctgccctttggcaaaggcctcatcaagaagtgccggaccagccctgatgcctttgtgcagatcgcgctgcagctggctcacttccgggacaggggtaagttctgcctgacctatgaggcctcaatgaccagaatgttccgggagggacggactgagactgtgcgttcctgtaccagcgagtccacagcctttgtgcaggccatgatggaggggtcccacacaaaagcagacctgcgagatctcttccagaaggctgctaagaagcaccagaatatgtaccgcctggccatgaccggggcagggatcgacaggcacctcttctgcctttacttggtctccaagtacctaggagtcagctctcctttccttgctgaggtgctctcggaaccctggcgtctctccaccagccagatcccccaatcccagatccgcatgttcgacccagagcagcaccccaatcacctgggcgctggaggtggctttggccctgtagcagatgatggctatggagtttcctacatgattgcaggcgagaacacgatcttcttccacatctccagcaagttctcaagctcagagacgaacgcccagcgctttggaaaccacatccgcaaagccctgctggacattgctgatcttttccaagttcccaaggcctacagctgaagcccttaggtacctgtgttttgtttgggaactcggaggccctccccctcccccagctcagaccacagaggtggcaagagaagggctgaagctggaagactgttcatgagggacttgtgtgacctgctttgaaatgtgtgactctgctgagtgacgtaggctctgagatagctgtccacgcccacgtgtttgcttggaataaatacttgcctcagaaccttc

SEQ ID NO: 4660 - DNA, 2577 bp, Homo sapiens
  source 1..2577: mol_type = unassigned DNA
atttttagctctaaagccaccatcctcacgagactctggggccccccaggctcccagacctttgagcaaccttcaccgcacagaaacccagccgcgccctgcaattcccaccgcggaaggtgccgaccaacccccaggatggcggaagctcaccaggccgtggccttccagttcacggtgaccccagacggggtcgacttccggctcagtcgggaggccctgaaacacgtctacctgtctgggatcaactcctggaagaaacgcctgatccgcatcaagaatggcatcctcaggggcgtgtaccctggcagccccaccagctggctggtcgtcatcatggcaacagtgggttcctccttctgcaacgtggacatctccttggggctggtcagttgcatccagagatgcctccctcaggggtgtggcccctaccagaccccgcagacccgggcacttctcagcatggccatcttctccacgggcgtctgggtgacgggcatcttcttcttccgccaaaccctgaagctgcttctctgctaccatgggtggatgtttgagatgcatggcaagaccagcaacttgaccaggatctgggcttacctagagtctgtgcgccccttgttggatgatgaggaatattaccgcatggagttgctggccaaagaattccaggacaagactgcccccaggctgcagaaatacctggtgctcaagtcatggtgggcaagtaactatgtgagtgactggtgggaagagtacatctaccttcgaggcaggagccctctcatggtgaacagcaactattatgtcatggaccttgtgctcatcaagaatacagacgtgcaggcagcccgcctgggaaacatcatccacgccatgatcatgtatcgccgtaaactggaccgtgaagaaatcaagcctgtgatggcactgggcatagtgcctatgtgctcctaccagatggagaggatgttcaacaccactcggatcccgggcaaggacacagatgtgctacagcacctctcagacagccggcacgtggctgtctaccacaagggacgcttcttcaagctgtggctctatgagggcgcccgtctgctcaagcctcaggatctggagatgcagttccagaggatcctggacgacccctccccacctcagcctggggaggagaagctggcagccctcactgcaggaggaagggtggagtgggcgcaggcacgccaggccttctttagctctggaaagaataaggctgccttggaggccatcgagcgtgccgctttcttcgtggccctggatgaggaatcctactcctatgaccccgaagatgaggccagcctcagcctctatggcaaggccctgctacatggcaactgctacaacaggtggtttgacaaatccttcactctcatttccttcaagaatggccagttgggtctcaatgcagagcatgcgtgggcagatgctcccatcattgggcacctctgggagtttgtcctgggcacagacagcttccacctgggctacacggagaccgggcactgcctgggcaaaccgaaccctgcgctcgcacctcctacacggctgcagtgggacattccaaaacagtgccaggcggtcatcgagagttcctaccaggtggccaaggcgttggcagacgacgtggagttgtactgcttccagttcctgccctttggcaaaggcctcatcaagaagtgccggaccagccctgatgcctttgtgcagatcgcgctgcagctggctcacttccgggacaggggtaagttctgcctgacctatgaggcctcaatgaccagaatgttccgggagggacggactgagactgtgcgttcctgtaccagcgagtccacagcctttgtgcaggccatgatggaggggtcccacacaaaagcagacctgcgagatctcttccagaaggctgctaagaagcaccagaatatgtaccgcctggccatgaccggggcagggatcgacaggcacctcttctgcctttacttggtctccaagtacctaggagtcagctctcctttccttgctgaggtgctctcggaaccctggcgtctctccaccagccagatcccccaatcccagatccgcatgttcgacccagagcagcaccccaatcacctgggcgctggaggtggctttggccctgtagcagatgatggctatggagtttcctacatgattgcaggcgagaacacgatcttcttccacatctccagcaagttctcaagctcagagacgaacgcccagcgctttggaaaccacatccgcaaagccctgctggacattgctgatcttttccaagttcccaaggcctacagctgaagcccttaggtacctgtgttttgtttgggaactcggaggccctccccctcccccagctcagaccacagaggtggcaagagaagggctgaagctggaagactgttcatgagggacttgtgtgacctgctttgaaatgtgtgactctgctgagtgacgtaggctctgagatagctgtccacgcccacgtgtttgcttggaataaatacttgcctcagaaccttc

SEQ ID NO: 4661 - DNA, 1952 bp, Homo sapiens
  source 1..1952: mol_type = unassigned DNA
ctaaaactaatgcttttctcaagaccccgcaactcagcctggaccagtttccctcctccacccacccccgaatcttgagaatcctgtactggggggagggcactgcccccgcaccatgttcttgggagagcagggctccagcgtgacatggctgaagcgcaccaggccgtgggcttccgaccctcgctgacctcggacggggctgaagtggaactcagtgcccctgtgctgcaggagatctacctctctggcctgcgctcctggaaaaggcatctctcacgtttctggaatgactttctcaccggtgtgtttcctgccagccccctcagttggcttttcctcttcagtgccatccagcttgcctggttcctccagctggatccttccttaggactgatggagaagatcaaagagttgctgcctgactggccctggtccgcatcttctctggccgccacccgatgctgttcagttaccagcgctccctgccacgccagcccgtgccctctgtgcaggacaccgtgcgcaagtacctggagtcggtccggcccatcctctccgacgaggacttcgactggaccgcggtcctggcgcaggaattcctgaggctgcaggcgtcgctgctgcagtggtacctgcggctcaagtcctggtgggcgtccaattatgtcagtgactggtgggaggaatttgtgtacctgcgctcccgaaatccgctgatggtgaacagcaactattacatgatggacttcctgtatgtcacacccacgcctctgcaggcagctcgcgctgggaatgccgtccatgccctcctcctgtaccgccaccgcctgaaccgccaggagatacccccggtgagagggccccagtgggttagggatggaggtgtggtcctgtggcctttgggccacgtgggtcctggaaggcagctcacagcccacggtttcctgcagactttgctgatgggaatgcgccccttatgctctgcccagtacgagaagatcttcaacaccacgcggattccaggggtccaaaaagactacatccgccacctccatgacagccaacacgtggctgtcttccaccggggccgattcttccgcatggggacccactcccgaaacagcctgctttccccgagagccctggagcagcagtttcagagaatcctggatgatccctcaccggcctgcccccacgaggaacatctggcagctctgacagctgctcccaggggcacgtgggcccaggtgcggacatccctgaagacccaggcagcggaggccctggaggcggtggaaggggccgctttctttgtgtcactggatgctgagcccgcggggctcaccagggaggacccggcagcgtcgttggatgcctacgcccatgctctgctggccggccggggccatgatcgctggtttgacaaatccttcaccctaatcgtcttctctaacgggaagctgggcctcagcgtggagcactcctgggccgactgccccatctcaggacacatgtgggagttcactctggctacagaatgctttcagctgggctactcaacagacggccactgcaaggggcacccggaccccacactaccccagccccagcggctgcaatgggaccttccagaccagatccactcctccatctctctagccctgaggggagccaagatcttgtctgaaaatgtcgactgccatgtcgttccattctccctatttggcaagagcttcatccgacgctgccacctctcttcagacagcttcatccagatcgccttgcaactggcccacttccgggtcagttgggttccccatccacagcccccgcagggtctcagtccacctgagcccccaagacctgcccctccacggttccttgtggtcgctgccattgtgggtcggccatcttgaattctctcttccaaccattcttgggctggctgg

SEQ ID NO: 4662 - DNA, 2743 bp, Homo sapiens
  source 1..2743: mol_type = unassigned DNA
ggggtttctgggtgacggtgatctcggggtgggcaggactccaaaggcccgtcgacccggtggtggactccttgcactgggattggacatatgcaagcgggagatttggggccggcgctcaaaatcggggggcgggggtggactcgggtttggaccccaggatccgatcagcggacccttgattcaacgtgggctccagcgtgacatggctgaagcgcaccaggccgtgggcttccgaccctcgctgacctcggacggggctgaagtggaactcagtgcccctgtgctgcaggagatctacctctctggcctgcgctcctggaaaaggcatctctcacgtttctggaatgactttctcaccggtgtgtttcctgccagccccctcagttggcttttcctcttcagtgccatccagcttgcctggttcctccagctggatccttccttaggactgatggagaagatcaaagagttgctgcctgactggggtggacaacaccacgggctccggggggtcctggcagccgcgctgtttgcctcgtgtttgtggggagccctgatcttcacactgcacgtggccctgaggctgcttctgtcctaccacggctggcttcttgagccccacggagccatgtcctcccccaccaagacctggctggccctggtccgcatcttctctggccgccacccgatgctgttcagttaccagcgctccctgccacgccagcccgtgccctctgtgcaggacaccgtgcgcaagtacctggagtcggtccggcccatcctctccgacgaggacttcgactggaccgcggtcctggcgcaggaattcctgaggctgcaggcgtcgctgctgcagtggtacctgcggctcaagtcctggtgggcgtccaattatgtcagtgactggtgggaggaatttgtgtacctgcgctcccgaaatccgctgatggtgaacagcaactattacatgatggacttcctgtatgtcacacccacgcctctgcaggcagctcgcgctgggaatgccgtccatgccctcctcctgtaccgccaccgcctgaaccgccaggagatacccccgactttgctgatgggaatgcgccccttatgctctgcccagtacgagaagatcttcaacaccacgcggattccaggggtccaaaaagactacatccgccacctccatgacagccaacacgtggctgtcttccaccggggccgattcttccgcatggggacccactcccgaaacagcctgctttccccgagagccctggagcagcagtttcagagaatcctggatgatccctcaccggcctgcccccacgaggaacatctggcagctctgacagctgctcccaggggcacgtgggcccaggtgcggacatccctgaagacccaggcagcggaggccctggaggcggtggaaggggccgctttctttgtgtcactggatgctgagcccgcggggctcaccagggaggacccggcagcgtcgttggatgcctacgcccatgctctgctggccggccggggccatgatcgctggtttgacaaatccttcaccctaatcgtcttctctaacgggaagctgggcctcagcgtggagcactcctgggccgactgccccatctcaggacacatgtgggagttcactctggctacagaatgctttcagctgggctactcaacagacggccactgcaaggggcacccggaccccacactaccccagccccagcggctgcaatgggaccttccagaccagatccactcctccatctctctagccctgaggggagccaagatcttgtctgaaaatgtcgactgccatgtcgttccattctccctatttggcaagagcttcatccgacgctgccacctctcttcagacagcttcatccagatcgccttgcaactggcccacttccgggacaggggtcaattctgcctgacttatgagtcggccatgactcgcttattcctggaaggccggacggagacggtgcggtcttgcacgagggaggcctgcaactttgtcagggccatggaggacaaagagaagacggacccacagtgcctcgccctgttccgcgtggcagtggacaagcaccaggctctgctgaaggcagccatgagcgggcagggagttgaccgccacctgtttgcgctgtacatcgtgtcccgattcctccacctgcagtcgcccttcctgacccaggtccattcggagcagtggcagctgtccaccagccagatccctgttcagcaaatgcatctgtttgacgtccacaattacccggactatgtttcctcaggcggtggattcgggcctgctgatgaccatggttatggtgtttcttatatcttcatgggggatggcatgatcaccttccacatctccagcaaaaaatcaagcacaaaaacggattcccacaggctggggcagcacattgaggacgcactgctggatgtggcctccctgttccaggcgggacagcattttaagcgccggttcagagggtcagggaaggagaactccaggcacaggtgtggatttctctcccgccagactggggcctccaaggcctcaatgacatccaccgacttctgactccttccagcaggcagctggcctctccaaggaataagggtgaaattgccacagctggctgacacaggacaggggcaactggtttggcaaccccacatccaggccaataaagatgtgtgagctggg

SEQ ID NO: 4663 - DNA, 2500 bp, Homo sapiens
  source 1..2500: mol_type = unassigned DNA
gagagagaggaatcggggtttctgggtgacggtgatctcggggtgggcaggactccaaaggcccgtcgacccggtggtggactccttgcactgggattggacatatgcaagcgggagatttggggccggcgctcaaaatcggggggcgggggtggactcgggtttggaccccaggatccgatcagcggacccttgattcaacgtgaggtcccgaattgacgtccttccctcaaaacctccgggtctacaaaccaggaccctcaagacccttcagggctccagcgtgacatggctgaagcgcaccaggccgtgggcttccgaccctcgctgacctcggacggggctgaagtggaactcagtgcccctgtgctgcaggagatctacctctctggcctgcgctcctggaaaaggcatctctcacgtttctggaatgactttctcaccggtgtgtttcctgccagccccctcagttggcttttcctcttcagtgccatccagcttgcctggttcctccagctggatccttccttaggactgatggagaagatcaaagagttgctgcctgactggggtggacaacaccacgggctccggggggtcctggcagccgcgctgtttgcctcgtgtttgtggggagccctgatcttcacactgcacgtggccctgaggctgcttctgtcctaccacggctggcttcttgagccccacggagccatgtcctcccccaccaagacctggctggccctggtccgcatcttctctggccgccacccgatgctgttcagttaccagcgctccctgccacgccagcccgtgccctctgtgcaggacaccgtgcgcaagtacctggagtcggtccggcccatcctctccgacgaggacttcgactggaccgcggtcctggcgcaggaattcctgaggctgcaggcgtcgctgctgcagtggtacctgcggctcaagtcctggtgggcgtccaattatgtcagtgactggtgggaggaatttgtgtacctgcgctcccgaaatccgctgatggtgaacagcaactattacatgatggacttcctgtatgtcacacccacgcctctgcaggcagctcgcgctgggaatgccgtccatgccctcctcctgtaccgccaccgcctgaaccgccaggagatacccccgactttgctgatgggaatgcgccccttatgctctgcccagtacgagaagatcttcaacaccacgcggattccaggggtccaaaaagactacatccgccacctccatgacagccaacacgtggctgtcttccaccggggccgattcttccgcatggggacccactcccgaaacagcctgctttccccgagagccctggagcagcagtttcagagaatcctggatgatccctcaccggcctgcccccacgaggaacatctggcagctctgacagctgctcccaggggcacgtgggcccaggtgcggacatccctgaagacccaggcagcggaggccctggaggcggtggaaggggccgctttctttgtgtcactggatgctgagcccgcggggctcaccagggaggacccggcagcgtcgttggatgcctacgcccatgctctgctggccggccggggccatgatcgctggtttgacaaatccttcaccctaatcgtcttctctaacgggaagctgggcctcagcgtggagcactcctgggccgactgccccatctcaggacacatgtgggagttcactctggctacagaatgctttcagctgggctactcaacagacggccactgcaaggggcacccggaccccacactaccccagccccagcggctgcaatgggaccttccagaccagatccactcctccatctctctagccctgaggggagccaagatcttgtctgaaaatgtcgactgccatgtcgttccattctccctatttggcaagagcttcatccgacgctgccacctctcttcagacagcttcatccagatcgccttgcaactggcccacttccgggacaggggtcaattctgcctgacttatgagtcggccatgactcgcttattcctggaaggccggacggagacggtgcggtcttgcacgagggaggcctgcaactttgtcagggccatggaggacaaagagaagacggctgatgaccatggttatggtgtttcttatatcttcatgggggatggcatgatcaccttccacatctccagcaaaaaatcaagcacaaaaacggattcccacaggctggggcagcacattgaggacgcactgctggatgtggcctccctgttccaggcgggacagcattttaagcgccggttcagagggtcagggaaggagaactccaggcacaggtgtggatttctctcccgccagactggggcctccaaggcctcaatgacatccaccgacttctgactccttccagcaggcagctggcctctccaaggaataagggtgaaattgccacagctggctgacacag

SEQ ID NO: 4664 - DNA, 2910 bp, Homo sapiens
  source 1..2910: mol_type = unassigned DNA
gaatacccggctagggacacgagagagaggaatcggggtttctgggtgacggtgatctcggggtgggcaggactccaaaggcccgtcgacccggtggtggactccttgcactgggattggacatatgcaagcgggagatttggggccggcgctcaaaatcggggggcgggggtggactcgggtttggaccccaggatccgatcagcggacccttgattcaacgtgaggtcccgaattgacgtccttccctcaaaacctccgggtctacaaaccaggaccctcaagacccttcaggtgcttagagaaggatgagctaggttatgtagtcctgggtcggcgcaaaaaggcagctgaaagcggctccagcgtgacatggctgaagcgcaccaggccgtgggcttccgaccctcgctgacctcggacggggctgaagtggaactcagtgcccctgtgctgcaggagatctacctctctggcctgcgctcctggaaaaggcatctctcacgtttctggaatgactttctcaccggtgtgtttcctgccagccccctcagttggcttttcctcttcagtgccatccagcttgcctggttcctccagctggatccttccttaggactgatggagaagatcaaagagttgctgcctgactggggtggacaacaccacgggctccggggggtcctggcagccgcgctgtttgcctcgtgtttgtggggagccctgatcttcacactgcacgtggccctgaggctgcttctgtcctaccacggctggcttcttgagccccacggagccatgtcctcccccaccaagacctggctggccctggtccgcatcttctctggccgccacccgatgctgttcagttaccagcgctccctgccacgccagcccgtgccctctgtgcaggacaccgtgcgcaagtacctggagtcggtccggcccatcctctccgacgaggacttcgactggaccgcggtcctggcgcaggaattcctgaggctgcaggcgtcgctgctgcagtggtacctgcggctcaagtcctggtgggcgtccaattatgtcagtgactggtgggaggaatttgtgtacctgcgctcccgaaatccgctgatggtgaacagcaactattacatgatggacttcctgtatgtcacacccacgcctctgcaggcagctcgcgctgggaatgccgtccatgccctcctcctgtaccgccaccgcctgaaccgccaggagatacccccgactttgctgatgggaatgcgccccttatgctctgcccagtacgagaagatcttcaacaccacgcggattccaggggtccaaaaagactacatccgccacctccatgacagccaacacgtggctgtcttccaccggggccgattcttccgcatggggacccactcccgaaacagcctgctttccccgagagccctggagcagcagtttcagagaatcctggatgatccctcaccggcctgcccccacgaggaacatctggcagctctgacagctgctcccaggggcacgtgggcccaggtgcggacatccctgaagacccaggcagcggaggccctggaggcggtggaaggggccgctttctttgtgtcactggatgctgagcccgcggggctcaccagggaggacccggcagcgtcgttggatgcctacgcccatgctctgctggccggccggggccatgatcgctggtttgacaaatccttcaccctaatcgtcttctctaacgggaagctgggcctcagcgtggagcactcctgggccgactgccccatctcaggacacatgtgggagttcactctggctacagaatgctttcagctgggctactcaacagacggccactgcaaggggcacccggaccccacactaccccagccccagcggctgcaatgggaccttccagaccagatccactcctccatctctctagccctgaggggagccaagatcttgtctgaaaatgtcgactgccatgtcgttccattctccctatttggcaagagcttcatccgacgctgccacctctcttcagacagcttcatccagatcgccttgcaactggcccacttccgggacaggggtcaattctgcctgacttatgagtcggccatgactcgcttattcctggaaggccggacggagacggtgcggtcttgcacgagggaggcctgcaactttgtcagggccatggaggacaaagagaagacggacccacagtgcctcgccctgttccgcgtggcagtggacaagcaccaggctctgctgaaggcagccatgagcgggcagggagttgaccgccacctgtttgcgctgtacatcgtgtcccgattcctccacctgcagtcgcccttcctgacccaggtccattcggagcagtggcagctgtccaccagccagatccctgttcagcaaatgcatctgtttgacgtccacaattacccggactatgtttcctcaggcggtggattcgggcctgctgatgaccatggttatggtgtttcttatatcttcatgggggatggcatgatcaccttccacatctccagcaaaaaatcaagcacaaaaacggattcccacaggctggggcagcacattgaggacgcactgctggatgtggcctccctgttccaggcgggacagcattttaagcgccggttcagagggtcagggaaggagaactccaggcacaggtgtggatttctctcccgccagactggggcctccaaggcctcaatgacatccaccgacttctgactccttccagcaggcagctggcctctccaaggaataagggtgaaattgccacagctggctgacacaggacaggggcaactggtttggcaaccccacatccaggccaataaagatgtgtgagctggg

SEQ ID NO: 4665 - DNA, 2785 bp, Homo sapiens
  source 1..2785: mol_type = unassigned DNA
ggaatcggggtttctgggtgacggtgatctcggggtgggcaggactccaaaggcccgtcgacccggtggtggactccttgcactgggattggacatatgcaagcgggagatttggggccggcgctcaaaatcggggggcgggggtggactcgggtttggaccccaggatccgatcagcggacccttgattcaacgtgaggtcccgaattgacgtccttccctcaaaacctccgggtctacaaaccaggaccctcaagacccttcagggctccagcgtgacatggctgaagcgcaccaggccgtgggcttccgaccctcgctgacctcggacggggctgaagtggaactcagtgcccctgtgctgcaggagatctacctctctggcctgcgctcctggaaaaggcatctctcacgtttctggaatgactttctcaccggtgtgtttcctgccagccccctcagttggcttttcctcttcagtgccatccagcttgcctggttcctccagctggatccttccttaggactgatggagaagatcaaagagttgctgcctgactggggtggacaacaccacgggctccggggggtcctggcagccgcgctgtttgcctcgtgtttgtggggagccctgatcttcacactgcacgtggccctgaggctgcttctgtcctaccacggctggcttcttgagccccacggagccatgtcctcccccaccaagacctggctggccctggtccgcatcttctctggccgccacccgatgctgttcagttaccagcgctccctgccacgccagcccgtgccctctgtgcaggacaccgtgcgcaagtacctggagtcggtccggcccatcctctccgacgaggacttcgactggaccgcggtcctggcgcaggaattcctgaggctgcaggcgtcgctgctgcagtggtacctgcggctcaagtcctggtgggcgtccaattatgtcagtgactggtgggaggaatttgtgtacctgcgctcccgaaatccgctgatggtgaacagcaactattacatgatggcagctcgcgctgggaatgccgtccatgccctcctcctgtaccgccaccgcctgaaccgccaggagatacccccgactttgctgatgggaatgcgccccttatgctctgcccagtacgagaagatcttcaacaccacgcggattccaggggtccaaaaagactacatccgccacctccatgacagccaacacgtggctgtcttccaccggggccgattcttccgcatggggacccactcccgaaacagcctgctttccccgagagccctggagcagcagtttcagagaatcctggatgatccctcaccggcctgcccccacgaggaacatctggcagctctgacagctgctcccaggggcacgtgggcccaggtgcggacatccctgaagacccaggcagcggaggccctggaggcggtggaaggggccgctttctttgtgtcactggatgctgagcccgcggggctcaccagggaggacccggcagcgtcgttggatgcctacgcccatgctctgctggccggccggggccatgatcgctggtttgacaaatccttcaccctaatcgtcttctctaacgggaagctgggcctcagcgtggagcactcctgggccgactgccccatctcaggacacatgtgggagttcactctggctacagaatgctttcagctgggctactcaacagacggccactgcaaggggcacccggaccccacactaccccagccccagcggctgcaatgggaccttccagaccagatccactcctccatctctctagccctgaggggagccaagatcttgtctgaaaatgtcgactgccatgtcgttccattctccctatttggcaagagcttcatccgacgctgccacctctcttcagacagcttcatccagatcgccttgcaactggcccacttccgggacaggggtcaattctgcctgacttatgagtcggccatgactcgcttattcctggaaggccggacggagacggtgcggtcttgcacgagggaggcctgcaactttgtcagggccatggaggacaaagagaagacggacccacagtgcctcgccctgttccgcgtggcagtggacaagcaccaggctctgctgaaggcagccatgagcgggcagggagttgaccgccacctgtttgcgctgtacatcgtgtcccgattcctccacctgcagtcgcccttcctgacccaggtccattcggagcagtggcagctgtccaccagccagatccctgttcagcaaatgcatctgtttgacgtccacaattacccggactatgtttcctcaggcggtggattcgggcctgctgatgaccatggttatggtgtttcttatatcttcatgggggatggcatgatcaccttccacatctccagcaaaaaatcaagcacaaaaacggattcccacaggctggggcagcacattgaggacgcactgctggatgtggcctccctgttccaggcgggacagcattttaagcgccggttcagagggtcagggaaggagaactccaggcacaggtgtggatttctctcccgccagactggggcctccaaggcctcaatgacatccaccgacttctgactccttccagcaggcagctggcctctccaaggaataagggtgaaattgccacagctggctgacacaggacaggggcaactggtttggcaaccccacatccaggccaataaagatgtgtgagctggg

SEQ ID NO: 4666 - DNA, 2767 bp, Homo sapiens
  source 1..2767: mol_type = unassigned DNA
gagagagaggaatcggggtttctgggtgacggtgatctcggggtgggcaggactccaaaggcccgtcgacccggtggtggactccttgcactgggattggacatatgcaagcgggagatttggggccggcgctcaaaatcggggggcgggggtggactcgggtttggaccccaggatccgatcagcggacccttgattcaacgtgaggtcccgaattgacgtccttccctcaaaacctccgggtctacaaaccaggaccctcaagacccttcagggctccagcgtgacatggctgaagcgcaccaggccgtgggcttccgaccctcgctgacctcggacggggctgaagtggaactcagtgcccctgtgctgcaggagatctacctctctggcctgcgctcctggaaaaggcatctctcacgtttctggaatgactttctcaccggtgtgtttcctgccagccccctcagttggcttttcctcttcagtgccatccagcttgcctggttcctccagctggatccttccttaggactgatggagaagatcaaagagttgctgcctgactggggtggacaacaccacgggctccggggggtcctggcagccgcgctgtttgcctcgtgtttgtggggagccctgatcttcacactgcacgtggccctgaggctgcttctgtcctaccacggctggcttcttgagccccacggagccatgtcctcccccaccaagacctggctggccctggtccgcatcttctctggccgccacccgatgctgttcagttaccagcgctccctgccacgccagcccgtgccctctgtgcaggacaccgtgcgcaagtacctggagtcggtccggcccatcctctccgacgaggacttcgactggaccgcggtcctggcgcaggaattcctgaggctgcaggcgtcgctgctgcagtggtacctgcggctcaagtcctggtgggcgtccaattatgtcagtgactggtgggaggaatttgtgtacctgcgctcccgaaatccgctgatggtgaacagcaactattacatgatggacttcctgtatgtcacacccacgcctctgcaggcagctcgcgctgggaatgccgtccatgccctcctcctgtaccgccaccgcctgaaccgccaggagatacccccgactttgctgatgggaatgcgccccttatgctctgcccagtacgagaagatcttcaacaccacgcggattccaggggtccaaaaagactacatccgccacctccatgacagccaacacgtggctgtcttccaccggggccgattcttccgcatggggacccactcccgaaacagcctgctttccccgagagccctggagcagcagtttcagagaatcctggatgatccctcaccggcctgcccccacgaggaacatctggcagctctgacagctgctcccaggggcacgtgggcccaggtgcggacatccctgaagacccaggcagcggaggccctggaggcggtggaaggggccgctttctttgtgtcactggatgctgagcccgcggggctcaccagggaggacccggcagcgtcgttggatgcctacgcccatgctctgctggccggccggggccatgatcgctggtttgacaaatccttcaccctaatcgtcttctctaacgggaagctgggcctcagcgtggagcactcctgggccgactgccccatctcaggacacatgtgggagttcactctggctacagaatgctttcagctgggctactcaacagacggccactgcaaggggcacccggaccccacactaccccagccccagcggctgcaatgggaccttccagaccagatccactcctccatctctctagccctgaggggagccaagatcttgtctgaaaatgtcgactgccatgtcgttccattctccctatttggcaagagcttcatccgacgctgccacctctcttcagacagcttcatccagatcgccttgcaactggcccacttccgggacaggggtcaattctgcctgacttatgagtcggccatgactcgcttattcctggaaggccggacggagacggtgcggtcttgcacgagggaggcctgcaactttgtcagggccatggaggacaaagagaagacggacccacagtgcctcgccctgttccgcgtggcagtggacaagcaccaggctctgctgaaggcagccatgagcgggcagggagttgaccgccacctgtttgcgctgtacatcgtgtcccgattcctccacctgcagtcgcccttcctgacccaggtccattcggagcagtggcagctgtccaccagccagatccctgttcagcaaatgcatctgtttgacgtccacaattacccggactatgtttcctcaggcggtggattcgggcctgctgatgaccatggttatggtgtttcttatatcttcatgggggatggcatgatcaccttccacatctccagcaaaaaatcaagcacaaaaacggattcccacaggctggggcagcacattgaggacgcactgctggatgtggcctccctgttccaggcgggacagcattttaagcgccggttcagagggtcagggaaggagaactccaggcacaggtgtggatttctctcccgccagactggggcctccaaggcctcaatgacatccaccgacttctgactccttccagcaggcagctggcctctccaaggaataagggtgaaattgccacagctggctgacacag

SEQ ID NO: 4667 - DNA, 2215 bp, Homo sapiens
  source 1..2215: mol_type = unassigned DNA
gcattgtctcttcctctgcagttgagctgaatgaatacctccgaagccgctttgttctccagatgtgaatagctccactataccagcctcgtcttccttccgggggacaacgtgggtcagggcacagagagatatttaatgtcaccctcttggggctttcatgggactccctctgccacattttttggaggttgggaaagttgctagaggcttcagaactccagcctaatggatcccaaactcgggagaatggctgcgtccctgctggctgtgctgctgctgctgctggagcgcggcatgttctcctcaccctccccgcccccggcgctgttagagaaagtcttccagtacattgacctccatcaggatgaatttgtgcagacgctgaaggagtgggtggccatcgagagcgactctgtccagcctgtgcctcgcttcagacaagagctcttcagaatgatggccgtggctgcggacacgctgcagcgcctgggggcccgtgtggcctcggtggacatgggtcctcagcagctgcccgatggtcagagtcttccaatacctcccatcatcctggccgaactggggagcgatcccacgaaaggcaccgtgtgcttctacggccacttggacgtgcagcctgctgaccggggcgatgggtggctcacggacccctatgtgctgacggaggtagacgggaaactttatggacgaggagcgaccgacaacaaaggccctgtcttggcttggatcaatgctgtgagcgccttcagagccctggagcaagatcttcctgtgaatatcaaattcatcattgaggggatggaagaggctggctctgttgccctggaggaacttgtggaaaaagaaaaggaccgattcttctctggtgtggactacattgtaatttcagataacctgtggatcagccaaaggaagccagcaatcacttacggaacccgggggaacagctacttcatggtggaggtgaaatgcagagaccaggattttcactcaggaacctttggtggcatccttcatgaaccaatggctgatctggttgctcttctcggtagcctggtagactcgtctggtcatatcctggtccctggaatctatgatgaagtggttcctcttacagaagaggaaataaatacatacaaagccatccatctagacctagaagaataccggaatagcagccgggttgagaaatttctgttcgatactaaggaggagattctaatgcacctctggaggtacccatctctttctattcatgggatcgagggcgcgtttgatgagcctggaactaaaacagtcatacctggccgagttataggaaaattttcaatccgtctagtccctcacatgaatgtgtctgcggtggaaaaacaggtgacacgacatcttgaagatgtgttctccaaaagaaatagttccaacaagatggttgtttccatgactctaggactacacccgtggattgcaaatattgatgacacccagtatctcgcagcaaaaagagcgatcagaacagtgtttggaacagaaccagatatgatccgggatggatccaccattccaattgccaaaatgttccaggagatcgtccacaagagcgtggtgctaattccgctgggagctgttgatgatggagaacattcgcagaatgagaaaatcaacaggtggaactacatagagggaaccaaattatttgctgcctttttcttagagatggcccagctccattaatcacaagaaccttctagtctgatctgatccactgacagattcacctcccccacatccctagacagggatggaatgtaaatatccagagaatttgggtctagtatagtacattttcccttccatttaaaatgtcttgggatatctggatcagtaataaaatatttcaaaggcacagatgttggaaatggtttaaggtcccccactgcacaccttcctcaagtcatagctgcttgcagcaacttgatttccccaagtcctgtgcaatagccccaggattggattccttcaaaccttttagcatatctccaaccttgcaatttgattggcataatcactccagtttgctttctaggtcctcaagtgctcgtgacacataatcattccatccaatgatcgcctttgctttaccactctttccttttatcttattaataaaaatgttggtctccaccactgactacaa

SEQ ID NO: 4668 - DNA, 3942 bp, Homo sapiens
  source 1..3942: mol_type = unassigned DNA
gctgtgccactgccaccgccgccgccgctgcatcccgcccggtccgagtccgcccgccacgcccgccgagccgctgccgccgccagctctccctggatccatcgggtcccgagtgggattgcccactgggctccaaggacctggaggaagagggcccctggggagggggctctggcctgccgcccacaggctgcttccctggctcctggcgccaggacgtgggcctggactgcaagggatcccccgagggggccgaggcccgggcttggactgtctactactacagcctcctgcagagctgtctgcagcaagctggccttccggagactcaggaccgcggccaggtgccccgcacaggctgtcctggggcggaggtgaccttgtgcgttctgggctcccccagcacctttctgcctgtgctgctggagggtggggtccagagcccgggaaacatgctcctttgcctgtcccctgcttggctgatgaaggtgccagcacccgggcagccgggtgaggcagccctgctagtctccaaggctgtgagcttccaccctgggggcctgacattcctggatgactttgtccccccgcgccgtgccacctactttttggcaggcctgggcctggggcctggccggggccgagaggcagcagaactcgcccgtgacctgacctgccccacaggagcttcggctgagctggcccggctgctggaggaccggctgctgacaaggcagttgctggcccagcagggtggtgtggctgtgccagcaaccctggctttcacctacaagccgccggggctgctgcggggaggggatgccagcctagggctacggctggtggagctgagtggcaaagagggccaggagacgctggtgaaagaggaagtggaggcttttctgcgctccgaggccctgggtgatatcctgcaggtagctgtgaagctcagtggctggcgctggcgggggcggcaggcatggcgtctgcacccgcgggcagagctgggtgcagtggtggacacagtgctggcgctgctggagaagctggaggaggaggagagtgtcctggtggaggctgtgtacccacctgcccagctgccctgctcagatggtccttcacccggccccggcctggccgtgcgaatctgtgctgtggtgtgtcggacacagggtgataggccactgctgagcaaggtggtgtgcggcgtgggccgcggggaccgccctctacggcaccacaactccctgccgaggacgctggaggtggcgctggcccagtgcggcctgggcgaggaggcgcaggtggcggctgtgcggcagcgcgtcaaggcggcggccgaggccgcgctggccgccgtgctggctctggaggccggcctgagtgccgagcagcgcggcgggcgccgggcgcacacggacttcctgggcgtggatttcgcgctgacagcggccggcggcgtgctgaccccagtggccctggagctgaacggcggcctgtgtctggaggcgtgcggcgcgctggaggggctgtgggccgcgccgcggctggggccggcggccgacgaggcggtggcggcgccgctggtggagaccatgcttcggcggtcggcgcgctgcctcatggagggaaaacagctgctggtggtcggcgctggcggcgtcagcaagaagttcgtgtgggaggcggcgcgcgactacgggctccagctgcacctcgtggagtcagaccccaaccactttgcatcccagttggtacagaccttcatccactttgacatgacagagcaccggagggatgaggagaacgcacggctgctggcagagttggtgcgggctcgcggcctcaagctagatggctgcttctcctactgggatgactgcctggtgctcacagccctgctctgccaggagctaggtctgccctgcagctccccagctgccatgcgcctggctaagcagaagagcctcacccagctgcacctgttgcaccaccatggcccaccctggcctgcgccctccctccatgctgtgccctgctgcccactggagagtgaggctgatgtggagagggccgtgcaccaggtacccctgccaggtgtcatgaagctggagttcggggcaggtgcagtgggtgtccggctggtagaggatgcgccacagtgccatgagcacttttcccggattacccgagacttgcagggcgaggccgaccacccaggcattgggctgggctggggcaatgccatgctgctgatggagtttgtggagggcaccgagcacgacgtggacctggtgttgtttggtgggcggttgctggctgcctttgtctccgacaatggccctacgaggctgcctggcttcactgagacggcggcctgcatgcccaccgggctggcaccagagcaggaggcacagatggttcaggcagccttccgctgttgcctgggctgcgggttgctcgatggagtcttcaacgtggagctcaagctgaccggggctgggcctcggcttatcgagatcaacccccgcatgggtggcttctacctgcgtgattggatcctggagctctatggtgttgacctgctgctggctgctgttatggtggcctgtggcttgcgtcctgccctgcccacccgcccacgtgctcgtggccatctggtgggcgtcatgtgccttgtgtcccagcacctgcaggccctgagttccaccgccagccgtgagaccctgcaggccctgcacgaccgtggactgctacgcctcaatctgctggaggaggccctggtgcctggcgagtatgaggagccctactgcagtgtggcctgtgccggacccagccccaccgaggcccgtctccgcctgctgggcctctgccagggcctgggcatcgatgggcccagctaccctgttgcccacttcctgtctcacttcaaatagcactggggtcagggggcagggaagcagtgctgggtggaggcactgtggtgccctctgctccctggagctcttcctgcttctctccccatcaccatgccccagccccagcctggcccgctgcaatgcctaggtctgttccagagcagcagggcaatttagacaccaaggcatcctggactcaagggcctcttgccctcccgaaggccccagtccagcctacagcttccccagcattctagccttggagaaatgacaatggccacacacacacacacacacacacacacacacctctgacgccagctccccaggtgggagtgggcccaaacccagcccctcctgtccacctctccaggtctcactctcttcctgccatctacaagaggagaggacctggctgggccccaagccttggacaaatcctgggaaaacctgagactagaacccttgtcttcctcttacccaaattctaggatagctctgaagcctgctggaaacttggtggcatccaacctgcctcattcggcctgaccggtagaggcaggtggcctgtggacagaagtaatcctctttctgctcaccccaggcagacacaactgcctatgttcccccgatgagaggaaacaggctgagagaagaaaaatgactgctccaggattataccacagtggagagcgggtcacaggacatgatgcagggtccaggtttctgttttgatcaagtcttacatgcccattcagcttctaggcccccctcacctccctgccctcattcacaagtggccctgagacacgtgaacacctccctcctatgcatcacaaaccttctccaccgagctttggtgctttggcctctggcacacctaactagcattggcagaggagagtctacactctcttcctcattcagggaagatgctttaagaaatcctgcctctgtgcagcagaggagctggaggcagctccccaggcatccctccccaaataaaggcttatgtactggtgaa

SEQ ID NO: 4669 - DNA, 3967 bp, Homo sapiens
  source 1..3967: mol_type = unassigned DNA
gctgtgccactgccaccgccgccgccgctgcatcccgcccggtccgagtccgcccgccacgcccgccgagccgctgccgccgccagtctctcagccactccacccacgagatgctctccctggatccatcgggtcccgagtgggattgcccactgggctccaaggacctggaggaagagggcccctggggagggggctctggcctgccgcccacaggctgcttccctggctcctggcgccaggacgtgggcctggactgcaagggatcccccgagggggccgaggcccgggcttggactgtctactactacagcctcctgcagagctgtctgcagcaagctggccttccggagactcaggaccgcggccaggtgccccgcacaggctgtcctggggcggaggtgaccttgtgcgttctgggctcccccagcacctttctgcctgtgctgctggagggtggggtccagagcccgggaaacatgctcctttgcctgtcccctgcttggctgatgaaggtgccagcacccgggcagccgggtgaggcagccctgctagtctccaaggctgtgagcttccaccctgggggcctgacattcctggatgactttgtccccccgcgccgtgccacctactttttggcaggcctgggcctggggcctggccggggccgagaggcagcagaactcgcccgtgacctgacctgccccacaggagcttcggctgagctggcccggctgctggaggaccggctgctgacaaggcagttgctggcccagcagggtggtgtggctgtgccagcaaccctggctttcacctacaagccgccggggctgctgcggggaggggatgccagcctagggctacggctggtggagctgagtggcaaagagggccaggagacgctggtgaaagaggaagtggaggcttttctgcgctccgaggccctgggtgatatcctgcaggtagctgtgaagctcagtggctggcgctggcgggggcggcaggcatggcgtctgcacccgcgggcagagctgggtgcagtggtggacacagtgctggcgctgctggagaagctggaggaggaggagagtgtcctggtggaggctgtgtacccacctgcccagctgccctgctcagatggtccttcacccggccccggcctggccgtgcgaatctgtgctgtggtgtgtcggacacagggtgataggccactgctgagcaaggtggtgtgcggcgtgggccgcggggaccgccctctacggcaccacaactccctgccgaggacgctggaggtggcgctggcccagtgcggcctgggcgaggaggcgcaggtggcggctgtgcggcagcgcgtcaaggcggcggccgaggccgcgctggccgccgtgctggctctggaggccggcctgagtgccgagcagcgcggcgggcgccgggcgcacacggacttcctgggcgtggatttcgcgctgacagcggccggcggcgtgctgaccccagtggccctggagctgaacggcggcctgtgtctggaggcgtgcggcgcgctggaggggctgtgggccgcgccgcggctggggccggcggccgacgaggcggtggcggcgccgctggtggagaccatgcttcggcggtcggcgcgctgcctcatggagggaaaacagctgctggtggtcggcgctggcggcgtcagcaagaagttcgtgtgggaggcggcgcgcgactacgggctccagctgcacctcgtggagtcagaccccaaccactttgcatcccagttggtacagaccttcatccactttgacatgacagagcaccggagggatgaggagaacgcacggctgctggcagagttggtgcgggctcgcggcctcaagctagatggctgcttctcctactgggatgactgcctggtgctcacagccctgctctgccaggagctaggtctgccctgcagctccccagctgccatgcgcctggctaagcagaagagcctcacccagctgcacctgttgcaccaccatggcccaccctggcctgcgccctccctccatgctgtgccctgctgcccactggagagtgaggctgatgtggagagggccgtgcaccaggtacccctgccaggtgtcatgaagctggagttcggggcaggtgcagtgggtgtccggctggtagaggatgcgccacagtgccatgagcacttttcccggattacccgagacttgcagggcgaggccgaccacccaggcattgggctgggctggggcaatgccatgctgctgatggagtttgtggagggcaccgagcacgacgtggacctggtgttgtttggtgggcggttgctggctgcctttgtctccgacaatggccctacgaggctgcctggcttcactgagacggcggcctgcatgcccaccgggctggcaccagagcaggaggcacagatggttcaggcagccttccgctgttgcctgggctgcgggttgctcgatggagtcttcaacgtggagctcaagctgaccggggctgggcctcggcttatcgagatcaacccccgcatgggtggcttctacctgcgtgattggatcctggagctctatggtgttgacctgctgctggctgctgttatggtggcctgtggcttgcgtcctgccctgcccacccgcccacgtgctcgtggccatctggtgggcgtcatgtgccttgtgtcccagcacctgcaggccctgagttccaccgccagccgtgagaccctgcaggccctgcacgaccgtggactgctacgcctcaatctgctggaggaggccctggtgcctggcgagtatgaggagccctactgcagtgtggcctgtgccggacccagccccaccgaggcccgtctccgcctgctgggcctctgccagggcctgggcatcgatgggcccagctaccctgttgcccacttcctgtctcacttcaaatagcactggggtcagggggcagggaagcagtgctgggtggaggcactgtggtgccctctgctccctggagctcttcctgcttctctccccatcaccatgccccagccccagcctggcccgctgcaatgcctaggtctgttccagagcagcagggcaatttagacaccaaggcatcctggactcaagggcctcttgccctcccgaaggccccagtccagcctacagcttccccagcattctagccttggagaaatgacaatggccacacacacacacacacacacacacacacacctctgacgccagctccccaggtgggagtgggcccaaacccagcccctcctgtccacctctccaggtctcactctcttcctgccatctacaagaggagaggacctggctgggccccaagccttggacaaatcctgggaaaacctgagactagaacccttgtcttcctcttacccaaattctaggatagctctgaagcctgctggaaacttggtggcatccaacctgcctcattcggcctgaccggtagaggcaggtggcctgtggacagaagtaatcctctttctgctcaccccaggcagacacaactgcctatgttcccccgatgagaggaaacaggctgagagaagaaaaatgactgctccaggattataccacagtggagagcgggtcacaggacatgatgcagggtccaggtttctgttttgatcaagtcttacatgcccattcagcttctaggcccccctcacctccctgccctcattcacaagtggccctgagacacgtgaacacctccctcctatgcatcacaaaccttctccaccgagctttggtgctttggcctctggcacacctaactagcattggcagaggagagtctacactctcttcctcattcagggaagatgctttaagaaatcctgcctctgtgcagcagaggagctggaggcagctccccaggcatccctccccaaataaaggcttatgtactggtg

SEQ ID NO: 4670 - DNA, 3971 bp, Homo sapiens
  source 1..3971: mol_type = unassigned DNA
ccactcccaaagtctaggggctggaaggccaggcagggacttggctgccctgactccttcgtctctctgtccctctgtctctgccatcagtctctcagccactccacccacgagatgctctccctggatccatcgggtcccgagtgggattgcccactgggctccaaggacctggaggaagagggcccctggggagggggctctggcctgccgcccacaggctgcttccctggctcctggcgccaggacgtgggcctggactgcaagggatcccccgagggggccgaggcccgggcttggactgtctactactacagcctcctgcagagctgtctgcagcaagctggccttccggagactcaggaccgcggccaggtgccccgcacaggctgtcctggggcggaggtgaccttgtgcgttctgggctcccccagcacctttctgcctgtgctgctggagggtggggtccagagcccgggaaacatgctcctttgcctgtcccctgcttggctgatgaaggtgccagcacccgggcagccgggtgaggcagccctgctagtctccaaggctgtgagcttccaccctgggggcctgacattcctggatgactttgtccccccgcgccgtgccacctactttttggcaggcctgggcctggggcctggccggggccgagaggcagcagaactcgcccgtgacctgacctgccccacaggagcttcggctgagctggcccggctgctggaggaccggctgctgacaaggcagttgctggcccagcagggtggtgtggctgtgccagcaaccctggctttcacctacaagccgccggggctgctgcggggaggggatgccagcctagggctacggctggtggagctgagtggcaaagagggccaggagacgctggtgaaagaggaagtggaggcttttctgcgctccgaggccctgggtgatatcctgcaggtagctgtgaagctcagtggctggcgctggcgggggcggcaggcatggcgtctgcacccgcgggcagagctgggtgcagtggtggacacagtgctggcgctgctggagaagctggaggaggaggagagtgtcctggtggaggctgtgtacccacctgcccagctgccctgctcagatggtccttcacccggccccggcctggccgtgcgaatctgtgctgtggtgtgtcggacacagggtgataggccactgctgagcaaggtggtgtgcggcgtgggccgcggggaccgccctctacggcaccacaactccctgccgaggacgctggaggtggcgctggcccagtgcggcctgggcgaggaggcgcaggtggcggctgtgcggcagcgcgtcaaggcggcggccgaggccgcgctggccgccgtgctggctctggaggccggcctgagtgccgagcagcgcggcgggcgccgggcgcacacggacttcctgggcgtggatttcgcgctgacagcggccggcggcgtgctgaccccagtggccctggagctgaacggcggcctgtgtctggaggcgtgcggcgcgctggaggggctgtgggccgcgccgcggctggggccggcggccgacgaggcggtggcggcgccgctggtggagaccatgcttcggcggtcggcgcgctgcctcatggagggaaaacagctgctggtggtcggcgctggcggcgtcagcaagaagttcgtgtgggaggcggcgcgcgactacgggctccagctgcacctcgtggagtcagaccccaaccactttgcatcccagttggtacagaccttcatccactttgacatgacagagcaccggagggatgaggagaacgcacggctgctggcagagttggtgcgggctcgcggcctcaagctagatggctgcttctcctactgggatgactgcctggtgctcacagccctgctctgccaggagctaggtctgccctgcagctccccagctgccatgcgcctggctaagcagaagagcctcacccagctgcacctgttgcaccaccatggcccaccctggcctgcgccctccctccatgctgtgccctgctgcccactggagagtgaggctgatgtggagagggccgtgcaccaggtacccctgccaggtgtcatgaagctggagttcggggcaggtgcagtgggtgtccggctggtagaggatgcgccacagtgccatgagcacttttcccggattacccgagacttgcagggcgaggccgaccacccaggcattgggctgggctggggcaatgccatgctgctgatggagtttgtggagggcaccgagcacgacgtggacctggtgttgtttggtgggcggttgctggctgcctttgtctccgacaatggccctacgaggctgcctggcttcactgagacggcggcctgcatgcccaccgggctggcaccagagcaggaggcacagatggttcaggcagccttccgctgttgcctgggctgcgggttgctcgatggagtcttcaacgtggagctcaagctgaccggggctgggcctcggcttatcgagatcaacccccgcatgggtggcttctacctgcgtgattggatcctggagctctatggtgttgacctgctgctggctgctgttatggtggcctgtggcttgcgtcctgccctgcccacccgcccacgtgctcgtggccatctggtgggcgtcatgtgccttgtgtcccagcacctgcaggccctgagttccaccgccagccgtgagaccctgcaggccctgcacgaccgtggactgctacgcctcaatctgctggaggaggccctggtgcctggcgagtatgaggagccctactgcagtgtggcctgtgccggacccagccccaccgaggcccgtctccgcctgctgggcctctgccagggcctgggcatcgatgggcccagctaccctgttgcccacttcctgtctcacttcaaatagcactggggtcagggggcagggaagcagtgctgggtggaggcactgtggtgccctctgctccctggagctcttcctgcttctctccccatcaccatgccccagccccagcctggcccgctgcaatgcctaggtctgttccagagcagcagggcaatttagacaccaaggcatcctggactcaagggcctcttgccctcccgaaggccccagtccagcctacagcttccccagcattctagccttggagaaatgacaatggccacacacacacacacacacacacacacacacctctgacgccagctccccaggtgggagtgggcccaaacccagcccctcctgtccacctctccaggtctcactctcttcctgccatctacaagaggagaggacctggctgggccccaagccttggacaaatcctgggaaaacctgagactagaacccttgtcttcctcttacccaaattctaggatagctctgaagcctgctggaaacttggtggcatccaacctgcctcattcggcctgaccggtagaggcaggtggcctgtggacagaagtaatcctctttctgctcaccccaggcagacacaactgcctatgttcccccgatgagaggaaacaggctgagagaagaaaaatgactgctccaggattataccacagtggagagcgggtcacaggacatgatgcagggtccaggtttctgttttgatcaagtcttacatgcccattcagcttctaggcccccctcacctccctgccctcattcacaagtggccctgagacacgtgaacacctccctcctatgcatcacaaaccttctccaccgagctttggtgctttggcctctggcacacctaactagcattggcagaggagagtctacactctcttcctcattcagggaagatgctttaagaaatcctgcctctgtgcagcagaggagctggaggcagctccccaggcatccctccccaaataaaggcttatgtactggtg

SEQ ID NO: 4671 - DNA, 2968 bp, Homo sapiens
  source 1..2968: mol_type = unassigned DNA
gctgtgccactgccaccgccgccgccgctgcatcccgcccggtccgagtccgcccgccacgcccgccgagccgctgccgccgccagtctctcagccactccacccacgagatgctctccctggatccatcgggtcccgagtgggattgcccactgggctccaaggacctggaggaagagggcccctggggagggggctctggcctgccgcccacaggctgcttccctggctcctggcgccaggacgtgggcctggactgcaagggatcccccgagggggccgaggcccgggcttggactgtctactactacagcctcctgcagagctgtctgcagcaagctggccttccggagactcaggaccgcggccaggtgccccgcacaggctgtcctggggcggaggtgaccttgtgcgttctgggctcccccagcacctttctgcctgtgctgctggagggtggggtccagagcccgggaaacatgctcctttgcctgtcccctgcttggctgatgaaggtgccagcacccgggcagccgggtgaggcagccctgctagtctccaaggctgtgagcttccaccctgggggcctgacattcctggatgactttgtccccccgcgccgtgccacctactttttggcaggcctgggcctggggcctggccggggccgagaggcagcagaactcgcccgtgacctgacctgccccacaggagcttcggctgagctggcccggctgctggaggaccggctgctgacaaggcagttgctggcccagcagggtggtgtggctgtgccagcaaccctggctttcacctacaagccgccggggctgctgcggggaggggatgccagcctagggctacggctggtggagctgagtggcaaagagggccaggagacgctggtgaaagaggaagtggaggcttttctgcgctccgaggccctgggtgatatcctgcaggtagctgtgaagctcagtggctggcgctggcgggggcggcaggcatggcgtctgcacccgcgggcagagctgggtgcagtggtggacacagtgctggcgctgctggagaagctggaggaggaggagagtgtcctggtggaggctgtgtacccacctgcccagctgccctgctcagatggtccttcacccggccccggcctggccgtgcgaatctgtgctgtggtgtgtcggacacagggtgataggccactgctgagcaaggtggtgtgcggcgtgggccgcggggaccgccctctacggcaccacaactccctgccgaggacgctggaggccgcgctggccgccgtgctggctctggaggccggcctgagtgccgagcagcgcggcgggcgccgggcgcacacggacttcctgggcgtggatttcgcgctgacagcggccggcggcgtgctgaccccagtggccctggagctgaacggcggcctgtgtctggaggcgtgcggcgcgctggaggggctgtgggccgcgccgcggctggggccggcggccgacgaggcggtggcggcgccgctggtggagaccatgcttcggcggtcggcgcgctgcctcatggagggaaaacagctgctggtggtcggcgctggcggcgtcagcaagaagttcgtgtgggaggcggcgcgcgactacgggctccagctgcacctcgtggagtcagaccccaaccactttgcatcccagttggtacagaccttcatccactttgacatgacagagcaccggagggatgaggagaacgcacggctgctggcagagttggtgcgggctcgcggcctcaagctagatggctgcttctcctactgggatgactgcctggtgctcacagccctgctctgccaggagctaggtctgccctgcagctccccagctgccatgcgcctggctaagcagaagagcctcacccagctgcacctgttgcaccaccatggcccaccctggcctgcgccctccctccatgctgtgccctgctgcccactggagagtgaggctgatgtggagagggccgtgcaccaggtacccctgccaggtgtcatgaagctggagttcggggcaggtgcagtgggtgtccggctggtagaggatgcgccacagtgccatgagcacttttcccggattacccgagacttgcagggcgaggccgaccacccaggcattgggctgggctggggcaatgccatgctgctgatggagtttgtggagggcaccgagcacgacgtggacctggtgttgtttggtgggcggttgctggctgcctttgtctccgacaatggccctacgaggctgcctggcttcactgagacggcggcctgcatgcccaccgggctggcaccagagcaggaggcacagatggttcaggcagccttccgctgttgcctgggctgcgggttgctcgatggagtcttcaacgtggagctcaagctgaccggggctgggcctcggcttatcgagatcaacccccgcatgggtggcttctacctgcgtgattggatcctggagctctatggtgttgacctgctgctggctgctgttatggtggcctgtggcttgcgtcctgccctgcccacccgcccacgtgctcgtggccatctggtgggcgtcatgtgccttgtgtcccagcacctgcaggccctgagttccaccgccagccgtgagaccctgcaggccctgcacgaccgtggactgctacgcctcaatctgctggaggaggccctggtgcctggcgagtatgaggagccctactgcagtgtggcctgtgccggacccagccccaccgaggcccgtctccgcctgctgggcctctgccagggcctgggcatcgatgggcccagctaccctgttgcccacttcctgtctcacttcaaatagcactggggtcagggggcagggaagcagtgctgggtggaggcactgtggtgccctctgctccctggagctcttcctgcttctct

SEQ ID NO: 4672 - DNA, 2369 bp, Homo sapiens
  source 1..2369: mol_type = unassigned DNA
gctgtgccactgccaccgccgccgccgctgcatcccgcccggtccgagtccgcccgccacgcccgccgagccgctgccgccgccagtctctcagccactccacccacgagatggtgagtcttctgtggtccctcccccacaaggcccaagtccctgggcagagagtgggcccagaggacagcaggcagcacctaggacctaagcctgggagttgccccctgcagacagcttagacccacgaccagctcccccacccccaccctgcggctgcatcctgggaggtgggcactcttagtgccctgtgacattcattcattccatggcccctcagggagctcaccttctaggagacggcacagaggctctggccctggcaaactgggattcgagcccaggcatgaggcccagtcctctgccgtctgggccacagcacaccatctcccaacaaccaagagattctcttcgtcccagcctcatcagcccccaggggatgggagagggcaggcaccaggcaacaaggtccaaagagacctcacgacttgctcaaggtggccgagcctgtcccctggaggacagactcagctgccaggcctgtccaggcctggggactgcaaagaacaagaattccattcacacgaagcctcccagcagccccatattgggggggcgccagcctcagagaggggagggacgttaggtttcatccaaagaaagcatttccgtgactcaaaatatctgcaggggggatactgtctagcctcctaatgtttagcccagggctgggcacacagtagggcttcaagacctacgtggggatgacagtggaatcacatttaggtgtcagcacactccatgccgggtcatgagacagaaataagccacctcagagtgatggctgggttcgttcattcatctactcttcagtcaacaaacacttactgagaagtggctgtgtgccaggcacgctttaggtgctggggttgcctccatgaacaaaacaagcagaaaactctgctgctgtgaagcaagctaaggcggagcccagcatggcaggggcgggaggggctggctggcaagacattgcttcctgccctccccccaggggcaccacacagaacagtttacaaagcactcccacggttgcgttcccattaacaagccttcgcccccaacacaagcctttcctctcctagtccccgggacggtgtcagccctgaacatagcccaggctgggagagtggggggcttacacccttgggtgacttaatgtgcccactggcccaccctgcccaagacctaccacttctgccctctcagctctccctggatccatcgggtcccgagtgggattgcccactgggctccaaggacctggaggaagagggcccctggggagggggctctggcctgccgcccacaggctgcttccctggctcctggcgccaggacgtgggcctggactgcaagggatcccccgagggggccgaggcccgggcttggactgtctactactacagcctcctgcagagctgtctgcagcaagctggccttccggagactcaggaccgcggccaggtgccccgcacaggctgtcctggggcggaggtgaccttgtgcgttctgggctcccccagcacctttctgcctgtgctgctggagggtggggtccagagcccgggaaacatgctcctttgcctgtcccctgcttggctgatgaaggtgccagcacccgggcagccgggtgaggcagccctgctagtctccaaggctgtgagcttccaccctgggggcctgacattcctggatgactttgtccccccgcgccgtgccacctactttttggcaggcctgggcctggggcctggccggggccgagaggcagcagaactcgcccgtgacctgacctgccccacaggagcttcggctgagctggcccggctgctggaggaccggctgctgacaaggcagttgctggcccagcagggtggtgtggctgtgccagcaaccctggctttcacctacaagccgccggggctgctgcggggaggggatgccagcctagggctacggctggtggagctgagtggcaaagagggccaggagacgctggtgaaagaggagaggacctggctgggccccaagccttggacaaatcctgggaaaacctgagactagaacccttgtcttcctcttacccaaattctaggatagctctgaagcctgctggaaacttggtggcatccaacctgcctcattcggcctgaccggtagaggcaggtggcctgtggacagaagtaatcctctttctgctcaccccaggcagacacaactgcctatgttcccccgatgagaggaaacaggctgagaga

SEQ ID NO: 4673 - DNA, 2968 bp, Homo sapiens
  source 1..2968: mol_type = unassigned DNA
gctgtgccactgccaccgccgccgccgctgcatcccgcccggtccgagtccgcccgccacgcccgccgagccgctgccgccgccagtctctcagccactccacccacgagatgctctccctggatccatcgggtcccgagtgggattgcccactgggctccaaggacctggaggaagagggcccctggggagggggctctggcctgccgcccacaggctgcttccctggctcctggcgccaggacgtgggcctggactgcaagggatcccccgagggggccgaggcccgggcttggactgtctactactacagcctcctgcagagctgtctgcagcaagctggccttccggagactcaggaccgcggccaggtgccccgcacaggctgtcctggggcggaggtgaccttgtgcgttctgggctcccccagcacctttctgcctgtgctgctggagggtggggtccagagcccgggaaacatgctcctttgcctgtcccctgcttggctgatgaaggtgccagcacccgggcagccgggtgaggcagccctgctagtctccaaggctgtgagcttccaccctgggggcctgacattcctggatgactttgtccccccgcgccgtgccacctactttttggcaggcctgggcctggggcctggccggggccgagaggcagcagaactcgcccgtgacctgacctgccccacaggagcttcggctgagctggcccggctgctggaggaccggctgctgacaaggcagttgctggcccagcagggtggtgtggctgtgccagcaaccctggctttcacctacaagccgccggggctgctgcggggaggggatgccagcctagggctacggctggtggagctgagtggcaaagagggccaggagacgctggtgaaagaggaagtggaggcttttctgcgctccgaggccctgggtgatatcctgcaggtagctgtgaagctcagtggctggcgctggcgggggcggcaggcatggcgtctgcacccgcgggcagagctgggtgcagtggtggacacagtgctggcgctgctggagaagctggaggaggaggagagtgtcctggtggaggctgtgtacccacctgcccagctgccctgctcagatggtccttcacccggccccggcctggccgtgcgaatctgtgctgtggtgtgtcggacacagggtgataggccactgctgagcaaggtggtgtgcggcgtgggccgcggggaccgccctctacggcaccacaactccctgccgaggacgctggaggtggcgctggccgccgtgctggctctggaggccggcctgagtgccgagcagcgcggcgggcgccgggcgcacacggacttcctgggcgtggatttcgcgctgacagcggccggcggcgtgctgaccccagtggccctggagctgaacggcggcctgtgtctggaggcgtgcggcgcgctggaggggctgtgggccgcgccgcggctggggccggcggccgacgaggcggtggcggcgccgctggtggagaccatgcttcggcggtcggcgcgctgcctcatggagggaaaacagctgctggtggtcggcgctggcggcgtcagcaagaagttcgtgtgggaggcggcgcgcgactacgggctccagctgcacctcgtggagtcagaccccaaccactttgcatcccagttggtacagaccttcatccactttgacatgacagagcaccggagggatgaggagaacgcacggctgctggcagagttggtgcgggctcgcggcctcaagctagatggctgcttctcctactgggatgactgcctggtgctcacagccctgctctgccaggagctaggtctgccctgcagctccccagctgccatgcgcctggctaagcagaagagcctcacccagctgcacctgttgcaccaccatggcccaccctggcctgcgccctccctccatgctgtgccctgctgcccactggagagtgaggctgatgtggagagggccgtgcaccaggtacccctgccaggtgtcatgaagctggagttcggggcaggtgcagtgggtgtccggctggtagaggatgcgccacagtgccatgagcacttttcccggattacccgagacttgcagggcgaggccgaccacccaggcattgggctgggctggggcaatgccatgctgctgatggagtttgtggagggcaccgagcacgacgtggacctggtgttgtttggtgggcggttgctggctgcctttgtctccgacaatggccctacgaggctgcctggcttcactgagacggcggcctgcatgcccaccgggctggcaccagagcaggaggcacagatggttcaggcagccttccgctgttgcctgggctgcgggttgctcgatggagtcttcaacgtggagctcaagctgaccggggctgggcctcggcttatcgagatcaacccccgcatgggtggcttctacctgcgtgattggatcctggagctctatggtgttgacctgctgctggctgctgttatggtggcctgtggcttgcgtcctgccctgcccacccgcccacgtgctcgtggccatctggtgggcgtcatgtgccttgtgtcccagcacctgcaggccctgagttccaccgccagccgtgagaccctgcaggccctgcacgaccgtggactgctacgcctcaatctgctggaggaggccctggtgcctggcgagtatgaggagccctactgcagtgtggcctgtgccggacccagccccaccgaggcccgtctccgcctgctgggcctctgccagggcctgggcatcgatgggcccagctaccctgttgcccacttcctgtctcacttcaaatagcactggggtcagggggcagggaagcagtgctgggtggaggcactgtggtgccctctgctccctggagctcttcctgcttctct

SEQ ID NO: 4674 - DNA, 2518 bp, Homo sapiens
  source 1..2518: mol_type = unassigned DNA
aagcactgggcccgccgcgtcgcaccgtcctctttcctttccttctccctccccttttcccttccttcgtcccttccttccttcctttcgccgggcgcgatggagccggggcgccggggggccgcggcgctgctagcgctgctgtgcgtggcctgcgcgctgcgcgccgggcgcgcccaatacgaacgctacagcttccgcagcttcccacgggacgagctgatgccgctcgagtcggcctaccggcacgcgctggacaagtacagcggcgagcactgggccgagagcgtgggctacctggagatcagcctgcggctgcaccgcttgctgcgcgacagcgaggccttctgccaccgcaactgcagcgccgcgccgcagcccgagcccgccgccggcctcgccagctatcccgagctgcgcctcttcgggggcctgctgcgccgcgcgcactgcctcaagcgctgcaagcagggcctgccagccttccgccagtcccagcccagccgcgaggtgctggcggacttccagcgccgcgagccctacaagttcctgcagttcgcttacttcaaggcaaataatctccccaaagccatcgccgctgctcacacctttctactgaagcatcctgatgacgaaatgatgaagaggaacatggcatattataagagcctgcctggtgccgaggactacattaaagacctggaaaccaagtcatatgaaagcctgttcatccgagcagtgcgggcatacaacggtgagaactggagaacatccatcacagacatggagctggcccttcccgacttcttcaaagccttttacgagtgtctcgcagcctgcgagggttccagggagatcaaggacttcaaggatttctacctttccatagcagatcattatgtagaagttctggaatgcaaaatacagtgtgaagagaacctcaccccagttataggaggctatccggttgagaaatttgtggctaccatgtatcattacttgcagtttgcctattataagttgaacgacctgaagaatgcagccccctgtgcagtcagctatctgctctttgatcagaatgacaaggtcatgcagcagaacctggtgtattaccagtaccacagggacacttggggcctctcggatgagcacttccagcccagacctgaagcagttcagttctttaatgtgaccacactccagaaggagctgtatgactttgctaaggaaaatataatggatgatgatgagggagaagttgtggaatatgtggatgacctcttggaactggaggagaccagctagcccacagcaaccaaagagacttcctcttggcgttcaggaaacacagattctttgtccttttcccaacagcccaggctgttgatacctcagagccttctctttactctccaaagtgaaagggaagcccccgtctctctaactgcatgtcatcaggggtgagcctgcctttcctatcttcacacctgccacctcatgttcacacctatctttctcaccttttttttgagatggagtctcgctctcttgcccaggctggagtgcaatggcacgttctcagctcactgcaacctccgcctcttgggttcaagcaattctgctgcatcagcctcccgagtacctgggattacaggcatgtgccaccacgcccggctaattttgtatttttagtagagacggggttttgccatgttggccaggctggtctcgaactcttgacttcagatgatccatctgccttggcctcccacagtgctgggattacaggcgtgagccaccatgcccggcctctttctcacctttacacctgtcttcttatcctcacatctgttttcacaccttcatccctgtcttcctcatgttcacacttgtcttccccatgttcatagctgcctttcttaccattttggtttgaagggcagtcttctctggcttgtttttttgtttttcccagaaaatcagtattattttttaaataagaaaaacattcctagaagatgataattgtgaaaacctcctttggcttatttgcttttccagattttagtctcctttctccccatccgggaaagatggtggaagacataggctaaatttctccagcctcacaatggtcttcacttggtctgacttgtaccaattctagcacccactgaaaaacaagttgagtagagagtgtagagtgcagaaatgtggcttttgccccactttgcatctccaaaattacaacggttggccgatcccatttgaggacaatgcttagttataagtctccgagttggaaaaggaagaaagccagagctgtctagtttcattcattctttcagtaaatatttattgagtacctactgtgtgctaggcattgacctgggaactagagatacttcacagaataacagggaaagttccctgtgctcatggagcttacattctacagggagaaagagatagccaatacataggaataaatatatacaaggtatcatgtagtgataat

SEQ ID NO: 4675 - DNA, 1810 bp, Homo sapiens
  source 1..1810: mol_type = unassigned DNA
ccttccttcctttcgccgggcgcgatggagccggggcgccggggggccgcggcgctgctagcgctgctgtgcgtggcctgcgcgctgcgcgccgggcgcgcccaatacgaacgctacagcttccgcagcttcccacgggacgagctgatgccgctcgagtcggcctaccggcacgcgctggacaagtacagcggcgagcactgggccgagagcgtgggctacctggagatcagcctgcggctgcaccgcttgctgcgcgacagcgaggccttctgccaccgcaactgcagcgccgcgccgcagcccgagcccgccgccggcctcgccagctatcccgagctgcgcctcttcgggggcctgctgcgccgcgcgcactgcctcaagcgctgcaagcagggcctgccagccttccgccagtcccagcccagccgcgaggtgctggcggacttccagcgccgcgagccctacaagttcctgcagttcgcttacttcaaggcaaataatctccccaaagccatcgccgctgctcacacctttctactgaagcatcctgatgacgaaatgatgaagaggaacatggcatattataagagcctgcctggtgccgaggactacttaaagacctggaaaccaagtcatatgaaagcctgttcatccgagcagtgcgggcatacaacggtgagaactggagaacatccatcacagacatggagctggcccttcccgacttcttcaaagccttttacgagtgtctcgcagcctgcgagggttccagggagatcaaggacttcaaggatttctacctttccatagcagtgaacgacctgaagaatgcagccccctgtgcagtcagctatctgctctttgatcagaatgacaaggtcatgcagcagaacctggtgtattaccagtaccacagggacacttggggcctctcggatgagcacttccagcccagacctgaagcagttcagttctttaatgtgaccacactccagaaggagctgtatgactttgctaaggaaaatataatggatgatgatgagggagaagttgtggaatatgtggatgacctcttggaactggaggagaccagctagcccacagcaaccaaagagacttcctcttggcgttcaggaaacacagattctttgtccttttcccaacagcccaggctgttgatacctcagagccttctctttactctccaaagtgaaagggaagcccccgtctctctaactgcatgtcatcaggggtgagcctgcctttcctatcttcacacctgccacctcatgttcacacctatctttctcaccttttttttgagatggagtctcgctctcttgcccaggctggagtgcaatggcacgttctcagctcactgcaacctccgcctcttgggttcaagcaattctgctgcatcagcctcccgagtacctgggattacaggcatgtgccaccacgcccggctaattttgtatttttagtagagacggggttttgccatgttggccaggctggtctcgaactcttgacttcagatgatccatctgccttggcctcccacagtgctgggattacaggcgtgagccaccatgcccggcctctttctcacctttacacctgtcttcttatcctcacatctgttttcacaccttcatccctgtcttcctcatgttcacacttgtcttccccatgttcatagctgcctttcttaccattttggtttgaagggcagtcttctctggcttgtttttttgtttttcccagaaaatcagtattattttttaaataagaaaaacattcctag

SEQ ID NO: 4676 - DNA, 2010 bp, Homo sapiens
  source 1..2010: mol_type = unassigned DNA
actgggcccgccgcgtcgcaccgtcctctttcctttccttctccctccccttttcccttccttcgtcccttccttccttcctttcgccgggcgcgatggagccggggcgccggggggccgcggcgctgctagcgctgctgtgcgtggcctgcgcgctgcgcgccgggcgcgcccaatacgaacgctacagcttccgcagcttcccacgggacgagctgatgccgctcgagtcggcctaccggcacgcgctggacaagtacagcggcgagcactgggccgagagcgtgggctacctggagatcagcctgcggctgcaccgcttgctgcgcgacagcgaggccttctgccaccgcaactgcagcgccgcgccgcagcccgagcccgccgccggcctcgccagctatcccgagctgcgcctcttcgggggcctgctgcgccgcgcgcactgcctcaagcgctgcaagcagggcctgccagccttccgccagtcccagcccagccgcgaggtgctggcggacttccagcgccgcgagccctacaagttcctgcagttcgcttacttcaaggcaaataatctccccaaagccatcgccgctgctcacacctttctactgaagcatcctgatgacgaaatgatgaagaggaacatggcatattataagagcctgcctggtgccgaggactacattaaagacctggaaaccaagtcatatgaaagcctgttcatcgagcagtgcgggcatacaacggtgagaactggagaacatccatcacagacatggagctggcccttcccgacttcttcaaagccttttacgagtgtctcgcagcctgcgagggttccagggagatcaaggacttcaaggatttctacctttccatagcagatcattatgtagaagttctggaatgcaaaatacagtgtgaagagaacctcaccccagttataggaggctatccggttgagaaatttgtggctaccatgtatcattacttgcagtttgcctattataagttgaacgacctgaagaatgcagccccctgtgcagtcagctatctgctctttgatcagaatgacaaggtcatgcagcagaacctggtgtattaccagtaccacagggacacttggggcctctcggatgagcacttccagcccagacctgaagcagttcagttctttaatgtgaccacactccagaaggagctgtatgactttgctaaggaaaatataatggatgatgatgagggagaagttgtggaatatgtggatgacctcttggaactggaggagaccagctagcccacagcaaccaaagagacttcctcttggcgttcaggaaacacagattctttgtccttttcccaacagcccaggctgttgatacctcagagccttctctttactctccaaagtgaaagggaagcccccgtctctctaactgcatgtcatcaggggtgagcctgcctttcctatcttcacacctgccacctcatgttcacacctatctttctcaccttttttttgagatggagtctcgctctcttgcccaggctggagtgcaatggcacgttctcagctcactgcaacctccgcctcttgggttcaagcaattctgctgcatcagcctcccgagtacctgggattacaggcatgtgccaccacgcccggctaattttgtatttttagtagagacggggttttgccatgttggccaggctggtctcgaactcttgacttcagatgatccatctgccttggcctcccacagtgctgggattacaggcgtgagccaccatgcccggcctctttctcacctttacacctgtcttcttatcctcacatctgttttcacaccttcatccctgtcttcctcatgttcacacttgtcttccccatgttcatagctgcctttcttaccattttggtttgaagggcagtcttctctggcttgtttttttgtttttcccagaaaatcagtattattttttaaataagaaaaacattcctag

SEQ ID NO: 4677 - DNA, 1922 bp, Homo sapiens
  source 1..1922: mol_type = unassigned DNA
cttccttcgtcccttccttccttcctttcgccgggcgcgatggagccggggcgccggggggccgcggcgctgctagcgctgctgtgcgtggcctgcgcgctgcgcgccgggcgcgcccaatacgaacgctacagcttccgcagcttcccacgggacgagctgatgccgctcgagtcggcctaccggcacgcgctggacaagtacagcggcgagcactgggccgagagcgtgcgcgacagcgaggccttctgccaccgcaactgcagcgccgcgccgcagcccgagcccgccgccggcctcgccagctatcccgagctgcgcctcttcgggggcctgctgcgccgcgcgcactgcctcaagcgctgcaagcagggcctgccagccttccgccagtcccagcccagccgcgaggtgctggcggacttccagcgccgcgagccctacaagttcctgcagttcgcttacttcaaggcaaataatctccccaaagccatcgccgctgctcacacctttctactgaagcatcctgatgacgaaatgatgaagaggaacatggcatattataagagcctgcctggtgccgaggactacattaaagacctggaaaccaagtcatatgaaagcctgttcatccgagcagtgcgggcatacaacggtgagaactggagaacatccatcacagacatggagctggcccttcccgacttcttcaaagccttttacgagtgtctcgcagcctgcgagggttccagggagatcaaggacttcaaggatttctacctttccatagcagatcattatgtagaagttctggaatgcaaaatacagtgtgaagagaacctcaccccagttataggaggctatccggttgagaaatttgtggctaccatgtatcattacttgcagtttgcctattataagttgaacgacctgaagaatgcagccccctgtgcagtcagctatctgctctttgatcagaatgacaaggtcatgcagcagaacctggtgtattaccagtaccacagggacacttggggcctctcggatgagcacttccagcccagacctgaagcagttcagttctttaatgtgaccacactccagaaggagctgtatgactttgctaaggaaaatataatggatgatgatgagggagaagttgtggaatatgtggatgacctcttggaactggaggagaccagctagcccacagcaaccaaagagacttcctcttggcgttcaggaaacacagattctttgtccttttcccaacagcccaggctgttgatacctcagagccttctctttactctccaaagtgaaagggaagcccccgtctctctaactgcatgtcatcaggggtgagcctgcctttcctatcttcacacctgccacctcatgttcacacctatctttctcaccttttttttgagatggagtctcgctctcttgcccaggctggagtgcaatggcacgttctcagctcactgcaacctccgcctcttgggttcaagcaattctgctgcatcagcctcccgagtacctgggattacaggcatgtgccaccacgcccggctaattttgtatttttagtagagacggggttttgccatgttggccaggctggtctcgaactcttgacttcagatgatccatctgccttggcctcccacagtgctgggattacaggcgtgagccaccatgcccggcctctttctcacctttacacctgtcttcttatcctcacatctgttttcacaccttcatccctgtcttcctcatgttcacacttgtcttccccatgttcatagctgcctttcttaccattttggtttgaagggcagtcttctctggcttgtttttttgtttttcccagaaaatcagtattattttttaaataagaaaaacattcctagaagatg

SEQ ID NO: 4678 - DNA, 4199 bp, Homo sapiens
  source 1..4199: mol_type = unassigned DNA
agtcccagcggccgccagacccgccggagttggacccgagcacgccgcggagcccggaccctccctcggacgctctgccccggccatggcgtcgctgctgccactgctctgtctctgtgtcgtcgctgcgcacctggcgggggcccgagacgccacccccaccgaggagccaatggcgactgcactgggcctggaaagacggtccgtgtacaccggccagccctcaccagccctggaggactgggaagaggccagcgagtggacgtcctggttcaacgtggaccaccccggaggcgacggcgacttcgagagcctggctgccatccgcttctactacgggccagcgcgcgtgtgcccgcgaccgctggcgctggaagcgcgcaccacggactgggccctgccgtccgccgtcggcgagcgcgtgcacttgaaccccacgcgcggcttctggtgcctcaaccgcgagcaaccgcgtggccgccgctgctccaactaccacgtgcgcttccgctgcccactagaagcctcgtggggcgcgtggggcccgtggggtccctgctcggggagctgtgggccaggccgtcgcttgcgccgccgccactgcccaagccccgctggggatgcgtgtcccgggcgtcctctggaggcgcagaagtgcgtgcggcctcggtgtccagggtgcagccttgacacctgtgaatgcccggaccacatcctcctgggctcggtggtcaccccatctgggcaaccactgctaggagccagggtctccctgcgagaccagcctggcactgtggccaccagcgatgctcacggaaccttccgggtgcctggtgtctgtgctgacagccgcgccaacatcagggcccagatggatggcttctctgcaggggaggcccaggcccaggccaacggatccatctctgtggtcaccatcatccttgataagttggagaagccgtacctggtgaaacaccctgagtcccgagtgcgagaggctggccagaatgtgactttctgctgcaaagcctccgggacccccatgcccaagaaatactcctggttccacaatgggaccctgctggacaggcgagctcatgggtacggggcccacctggagctgcggggactgcgcccagaccaggctggcatctaccactgcaaggcatggaatgaggcgggtgccgtgcgctcgggcactgcccggctcactgtacttgccccaggccagccagcctgcgacccccggccccgagagtacctgatcaagctccctgaggactgtggtcagccaggtagtggccctgcctacctggatgtgggcctctgtcccgacacccgctgccccagcctggcaggctccagcccccgctgcggggacgccagctcccgctgctgctctgtgcgccgtctggagagaagggagattcactgccctggctacgtcctcccagtgaaggtggtggcagagtgtggctgccagaagtgtctgccccctcgggggctggtccggggccgtgttgtggctgctgactccggggagccgctacgcttcgccaggattctgctgggccaggagcccatcggcttcaccgcctaccagggcgactttaccattgaggtgccgccctccacccagcggctggtggtgacttttgtggaccccagcggtgagttcatggacgctgtccgggtcttgccttttgatcctcgaggtgccggcgtgtaccacgaggtcaaggccatgcggaagaaagccccggtcattttacataccagccagagcaacacgatccccctgggcgagctggaagatgaggcgcccctgggcgagctggtcctgccttctggcgctttccgcagagccgacggcaaaccctactcggggcctgtggaggcccgggtgacgttcgtggacccccgagacctcacctcggcggcgtctgcccccagtgacctgcgcttcgtggacagcgacggcgagctggctccactgcgcacctacggcatgttctccgtggacctccgtgcgcccggctccgcggagcagctgcaggtggggccggtggccgtgcgggtggccgccagccagatccacatgccaggccacgtggaggccctcaagctgtggtcgctgaaccccgagaccggcttgtgggaggaggagagcggcttccggcgcgaggggtcctcgggcccccgggtgcgccgggaggagcgcgtcttcctggtgggcaacgtggagatccgggagcggcgcctgttcaatctggacgtgcctgagcgccgccgctgcttcgtgaaggtgcgcgcctacgccaacgacaagttcacccccagcgagcaggtggagggcgtggtggtcacgctggtcaatctggagcccgcccccggcttctccgccaacccccgtgcctggggccgctttgacagcgcggtcaccggccccaatggcgcctgcctccccgccttctgcgacgccgacaggccagacgcctacaccgccctggtcaccgccaccctgggcggcgaggagctggagccggccccttccttgccccgcccactcccggccaccgtgggcgtcacccagccctacctggacaggctggggtaccgtcggacggaccacgacgatcccgccttcaagcgtaacggcttccgcatcaacctcgccaagcccaggccaggtgaccccgccgaggccaatgggcctgtgtacccgtggcgcagcctgcgggaatgccagggggccccggtgactgccagccacttccgcttcgccagggtggaggcggacaagtacgagtacaacgtggtccccttccgagagggcacacctgcctcctggactggcgatctcctggcctggtggcccaacccgcaggagttccgggcctgcttcctcaaggtgaagatccagggtccccaggagtatatggtccgctcccacaacgcagggggcagccacccacgcacccgcggccagctctacggacttcgggatgcccggagtgtgcgagaccccgagcgtccgggcacctcggcagcctgcgtggagttcaagtgcagcgggatgctgttcgaccagcggcaggtggacaggacgctggtgaccattatgccccagggcagctgccggcgcgtggccgtcaacggactccttcgggattacctgacccggcaccccccaccggtgcccgcggaggacccagctgccttctccatgctggcccccctagaccctctgggccacaactatggcgtctacactgtcactgaccagagcccacgcttggccaaggagatcgccattggccgctgctttgatggttcctctgacggcttctccagagagatgaaggctgatgccggcacagccgtcaccttccagtgccgggagccaccggccggacgacccagcctcttccagaggctgctggagtccccggcgacagcacttggtgacatccgcagggagatgagcgaggcggcgcaggcacaggcccgggcctcaggtcccctccgcacccgccggggtagggtccggcagtgacctgggcaggggcctcgctttcccacctccctccagactcctttgaccccaggaagttttgcccctccttcttctccagacagccccctccccaggtgtctgggtcccctttcccgcccctttccagaactcagagtcagacaagaacccagagcatccgatggtagaaacaccaggaagacaattgttgctgtgtggtatggaatggagtttgcggtgactctggggccagcacccaggggacgacgttcaaccctagcctgaagggacccgctcccagctcagaagccgtctctgacttctcgtgcgtattttgaccctgatttcaatcttctacccttgggagttctggcgtttggcacaaagtcccctctgcctgtttggagctcagtgctagaccaggtcccctgccccgagctttgtttttggggttatttattgaaacaaagtgtggggagctggttgtgggtgtgagtgggggtgtggggtccaggctgggcccagtgaaaaggaggaaggggttcccatgcgggggaggctctggggctgaggggaacaattctcacgtgtttggtgcttagagacctgcccggggcgttgggcaggccctccgggggctgaattaaaaatgctttatttccaa

SEQ ID NO: 4679 - DNA, 4454 bp, Homo sapiens
  source 1..4454: mol_type = unassigned DNA
actggactgctggagaggcgaaggcttggacccccagctgaggagtcctgctcaagacacggtcactggatctgagaaacttcccaggggaccgcattccagagtcagtgactctgtgaagcacccacatctacctcttgccacgttcccacgggcttgggggaaagatggtggggaccaaggcctgggtgttctccttcctggtcctggaagtcacatctgtgttggggagacagacgatgctcacccagtcagtaagaagagtccagcctgggaagaagaaccccagcatctttgccaagcctgccgacaccctggagagccctggtgagtggacaacatggttcaacatcgactacccaggcgggaagggcgactatgagcggctggacgccattcgcttctactatggggaccgtgtatgtgcccgtcccctgcggctagaggctcggaccactgactggacacctgcgggcagcactggccaggtggtccatggtagtccccgtgagggtttctggtgcctcaacagggagcagcggcctggccagaactgctctaattacaccgtacgcttcctctgcccaccaggatccctgcgccgagacacagagcgcatctggagcccatggtctccctggagcaagtgctcagctgcctgtggtcagactggggtccagactcgcacacgcatttgcttggcagagatggtgtcgctgtgcagtgaggccagcgaagagggtcagcactgcatgggccaggactgtacagcctgtgacctgacctgcccaatgggccaggtgaatgctgactgtgatgcctgcatgtgccaggacttcatgcttcatggggctgtctcccttcccggaggtgccccagcctcaggggctgctatctacctcctgaccaagacgccgaagctgctgacccagacagacagtgatgggagattccgaatccctggcttgtgccctgatggcaaaagcatcctgaagatcacaaaggtcaagtttgcccccattgtactcacaatgcccaagactagcctgaaggcagccaccatcaaggcagagtttgtgagggcagagactccatacatggtgatgaaccctgagacaaaagcacggagagctgggcagagcgtgtctctgtgctgtaaggccacagggaagcccaggccagacaagtatttttggtatcataatgacacattgctggatccttccctctacaagcatgagagcaagctggtgctgaggaaactgcagcagcaccaggctggggagtacttttgcaaggcccagagtgatgctggggctgtgaagtccaaggttgcccagctgattgtcatagcatctgatgagactccttgcaacccagttcctgagagctatcttatccggctgccccatgattgctttcagaatgccaccaactccttctactatgacgtgggacgctgccctgttaagacttgtgcagggcagcaggataatgggatcaggtgccgtgatgctgtgcagaactgctgtggcatctccaagacagaggaaagggagatccagtgcagtggctacacgctacccaccaaggtggccaaggagtgcagctgccagcggtgtacggaaactcggagcatcgtgcggggccgtgtcagtgctgctgacaatggggagcccatgcgctttggccatgtgtacatggggaacagccgtgtaagcatgactggctacaagggcactttcaccctccatgtcccccaggacactgagaggctggtgctcacatttgtggacaggctgcagaagtttgtcaacaccaccaaagtgctacctttcaacaagaaggggagtgccgtgttccatgaaatcaagatgcttcgtcggaaaaagcccatcactttggaagccatggagaccaacatcatccccctgggggaagtggttggtgaagaccccatggctgaactggagattccatccaggagtttctacaggcagaatggggagccctacataggaaaagtgaaggccagtgtgaccttcctggatccccggaatatttccacagccacagctgcccagactgacctgaacttcatcaatgacgaaggagacactttcccccttcggacgtatggcatgttctctgtggacttcagagatgaggtcacctcagagccacttaatgctggcaaagtgaaggtccaccttgactcgacccaggtcaagatgccagagcacatatccacagtgaaactctggtcactcaatccagacacagggctgtgggaggaggaaggtgatttcaaatttgaaaatcaaaggaggaacaaaagagaagacagaaccttcctggtgggcaacctggagattcgtgagaggaggctctttaacctggatgttcctgaaagcaggcggtgctttgttaaggtgagggcctaccggagtgagaggttcttgcctagtgagcagatccagggggttgtgatctccgtgattaacctggagcctagaactggcttcttgtccaaccctagggcctggggccgctttgacagtgtcatcacaggccccaacggggcctgtgtgcctgccttctgtgatgaccagtcccctgatgcctactctgcctatgtcttggcaagcctggctggggaggaactgcaagcagtggagtcttctcctaaattcaacccaaatgcaattggcgtccctcagccctatctcaacaagctcaactaccgtcggacggaccatgaggatccacgggttaaaaagacagctttccagattagcatggccaagccaaggcccaactcagctgaggagagcaatgggcccatctatgcctttgagaacctccgggcatgtgaagaggcaccacccagtgcagcccacttccggttctaccagattgagggggatcgatatgactacaacacagtccccttcaacgaagatgaccctatgagctggactgaagactatctggcatggtggccaaagccgatggaattcagggcctgctatatcaaggtgaagattgtggggccactggaagtgaatgtgcgatcccgcaacatggggggcactcatcggcagacagtggggaagctgtatggaatccgagatgtgaggagcactcgggacagggaccagcccaatgtctcagctgcctgtctggagttcaagtgcagtgggatgctctatgatcaggaccgtgtggaccgcaccctggtgaaggtcatcccccagggcagctgccgtcgagccagtgtgaaccccatgctgcatgagtacctggtcaaccacttgccacttgcagtcaacaacgacaccagtgagtacaccatgctggcacccttggacccactgggccacaactatggcatctacactgtcactgaccaggaccctcgcacggccaaggagatcgcgctcggccggtgctttgatggcacatccgatggctcctccagaatcatgaagagcaatgtgggagtagccctcaccttcaactgtgtagagaggcaagtaggccgccagagtgccttccagtacctccaaagcaccccagcccagtcccctgctgcaggcactgtccaaggaagagtgccctcgaggaggcagcagcgagcgagcaggggtggccagcgccagggtggagtggtggcctctctgagatttcctagagttgctcaacagcccctgatcaactaagttttgtggtacttcaccctcttctgccctcatttcatgtgacagccattgtgagactgatgcacaaactgtcacttggttaatttaagcacttctgttttcgtgaatttgcttgtttgtttcttcatgcctttacttactttgtcccatgctactgattggcacgtggcccccacaatggcacaataaagcccctttgtgaaactgttctttaaatgaaacacaagaaattggccactggtaaaactctgcagcttcaactgtacttcatttaatgccattaatgcaaatatacttcctcttctttttgcatggttttgcccacctctgcaatagtgataatctgatgctgaagatcaaataaccaatataaagcatatttcttggccttgctccacaggacataggcaagccttgatcatagttcatacatataaatggtggtgaaataaagaaataaaacacaatacttttacttgaaatgtaaataacttatttatttctttgctaaatttggaattctagtgcacattcaaagttaagctattaaatatagggtgatcatagttcctctaccaagtctggaaagaacatctcctggtatccacaattacaccaggttgctaactgtatttgtacatttccctttgcattcgcttctgttcttgctagaaacccagtgtagcccagggcagatgtcaataaatgcatactctgtatttcgattctgag

SEQ ID NO: 4680 - DNA, 2461 bp, Homo sapiens
  source 1..2461: mol_type = unassigned DNA
gtgggcggtagaaagcgagcagccacccagctccccgccaccgccatggtccccgacaccgcctgcgttcttctgctcaccctggctgccctcggcgcgtccggacagggccagagcccgttgggctcagacctgggcccgcagatgcttcgggaactgcaggaaaccaacgcggcgctgcaggacgtgcgggagctgctgcggcagcaggtcagggagatcacgttcctgaaaaacacggtgatggagtgtgacgcgtgcgggatgcagcagtcagtacgcaccggcctacccagcgtgcggcccctgctccactgcgcgcccggcttctgcttccccggcgtggcctgcatccagacggagagcggcgcgcgctgcggcccctgccccgcgggcttcacgggcaacggctcgcactgcaccgacgtcaacgagtgcaacgcccacccctgcttcccccgagtccgctgtatcaacaccagcccggggttccgctgcgaggcttgcccgccggggtacagcggccccacccaccagggcgtggggctggctttcgccaaggccaacaagcaggtttgcacggacatcaacgagtgtgagaccgggcaacataactgcgtccccaactccgtgtgcatcaacacccggggctccttccagtgcggcccgtgccagcccggcttcgtgggcgaccaggcgtccggctgccagcggcgcgcacagcgcttctgccccgacggctcgcccagcgagtgccacgagcatgcagactgcgtcctagagcgcgatggctcgcggtcgtgcgtgtgtgccgttggctgggccggcaacgggatcctctgtggtcgcgacactgacctagacggcttcccggacgagaagctgcgctgcccggagcgccagtgccgtaaggacaactgcgtgactgtgcccaactcagggcaggaggatgtggaccgcgatggcatcggagacgcctgcgatccggatgccgacggggacggggtccccaatgaaaaggacaactgcccgctggtgcggaacccagaccagcgcaacacggacgaggacaagtggggcgatgcgtgcgacaactgccggtcccagaagaacgacgaccaaaaggacacagaccaggacggccggggcgatgcgtgcgacgacgacatcgacggcgaccggatccgcaaccaggccgacaactgccctagggtacccaactcagaccagaaggacagtgatggcgatggtataggggatgcctgtgacaactgtccccagaagagcaacccggatcaggcggatgtggaccacgactttgtgggagatgcttgtgacagcgatcaagaccaggatggagacggacatcaggactctcgggacaactgtcccacggtgcctaacagtgcccaggaggactcagaccacgatggccagggtgatgcctgcgacgacgacgacgacaatgacggagtccctgacagtcgggacaactgccgcctggtgcctaaccccggccaggaggacgcggacagggacggcgtgggcgacgtgtgccaggacgactttgatgcagacaaggtggtagacaagatcgacgtgtgtccggagaacgctgaagtcacgctcaccgacttcagggccttccagacagtcgtgctggacccggagggtgacgcgcagattgaccccaactgggtggtgctcaaccagggaagggagatcgtgcagacaatgaacagcgacccaggcctggctgtgggttacactgccttcaatggcgtggacttcgagggcacgttccatgtgaacacggtcacggatgacgactatgcgggcttcatctttggctaccaggacagctccagcttctacgtggtcatgtggaagcagatggagcaaacgtattggcaggcgaaccccttccgtgctgtggccgagcctggcatccaactcaaggctgtgaagtcttccacaggccccggggaacagctgcggaacgctctgtggcatacaggagacacagagtcccaggtgcggctgctgtggaaggacccgcgaaacgtgggttggaaggacaagaagtcctatcgttggttcctgcagcaccggccccaagtgggctacatcagggtgcgattctatgagggccctgagctggtggccgacagcaacgtggtcttggacacaaccatgcggggtggccgcctgggggtcttctgcttctcccaggagaacatcatctgggccaacctgcgttaccgctgcaatgacaccatcccagaggactatgagacccatcagctgcggcaagcctagggaccagggtgaggacccgccggatgacagccaccctcaccgcggctggatgggggctctgcacccagccccaaggggtggccgtcctgagggggaagtgagaagggctcagagaggacaaaataaagtgtgtgtgcaggga

SEQ ID NO: 4681 - DNA, 2292 bp, Homo sapiens
  source 1..2292: mol_type = unassigned DNA
agaaagcgagcagccacccagctccccgccaccgccatggtccccgacaccgcctgcgttcttctgctcaccctggctgccctcggcgcgtccggacagggccagagcccgttgggctcagacctgggcccgcagatgcttcgggaactgcaggaaaccaacgcggcgctgcaggacgtgcgggagctgctgcggcagcaggtcagggagatcacgttcctgaaaaacacggtgatggagtgtgacgcgtgcgggatgcagcagtcagtacgcaccggcctacccagcgtgcggcccctgctccactgcgcgcccggcttctgcttccccggcgtggcctgcatccagacggagagcggcgcgcgctgcggcccctgccccgcgggcttcacgggcaacggctcgcactgcaccgacgtcaacgagtgtgagaccgggcaacataactgcgtccccaactccgtgtgcatcaacacccggggctccttccagtgcggcccgtgccagcccggcttcgtgggcgaccaggcgtccggctgccagcggcgcgcacagcgcttctgccccgacggctcgcccagcgagtgccacgagcatgcagactgcgtcctagagcgcgatggctcgcggtcgtgcgtgtgtgccgttggctgggccggcaacgggatcctctgtggtcgcgacactgacctagacggcttcccggacgagaagctgcgctgcccggagcgccagtgccgtaaggacaactgcgtgactgtgcccaactcagggcaggaggatgtggaccgcgatggcatcggagacgcctgcgatccggatgccgacggggacggggtccccaatgaaaaggacaactgcccgctggtgcggaacccagaccagcgcaacacggacgaggacaagtggggcgatgcgtgcgacaactgccggtcccagaagaacgacgaccaaaaggacacagaccaggacggccggggcgatgcgtgcgacgacgacatcgacggcgaccggatccgcaaccaggccgacaactgccctagggtacccaactcagaccagaaggacagtgatggcgatggtataggggatgcctgtgacaactgtccccagaagagcaacccggatcaggcggatgtggaccacgactttgtgggagatgcttgtgacagcgatcaagaccaggatggagacggacatcaggactctcgggacaactgtcccacggtgcctaacagtgcccaggaggactcagaccacgatggccagggtgatgcctgcgacgacgacgacgacaatgacggagtccctgacagtcgggacaactgccgcctggtgcctaaccccggccaggaggacgcggacagggacggcgtgggcgacgtgtgccaggacgactttgatgcagacaaggtggtagacaagatcgacgtgtgtccggagaacgctgaagtcacgctcaccgacttcagggccttccagacagtcgtgctggacccggagggtgacgcgcagattgaccccaactgggtggtgctcaaccagggaagggagatcgtgcagacaatgaacagcgacccaggcctggctgtgggttacactgccttcaatggcgtggacttcgagggcacgttccatgtgaacacggtcacggatgacgactatgcgggcttcatctttggctaccaggacagctccagcttctacgtggtcatgtggaagcagatggagcaaacgtattggcaggcgaaccccttccgtgctgtggccgagcctggcatccaactcaaggctgtgaagtcttccacaggccccggggaacagctgcggaacgctctgtggcatacaggagacacagagtcccaggtgcggctgctgtggaaggacccgcgaaacgtgggttggaaggacaagaagtcctatcgttggttcctgcagcaccggccccaagtgggctacatcagggtgcgattctatgagggccctgagctggtggccgacagcaacgtggtcttggacacaaccatgcggggtggccgcctgggggtcttctgcttctcccaggagaacatcatctgggccaacctgcgttaccgctgcaatgacaccatcccagaggactatgagacccatcagctgcggcaagcctagggaccagggtgaggacccgccggatgacagccaccctcaccgcggctggatgggggctctgcacccagccccaaggggtggccgtcctgagggggaagtgagaagggctcagagaggacaaaataaagtgtgtgtgcaggg

SEQ ID NO: 4682 - DNA, 2322 bp, Homo sapiens
  source 1..2322: mol_type = unassigned DNA
agaaagcgagcagccacccagctccccgccaccgccatggtccccgacaccgcctgcgttcttctgctcaccctggctgccctcggcgcgtccggacagggccagagcccgttgggctcagacctgggcccgcagatgcttcgggaactgcaggaaaccaacgcggcgctgcaggacgtgcgggagctgctgcggcagcaggtcagggagatcacgttcctgaaaaacacggtgatggagtgtgacgcgtgcgggatgcagcagtcagtacgcaccggcctacccagcgtgcggcccctgctccactgcgcgcccggcttctgcttccccggcccctgccccgcgggcttcacgggcaacggctcgcactgcaccgacgtcaacgagtgcaacgcccacccctgcttcccccgagtccgctgtatcaacaccagcccggggttccgctgcgaggcttgcccgccggggtacagcggccccacccaccagggcgtggggctggctttcgccaaggccaacaagcaggtttgcacggacatcaacgagtgtgagaccgggcaacataactgcgtccccaactccgtgtgcatcaacacccggggctccttccagtgcggcccgtgccagcccggcttcgtgggcgaccaggcgtccggctgccagcggcgcgcacagcgcttctgccccgacggctcgcccagcgagtgccacgagcatgcagactgcgtcctagagcgcgatggctcgcggtcgtgcgtgtgtgccgttggctgggccggcaacgggatcctctgtggtcgcgacactgacctagacggcttcccggacgagaagctgcgctgcccggagcgccagtgccgtaaggacaactgcgtgactgtgcccaactcagggcaggaggatgtggaccgcgatggcatcggagacgcctgcgatccggatgccgacggggacggggtccccaatgaaaaggacaactgcccgctggtgcggaacccagaccagcgcaacacggacgaggacaagtggggcgatgcgtgcgacaactgccggtcccagaagaacgacgaccaaaaggacacagaccaggacggccggggcgatgcgtgcgacgacgacatcgacggcgaccggatccgcaaccaggccgacaactgccctagggtacccaactcagaccagaaggacagtgatggcgatggtataggggatgcctgtgacaactgtccccagaagagcaacccggatcaggcggatgtggaccacgactttgtgggagatgcttgtgacagcgatcaagaccaggatggagacggacatcaggactctcgggacaactgtcccacggtgcctaacagtgcccaggaggactcagaccacgatggccagggtgatgcctgcgacgacgacgacgacaatgacggagtccctgacagtcgggacaactgccgcctggtgcctaaccccggccaggaggacgcggacagggacggcgtgggcgacgtgtgccaggacgactttgatgcagacaaggtggtagacaagatcgacgtgtgtccggagaacgctgaagtcacgctcaccgacttcagggccttccagacagtcgtgctggacccggagggtgacgcgcagattgaccccaactgggtggtgctcaaccagggaagggagatcgtgcagacaatgaacagcgacccaggcctggctgtgggttacactgccttcaatggcgtggacttcgagggcacgttccatgtgaacacggtcacggatgacgactatgcgggcttcatctttggctaccaggacagctccagcttctacgtggtcatgtggaagcagatggagcaaacgtattggcaggcgaaccccttccgtgctgtggccgagcctggcatccaactcaaggctgtgaagtcttccacaggccccggggaacagctgcggaacgctctgtggcatacaggagacacagagtcccaggtgcggctgctgtggaaggacccgcgaaacgtgggttggaaggacaagaagtcctatcgttggttcctgcagcaccggccccaagtgggctacatcagggtgcgattctatgagggccctgagctggtggccgacagcaacgtggtcttggacacaaccatgcggggtggccgcctgggggtcttctgcttctcccaggagaacatcatctgggccaacctgcgttaccgctgcaatgacaccatcccagaggactatgagacccatcagctgcggcaagcctagggaccagggtgaggacccgccggatgacagccaccctcaccgcggctggat

SEQ ID NO: 4683 - DNA, 3942 bp, Homo sapiens
  source 1..3942: mol_type = unassigned DNA
aggaaggggaggagacaggcgtccagggcgcctggggaaccggcacggcggagcagcggcggcggggctggggggaggccgccgagtcggccgcggccgaggaggggcaggcggaggtcgggggcgccgcggccgcggggtcaggttccccggcgggaggcgcaggtggcggcctggggagctggcggccgctcctcgcctggctgcagcggcggcagccccagtgctgcccctgtgcggcgcccctttcccgctccgccgcgcactgttgtcatggaggaaccaagatggcggctctggcctacaacctgggcaagcgggagatcaaccactacttcagcgtgaggagcgccaaggtgctggcgctggtggccgtgctgctgctcgcagcgtgccacctcgcctcccgccgctaccgaggcaatgattcgtgtgaataccttctctcaagtggcagatttcttggagagaaagtttggcaacctcacagttgtatgatgcataaatacaaaatcagtgaagcaaagaactgccttgtagataaacatattgcatttattggagattccagaattcgtcaattgttttattcttttgtaaaaataattaatccccaattcaaagaagaaggaaataagcatgaaaacattccttttgaagacaagactgcatcagttaaagtggattttctgtggcatcctgaagttaatggttctatgaaacagtgtatcaaagtgtggactgaggattccattgcaaagccacatgtgattgtagcaggagctgccacatggtccatcaagattcacaatggtagcagtgaagcgctttctcaatataaaatgaacatcacctccatagcaccacttttagaaaaattggcaaagactagtgatgtttattgggtcttacaagatcctgtttatgaagatctattaagtgaaaataggaagatgatcactaatgagaagatagatgcttacaatgaagctgcagtcagtattttgaatagtagcaccagaaattctaaatcaaatgttaagatgttcagtgtttccaaattaattgctcaagaaaccatcatggaatctttggatggcttacatcttcctgaatcgagcagagaaactactgcaatgattcttatgaatgtgtattgcaataagattttgaagcctgtagatgggtcctgttgtcaacctcggcctcctgttactctcatacagaagctagctgcttgttttttcactttatctattatcggatatttaattttttacataattcatcgtaatgctcatcggaagaataagccgtgtactgatttggaaagtggagaggaaaagaaaaatattatcaatacccctgtgtcttcattagaaatacttttacaatctttctgcaaacttggcctgattatggcatatttctatatgtgtgaccgtgcaaatctgttcatgaaggaaaacaaattttatacacattcatctttctttattccaattatctacattttggttttgggagtattttataatgaaaatactaaagagactaaagtattaaatagagaacaaacagacgaatggaaaggctggatgcaacttgtgattttgatttatcacatttctggagcaagtacatttttgcctgtatacatgcacattcgagttctggttgctgcatatttatttcagacagggtatgggcatttctcatacttttggataaaaggagattttggaatctatagagtatgtcaggttttatttcgtctcaatttcctggtagtggtgttatgtatagtaatggatcgaccttatcaattctattactttgtccccttggtcactgtatggttcatggtcatatatgttactttagcactatggccacaaataatccaaaaaaaagcaaacggaaattgtttctggcattttggcttactgttgaaactaggctttttgctgttattcatatgttttttggcatattctcagggtgcatttgagaagatcttttctctttggccattgtccaagtgttttgaactgaaagggaatgtatatgaatggtggttcagatggaggttagaccgttatgtagttttccacggaatgctgtttgcttttatttatctggctttgcagaagcgtcaaatactttctgaaggaaagggtgaacctcttttttcaaacaaaatttcaaattttctgttgtttatttcagtagtttctttcttgacctattccatctgggctagcagttgtaaaaacaaagcagagtgcaatgaactccatccgtctgtttctgtggtacagattttagccttcatcctaataagaaacatccctggatatgcccgttcagtttacagttcattttttgcttggtttggaaaaatttcattagagctatttatttgccagtatcacatatggctggcagcggacacaaggggtatcttggtactgatacctggaaaccctatgctcaacatcattgtcagcactttcatatttgtttgtgtggcacatgaaatttctcagatcactaatgatcttgcacagattattattcctaaagataactcatctctcttgaaaaggttggcatgtatagctgcatttttttgtggactcctcatcttatcatccattcaagataaatcaaaacattaggttccaaaaattctaaaaaacctaaactcttcaggctacctttgtgtgtctctagaagagaaaagcatctatctggagatataaatgtgtatgtaaatataaacgtttgtggcaagaggacagttctgtgacatctgttgaacatatgtggttgtatatattggaaatgtacatatccaatatgaaatactaaaacaaacaaacaaacaaaaaaccagaatgcattgtataggattgcatgtgaagtcttttctactgaatctatatttccatttgtaagtgattttaagttaacatatgaaggcagggaaatgattacctttccagtaaaaagtatagataatttaattaacttagtgacaccaccaagtgttttgatataactaaatttgtggtaataagactgtctgcacctgtattcattgtggaacttcctctttcattggaaactttcttactcaagaatgacggcagtattgttttcttatatgtgcaatgaagtggaatgataaacagtatgcctttaatttatatgtgttcttgttctgatgttgtttcctgaaatgatttttcttcctaactgtggttttcgggtatgcaagcctaaatctttgtacactttgtctcacagaatagttctgaggctccatgacagggttttgtcattgttgatgttattgttgcttcgttttataaaaaagccaaaattttttttccaatccaaacgttcacctgtttcctttcctcaagctataccagtgtaataccagttaccctgtggatccatttaatatgttatccccactaattaattttcgtatattatttccaatatttggaaagctctttatagccatttggtatttcctattacccacctcctattttaaatatttatcagtctaaacttgtgcagtgtagtaaacatgcaagttgttacgattgagctgtattaccataagtagaattttaagtaaactggtgaatttgggcaataaatgtttttgctttttgtttgatttttttttacaagctaactgttagaggtatacatttatttatctgttgtacagatttgattatgattttaatgtttgaaagattgcacttgtttgcttttactatatgtggggtaaaatatattttctgttcacagtatatgaaaatatggagtaatttaaacagtaaataaacattctgtggatgcttatttttgtattggcaaagtatcaattaaactatatgtgttctttttcaaaaa

SEQ ID NO: 4684 - DNA, 10257 bp, Homo sapiens
  source 1..10257: mol_type = unassigned DNA
acagaaacctggccgcggctttccgggagctgtgggcacgcgagctgctcgaagccggtggcccggggatcgtcgctgcccagtccggccgcggccggccgcttccccgagcttaccagtaagccggtccgcctccgggacgcgccccgcccgccccgggctcgcgcgctctgaaggggcgcgtcccgcgcactcccggcgccgcccactcccctccccacggccgctcctccctccgcccggatagccggcggcggcggcggcggcggcggcggcggcggccgggagaggcccctccttcacgccctgcttctctccctcgctcgcagtcgagccgagccggcggacccgcctgggctccgaccctgcccaggccatggccggcaacgtgaagaagagctctggggccgggggcggcagcggctccgggggctcgggttcgggtggcctgattgggctcatgaaggacgccttccagccgcaccaccaccaccaccaccacctcagcccccacccgccggggacggtggacaagaagatggtggagaagtgctggaagctcatggacaaggtggtgcggttgtgtcagaacccaaagctggcgctaaagaatagcccaccttatatcttagacctgctaccagatacctaccagcatctccgtactatcttgtcaagatatgaggggaagatggagacacttggagaaaatgagtattttagggtgtttatggagaatttgatgaagaaaactaagcaaaccataagcctcttcaaggagggaaaagaaagaatgtatgaggagaattctcagcctaggcgaaacctaaccaaactgtccctcatcttcagccacatgctggcagaactaaaaggaatctttccaagtggactctttcagggagacacatttcggattactaaagcagatgctgcggaattttggagaaaagcttttggggaaaagacaatagtcccttggaagagctttcgacaggctctacatgaagtgcatcccatcagttctgggctggaggccatggctctgaaatccactattgatctgacctgcaatgattatatttcggtttttgaatttgacatctttacccgactctttcagccctggtcctctttgctcaggaattggaacagccttgctgtaactcatcctggctacatggcttttttgacgtatgacgaagtgaaagctcggctccagaaattcattcacaaacctggcagttatatcttccggctgagctgtactcgtctgggtcagtgggctattgggtatgttactgctgatgggaacattctccagacaatccctcacaataaacctctcttccaagcactgattgatggcttcagggaaggcttctatttgtttcctgatggacgaaatcagaatcctgatctgactggcttatgtgaaccaactccccaagaccatatcaaagtgacccaggaacaatatgaattatactgtgagatgggctccacattccaactatgtaaaatatgtgctgaaaatgataaggatgtaaagattgagccctgtggacacctcatgtgcacatcctgtcttacatcctggcaggaatcagaaggtcagggctgtcctttctgccgatgtgaaattaaaggtactgaacccatcgtggtagatccgtttgatcctagagggagtggcagcctgttgaggcaaggagcagagggagctccctccccaaattatgatgatgatgatgatgaacgagctgatgatactctcttcatgatgaaggaattggctggtgccaaggtggaacggccgccttctccattctccatggccccacaagcttcccttcccccggtgccaccacgacttgaccttctgccgcagcgagtatgtgttccctcaagtgcttctgctcttggaactgcttctaaggctgcttctggctcccttcataaagacaaaccattgccagtacctcccacacttcgagatcttccaccaccaccgcctccagaccggccatattctgttggagcagaatcccgacctcaaagacgccccttgccttgtacaccaggcgactgtccctccagagacaaactgccccctgtcccctctagccgccttggagactcatggctgccccggccaatccccaaagtaccagtatctgccccaagttccagtgatccctggacaggaagagaattaaccaaccggcactcacttccattttcattgccctcacaaatggagcccagaccagatgtgcctaggctcggaagcacgttcagtctggatacctccatgagtatgaatagcagcccattagtaggtccagagtgtgaccaccccaaaatcaaaccttcctcatctgccaatgccatttattctctggctgccagacctcttcctgtgccaaaactgccacctggggagcaatgtgagggtgaagaggacacagagtacatgactccctcttccaggcctctacggcctttggatacatcccagagttcacgagcatgtgattgcgaccagcagattgatagctgtacgtatgaagcaatgtataatattcagtcccaggcgccatctatcaccgagagcagcacctttggtgaagggaatttggccgcagcccatgccaacactggtcccgaggagtcagaaaatgaggatgatgggtatgatgtcccaaagccacctgtgccggccgtgctggcccgccgaactctctcagatatctctaatgccagctcctcctttggctggttgtctctggatggtgatcctacaacaaatgtcactgaaggttcccaagttcccgagaggcctccaaaaccattcccgcggagaatcaactctgaacggaaagctggcagctgtcagcaaggtagtggtcctgccgcctctgctgccaccgcctcacctcagctctccagtgagatcgagaacctcatgagtcaggggtactcctaccaggacatccagaaagctttggtcattgcccagaacaacatcgagatggccaaaaacatcctccgggaatttgtttccatttcttctcctgcccatgtagctacctagcacaccatctccctgctgcaggtttagaggaccagtgagttgggagttattactcaagtggcacctagaagggcaggagttcctttggtgacttcacagtgaagtcttgccctctctgtgggatatcacatcagtggttccaagatttcaaagtggtgaaatgaaaatggagcagctagtatgttttattattttatgggtcttgagtgcatttgaaggtgtccttcagttcccacgtagagagagtgtggattatattacatgataacctacctggggaacagtccagaaagctatagaacaagtattttgctggaaatcctaattgaggacttaagacttcctgggttaaggatgtggccgtgtgtgtgtgtgtctgcctgtggttgtatgtgtccttgtgattataagattaacctgctgtgtgtgttaattccaggcagggaattagcacaaaaggtttaggaaggaatctttttttaaagacttccatctactgtggtattatacccaagcctagtgtgtattacaacttcaacactcccctttggcttatattaccatgtgcatagctaaagtcttctatttttagaacaccttctgtctgttctttccccatcaactccttcctcatccttcttggtgttctgtcatgggccatgggcttgctatggccagccttactgaggccaagcagcttatgggatgttctttattgtgtgtgatggtattggtttgtttggtagataagtgggaggaaaagtactgttgctacactattataggcatgtttgatactagcagctaacactggtcactccaaagcactgtttctataggaacattgaagctattaagatgttttgattatcctaattacataatgaccgatttgagatagaggcctttaaatacattccatgccctccccagaaaatagtctgtgggagtcagttgccttggtgccaggtatgtgttctgatgtaggtcatgagtctttctacttaatgggaagggaagaacatttgtttccaggatgactttctggccagaataccggaaagcttttaggaagcttcgttcacatgctatttaaatgcacaaaatagacagtaaggatttatctgttcagtttttcttcccagtgaattaatttcagcttatatgggtgtcttcatttgaacatgaggaatattaggttatattttcagcagtggttttttcctttgccctttaaggagtggggataatgtccacggtggcccagcctcttgctgatggcaccttccctgcattgctgcctcccgatgatgtggttcttttcttgtgcctgtggctttgggaatgtaacatctctttcctcctttccttcccttttcctcttcacctgaggtcctaaatactctctgtaattactgtgttcttcacggtaattagacatcattcagtgaataaattactgtagtcaaagacagtatgggctggcagtttgtgtaattgcaagttcataaagagaattgagggtccagttgggagaactattagtcagttcttttatatgctgataaatgatccctcgagttcagttagtattctgtccagagtgtttagctcactttcttagcagtgtgtaagctttctccatgtcagaagcaagcctgctctttgataaatctgtcttcctgaaaatctaaatcatgcttttgtctttagatctacacagaaatgaccctccttggatcagttttctttccagtctaatcatctttggaactaaaacttgttctaactcgtctcttggcattcagctactcctagatcttttggttttatcccctggcctcagagccatttatattcccagagtaggcagtacaggatctcgtgttgatttgctgtggttacccagtgtcttctctacatggcataaagcggcaaagcccaccattaggtgaggcggtcccgagttgaggtagagtggggcagaggaagatggcagtgaatatcaaacagtagaccgccatcaacttctaacagccagtacacacactgtttcattttgaggtaacgttcagttttgcattttgtttaaatattgaaggcctagacaaagaactagaaaaaaaaaagcagtttccaggcccatccatattgtaatttttctttatctgcagatattgcctgtagtctaaagatctctttggaagacaaagcattggctatatatcttttgccttttccatgcatctaaatcttctctggagattatctccctactgtgtaggttaagggcagtctcgacttttccttttttgagtcctgtgtggctctttgaatcagcgtgaaactgaggctccagctccctgtgttgtgtgtgtgtgccatccatgggcttgggtgtcagtttgtcacaggtatctgccagcattcaaggttttggatcatttcatgaggatctttcctttgactgggtgctgtgaggacacacctgggtctgtgcctgagattgccaggcaagattaaggaaagttttcatgtggcttttgttttgaggttattctcaaaaccttaatttcttatattttctgttgactaaggcaccagtaacccattcttcaccctccatttgtatggcaatttaaaagtctttggctttgctctgaatttaattaaaactgccttttatgaacagacttcgagttttgccattttgggcaagcccttccgcttgtcccttcctagtggctaataaagtaaaaaaacccacactactttgttctctttttctcatattcattgggctgttgtattcagccagtctcatgctttccctgggtcttcacggattgctttccaagctgccttgttgcggggttgctgcagagcagcaactggacctttccagctgtcgccatgttccttccactaaagtagagggttcttaaaatggaaaaacctgtgggctcttcatatacctccctttagttaagtaatagaccaggcagcttctcatctcagcatttacctgttaatatttttgtgaatagtgctctctacctgtgggtggccgttctcttccacttgctcgtctccccccagccccattctgcataatctaccattcttctcctctctttctcttcttatacagaccctcattactggggcccaagatgtgggatactactgttagtattatttaactattttgtagatttaaaagatttctggttaagggaggtgggggtcactgttcatcactcttaaaatatgtgttttctctatagaaaagtaaaatgtgtttatggtcccaaacagtcaactcacaaatttttataacaaaatttccttgtaaaaactagggaccatctatatattccctttaagatctagttctttttgtaggtgttcagcaatggtgataaagcagaatattctcctacctcacgtcattaaagtcagaagattatagaccttctcaaactataagtccctcttcttgccgttggcctttctgactctggaatgaccactgttcattgaaaaatagttttctgactattggtctggctctaacagtttgtttgttcatccagcaaatgtttatgagtgatgaccatgtgccagaaatgtcaggtatgtgtccttcccttggcgccacatagtagtttactaatgtttgggggattgtacttggactgtcatagcctctgcgtttgaccttaaaatagctcttcccagtaagattgtgcaatttttattcacagctcttccatgtagacttacctttcctcatagagctatcctggttaataacaggccaagattctcccattatcccctgttgtctcctgtagctttgataatgcctgggagattccttggtgtaagtgtcatggataccgactgtttttatgttggaatttgttccaacataattagaatctgtttggtgagttgaaaggtaagttggctcagagttgcacagtagggcattaaatgtttaagcaaagcatctgcccacactcccctttccaatctagtgccttccttgaactttttcctgagctgctacgtccctaatcccccttgttgggaggattttcgtatcacccttatgggacctgtcaccatgtcctgtactatttggaattggttttccagtctttcaacaaccgttgtggctaactatgttttagaagggctggaggtgtgggccctgtcttcgggtctcaggacccaaagatcctttagtcagttgttgggtcttccaagagccagacattaatacagattgaactccatcagtcccctaattgtcagcctttacctccctcccagagcaaggagtttagggattctaaagcttagtgtccacacatcattctaccagaccttagagctttagaagctcaatctaaaatactgtaactcagcataaactattactatcactcctttgaactcagtctccatgagcagtgttttgttggaaatacatagaacggcttaatgcctagagggtggtggatagtgaaggacggtcaaggttatatttttgactgcttagggattctttggatccaagaaacagaaatgttcaagcggaataaaggagggagtggagttgtggtaaggatgcagggtatttcgcagaacccaggacgggaagtgcctttggttcttgggtggagctggaactgcagagctttgcacctagtcctttctcccgcttcacagtctgcttatggtatatgtggcccccaaataggcactctagtcctcaagtctacaccaccttccaactctggggatcaccatgaacaaattctcaatttcccatacttaattttttttttttttgagatggagtctcgctgtgtcgcccaggctggagtgcagtggtgcagtctcaactcaccacaacctctgcctcccaggttcaagcagttctctgcctcaacctcccgagtagctgggattacaggcgcctgccaccatgcccagctaatgttcatatttttagtagagacagggtttcaccgtcttggctaggctggtcttgaactcctgaccctcatgatccacccacctcggcctcccaaagtgctaagattacaggcgtgagccaccgcgcccggcccatacttcgtattcttaaaaaaaactacactcagcccagcacattgatcaagtatctatctctgagcagttggccttgccagggagagcagagatgtggcaggctccttcagctggagacagggagcttctcagagaagtgagcagagactccacagacaccctaaaaaggcttctactcaagaagtaaagccactactcctgcctttttgcttagtggacaggaaggcacaggagtttgtctgggacatcatagaaattcttaggtttaacttaattctggtcattgtcttctttatttcctgtttttcttccctttgtcagtcttcgcatccaagatttcttccctccctcttgtgggccagcctgtcctgttccagagctagcctgttcctgggtagccttccttagcctccattcagcctcaggtcttttgccttcttccgtgtttatttagagagcagaatctaataacgggttccactgtagccactatccatggacttctgggtcctcttcaggtttgagtgcttgaaaatgttcattctctgggcttgtggcctgtctcctccactctcctcctcaccctctcgctccttcctgtgtgagggccgctctgcagtaatgttctcaggcaagccttcctaggcacctcagaaactactttgccagagccagtaagaatatataatattggagcagttgccaggatagaaattaaatatagattccagtttaggatagagtttttaccgagagctctttagacagtatacctgtgtcttctctggcaattgctttcattttagtcctatataaaagctttccttttctgtttttttttaaaactatgcttttgcttgcctaaatcttttgatcttatatttctctcatctcagagcctgtcctgagttgtaaggtatttcatactgccttacttaaaagttttttaaactactagagtcatttgatacacacagaagttacctaataatccaaagatgtccatcaagggaggaagggtgggtcatcagactttgcctttgatgttgtagactaggctcctgagttaagcagcagagggacagcagtgccatgtgccttcactgtgtcccaggaaatctgggttggttccagtgggaaataccagtatttcttggttctggaaagtagcaaaagagtaggagatggggaaatagggatggggagagcaagccccgcatgtccatggcgagtcaggtggggagcacgggtggaagggccggctgttgacagacagactaagctgtgtggtgctcttgccgccccttcctgggtacagagcttgagaaaaatgcagccgaccactccctgtgtttgtacagagcaaagcccaaaagccaacctcagatctcctgatttggcagctgaagaaatcagcagagtcctgattgcctgattcagtcccaaaaatgaatgtcaggccccgccccctccccaccaacattgcctctcctacattctccttctgcccctaaatcagacaggaggccagagaggagtattgctcaatgcgtgctatgtgcaactcctcaggccttgtgccacctccatgctgagccctgaagcagggtgtcctgggtgcctgtgtgtcagctccctcctctctacctacctctgaccttcttgtgggtgagggtggccatgcttatggccatcttaaaactggagaggcagagaactacttatgagtctgtagaccacgtgttgtcttccatggcctgtttctcctgctgtctgggtgagtgagcctgcaacgcaatgcccatgagagtaaatgcctcctgacctaccctgctcagcactgttctagtgtcttggccttgaaagaaaagcctgacttcctgctgacacatgtggtaggggcatggcagctatgaggcacctcctacgtctgttttctggctgtggtgacttgggatttttaaccttatatatctttttcctttactcaaaacaaaacaatttttagcacactg

SEQ ID NO: 4685 - DNA, 6780 bp, Homo sapiens
  source 1..6780: mol_type = unassigned DNA
ctgggtcctgtgtgtgccacaggggtggggtgtccagcgagcggtctcctcctcctgctagtgctgctgcggcgtcccgcggcctccccgagtcgggcgggaggggagagcgggtgtggatttgtcttgacggtaattgttgcgtttccacgtctcggaggcctgcgcgctgggttgctccttcttcgggagcgagctgttctcagcgatcccactcccagccggggctccccacacacactgggctgcgtgcgtgtggagtgggacccgcgcacacgcgtgtctctggacagctacggcgccgaaagaactaaaattccagatggcaaactcaatgaatggcagaaaccctggtggtcgaggaggaaatccccgaaaaggtcgaattttgggtattattgatgctattcaggatgcagttggaccccctaagcaagctgccgcagatcgcaggaccgtggagaagacttggaagctcatggacaaagtggtaagactgtgccaaaatcccaaacttcagttgaaaaatagcccaccatatatacttgatattttgcctgatacatatcagcatttacgacttatattgagtaaatatgatgacaaccagaaacttgcccaactcagtgagaatgagtactttaaaatctacattgatagccttatgaaaaagtcaaaacgggcaataagactctttaaagaaggcaaggagagaatgtatgaagaacagtcacaggacagacgaaatctcacaaaactgtcccttatcttcagtcacatgctggcagaaatcaaagcaatctttcccaatggtcaattccagggagataactttcgtatcacaaaagcagatgctgctgaattctggagaaagttttttggagacaaaactatcgtaccatggaaagtattcagacagtgccttcatgaggtccaccagattagctctggcctggaagcaatggctctaaaatcaacaattgatttaacttgcaatgattacatttcagtttttgaatttgatatttttaccaggctgtttcagccttggggctctattttgcggaattggaatttcttagctgtgacacatccaggttacatggcatttctcacatatgatgaagttaaagcacgactacagaaatatagcaccaaacccggaagctatattttccggttaagttgcactcgattgggacagtgggccattggctatgtgactggggatgggaatatcttacagaccatacctcataacaagcccttatttcaagccctgattgatggcagcagggaaggattttatctttatcctgatgggaggagttataatcctgatttaactggattatgtgaacctacacctcatgaccatataaaagttacacaggaacaatatgaattatattgtgaaatgggctccacttttcagctctgtaagatttgtgcagagaatgacaaagatgtcaagattgagccttgtgggcatttgatgtgcacctcttgccttacggcatggcaggagtcggatggtcagggctgccctttctgtcgttgtgaaataaaaggaactgagcccataatcgtggacccctttgatccaagagatgaaggctccaggtgttgcagcatcattgacccctttggcatgccgatgctagacttggacgacgatgatgatcgtgaggagtccttgatgatgaatcggttggcaaacgtccgaaagtgcactgacaggcagaactcaccagtcacatcaccaggatcctctccccttgcccagagaagaaagccacagcctgacccactccagatcccacatctaagcctgccacccgtgcctcctcgcctggatctaattcagaaaggcatagttagatctccctgtggcagcccaacgggttcaccaaagtcttctccttgcatggtgagaaaacaagataaaccactcccagcaccacctcctcccttaagagatcctcctccaccgccacctgaaagacctccaccaatcccaccagacaatagactgagtagacacatccatcatgtggaaagcgtgccttccagagacccgccaatgcctcttgaagcatggtgccctcgggatgtgtttgggactaatcagcttgtgggatgtcgactcctaggggagggctctccaaaacctggaatcacagcgagttcaaatgtcaatggaaggcacagtagagtgggctctgacccagtgcttatgcggaaacacagacgccatgatttgcctttagaaggagctaaggtcttttccaatggtcaccttggaagtgaagaatatgatgttcctccccggctttctcctcctcctccagttaccaccctcctccctagcataaagtgtactggtccgttagcaaattctctttcagagaaaacaagagacccagtagaggaagatgatgatgaatacaagattccttcatcccaccctgtttccctgaattcacaaccatctcattgtcataatgtaaaacctcctgttcggtcttgtgataatggtcactgtatgctgaatggaacacatggtccatcttcagagaagaaatcaaacatccctgacttaagcatatatttaaagggagatgtttttgattcagcctctgatcccgtgccattaccacctgccaggcctccaactcgggacaatccaaagcatggttcttcactcaacaggacgccctctgattatgatcttctcatccctccattaggtgaagatgcttttgatgccctccctccatctctcccacctcccccacctcctgcaaggcatagtctcattgaacattcaaaacctcctggctccagtagccggccatcctcaggacaggatctttttcttcttccttcagatccctttgttgatctagcaagtggccaagttcctttgcctcctgctagaaggttaccaggtgaaaatgtcaaaactaacagaacatcacaggactatgatcagcttccttcatgttcagatggttcacaggcaccagccagaccccctaaaccacgaccgcgcaggactgcaccagaaattcaccacagaaaaccccatgggcctgaggcggcattggaaaatgtcgatgcaaaaattgcaaaactcatgggagagggttatgcctttgaagaggtgaagagagccttagagatagcccagaataatgtcgaagttgcccggagcatcctccgagaatttgccttccctcctccagtatccccacgtctaaatctatagcagccagaactgtagacaccaaaatggaaagcaatcgatgtattccaagagtgtggaaataaagagaactgagatggaattcaagagagaagtgtctcctcctcgtgtagcagcttgagaagaggcttgggagtgcagcttctcaaaggagaccgatgcttgctcaggatgtcgacagctgtggcttccttgtttttgctagccatatttttaaatcagggttgaactgacaaaaataatttaaagacgtttacttcccttgaactttgaacctgtgaaatgctttaccttgtttacagtttggcaaagttgcagtttgttcttgtttttagtttagttttgttttggtgttttgatacctgtactgtgttcttcacagaccctttgtagcgtggtcaggtctgctgtaacatttcccaccaactctcttgctgtccacatcaacagctaaatcatttattcatatggatctctaccatccccatgccttgcccaggtccagttccatttctctcattcacaagatgctttgaaggttctgattttcaactgatcaaactaatgcaaaaaaaaaaaagtatgtattcttcactactgagtttcttctttggaaaccatcactattgagagatgggaaaaacctgaatgtataaagcatttatttgtcaataaactgccttttgtaaggggttttcacataacatagaggagcttcccttttttgtttaagttttgtaacctttaatcctccatattctcatgtctgtcatcccaggggtgtcacaactgtaaaaatctacaatattagaaagcagctactacagatgtggaagagagaacacttgtataagacaatgctgtactgaagttatataacaaggtcccctgatacttatgcctgcattactttgagggatgctgaatgagaggaccatctccctgaaatatattaataattttcagataaaattatgaacataacataccttttctcaagtggaattagagttcatttcccatttaagtgattacactctatctcctaagagctgtgggaaccagttcatattgcagtggaaacattaactcttcgttgcactgttgagtgtcaaggctactgtggcaatgttttttgcaaagttctcagtaattttctctctgcaatcaaattagagttcatatttaatttgcagattctctcattcattgctccacactgctttatcaaatcaggtgaaagaaattaatgtagttttgcctattttacaaaatggtggttggttctttaaacaccatgttattactcttaataaatctacaaatatttattgagcatctatgatatgcttggtgctgttaggcactgtgtttttaaagcacaaactctcaaaagctgattccagcgtaatgttttatttttgtttttctgtgttttttatgacaaagtctgtctgatagacaaagcctggaaggtttcccccagggctttagaatttagaattagctggttttcatttcaaatgggaaattaatggagaaatgagataaaatcatctctgtgtaaatgcttgaacccacagaaagttttctaaatatggactaattgtgggtttgtgcatatttctgtgtctcctcttttcacttcacacccaccatgatataaaaagatgcatcagagagtgagcctgccttcaggacctgaaaggacatgactgaacatctagtagatctggtggaaattaatgttatacaaaagacacgtagactaagttgaccctgggagaggagttaatacattcctttgcaaagtgacatgtgccctttttttgacagtctggctttcatggtatgagatgaggactcacaggccttgggtaatttctgcttttgtatgaattttttcagatggttctgagctggttatgtccctggaggggaatttttcatttgccttagatgttcttcccatgagtaggtacatgagtgaagtttcttacacttttaaaattgcattggcaaattttcttttgctttatgaacccctgttttgtcattatgatttttcacttgttttaacagtttcagatgtcaccttggaatagcactgtttattttggcctttttatgattgctgatgataggtacagtctaaaggccaaaagttgccacttcattgtgataacattgttgcaacattcctaatatattagagaatgatgtaaaataagaatgttagagaacatagcacattctcattcagtttataaacaatatttgaaaatttccagtgagaattaaaaaaggactagtgatgatatagcaaacctggacctgaaatttgggggtggggggtggggggatatctgttttgcagagaaaatttaccagcctccagcaaaatctctgcatcttgtactcaatagcaaccattagtattgtcatttaaaaagaatgaatcaaaaattcatacgtaatggaatgaaaagaggaaaactttctattaaacactgtcaagaaagacccattgctatctatcacctatgaaattaaacctaaaaaaatttttttttattgtaaaagcgactgctcgttgatgtctggaagtgatccagactttgtttcactgtgatccaaaaagttagacattccttccatttctcaagatttggtaacaatttttttttaagtcagcatttcatataatacataaaattaagacaaattaacttactgatatgtggccaatatcaacccttctcacccaacccaaacatgttctggagatagaaggacttatcctcaattatattccagtaaatttatctccataatctgttttatcccctaatgtatgatatatctcaccaaatttttctagaattgaataaaagcagtttttgcttaacttgaatttccttccacaaatacaaccttcagctcttccctctctgtttcccttttgcccacattgcaaatagtcttcataatagaaccctcactgcaacttaaaagggtcccatttcttaactcagcatttcatataccaagaacacttgcaaagatttcttcataatgtgattttttaatttttcagttccagaagcatttcctacagttcgaacgttattttttctctcagattttcaacttgaagctttgatttgcactgaattaacttggataaaattttagtttctctcttcagctaacagatttggaagcaaattacagtatacttgaataattcaggtactacctgttgacctggaattttagtgattctgggaaagttttccagacaaagacaccaatagagtgaagggttttttccccaattactattttattgttttttaaaatgcctttttaaaacttgtgtgatgtggcaaaatagtcatatgttcaattaatttatattttattcattccttttcaattctggttattatgtaacctcaagtactttatctgttcttttaaagtattttataaaatgaacgttaactaaa

SEQ ID NO: 4686 - DNA, 3430 bp, Homo sapiens
  source 1..3430: mol_type = unassigned DNA
cctttcagccccagatggctttggctcccggtcccgacgctcacgcccacctgccaccccttattgaactaaaattccagatggcaaactcaatgaatggcagaaaccctggtggtcgaggaggaaatccccgaaaaggtcgaattttgggtattattgatgctattcaggatgcagttggaccccctaagcaagctgccgcagatcgcaggaccgtggagaagacttggaagctcatggacaaagtggtaagactgtgccaaaatcccaaacttcagttgaaaaatagcccaccatatatacttgatattttgcctgatacatatcagcatttacgacttatattgagtaaatatgatgacaaccagaaacttgcccaactcagtgagaatgagtactttaaaatctacattgatagccttatgaaaaagtcaaaacgggcaataagactctttaaagaaggcaaggagagaatgtatgaagaacagtcacaggacagacgaaatctcacaaaactgtcccttatcttcagtcacatgctggcagaaatcaaagcaatctttcccaatggtcaattccagggagataactttcgtatcacaaaagcagatgctgctgaattctggagaaagttttttggagacaaaactatcgtaccatggaaagtattcagacagtgccttcatgaggtccaccagattagctctggcctggaagcaatggctctaaaatcaacaattgatttaacttgcaatgattacatttcagtttttgaatttgatatttttaccaggctgtttcagccttggggctctattttgcggaattggaatttcttagctgtgacacatccaggttacatggcatttctcacatatgatgaagttaaagcacgactacagaaatatagcaccaaacccggaagctatattttccggttaagttgcactcgattgggacagtgggccattggctatgtgactggggatgggaatatcttacagaccatacctcataacaagcccttatttcaagccctgattgatggcagcagggaaggattttatctttatcctgatgggaggagttataatcctgatttaactggattatgtgaacctacacctcatgaccatataaaagttacacaggaacaatatgaattatattgtgaaatgggctccacttttcagctctgtaagatttgtgcagagaatgacaaagatgtcaagattgagccttgtgggcatttgatgtgcacctcttgccttacggcatggcaggagtcggatggtcagggctgccctttctgtcgttgtgaaataaaaggaactgagcccataatcgtggacccctttgatccaagagatgaaggctccaggtgttgcagcatcattgacccctttggcatgccgatgctagacttggacgacgatgatgatcgtgaggagtccttgatgatgaatcggttggcaaacgtccgaaagtgcactgacaggcagaactcaccagtcacatcaccaggatcctctccccttgcccagagaagaaagccacagcctgacccactccagatcccacatctaagcctgccacccgtgcctcctcgcctggatctaattcagaaaggcatagttagatctccctgtggcagcccaacgggttcaccaaagtcttctccttgcatggtgagaaaacaagataaaccactcccagcaccacctcctcccttaagagatcctcctccaccgccacctgaaagacctccaccaatcccaccagacaatagactgagtagacacatccatcatgtggaaagcgtgccttccagagacccgccaatgcctcttgaagcatggtgccctcgggatgtgtttgggactaatcagcttgtgggatgtcgactcctaggggagggctctccaaaacctggaatcacagcgagttcaaatgtcaatggaaggcacagtagagtgggctctgacccagtgcttatgcggaaacacagacgccatgatttgcctttagaaggagctaaggtcttttccaatggtcaccttggaagtgaagaatatgatgttcctccccggctttctcctcctcctccagttaccaccctcctccctagcataaagtgtactggtccgttagcaaattctctttcagagaaaacaagagacccagtagaggaagatgatgatgaatacaagattccttcatcccaccctgtttccctgaattcacaaccatctcattgtcataatgtaaaacctcctgttcggtcttgtgataatggtcactgtatgctgaatggaacacatggtccatcttcagagaagaaatcaaacatccctgacttaagcatatatttaaagggtgaagatgcttttgatgccctccctccatctctcccacctcccccacctcctgcaaggcatagtctcattgaacattcaaaacctcctggctccagtagccggccatcctcaggacaggatctttttcttcttccttcagatccctttgttgatctagcaagtggccaagttcctttgcctcctgctagaaggttaccaggtgaaaatgtcaaaactaacagaacatcacaggactatgatcagcttccttcatgttcagatggttcacaggcaccagccagaccccctaaaccacgaccgcgcaggactgcaccagaaattcaccacagaaaaccccatgggcctgaggcggcattggaaaatgtcgatgcaaaaattgcaaaactcatgggagagggttatgcctttgaagaggtgaagagagccttagagatagcccagaataatgtcgaagttgcccggagcatcctccgagaatttgccttccctcctccagtatccccacgtctaaatctatagcagccagaactgtagacaccaaaatggaaagcaatcgatgtattccaagagtgtggaaataaagagaactgagatggaattcaagagagaagtgtctcctcctcgtgtagcagcttgagaagaggcttgggagtgcagcttctcaaaggagaccgatgcttgctcaggatgtcgacagctgtggcttccttgtttttgctagccatatttttaaatcagggttgaactgacaaaaataatttaaagacgtttacttcccttgaactttgaacctgtgaaatgctttaccttgtttacagtttggcaaagttgcagtttgttcttgtttttagtttagttttgttttggtgttttgatacctgtactgtgttcttcacagaccctttgtagcgtggtcaggtctgctgtaacatttcccaccaactctcttgctgtccacatcaacagctaaatcatttattcatatggatctctaccatccccatgccttgcccaggtccagttccatttctctcattcacaagatgctttga

SEQ ID NO: 4687 - DNA, 3350 bp, Homo sapiens
  source 1..3350: mol_type = unassigned DNA
ctgggtcctgtgtgtgccacaggggtggggtgtccagcgagcggtctcctcctcctgctagtgctgctgcggcgtcccgcggcctccccgagtcgggcgggaggggagagcgggtgtggatttgtcttgacggtaattgttgcgtttccacgtctcggaggcctgcgcgctgggttgctccttcttcgggagcgagctgttctcagcgatcccactcccagccggggctccccacacacactgggctgcgtgcgtgtggagtgggacccgcgcacacgcgtgtctctggacagctacggcgccgaaagaactaaaattccagatggcaaactcaatgaatggcagaaaccctggtggtcgaggaggaaatccccgaaaaggtcgaattttgggtattattgatgctattcaggatgcagttggaccccctaagcaagctgccgcagatcgcaggaccgtggagaagacttggaagctcatggacaaagtggtaagactgtgccaaaatcccaaacttcagttgaaaaatagcccaccatatatacttgatattttgcctgatacatatcagcatttacgacttatattgagtaaatatgatgacaaccagaaacttgcccaactcagtgagaatgagtactttaaaatctacattgatagccttatgaaaaagtcaaaacgggcaataagactctttaaagaaggcaaggagagaatgtatgaagaacagtcacaggacagacgaaatctcacaaaactgtcccttatcttcagtcacatgctggcagaaatcaaagcaatctttcccaatggtcaattccagggagataactttcgtatcacaaaagcagatgctgctgaattctggagaaagttttttggagacaaaactatcgtaccatggaaagtattcagacagtgccttcatgaggtccaccagattagctctggcctggaagcaatggctctaaaatcaacaattgatttaacttgcaatgattacatttcagtttttgaatttgatatttttaccaggctgtttcagccttggggctctattttgcggaattggaatttcttagctgtgacacatccaggttacatggcatttctcacatatgatgaagttaaagcacgactacagaaatatagcaccaaacccggaagctatattttccggttaagttgcactcgattgggacagtgggccattggctatgtgactggggatgggaatatcttacagaccatacctcataacaagcccttatttcaagccctgattgatggcagcagggaaggattttatctttatcctgatgggaggagttataatcctgatttaactggattatgtgaacctacacctcatgaccatataaaagttacacaggaacaatatgaattatattgtgaaatgggctccacttttcagctctgtaagatttgtgcagagaatgacaaagatgtcaagattgagccttgtgggcatttgatgtgcacctcttgccttacggcatggcaggagtcggatggtcagggctgccctttctgtcgttgtgaaataaaaggaactgagcccataatcgtggacccctttgatccaagagatgaaggctccaggtgttgcagcatcattgacccctttggcatgccgatgctagacttggacgacgatgatgatcgtgaggagtccttgatgatgaatcggttggcaaacgtccgaaagtgcactgacaggcagaactcaccagtcacatcaccaggatcctctccccttgcccagagaagaaagccacagcctgacccactccagatcccacatctaagcctgccacccgtgcctcctcgcctggatctaattcagaaaggcatagttagatctccctgtggcagcccaacgggttcaccaaagtcttctccttgcatggtgagaaaacaagataaaccactcccagcaccacctcctcccttaagagatcctcctccaccgccacctgaaagacctccaccaatcccaccagacaatagactgagtagacacatccatcatgtggaaagcgtgccttccagagacccgccaatgcctcttgaagcatggtgccctcgggatgtgtttgggactaatcagcttgtgggatgtcgactcctaggggagggctctccaaaacctggaatcacagcgagttcaaatgtcaatggaaggcacagtagagtgggctctgacccagtgcttatgcggaaacacagacgccatgatttgcctttagaaggagctaaggtcttttccaatggtcaccttggaagtgaagaatatgatgttcctccccggctttctcctcctcctccagttaccaccctcctccctagcataaagtgtactggtccgttagcaaattctctttcagagaaaacaagagacccagtagaggaagatgatgatgaatacaagattccttcatcccaccctgtttccctgaattcacaaccatctcattgtcataatgtaaaacctcctgttcggtcttgtgataatggtcactgtatgctgaatggaacacatggtccatcttcagagaagaaatcaaacatccctgacttaagcatatatttaaagggtacgtatagaatataatttcctttgtgatgtacatcttaatggtcagaatttaaaggcaaaatttcatgccattgtactgaaaatacattaaggttttgtgttatcctctaggagatgtttttgattcagcctctgatcccgtgccattaccacctgccaggcctccaactcgggacaatccaaagcatggttcttcactcaacaggacgccctctgattatgatcttctcatccctccattaggttgaaacctttaaaaaagttttgaacaacccacccctccttcttttaatttcagaattttcagaattcagagttcagtataacacagactcactgggttgtgaatttgcctgaaatttgaatgggttctccaggtgccggtgactcccaagttcacgagaccattactccatgtagatgattaaggtagtagtgtagtagttgggcatcagtcaggttttaagcaagttgttttgtccatactaaatgtagtctaaaaacacatgagagctttgtgctctagtagttttgaagtgatgacttgaagtgttgagattttctttaagtataataattcttaataaatatgaacttgcttttcttgcagcatgagcaccagttccacttacgctaattaaattatgcaaaattaaatagttgtatgtagagaactgataataaattctgttttattctaatcattacaactgtaacacattcaaaaaaa

SEQ ID NO: 4688 - DNA, 3237 bp, Homo sapiens
  source 1..3237: mol_type = unassigned DNA
ctgggtcctgtgtgtgccacaggggtggggtgtccagcgagcggtctcctcctcctgctagtgctgctgcggcgtcccgcggcctccccgagtcgggcgggaggggagagcgggtgtggatttgtcttgacggtaattgttgcgtttccacgtctcggaggcctgcgcgctgggttgctccttcttcgggagcgagctgttctcagcgatcccactcccagccggggctccccacacacactgggctgcgtgcgtgtggagtgggacccgcgcacacgcgtgtctctggacagctacggcgccgaaagaactaaaattccagatggcaaactcaatgaatggcagaaaccctggtggtcgaggaggaaatccccgaaaaggtcgaattttgggtattattgatgctattcaggatgcagttggaccccctaagcaagctgccgcagatcgcaggaccgtggagaagacttggaagctcatggacaaagtggtaagactgtgccaaaatcccaaacttcagttgaaaaatagcccaccatatatacttgatattttgcctgatacatatcagcatttacgacttatattgagtaaatatgatgacaaccagaaacttgcccaactcagtgagaatgagtactttaaaatctacattgatagccttatgaaaaagtcaaaacgggcaataagactctttaaagaaggcaaggagagaatgtatgaagaacagtcacaggacagacgaaatctcacaaaactgtcccttatcttcagtcacatgctggcagaaatcaaagcaatctttcccaatggtcaattccagggagataactttcgtatcacaaaagcagatgctgctgaattctggagaaagttttttggagacaaaactatcgtaccatggaaagtattcagacagtgccttcatgaggtccaccagattagctctggcctggaagcaatggctctaaaatcaacaattgatttaacttgcaatgattacatttcagtttttgaatttgatatttttaccaggctgtttcagccttggggctctattttgcggaattggaatttcttagctgtgacacatccaggttacatggcatttctcacatatgatgaagttaaagcacgactacagaaatatagcaccaaacccggaagctatattttccggttaagttgcactcgattgggacagtgggccattggctatgtgactggggatgggaatatcttacagaccatacctcataacaagcccttatttcaagccctgattgatggcagcagggaaggattttatctttatcctgatgggaggagttataatcctgatttaactggattatgtgaacctacacctcatgaccatataaaagttacacaggaacaatatgaattatattgtgaaatgggctccacttttcagctctgtaagatttgtgcagagaatgacaaagatgtcaagattgagccttgtgggcatttgatgtgcacctcttgccttacggcatggcaggagtcggatggtcagggctgccctttctgtcgttgtgaaataaaaggaactgagcccataatcgtggacccctttgatccaagagatgaaggctccaggtgttgcagcatcattgacccctttggcatgccgatgctagacttggacgacgatgatgatcgtgaggagtccttgatgatgaatcggttggcaaacgtccgaaagtgcactgacaggcagaactcaccagtcacatcaccaggatcctctccccttgcccagagaagaaagccacagcctgacccactccagatcccacatctaagcctgccacccgtgcctcctcgcctggatctaattcagaaaggcatagttagatctccctgtggcagcccaacgggttcaccaaagtcttctccttgcatggtgagaaaacaagataaaccactcccagcaccacctcctcccttaagagatcctcctccaccgccacctgaaagacctccaccaatcccaccagacaatagactgagtagacacatccatcatgtggaaagcgtgccttccagagacccgccaatgcctcttgaagcatggtgccctcgggatgtgtttgggactaatcagcttgtgggatgtcgactcctaggggagggctctccaaaacctggaatcacagcgagttcaaatgtcaatggaaggcacagtagagtgggctctgacccagtgcttatgcggaaacacagacgccatgatttgcctttagaaggagctaaggtcttttccaatggtcaccttggaagtgaagaatatgatgttcctccccggctttctcctcctcctccagttaccaccctcctccctagcataaagtgtactggtccgttagcaaattctctttcagagaaaacaagagacccagtagaggaagatgatgatgaatacaagattccttcatcccaccctgtttccctgaattcacaaccatctcattgtcataatgtaaaacctcctgttcggtcttgtgataatggtcactgtatgctgaatggaacacatggtccatcttcagagaagaaatcaaacatccctgacttaagcatatatttaaagggagatgtttttgattcagcctctgatcccgtgccattaccacctgccaggcctccaactcgggacaatccaaagcatggttcttcactcaacaggacgccctctgattatgatcttctcatccctccattaggttgaaacctttaaaaaagttttgaacaacccacccctccttcttttaatttcagaattttcagaattcagagttcagtataacacagactcactgggttgtgaatttgcctgaaatttgaatgggttctccaggtgccggtgactcccaagttcacgagaccattactccatgtagatgattaaggtagtagtgtagtagttgggcatcagtcaggttttaagcaagttgttttgtccatactaaatgtagtctaaaaacacatgagagctttgtgctctagtagttttgaagtgatgacttgaagtgttgagattttctttaagtataataattcttaataaatatgaacttgcttttcttgcagcatgagcaccagttccacttacgctaattaaattatgcaaaattaaatagttgtatgtagagaactgataataaattctgttttattctaatcattacaactgtaacacattcaaaaaaa

SEQ ID NO: 4689 - DNA, 561 bp, Homo sapiens
  source 1..561: mol_type = unassigned DNA
gctgtcctgggtagaagggtttggcagccctagggagatgaatttctccagcgttggacccgcccagagcggagaagcaacacccttccagccactactctgttgctatgaaacaaaagactaggaagaactaaaattccagatggcaaactcaatgaatggcagaaaccctggtggtcgaggaggaaatccccgaaaaggtcgaattttgggtattattgatgctattcaggatgcagttggaccccctaagcaagctgccgcagatcgcaggaccgtggagaagacttggaagctcatggacaaagtggtaagactgtgccaaaatcccaaacttcagttgaaaaatagcccaccatatatacttgatattttgcctgatacatatcagcatttacgacttatattgagtaaatatgatgacaaccagaaacttgcccaactcagtgagaatgagtactttaaaatctacattgatagccttatgaaaaagtcaaaacgggcaataagactctttaaagaaggcaaggagagaatgtatgaagaacagtcacaggacag

SEQ ID NO: 4690 - DNA, 1632 bp, Homo sapiens
  source 1..1632: mol_type = unassigned DNA
ttcagccccagatggctttggctcccggtcccgacgctcacgcccacctgccaccccttattgaactaaaattccagatggcaaactcaatgaatggcagaaaccctggtggtcgaggaggaaatccccgaaaaggtcgaattttgggtattattgatgctattcaggatgcagttggaccccctaagcaagctgccgcagatcgcaggaccgtggagaagacttggaagctcatggacaaagtggtaagactgtgccaaaatcccaaacttcagttgaaaaatagcccaccatatatacttgatattttgcctgatacatatcagcatttacgacttatattgagtaaatatgatgacaaccagaaacttgcccaactcagtgagaatgagtactttaaaatctacattgatagccttatgaaaaagtcaaaacgggcaataagactctttaaagaaggcaaggagagaatgtatgaagaacagtcacaggacagaactatcgtaccatggaaagtattcagacagtgccttcatgaggtccaccagattagctctggcctggaagcaatggctctaaaatcaacaattgatttaacttgcaatgattacatttcagtttttgaatttgatatttttaccaggctgtttcaggtttctgataattttacagaatatcttatttatttaacatgatacaaagacattctaaatagtaagagctttgcttcttcaccttgtcaaggaagagagtaaaagtaatcttcctacattaaacctaactgctcattctaggaaccttggggctctattttgcggaattggaatttcttagctgtgacacatccaggttacatggcatttctcacatatgatgaagttaaagcacgactacagaaatatagcaccaaacccggaagctatattttccggttaagttgcactcgattgggacagtgggccattggctatgtgactggggatgggaatatcttacagaccatacctcataacaagcccttatttcaagccctgattgatggcagcagggaaggattttatctttatcctgatgggaggagttataatcctgatttaactggattatgtgaacctacacctcatgaccatataaaagttacacaggaacaatatgaattatattgtgaaatgggctccacttttcagctctgtaagatttgtgcagagaatgacaaagatgtcaagattgagccttgtgggcatttgatgtgcacctcttgccttacggcatggcagccagaagttattgagtttctgtgggagatactgtgctttgaaaattcttggtatggatccaacctattctcagtgcatttatatacatataatttttccagttataattgctatgtttaaaaaaagatttgtggcaacctcatagctacatgaaatatagcaaggagtcggatggtcagggctgccctttctgtcgttgtgaaataaaaggaactgagcccataatcgtggacccctttgatccaagagatgaaggctccaggtgttgcagcatcattgacccctttggcatgccgatgctagacttggacgacgatgatgatcgtgaggagtccttgatgatgaatcggttggc

SEQ ID NO: 4691 - DNA, 1579 bp, Homo sapiens
  source 1..1579: mol_type = unassigned DNA
actctgggcgaggccgcccctatcccagccgcaccggtccttcccggcacacgcgaggctcccatggctctggcggtggccccgtgggggcgacagtgggaagaggcccgcgccctgggccgggcagtcaggatgctgcagcgcctagaagagcaatgcgtcgacccccggctgtccgtgagtcccccttcgctgcgggacctgctgccccgcacagcgcagctgcttcgagaggtggcccattctcggcgggcggccggcggaggcggccccgggggtcccggcggctctggggactttctactcatctacctggccaatctggaggccaagagcaggcaggtggccgcgctgctgcctccccggggccgaaggagtgccaacgacgagctcttccgggcgggctccagactcaggcgacagctggccaagctggccatcatcttcagccacatgcacgcagagctgcacgcactcttccccgggggaaagtactgtggacacatgtaccagctcaccaaggcccccgcccacaccttctggagggaaagttgcggagcccggtgtgtgctgccctgggctgagtttgagtccctcctgggcacctgccaccctgtggaaccaggctgcacagccctggccttgcgcaccaccattgacctcacctgcagcgggcacgtgtccatcttcgagttcgacgtcttcaccaggctctttcagccatggccaacactcctcaagaactggcagctcctggcagtcaaccacccaggctacatggccttcctcacctatgatgaggtccaagagcgtctgcaggcctgcagggacaagccaggcagttacatcttccggcccagctgtactcgcctggggcagtgggccatcggctatgtgagctcagatggcagcatcctgcagaccatccctgccaacaaacccctgtcccaggtgctcctggagggacagaaggacggcttctacctctacccagatggaaagacccacaacccagacctgactgagctcggccaggcagaaccccagcagcgcatccacgtgtcagaggagcagctgcagctctactgggccatggactccacatttgagctctgcaagatctgtgctgagagcaacaaggatgtgaagattgagccgtgcgggcacctgctctgcagctgctgcctggctgcctggcagcactcggacagccagacctgccccttctgccgctgcgagatcaagggctgggaggccgtgagtatctaccagttccacggtcaggctactgctgaggactcagggaacagcagtgaccaggaaggcagggagttggagctggggcaggtgcccctttcggctcctccattgcccccacggccagatctgccccccaggaagcccagaaatgcccagccgaaagtgagactcctaaaggggaactcccctccagctgcgctgggaccccaggaccctgccccggcctgaaggccagggcacccagatgtgctgctcaagggagccccaagggctggaagggggttgtgaaaccgaaataaactgccaagcctggtctgtc

SEQ ID NO: 4692 - DNA, 1441 bp, Homo sapiens
  source 1..1441: mol_type = unassigned DNA
actctgggcgaggccgcccctatcccagccgcaccggtccttcccggcacacgcgaggctcccatggctctggcggtggccccgtgggggcgacagtgggaagaggcccgcgccctgggccgggcagtcaggatgctgcagcgcctagaagagcaatgcgtcgacccccggctgtccgtgagtcccccttcgctgcgggacctgctgccccgcacagcgcagctgcttcgagaggtggcccattctcggcgggcggccggcggaggcggccccgggggtcccggcggctctggggactttctactcatctacctggccaatctggaggccaagagcaggcaggtggccgcgctgctgcctccccggggccgaaggagtgccaacgacgagctcttccgggcgggctccagactcaggcgacagctggccaagctggccatcatcttcagccacatgcacgcagagctgcacgcactcttccccgggggaaagtactgtggacacatgtaccagctcaccaaggcccccgcccacaccttctggagggaaagttgcggagcccggtgtgtgctgccctgggctgagtttgagtccctcctgggcacctgccaccctgtggaaccaggctgcacagccctggccttgcgcaccaccattgacctcacctgcagcgggcacgtgtccatcttcgagttcgacgtcttcaccaggctctttcagccatggccaacactcctcaagaactggcagctcctggcagtcaaccacccaggctacatggccttcctcacctatgatgaggtccaagagcgtctgcaggcctgcagggacaagccaggcagctacctctacccagatggaaagacccacaacccagacctgactgagctcggccaggcagaaccccagcagcgcatccacgtgtcagaggagcagctgcagctctactgggccatggactccacatttgagctctgcaagatctgtgctgagagcaacaaggatgtgaagattgagccgtgcgggcacctgctctgcagctgctgcctggctgcctggcagcactcggacagccagacctgccccttctgccgctgcgagatcaagggctgggaggccgtgagtatctaccagttccacggtcaggctactgctgaggactcagggaacagcagtgaccaggaaggcagggagttggagctggggcaggtgcccctttcggctcctccattgcccccacggccagatctgccccccaggaagcccagaaatgcccagccgaaagtgagactcctaaaggggaactcccctccagctgcgctgggaccccaggaccctgccccggcctgaaggccagggcacccagatgtgctgctcaagggagccccaagggctggaagggggttgtgaaaccgaaataaactgccaagcctggtctgtc

SEQ ID NO: 4693 - DNA, 2003 bp, Homo sapiens
  source 1..2003: mol_type = unassigned DNA
actgtgctctgcgagccgaatcatggatcacactgacaatgagttacaaggcactaatagttctggatccttgggtggtcttgatgttcgcagacgaattcctataaagctcatctccaaacaagcaaacaaagcgaaacctgcaccgcgaactcaaagaactataaacaggatgcctgcaaaggctccacctggtgatgaaggatttgattataatgaagaagaacggtatgactgtaaagggggtgagctgtttgcaaatcagcgaagatttcctggacaccttttttgggactttcagataaacatcttaggtgaaaaggatgatacaccagttcatttctgtgacaagtgtggattgcctattaaaatctatgggagaatgattccatgcaagcatgttttttgctatgactgtgctattttacatgaaaaaaagggagataagatgtgtccaggctgtagtgatcctgtgcagcgaattgagcagtgtacacgaggttctctcttcatgtgtagcattgttcaagggtgcaagagaacatatttgtctcagagagacttacaggctcatatcaaccatcgccatatgagagctggaaaacctgttacccgtgcttcacttgaaaatgttcatcctcctattgccccaccaccaactgaaatccctgagcgttttataatgccaccagacaagcaccatatgagccatattccgccaaagcagcacatcatgatgccaccacctcctttgcaacatgtgccacatgagcactataatcagccacatgaggatattcgtgctcctccagcagaattgtccatggctccacctccacctcgatcggtcagtcaggaaacctttcgtatttcaacaagaaaacacagcaatttaataaccgtccctattcaggatgactcaaattcaggtgctagagaaccaccacctcctgccccagcacctgctcaccatcatcctgaatatcagggtcaaccagtggtatcgcaccctcatcatattatgcctccacagcaacattatgcaccacccccacctcctccaccaccaataagccatccaatgccacatcctccccaggctgcaggtactcctcacttggtatatagccaagctccacctccaccaatgacctctgctccaccaccaataacccctccccctggacatattattgcccagatgccaccttatatgaatcatcctcctccaggacctcccccacctcaacatggtggtccacctgtaactgcaccccctcctcaccattataatcctaactcattaccccagttcactgaagatcaaggaactctgagccctccatttacacaaccagggggaatgagtcctggtatatggcctgcaccaagagggccaccaccacctccacgattgcagggtccgccttctcaaaccccacttcctggaccacatcatccagatcagacaagatatagaccgtattaccaatgataatagtattttgaatggaagatatgagggggaaaaaaacttatgtgtagtcaatcttttaagctttgactgttttgggaaggaagagtacctcttatcgaggtagtataaaacacatagggtcttgtttcttaaaatggttttaaatcttgaccttaagattgatttcaagtaccatactgtagtacagataagtggctcagttgagcacagctatattttaacatctctttgttcccctagtttagtaaattgacccagaggtgaccatttgtaaaaaatttgaaaaaatttttcattgttttacttcaaaagtattgttttgttaaacccaacgtttagtttttcttgtgatacattttgttaacctgtgtaaaaggattaaatttcaatatggttgtaaaaatgctatttttatgtgaatttaagtgcagccacatactgttttttaaaccatatgttttaccactaatttcccaaagttataataaaatcctgaaagtaaaaa

SEQ ID NO: 4694 - DNA, 2349 bp, Homo sapiens
  source 1..2349: mol_type = unassigned DNA
gttactccgcccgccggggtggggccagcgcaacggccgagcctgcgcagccagccggctccgggggccccgcgcactacaagtcccagaaggcagctctccgcggggcgggcagtcgccttatctgcttctggctcatttttaccactgctctccccttccccggtccccctggtgtcctttccacagttaaaggctactttctcttgaagcacatgaggagaagccttagcaacctcaataccgaagttcttcgcgcgctcgctctttctgcctccgcccgaactatgcctgagtccctcacaggagttggatagtagaggcgagagaaggaagtctttgcaggccaaaattgggacaacctgcttggacttccgcctcccggcctccggaaggcagtgcgcacgcgctcgctgcgactccggcgcggttgacttccgctcccactgtgctctgcgagccgaatcatggatcacactgacaatgagttacaaggcactaatagttctggatccttgggtggtcttgatgttcgcagacgaattcctataaagctcatctccaaacaagcaaacaaagcgaaacctgcaccgcgaactcaaagaactataaacaggatgcctgcaaaggctccacctggtgatgaagaaggatttgattataatgaagaagaacggtatgactgtaaagggggtgagctgtttgcaaatcagcgaagatttcctggacaccttttttgggactttcagataaacatcttaggtgaaaaggatgatacaccagttcatttctgtgacaagtgtggattgcctattaaaatctatgggagaatgattccatgcaagcatgttttttgctatgactgtgctattttacatgaaaaaaagggagataagatgtgtccaggctgtagtgatcctgtgcagcgaattgagcagtgtacacgaggttctctcttcatgtgtagcattgttcaagggtgcaagagaacatatttgtctcagagagacttacaggctcatatcaaccatcgccatatgagagctggaaaacctgttacccgtgcttcacttgaaaatgttcatcctcctattgccccaccaccaactgaaatccctgagcgttttataatgccaccagacaagcaccatatgagccatattccgccaaagcagcacatcatgatgccaccacctcctttgcaacatgtgccacatgagcactataatcagccacatgaggatattcgtgctcctccagcagaattgtccatggctccacctccacctcgatcggtcagtcaggaaacctttcgtatttcaacaagaaaacacagcaatttaataaccgtccctattcaggatgactcaaattcaggtgctagagaaccaccacctcctgccccagcacctgctcaccatcatcctgaatatcagggtcaaccagtggtatcgcaccctcatcatattatgcctccacagcaacattatgcaccacccccacctcctccaccaccaataagccatccaatgccacatcctccccaggctgcaggtactcctcacttggtatatagccaagctccacctccaccaatgacctctgctccaccaccaataacccctccccctggacatattattgcccagatgccaccttatatgaatcatcctcctccaggacctcccccacctcaacatggtggtccacctgtaactgcaccccctcctcaccattataatcctaactcattaccccagttcactgaagatcaaggaactctgagccctccatttacacaaccagggggaatgagtcctggtatatggcctgcaccaagagggccaccaccacctccacgattgcagggtccgccttctcaaaccccacttcctggaccacatcatccagatcagacaagatatagaccgtattaccaatgataatagtattttgaatggaagatatgagggggaaaaaaacttatgtgtagtcaatcttttaagctttgactgttttgggaaggaagagtacctcttatcgaggtagtataaaacacatagggtcttgtttcttaaaatggttttaaatcttgaccttaagattgatttcaagtaccatactgtagtacagataagtggctcagttgagcacagctatattttaacatctctttgttcccctagtttagtaaattgacccagaggtgaccatttgtaaaaaatttgaaaaaatttttcattgttttacttcaaaagtattgttttgttaaacccaacgtttagtttttcttgtgatacattttgttaacctgtgtaaaaggattaaatttcaatatggttgtaaaaa

SEQ ID NO: 4695 - DNA, 1983 bp, Homo sapiens
  source 1..1983: mol_type = unassigned DNA
accactgctctccccttccccggtccccctggtgtcctttccacagttaaaggctactttctcttgaagcacatgaggagaagccttagcaacctcaataccgaagttcttcgcgcgctcgctctttctgcctccgcccgaactatgcctgagtccctcacaggagttggatagtagaggcgagagaaggaagtctttgcaggccaaaattgggacaacctgcttggacttccgcctcccggcctccggaaggcagtgcgcacgcgctcgctgcgactccggcgcggttgacttccgctcccactgtgctctgcgagccgaatcatggatcacactgacaatgagttacaaggcactaatagttctggatccttgggtggtcttgatgttcgcagacgaattcctataaagctcatctccaaacaagcaaacaaagcgaaacctgcaccgcgaactcaaagaactataaagaaggatttgattataatgaagaagaacggtatgactgtaaagggggtgagctgtttgcaaatcagcgaagatttcctggacaccttttttgggactttcagataaacatcttaggtgaaaaggatgatacaccagttcatttctgtgacaagtgtggattgcctattaaaatctatgggagaatgattccatgcaagcatgttttttgctatgactgtgctattttacatgaaaaaaagggagataagatgtgtccaggctgtagtgatcctgtgcagcgaattgagcagtgtacacgaggttctctcttcatgtgtagcattgttcaagggtgcaagagaacatatttgtctcagagagacttacaggctcatatcaaccatcgccatatgagagctggaaaacctgttacccgtgcttcacttgaaaatgttcatcctcctattgccccaccaccaactgaaatccctgagcgttttataatgccaccagacaagcaccatatgagccatattccgccaaagcagcacatcatgatgccaccacctcctttgcaacatgtgccacatgagcactataatcagccacatgaggatattcgtgctcctccagcagaattgtccatggctccacctccacctcgatcggtcagtcaggaaacctttcgtatttcaacaagaaaacacagcaatttaataaccgtccctattcaggatgactcaaattcaggtgctagagaaccaccacctcctgccccagcacctgctcaccatcatcctgaatatcagggtcaaccagtggtatcgcaccctcatcatattatgcctccacagcaacattatgcaccacccccacctcctccaccaccaataagccatccaatgccacatcctccccaggctgcaggtactcctcacttggtatatagccaagctccacctccaccaatgacctctgctccaccaccaataacccctccccctggacatattattgcccagatgccaccttatatgaatcatcctcctccaggacctcccccacctcaacatggtggtccacctgtaactgcaccccctcctcaccattataatcctaactcattaccccagttcactgaagatcaaggaactctgagccctccatttacacaaccagggggaatgagtcctggtatatggcctgcaccaagagggccaccaccacctccacgattgcagggtccgccttctcaaaccccacttcctggaccacatcatccagatcagacaagatatagaccgtattaccaatgataatagtattttgaatggaagatatgagggggaaaaaaacttatgtgtagtcaatcttttaagctttgactgttttgggaaggaagagtataaatcaacattcttaggatattatttatatcctttgaataaatccctgtgaagtttttcctccccactaaaatggtgcataataaaacatgaaatatgtagtatgcagatatcatttattagatag

SEQ ID NO: 4696 - DNA, 1066 bp, Homo sapiens
  source 1..1066: mol_type = unassigned DNA
gacttagtagccatgaaggtcctcatcctcgcctgcctggtggctcttgctcttgcaagggagaccatagaaagcctttcaagcagtgaggaatctattacagaatacaagcagaaagttgagaaggttaaacatgaggaccagcagcaaggagaggatgaacaccaggataaaatctacccctctttccagccacagcctctgatctatccattcgttgaacctatcccctatggttttcttccacaaaacattctgcctcttgctcagcctgctgtggtgctgcctgtccctcagcctgaaataatggaagtccctaaagctaaagacactgtctacactaagggcagagtgatgcctgtccttaaatctccaacgatacccttttttgaccctcaaatcccaaaactcactgatcttgaaaatctgcatcttcctctgcctctgctccagcccttgatgcagcaggtccctcagcctattcctcagactcttgcacttccccctcagcccctgtggtctgttcctcagcccaaagtcctgcctatcccccagcaagtggtgccctaccctcagagagctgtgcctgttcaagcccttctgctcaaccaagaacttctacttaaccccacccaccagatctaccctgtgactcagccacttgccccagttcataaccccattagtgtctaagaagatttcaaagttaattttccctccttatttttgaattgactgagactggaaatatgatgccttttccgtctttgtatcacgttaccccaaattaagtatgtttgaatgagtttatatggaaaaaatgaactttgtccctttatttattttatatattatgtcattcatttaatttgaaatttgactcatgaactatttacattttccaaatcttaattcaactagtaccacagaagttcaatactcatttggaaatgctacaaacatatcaaacatatgtatacaaattgtttctggaattgtgcttatttttatttctttaagaatctatttcctttccagtcatttcaataaattattcttaagcata

SEQ ID NO: 4697 - DNA, 836 bp, Homo sapiens
  source 1..836: mol_type = unassigned DNA
atttttcttgggtcttctctacagctgacaggccaactcaacctactgccaaccaagacctgactggcacgaggaaaggtgcaataatgaagagttttcttctagttgtcaatgccctggcattaaccctgccttttttggctgtggaggttcaaaaccagaaacaaccagcatgccatgagaatgatgaaagaccattctatcagaaaacagctccatatgtcccaatgtattatgtgccaaatagctatccttattatggaaccaatttgtaccaacgtagaccagctatagcaattaataatccatatgtgcctcgcacatattatgcaaacccagctgtagttaggccacatgcccaaattcctcagcggcaatacctgccaaatagccacccacccactgtggtacgtcgcccaaacctgcatccatcatttattgccatccccccaaagaaaattcaggataaaataatcatccctaccatcaataccattgctactgttgaacctacaccagctcctgccactgaaccaacggtggacagtgtagtcactccagaagctttttcagagtccatcatcacgagcacccctgagacaaccacagttgcagttactccacctacggcataaaaacaccaaggaaatatcaaagaacacaacgcaggacttgctgaaaccaaattactacttcacactctccttcagccatttgtctgccttcagtcaacagaaaatgtgattttcacagattcagctcttctctccttacattttacattcatgccacattcaatattttgattcttgcacaataaagccaactgattgcaa

SEQ ID NO: 4698 - DNA, 6067 bp, Homo sapiens
  source 1..6067: mol_type = unassigned DNA
gggggcattttgtgttggctggagctggagtaacaagatggcgtcgtccgcggagtgacaggggtccctctgggccggagccggcggcagtggtggcagcggtatcgccgccctagctcaccgcgccccttttccagcccgcgacgtcgccgcgcaagcgaggcagcggcggccgccgagaaacaagtggcccagcctggtaaccgccgagaagcccttcacaaactgcggcctggcaaaaagaaacctgactgagcggcggtgatcaggttcccctctgctgattctgggccccgaaccccggtaaaggcctccgtgttccgtttcctgccgccctcctccgtagccttgcctagtgtaggagccccgaggcctccgtcctcttcccagaggtgtcggggcttggccccagcctccatcttcgtctctcaggatggcgagtagcagcggctccaaggctgaattcattgtcggagggaaatataaactggtacggaagatcgggtctggctccttcggggacatctatttggcgatcaacatcaccaacggcgaggaagtggcagtgaagctagaatctcagaaggccaggcatccccagttgctgtacgagagcaagctctataagattcttcaaggtggggttggcatcccccacatacggtggtatggtcaggaaaaagactacaatgtactagtcatggatcttctgggacctagcctcgaagacctcttcaatttctgttcaagaaggttcacaatgaaaactgtacttatgttagctgaccagatgatcagtagaattgaatatgtgcatacaaagaattttatacacagagacattaaaccagataacttcctaatgggtattgggcgtcactgtaataagttattccttattgattttggtttggccaaaaagtacagagacaacaggacaaggcaacacataccatacagagaagataaaaacctcactggcactgcccgatatgctagcatcaatgcacatcttggtattgagcagagtcgccgagatgacatggaatcattaggatatgttttgatgtattttaatagaaccagcctgccatggcaagggctaaaggctgcaacaaagaaacaaaaatatgaaaagattagtgaaaagaagatgtccacgcctgttgaagttttatgtaaggggtttcctgcagaatttgcgatgtacttaaactattgtcgtgggctacgctttgaggaagccccagattacatgtatctgaggcagctattccgcattcttttcaggaccctgaaccatcaatatgactacacatttgattggacaatgttaaagcagaaagcagcacagcaggcagcctcttccagtgggcagggtcagcaggcccaaacccccacaggtttctaagcatgaattgaggaacagaagaagcagagcagatgatcggagcagcatttgtttctccccaaatctagaaattttagttcatatgtacactagccagtggttgtggacaaccatttacttggtgtaaagaacttaatttcagtataaactgactctgggcagcattggtgatgctgtatcctgagttgtagcctctgtaattgtgaatattaactgagatagtgaaacatggtgtccggttttctattgcattttttcaagtggaaaagttaactaaatggttgacacacaaaaattggtggagaaattgtgcatatgccaattttttgttaaaaccttttgttttgaactatactgctttgagatctcatttcagaagaacggcatgaacagtcttcagccacagttgtgatggttgttaaatgctcacaattgtgcattcttagggtttttccatccctggggtttgcaagttgttcacttaaaacattcttaaaatggttggcttcttgtctgcaagccagctgatatggtagcaaccaaagattccagtgtttgagcatatgaaagactctgcctgcttaattgtgctagaaataacagcatctaaagtgaagacttaagaaaaacttagtgactactagattatccttaggactctgcattaactctataatgttcttggtattaaaaaaaaagcatatttgtcacagaaatttagttaacatcttacaactgaacatgtatgtatgttgcttagataaatgtaatcactgtaaacatctatatgatctgggattttgtttttattttgaaatgggagcttttttgtttacaagttcattaaaaactaaaaactgtttctgtaaggaaatgagattttttttaaacaacaaaaaatgccttgctgactcactattaaataaaaatctccccaattttttgatagactacttcaagccatttgttacatggtattcctttgcaagtcaatttaggtttcgtgttataacttttcctctttttttaagaaaaatgaaaaaagtaattcttttgtctgaaggggaaaggcattctttcatttttttctttttttttttttttttttatgacttgcaggcacaatatctagtactgcaactgccagaacttggtattgtagctgctgcccgctgactagcagctggactgattttgaataaaaatgaaagcattaaagggtttccctacaaaacatttttctttaaaatacttttgaaatggctataagcagttgactttcacccttggagagcatcacactgtgtgaggttcagtgattgttgaccctccccagcccctcctgcttctttaagttatctgtgtgcgtgcgcttcctctcaatcttctttgcacgctcatttctttttctctgacccatgagaaaggaaaacttactgatgataatttttaaatagtgtaatttattcatttatagcatgtcaggataaattaaaagaacatttgtctggaaatgctgccgggagcctattgtgtaaatgtaggtattttgtaaaataaccttgaaattgtaaattgacacgtgtttggtcagattgtgtcaagtttaatttgttttgttttcttttttcttttttttatttgaaaactactttagcaataattaattccatgattatcacattctgccattaagggatattagtaccgtaatactgaagaaattttattaagtctgaacttctggggtaggcagcttctttgtttcttttctatccacccttgtcggttgaggtatttgtttcttgactaataaaccctttgatacttttagccagaaatcagtctcataaagctatttttgagtatagtttgtgtaaaataaaaatgtttagctttggtaataacttccaagctgaactccctctagcaagatatttttcagtgcttttatttactatgcacttagactatgcactttttctgaaatatttttgtaacacttttttgtatttttgccatttgaaaaggttgtggtgtagttggtctgtaattaagttgcagatttaaaactgctgttagctttgtaaatcaaaatataggtgttttttgtcctggtatatcgtcattccatctgcagctggagctggaatcccattgatcttctagctaccattcattttcttcactgttcacaaaagaagagtgtgaaattcagtgaatgctgttactaatcctgttacgagatgaatctcatttcaccaaaattaaattatgtttttccgctaaaatgatgatacaagttgaagacacatcactctgaaattggaagacctcaccacttaaggctccacagtggcttactcagctgaactctaggttactactctttactttgttcacccattggggggtgcagtttttttaaaatgttgggagatggccattctaactactgttgaatgtctctgttttgggaaggtataacaagaaataaaaaagaatatatatgaagggagagactggttatctcctcccatatggttgtgcttatcctcttatggcttacaaatgaatatttggaggtttgctttcacaatgatttcccatcaacaaatatttttagtaggatttttcctgtttctgttagtccttgcagtactcataaatgttttaagctgagcatactgtaatagtcataagtttaatttcattataataaaaataatcaaacaaaaggactttagaacccaagacaatgagctagttttccctaaagtttgctgaactattaaggaatatgttcttatagcttttgactagaatgagtcatgggaattctaagaagggatggcctagacatttttagctcagttaaattcagcatttaatgcaggtgagttcctgggtcgttttccaactagtctggaacagtctggttctgactcaaactggtataaagcattattttaggttttctctttgccagtttttaagcagttataaccatgtaaatcaagatgtgaggacatctatatgaagtatagtaaagaagtggtgtcagcagatcaatatgtgtgtcctgggtgtgctgctctcttaagtgagactttgtgagactatactttaaatgcattattaccattgcttacattttgggggattttcttcctcctcaaaacttccatttctattgtaatattcttaatgacaatctttttttttttttagcagtgtatgtttgaaacagccaaagatggcgatgaaccaagtgtaaattgatctaagcagcccatgcagtttgtgttgaatcaacaaacagtgtattgttgaagtgaaattattttctgaaatgacttgttagaccagttttgaggacatactcaaaagtagagtaataatggctcctgggatggagaaatatgagatgaacctggaacattctattatggtgccacaaaggaaatctaaaaaaaaaaaaaaaaaaaaaagtggttggctaggagcagtggcacacgcctgtgattccagcactttgggaggccgaagtgggcaggagttcaagaccagcctggccaacatagtgaaaccctgtctctactaaaaatacaaaaattagccgggtgtggtggcgggcgcctgtaatcccagcttttcaagaggctgaggcagaagaatcgcttgaacccgggagatggaggttgcagtgagctgagatcgtgccactgcactccagcctgggcgttgcagtgagactccgtctcaacaacaacaaaaaggtggatacatgtcaaaagggcacaggagccacttgaaggattatacttgctaaatctgtgtcaattatcaaaataaactggtagcaacgttacaactcactgaataagataccatgattccatgttgacttaaaaatggagagaagagaaagctctaacttgaatgtcagctaatttaaggtgaaaggattttatgtgttagaaaaatcaccattttgcaaactagttttcagaatccttaatatatgtcatctcttttattcctcataacagtaataagaaacagttaactgtttcagaaaagagtggggctgcccaaggcaaggcatgttggtaattggtaagctttatagagccaagacctcaacctgattttcttgctttcatgcagttaagccatggtgctcctcttgttatatcacccttttaaacccagagattgatagtattagccatcatttgctgagtgtcatgcactattctaagtgctttacatgtatttgcctaatcagcgccctgtgaagtacatcctgtctccattttgcatataaggataccaaagcacagagttggagggaagatagttatattcccttactttatttatttatttttttgagacagggtctcgcactgtcgcccaggcttgagtgctataagaccttaagtttcccctttcaaagtagtttatagtgtctaaatatcttacataaaagtatatatcaaatagggtggcagtctggaaagatttaaaatccagaatgactggaaggttgggcaactaagatttcttaaattgcagctgttttcaacatagatgtgttgtagagtcttttcggtttcaaaattaaattgactataaatggagtgtgcttaa

SEQ ID NO: 4699 - DNA, 1331 bp, Homo sapiens
  source 1..1331: mol_type = unassigned DNA
attttgtgttggctggagctggagtaacaagatggcgtcgtccgcggtaaaggcctccgtgttccgtttcctgccgccctcctccgtagccttgcctagtgtaggagccccgaggcctccgtcctcttcccagaggtgtcggggcttggccccagcctccatcttcgtctctcaggatggcgagtagcagcggctccaaggctgaattcattgtcggagggaaatataaactggtacggaagatcgggtctggctccttcggggacatctatttggcgatcaacatcaccaacggcgaggaagtggcagtgaagctagaatctcagaaggccaggcatccccagttgctgtacgagagcaagctctataagattcttcaaggtggggttggcatcccccacatacggtggtatggtcaggaaaaagactacaatgtactagtcatggatcttctgggacctagcctcgaagacctcttcaatttctgttcaagaaggttcacaatgaaaactgtacttatgttagctgaccagatgatcagtagaattgaatatgtgcatacaaagaattttatacacagagacattaaaccagataacttcctaatgggtattgggcgtcactgtaataagttattccttattgattttggtttggccaaaaagtacagagacaacaggacaaggcaacacataccatacagagaagataaaaacctcactggcactgcccgatatgctagcatcaatgcacatcttggtattgagcagagtcgccgagatgacatggaatcattaggatatgttttgatgtattttaatagaaccagcctgccatggcaagggctaaaggctgcaacaaagaaacaaaaatatgaaaagattagtgaaaagaagatgtccacgcctgttgaagttttatgtaaggggtttcctgcagaatttgcgatgtacttaaactattgtcgtgggctacgctttgaggaagccccagattacatgtatctgaggcagctattccgcattcttttcaggaccctgaaccatcaatatgactacacatttgattggacaatgttaaagcagaaagcagcacagcaggcagcctcttccagtgggcagggtcagcaggcccaaacccccacaggtttctaagcatgaattgaggaacagaagaagcagagcagatgatcggagcagcatttgtttctccccaaatctagaaattttagttcatatgtacactagccagtggttgtggacaaccatttacttggtgtaaagaacttaatttcagtataaactgactctgggcagcattggtgatgctgt

SEQ ID NO: 4700 - DNA, 3065 bp, Homo sapiens
  source 1..3065: mol_type = unassigned DNA
cctttcccagagtgctctgcgccgtgaagaagcggctcccggggactgggggcattttgtgttggctggagctggagtaacaagatggcgtcgtccgcggagtgacaggggtccctctgggccggagccggcggcagtggtggcagcggtatcgccgccctagctcaccgcgccccttttccagcccgcgacgtcgccgcgcaagcgaggcagcggcggccgccgagaaacaagtggcccagcctggtaaccgccgagaagcccttcacaaactgcggcctggcaaaaagaaacctgactgagcggcggtgatcaggttcccctctgctgattctgggccccgaaccccggtaaaggcctccgtgttccgtttcctgccgccctcctccgtagccttgcctagtgtaggagccccgaggcctccgtcctcttcccagaggtgtcggggcttggccccagcctccatcttcgtctctcaggatggcgagtagcagcggctccaaggctgaattcattgtcggagggaaatataaactggtacggaagatcgggtctggctccttcggggacatctatttggcgatcaacatcaccaacggcgaggaagtggcagtgaagctagaatctcagaaggccaggcatccccagttgctgtacgagagcaagctctataagattcttcaaggtggggttggcatcccccacatacggtggtatggtcaggaaaaagactacaatgtactagtcatggatcttctgggacctagcctcgaagacctcttcaatttctgttcaagaaggttcacaatgaaaactgtacttatgttagctgaccagatgatcagtagaattgaatatgtgcatacaaagaattttatacacagagacattaaaccagataacttcctaatgggtattgggcgtcactgtaataagttattccttattgattttggtttggccaaaaagtacagagacaacaggacaaggcaacacataccatacagagaagataaaaacctcactggcactgcccgatatgctagcatcaatgcacatcttggtattgagcagagtcgccgagatgacatggaatcattaggatatgttttgatgtattttaatagaaccagcctgccatggcaagggctaaaggctgcaacaaagaaacaaaaatatgaaaagattagtgaaaagaagatgtccacgcctgttgaagttttatgtaaggggtttcctgcagaatttgcgatgtacttaaactattgtcgtgggctacgctttgaggaagccccagattacatgtatctgaggcagctattccgcattcttttcaggaccctgaaccatcaatatgactacacatttgattggacaatgttaaagcagaaagcagcacagcaggcagcctcttccagtgggcagggtcagcaggcccaaacccccacaggcaagcaaactgacaaaaccaagagtaacatgaaaggtttctaagcatgaattgaggaacagaagaagcagagcagatgatcggagcagcatttgtttctccccaaatctagaaattttagttcatatgtacactagccagtggttgtggacaaccatttacttggtgtaaagaacttaatttcagtataaactgactctgggcagcattggtgatgctgtatcctgagttgtagcctctgtaattgtgaatattaactgagatagtgaaacatggtgtccggttttctattgcattttttcaagtggaaaagttaactaaatggttgacacacaaaaattggtggagaaattgtgcatatgccaattttttgttaaaaccttttgttttgaactatactgctttgagatctcatttcagaagaacggcatgaacagtcttcagccacagttgtgatggttgttaaatgctcacaattgtgcattcttagggtttttccatccctggggtttgcaagttgttcacttaaaacattcttaaaatggttggcttcttgtctgcaagccagctgatatggtagcaaccaaagattccagtgtttgagcatatgaaagactctgcctgcttaattgtgctagaaataacagcatctaaagtgaagacttaagaaaaacttagtgactactagattatccttaggactctgcattaactctataatgttcttggtattaaaaaaaaagcatatttgtcacagaaatttagttaacatcttacaactgaacatgtatgtatgttgcttagataaatgtaatcactgtaaacatctatatgatctgggattttgtttttattttgaaatgggagcttttttgtttacaagttcattaaaaactaaaaactgtttctgtaaggaaatgagattttttttaaacaacaaaaaatgccttgctgactcactattaaataaaaatctccccaattttttgatagactacttcaagccatttgttacatggtattcctttgcaagtcaatttaggtttcgtgttataacttttcctctttttttaagaaaaatgaaaaaagtaattcttttgtctgaaggggaaaggcattctttcatttttttctttttttttttttttttttatgacttgcaggcacaatatctagtactgcaactgccagaacttggtattgtagctgctgcccgctgactagcagctggactgattttgaataaaaatgaaagcattaaagggtttccctacaaaacatttttctttaaaatacttttgaaatggctataagcagttgactttcacccttggagagcatcacactgtgtgaggttcagtgattgttgaccctccccagcccctcctgcttctttaagttatctgtgtgcgtgcgcttcctctcaatcttctttgcacgctcatttctttttctctgacccatgagaaaggaaaacttactgatgataatttttaaatagtgtaatttattcatttatagcatgtcaggataaattaaaagaacatttgtctggaaatgctgccgggagcctattgtgtaaatgtaggtattttgtaaaataaccttgaaattg

SEQ ID NO: 4701 - DNA, 1098 bp, Homo sapiens
  source 1..1098: mol_type = unassigned DNA
atggcgagtagcagcggctccaaggctgaattcattgtcggagggaaatataaactggtacggaagatcgggtctggctccttcggggacatctatttggcgatcaacatcaccaacggcgaggaagtggcagtgaagctagaatctcagaaggccaggcatccccagttgctgtacgagagcaagctctataagattcttcaaggtggggttggcatcccccacatacggtggtatggtcaggaaaaagactacaatgtactagtcatggatcttctgggacctagcctcgaagacctcttcaatttctgttcaagaaggttcacaatgaaaactgtacttatgttagctgaccagatgatcagtagaattgaatatgtgcatacaaagaattttatacacagagacattaaaccagataacttcctaatgggtattgggcgtcactgtaataagtgtttagaatctccagtggggaagaggaaaagaagcatgactgttagtacttctcaggacccatctttctcaggattaaaccagttattccttattgattttggtttggccaaaaagtacagagacaacaggacaaggcaacacataccatacagagaagataaaaacctcactggcactgcccgatatgctagcatcaatgcacatcttggtattgagcagagtcgccgagatgacatggaatcattaggatatgttttgatgtattttaatagaaccagcctgccatggcaagggctaaaggctgcaacaaagaaacaaaaatatgaaaagattagtgaaaagaagatgtccacgcctgttgaagttttatgtaaggggtttcctgcagaatttgcgatgtacttaaactattgtcgtgggctacgctttgaggaagccccagattacatgtatctgaggcagctattccgcattcttttcaggaccctgaaccatcaatatgactacacatttgattggacaatgttaaagcagaaagcagcacagcaggcagcctcttccagtgggcagggtcagcaggcccaaacccccacaggcaagcaaactgacaaaaccaagagtaacatgaaaggtttctaa

SEQ ID NO: 4702 - DNA, 1520 bp, Homo sapiens
  source 1..1520: mol_type = unassigned DNA
gcgcgatggcggcggctcctttaggcagctgaaaggggatttaggcccggaagatccgagtccatccgcggcggggagagggcaagcgggaccggtaggggccggagcagcggcggcggcgctcggactgtcccatccgccccgtattgaggcgctgggagcggcggggcgacaggaaagcgatggtgaaagcggggccgtgaggggggcggagccgggagccggacccgcagtagcggcagcagcggcgccgcctcccagagttcagacccaggaagcggccgggagggcaggagcgaatcgggccgccgccgccatggagctgagagtcgggaacaggtaccggctgggccggaagatcggcagcggctccttcggagacatctatctcggtacggacattgctgcaggagaagaggttgccatcaagcttgaatgtgtcaaaaccaaacaccctcagctccacattgagagcaaaatctacaagatgatgcagggaggagatcagtcgcatcgaatacattcattcaaagaacttcatccaccgggatgtgaagccagacaacttcctcatgggcctggggaagaagggcaacctggtgtacatcatcgacttcgggctggccaagaagtaccgggatgcacgcacccaccagcacatcccctatcgtgagaacaagaacctcacggggacggcgcggtacgcctccatcaacacgcaccttggaattgaacaatcccgaagagatgacttggagtctctgggctacgtgctaatgtacttcaacctgggctctctcccctggcaggggctgaaggctgccaccaagagacagaaatacgaaaggattagcgagaagaaaatgtccacccccatcgaagtgttgtgtaaaggctacccttccgaatttgccacatacctgaatttctgccgttccttgcgttttgacgacaagcctgactactcgtacctgcggcagcttttccggaatctgttccatcgccagggcttctcctatgactacgtgttcgactggaacatgctcaaatttggtgccagccgggccgccgatgacgccgagcgggagcgcagggaccgagaggagcggctgagacactcgcggaacccggctacccgcggcctcccttccacagcctccggccgcctgcgggggacgcaggaagtggctccccccacacccctcacccctacctcacacacggctaacacctccccccggcccgtctccggcatggagagagagcggaaagtgagtatgcggctgcaccgcggggcccccgtcaacatctcctcgtccgacctcacaggccgacaagatacctctcgcatgtccacctcacaggtaggtgcagagctcccgggcgggcgctgggcctcgggctaccccgtccgagtcaagagcgggctgtggtttctccagggcttcttctttcctttcttccccccatttttgagagtttttaatctcgccagggtgtggcgtcttggttgcagatga

SEQ ID NO: 4703 - DNA, 1975 bp, Homo sapiens
  source 1..1975: mol_type = unassigned DNA
gcgcgatggcggcggctcctttaggcagctgaaaggggatttaggcccggaagatccgagtccatccgcggcggggagagggcaagcgggaccggtaggggccggagcagcggcggcggcgctcggactgtcccatccgccccgtattgaggcgctgggagcggcggggcgacaggaaagcgatggtgaaagcggggccgtgaggggggcggagccgggagccggacccgcagtagcggcagcagcggcgccgcctcccagagttcagacccaggaagcggccgggagggcaggagcgaatcgggccgccgccgccatggagctgagagtcgggaacaggtaccggctgggccggaagatcggcagcggctccttcggagacatctatctcggtacggacattgctgcaggagaagaggttgccatcaagcttgaatgtgtcaaaaccaaacaccctcagctccacattgagagcaaaatctacaagatgatgcagggaggagtgggcatccccaccatcagatggtgcggggcagagggggactacaacgtcatggtgatggagctgctggggccaagcctggaggacctcttcaacttctgctccaggaaattcagcctcaaaaccgtcctgctgcttgctgaccaaatgatcagtcgcatcgaatacattcattcaaagaacttcatccaccgggatgtgaagccagacaacttcctcatgggcctggggaagaagggcaacctggtgtacatcatcgacttcgggctggccaagaagtaccgggatgcacgcacccaccagcacatcccctatcgtgagaacaagaacctcacggggacggcgcggtacgcctccatcaacacgcaccttggaattgaacaatcccgaagagatgacttggagtctctgggctacgtgctaatgtacttcaacctgggctctctcccctggcaggggctgaaggctgccaccaagagacagaaatacgaaaggattagcgagaagaaaatgtccacccccatcgaagtgttgtgtaaaggctacccttccgaatttgccacatacctgaatttctgccgttccttgcgttttgacgacaagcctgactactcgtacctgcggcagcttttccggaatctgttccatcgccagggcttctcctatgactacgtgttcgactggaacatgctcaaatttggtgccagccgggccgccgatgacgccgagcgggagcgcagggaccgagaggagcggctgagacactcgcggaacccggctacccgcggcctcccttccacagcctccggccgcctgcgggggacgcaggaagtggctccccccacacccctcacccctacctcacacacggctaacacctccccccggcccgtctccggcatggagagagagcggaaagtgagtatgcggctgcaccgcggggcccccgtcaacatctcctcgtccgacctcacaggccgacaagatacctctcgcatgtccacctcacagattcctggtcgggtggcttccagtggtcttcagtctgtcgtgcaccgatgagaactctccttattgctgtgaagggcagacaatgcatggctgatctactctgttaccaatggctttactagtgacacgtcccccggtctaggatcgaaatgttaacaccgggagctctccaggccactcacccagcgacgctcgtgggggaaacatactaaacggacagactccaagagctgccaccgctggggctgcactgcggccccccacgtgaactcggttgtaacggggctgggaagaaaagcagagagagaattgcagagaatcagactccttttccagggcctcagctccctccagtggtggccgccctgtactccctgacgattccactgtaactaccaatcttctacttggttaagacagttttgtatcattttgctaaaaattattggcttaaatctgtgt

SEQ ID NO: 4704 - DNA, 2039 bp, Homo sapiens
  source 1..2039: mol_type = unassigned DNA
gcgcgatggcggcggctcctttaggcagctgaaaggggatttaggcccggaagatccgagtccatccgcggcggggagagggcaagcgggaccggtaggggccggagcagcggcggcggcgctcggactgtcccatccgccccgtattgaggcgctgggagcggcggggcgacaggaaagcgatggtgaaagcggggccgtgaggggggcggagccgggagccggacccgcagtagcggcagcagcggcgccgcctcccagagttcagacccaggaagcggccgggagggcaggagcgaatcgggccgccgccgccatggagctgagagtcgggaacaggtaccggctgggccggaagatcggcagcggctccttcggagacatctatctcggtacggacattgctgcaggagaagaggttgccatcaagcttgaatgtgtcaaaaccaaacaccctcagctccacattgagagcaaaatctacaagatgatgcagggaggagtgggcatccccaccatcagatggtgcggggcagagggggactacaacgtcatggtgatggagctgctggggccaagcctggaggacctcttcaacttctgctccaggaaattcagcctcaaaaccgtcctgctgcttgctgaccaaatgatcagtcgcatcgaatacattcattcaaagaacttcatccaccgggatgtgaagccagacaacttcctcatgggcctggggaagaagggcaacctggtgtacatcatcgacttcgggctggccaagaagtaccgggatgcacgcacccaccagcacatcccctatcgtgagaacaagaacctcacggggacggcgcggtacgcctccatcaacacgcaccttggaattgaacaatcccgaagagatgacttggagtctctgggctacgtgctaatgtacttcaacctgggctctctcccctggcaggggctgaaggctgccaccaagagacagaaatacgaaaggattagcgagaagaaaatgtccacccccatcgaagtgttgtgtaaaggctacccttccgaatttgccacatacctgaatttctgccgttccttgcgttttgacgacaagcctgactactcgtacctgcggcagcttttccggaatctgttccatcgccagggcttctcctatgactacgtgttcgactggaacatgctcaaatttggtgccagccgggccgccgatgacgccgagcgggagcgcagggaccgagaggagcggctgagacactcgcggaacccggctacccgcggcctcccttccacagcctccggccgcctgcgggggacgcaggaagtggctccccccacacccctcacccctacctcacacacggctaacacctccccccggcccgtctccggcatggagagagagcggaaagtgagtatgcggctgcaccgcggggcccccgtcaacatctcctcgtccgacctcacaggccgacaagatacctctcgcatgtccacctcacagaatagcattcctttcgaacaccacggcaagtagctgctcgtctcccatcggaaggcagcactggattcctggtcgggtggcttccagtggtcttcagtctgtcgtgcaccgatgagaactctccttattgctgtgaagggcagacaatgcatggctgatctactctgttaccaatggctttactagtgacacgtcccccggtctaggatcgaaatgttaacaccgggagctctccaggccactcacccagcgacgctcgtgggggaaacatactaaacggacagactccaagagctgccaccgctggggctgcactgcggccccccacgtgaactcggttgtaacggggctgggaagaaaagcagagagagaattgcagagaatcagactccttttccagggcctcagctccctccagtggtggccgccctgtactccctgacgattccactgtaactaccaatcttctacttggttaagacagttttgtatcattttgctaaaaattattggcttaaatctgtgt

SEQ ID NO: 4705 - DNA, 1492 bp, Homo sapiens
  source 1..1492: mol_type = unassigned DNA
acagcgcgatggcggcggctcctttaggcagctgaaaggggatttaggcccggaagatccgagtccatccgcggcggggagagtcgggaacaggtaccggctgggccggaagatcggcagcggctccttcggagacatctatctcggtacggacattgctgcaggagaagaggttgccatcaagcttgaatgtgtcaaaaccaaacaccctcagctccacattgagagcaaaatctacaagatgatgcagggaggagtgggcatccccaccatcagatggtgcggggcagagggggactacaacgtcatggtgatggagctgctggggccaagcctggaggacctcttcaacttctgctccaggaaattcagcctcaaaaccgtcctgctgcttgctgaccaaatgatcagtcgcatcgaatacattcattcaaagaacttcatccaccgggatgtgaagccagacaacttcctcatgggcctggggaagaagggcaacctggtgtacatcatcgacttcgggctggccaagaagtaccgggatgcacgcacccaccagcacatcccctatcgtgagaacaagaacctcacggggacggcgcggtacgcctccatcaacacgcaccttggaattgaacaatcccgaagagatgacttggagtctctgggctacgtgctaatgtacttcaacctgggctctctcccctggcaggggctgaaggctgccaccaagagacagaaatacgaaaggattagcgagaagaaaatgtccacccccatcgaagtgttgtgtaaaggctacccttccgaatttgccacatacctgaatttctgccgttccttgcgttttgacgacaagcctgactactcgtacctgcggcagcttttccggaatctgttccatcgccagggcttctcctatgactacgtgttcgactggaacatgctcaaatttggtgccagccgggccgccgatgacgccgagcgggagcgcagggaccgagaggagcggctgagacactcgcggaacccggctacccgcggcctcccttccacagcctccggccgcctgcgggggacgcaggaagtggctccccccacacccctcacccctacctcacacacggctaacacctccccccggcccgtctccggcatggagagagagcggaaagtgagtatgcggctgcaccgcggggcccccgtcaacatctcctcgtccgacctcacaggccgacaagatacctctcgcatgtccacctcacagattcctggtcgggtggcttccagtggtcttcagtctgtcgtgcaccgatgagaactctccttattgctgtgaagggcagacaatgcatggctgatctactctgttaccaatggctttactagtgacacgtcccccggtctaggatcgaaatgttaacaccgggagctctccaggccactcacccagcgacgctcgtgggggaaacatactaaacggacagactcc

SEQ ID NO: 4706 - DNA, 1040 bp, Homo sapiens
  source 1..1040: mol_type = unassigned DNA
agacccaggaagcggccgggagggcaggagcgaatcgggccgccgccgccatggagctgagagtcgggaacaggtaccggctgggccggaagatcggcagcggctccttcggagacatctatctcggtacggacattgctgcaggagaagaggttgccatcaagcttgaatgtgtcaaaaccaaacaccctcagctccacattgagagcaaaatctacaagatgatgcagggaggagtgggcatccccaccatcagatggtgcggggcagagggggactacaacgtcatggtgatggagctgctggggccaagcctggaggacctcttcaacttctgctccaggaaattcagcctcaaaaccgtcctgctgcttgctgaccaaatgaacaatcccgaagagatgacttggagtctctgggctacgtgctaatgtacttcaacctgggctctctcccctggcaggggctgaaggctgccaccaagagacagaaatacgaaaggattagcgagaagaaaatgtccacccccatcgaagtgttgtgtaaaggctacccttccgaatttgccacatacctgaatttctgccgttccttgcgttttgacgacaagcctgactactcgtacctgcggcagcttttccggaatctgttccatcgccagggcttctcctatgactacgtgttcgactggaacatgctcaaatttggtgccagccgggccgccgatgacgccgagcgggagcgcagggaccgagaggagcggctgagacactcgcggaacccggctacccgcggcctcccttccacagcctccggccgcctgcgggggacgcaggaagtggctccccccacacccctcacccctacctcacacacggctaacacctccccccggcccgtctccggcatggagagagagcggaaagtgagtatgcggctgcaccgcggggcccccgtcaacatctcctcgtccgacctcacaggccgacaagatacctctcgcatgtccacctcacagaatagcattcctttcgaacacc

SEQ ID NO: 4707 - DNA, 2642 bp, Homo sapiens
  source 1..2642: mol_type = unassigned DNA
ggttgggatctgaggggtcctctctgtgcccatcacagtttgagcttcagggaaaagaagaagaggtctttgcccttcgtttttccacgggaggagaatcaagagtgagccatggagctacgtgtggggaacaagtaccgcctgggacggaagatcgggagcgggtccttcggagatatctacctgggtgccaacatcgcctctggtgaggaagtcgccatcaagctggagtgtgtgaagacaaagcacccccagctgcacatcgagagcaagttctacaagatgatgcagggtggcgtggggatcccgtccatcaagtggtgcggagctgagggcgactacaacgtgatggtcatggagctgctggggcctagcctcgaggacctgttcaacttctgttcccgcaaattcagcctcaagacggtgctgctcttggccgaccagatgatcagccgcatcgagtatatccactccaagaacttcatccaccgggacgtcaagcccgacaacttcctcatggggctggggaagaagggcaacctggtctacatcatcgacttcggcctggccaagaagtaccgggacgcccgcacccaccagcacattccctaccgggaaaacaagaacctgaccggcacggcccgctacgcttccatcaacacgcacctgggcattgagcaaagccgtcgagatgacctggagagcctgggctacgtgctcatgtacttcaacctgggctccctgccctggcaggggctcaaagcagccaccaagcgccagaagtatgaacggatcagcgagaagaagatgtcaacgcccatcgaggtcctctgcaaaggctatccctccgaattctcaacatacctcaacttctgccgctccctgcggtttgacgacaagcccgactactcttacctacgtcagctcttccgcaacctcttccaccggcagggcttctcctatgactacgtctttgactggaacatgctgaaattcggtgcagcccggaatcccgaggatgtggaccgggagcggcgagaacacgaacgcgaggagaggatggggcagctacgggggtccgcgacccgagccctgccccctggcccacccacgggggccactgccaaccggctccgcagtgccgccgagcccgtggcttccacgccagcctcccgcatccagccggctggcaatacttctcccagagcgatctcgcgggtcgaccgggagaggaaggtgagtatgaggctgcacaggggtgcgcccgccaacgtctcctcctcagacctcactgggcggcaagaggtctcccggatcccagcctcacagacaagtgtgccatttgaccatctcgggaagtgaggagagcccccattggaccagtgtttgcttagtgtcttcactgtattttctttaaaaaaaaaaaaaaaaaaaaaaaggcaaaaataaaccactcaaaagaacaacaaaaaaacccagcacaaaaccgacgatggagtttgtttctttgatttctttgccaatggcaagaagatgagatgccctcagcactgaggattcttgcccccttgtggtgcccgctgcccccaaccttcaggctgccagatgctcccctgacaacaccaggctacaggagccagacgccagggcctgcccggcctcctgttcctgcccccacccaccacctgcctggagaggaacgggtcgggtccgtgtcggagaagtgacaggtcccagagccaaagccggccctcaagcatcatcagggagtggtgtagtcagttgaaggcagttcccaccgagttttccgagcctcagaatccaggagatacgcacagccccacccactctgagatgacagtggctgacttcccgtgctgggcttttccattgtccccctggcctccaggctcctcctctgcctctccatggagtgggtggggaggtggtgggggccggcgtcccctgcgtgtgtgtgtgtgtgtgtgtgtgtggatgtattgacctgtgtttcccaagacagcaggtgccacggcccgccccgcctgccagcccgaattcccgttctcctgtgtctactaacaaggacatgggggtgggcggtgacctccgcatccctcagagctcagagggtcctcgctgccaccggtccccccctagcccgtcatcagccggtggcagctccatcttccattcctggttttagggcagaatccatggagactgcttccagaaggcatctggctctgagttataaattacttccctggtcctgacagtcacctggggtcccccctctccctggttccacctttctgaggaggagcctggagtcagggctgggttttggattaacccatccttcctagttaacacctttttgtttttattttattttatttttgtttgttttctccgtgtgtgtgttttcctaatttatttacctctgtttcccctttttcctttttttttttaattaaagagcaaagctttttattactttgtaatttaaaaaactgaaaaaaaaaaaactgaagaactttggggggaattttgtacttttttcctgtgtaaatattggacttttttgagctttatcgtggttgttaatttgaagtaataaagtagaaaagataaagtga

SEQ ID NO: 4708 - DNA, 1005 bp, Homo sapiens
  source 1..1005: mol_type = unassigned DNA
cccggaatcccgaggatgtggaccgggagcggcgagaacacgaacgcgaggagaggatggggcagctacgggggtccgcgacccgagccctgccccctggcccacccacgggggccactgccaaccggctccgcagtgccgccgagcccgtggcttccacgccagcctcccgcatccagccggctggcaatacttctcccagagcgatctcgcgggtcgaccgggagaggaaggtgagtatgaggctgcacaggggtgcgcccgccaacgtctcctcctcagacctcactgggcggcaagaggtctcccggatcccagcctcacagacaagtgtgccatttgaccatctcgggaagtgaggagagcccccattggaccagtgtttgcttagaaattcatccacacaagagagtggaggcatgaacagggctggccttcctcggatctcaggcccaggaaccaagctgtccatggcgggctgggcagatatttgggggtggggtggggagatgctcaccaggagggcagagaagggagagaatccgtttctgtcacatgaagatggatctcctagcgtgctgggccttgagccaggctctggggcccagagggagatagaccaagggacgagaagacaggagtttggggggccaagtgcagtggctcgcacctgtaatcccagcacttcgggaggcccagacaggtgggtcacttgaggtcaggagttcgagaccagcctggccaacatggtgaaaacccatctctactaaaaacacaaaaattagccgggtgtggtggcacacacctgtaatctcagctactcgggacgctgagacaggagaattgcttgaatctgggaggtggaggttgcagtgagccgagatcgtgccactgcactccagcctgggggacagagcgagactccatctcaaaaaaaaaaaaaagtagccagagacagctgtgtacctcacctgtcttttcccttctcccttctagtgtcttcac

SEQ ID NO: 4709 - DNA, 2791 bp, Homo sapiens
  source 1..2791: mol_type = unassigned DNA
gcgggcgggcgggcaggaggccgggaggagggaggcggcggcggcggcggcggcggcggcgagagcccagagccagagcccggccggggccgagcggagcgcggcggcggcggcggcggcggcggctgggccgggagaggctggcgcgccgggcggctccgcgaatcctccggcatccgccccggcgggccgcccccgcccgcggcagccccccgagcagtggcccggcatcggcgccttcccggcgggcaagagtgagccatggagctacgtgtggggaacaagtaccgcctgggacggaagatcgggagcgggtccttcggagatatctacctgggtgccaacatcgcctctggtgaggaagtcgccatcaagctggagtgtgtgaagacaaagcacccccagctgcacatcgagagcaagttctacaagatgatgcagggtggcgtggggatcccgtccatcaagtggtgcggagctgagggcgactacaacgtgatggtcatggagctgctggggcctagcctcgaggacctgttcaacttctgttcccgcaaattcagcctcaagacggtgctgctcttggccgaccagatgatcagccgcatcgagtatatccactccaagaacttcatccaccgggacgtcaagcccgacaacttcctcatggggctggggaagaagggcaacctggtctacatcatcgacttcggcctggccaagaagtaccgggacgcccgcacccaccagcacattccctaccgggaaaacaagaacctgaccggcacggcccgctacgcttccatcaacacgcacctgggcattgagcaaagccgtcgagatgacctggagagcctgggctacgtgctcatgtacttcaacctgggctccctgccctggcaggggctcaaagcagccaccaagcgccagaagtatgaacggatcagcgagaagaagatgtcaacgcccatcgaggtcctctgcaaaggctatccctccgaattctcaacatacctcaacttctgccgctccctgcggtttgacgacaagcccgactactcttacctacgtcagctcttccgcaacctcttccaccggcagggcttctcctatgactacgtctttgactggaacatgctgaaattcggtgcagcccggaatcccgaggatgtggaccgggagcggcgagaacacgaacgcgaggagaggatggggcagctacgggggtccgcgacccgagccctgccccctggcccacccacgggggccactgccaaccggctccgcagtgccgccgagcccgtggcttccacgccagcctcccgcatccagccggctggcaatacttctcccagagcgatctcgcgggtcgaccgggagaggaaggtgagtatgaggctgcacaggggtgcgcccgccaacgtctcctcctcagacctcactgggcggcaagaggtctcccggatcccagcctcacagacaagtgtgccatttgaccatctcgggaagtgaggagagcccccattggaccagtgtttgcttagtgtcttcactgtattttctttaaaaaaaaaaaaaaaaaaaaaaaggcaaaaataaaccactcaaaagaacaacaaaaaaacccagcacaaaaccgacgatggagtttgtttctttgatttctttgccaatggcaagaagatgagatgccctcagcactgaggattcttgcccccttgtggtgcccgctgcccccaaccttcaggctgccagatgctcccctgacaacaccaggctacaggagccagacgccagggcctgcccggcctcctgttcctgcccccacccaccacctgcctggagaggaacgggtcgggtccgtgtcggagaagtgacaggtcccagagccaaagccggccctcaagcatcatcagggagtggtgtagtcagttgaaggcagttcccaccgagttttccgagcctcagaatccaggagatacgcacagccccacccactctgagatgacagtggctgacttcccgtgctgggcttttccattgtccccctggcctccaggctcctcctctgcctctccatggagtgggtggggaggtggtgggggccggcgtcccctgcgtgtgtgtgtgtgtgtgtgtgtgtggatgtattgacctgtgtttcccaagacagcaggtgccacggcccgccccgcctgccagcccgaattcccgttctcctgtgtctactaacaaggacatgggggtgggcggtgacctccgcatccctcagagctcagagggtcctcgctgccaccggtccccccctagcccgtcatcagccggtggcagctccatcttccattcctggttttagggcagaatccatggagactgcttccagaaggcatctggctctgagttataaattacttccctggtcctgacagtcacctggggtcccccctctccctggttccacctttctgaggaggagcctggagtcagggctgggttttggattaacccatccttcctagttaacacctttttgtttttattttattttatttttgtttgttttctccgtgtgtgtgttttcctaatttatttacctctgtttcccctttttcctttttttttttaattaaagagcaaagctttttattactttgtaatttaaaaaactgaaaaaaaaaaaactgaagaactttggggggaattttgtacttttttcctgtgtaaatattggacttttttgagctttatcgtggttgttaatttgaagtaataaagtagaaaagataaagtg

SEQ ID NO: 4710 - DNA, 2321 bp, Homo sapiens
  source 1..2321: mol_type = unassigned DNA
ctttcaaacccggccggcccgagtggagtcagctcagtcccggcagccgccgcgcgaggaaatggccgaggggccggagccacagtccacagacaaacgaatttaaaggagcaaccgaggaggcacctgcgaaagaaagcccacacacaggtgaatttaaaggagcagccctggtgtcacctatcagtaaaagactatttggagttttcctcgtcttactggatgtcactctcgtccttgccgacctaattttcactgacagcaaactttatattcctttggagtatcgttctatttctctagctattgccttattttttctcatggatgttcttcttcgagtatttgtagaagggtgttggagcgggccggagagaagtagagtgggctgcgaggagaaggaaacaggcctttcggaggctcctcatccctcggaggtcatcccttactccagcaagagtgagccatggagctacgtgtggggaacaagtaccgcctgggacggaagatcgggagcgggtccttcggagatatctacctgggtgccaacatcgcctctggtgaggaagtcgccatcaagctggagtgtgtgaagacaaagcacccccagctgcacatcgagagcaagttctacaagatgatgcagggtggcgtggggatcccgtccatcaagtggtgcggagctgagggcgactacaacgtgatggtcatggagctgctggggcctagcctcgaggacctgttcaacttctgttcccgcaaattcagcctcaagacggtgctgctcttggccgaccagatgatcagccgcatcgagtatatccactccaagaacttcatccaccgggacgtcaagcccgacaacttcctcatggggctggggaagaagggcaacctggtctacatcatcgacttcggcctggccaagaagtaccgggacgcccgcacccaccagcacattccctaccgggaaaacaagaacctgaccggcacggcccgctacgcttccatcaacacgcacctgggcattgagcaaagccgtcgagatgacctggagagcctgggctacgtgctcatgtacttcaacctgggctccctgccctggcaggggctcaaagcagccaccaagcgccagaagtatgaacggatcagcgagaagaagatgtcaacgcccatcgaggtcctctgcaaaggctatccctccgaattctcaacatacctcaacttctgccgctccctgcggtttgacgacaagcccgactactcttacctacgtcagctcttccgcaacctcttccaccggcagggcttctcctatgactacgtctttgactggaacatgctgaaattcggtgcagcccggaatcccgaggatgtggaccgggagcggcgagaacacgaacgcgaggagaggatggggcagctacgggggtccgcgacccgagccctgccccctggcccacccacgggggccactgccaaccggctccgcagtgccgccgagcccgtggcttccacgccagcctcccgcatccagccggctggcaatacttctcccagagcgatctcgcgggtcgaccgggagaggaaggtgagtatgaggctgcacaggggtgcgcccgccaacgtctcctcctcagacctcactgggcggcaagaggtctcccggatcccagcctcacagacaagtgtgccatttgaccatctcgggaagtgaggagagcccccattggaccagtgtttgcttagtgtcttcactgtattttctttaaaaaaaaaaaaaaaaaaaaaaaggcaaaaataaaccactcaaaagaacaacaaaaaaacccagcacaaaaccgacgatggagtttgtttctttgatttctttgccaatggcaagaagatgagatgccctcagcactgaggattcttgcccccttgtggtgcccgctgcccccaaccttcaggctgccagatgctcccctgacaacaccaggctacaggagccagacgccagggcctgcccggcctcctgttcctgcccccacccaccacctgcctggagaggaacgggtcgggtccgtgtcggagaagtgacaggtcccagagccaaagccggccctcaagcatcatcagggagtggtgtagtcagttgaaggcagttcccaccgagttttccgagcctcagaatccaggagatacgcacagccccacccactctgagatgacagtggctgacttcccgtgctgggcttttccattgtccccctggcctccaggctcctcctctgcctctccatggagtgggtggggaggtggtgggggccggcgtcccc

SEQ ID NO: 4711 - DNA, 2048 bp, Homo sapiens
  source 1..2048: mol_type = unassigned DNA
tccggcatccgccccggcgggccgcccccgcccgcggcagccccccgagcagtggcccggcatcggcgccttcccggcgggcaagagtgagccatggagctacgtgtggggaacaagtaccgcctgggacggaagatcgggagcgggtccttcggagatatctacctgggtgccaacatcgcctctggtgaggaagtcgccatcaagctggagtgtgtgaagacaaagcacccccagctgcacatcgagagcaagttctacaagatgatgcagggtggcgtggggatcccgtccatcaagtggtgcggagctgagggcgactacaacgtgatggtcatggagctgctggggcctagcctcgaggacctgttcaacttctgttcccgcaaattcagcctcaagacggtgctgctcttggccgaccagatgatcagccgcatcgagtatatccactccaagaacttcatccaccgggacgtcaagcccgacaacttcctcatggggctggggaagaagggcaacctggtctacatcatcgacttcggcctggccaagaagtaccgggacgcccgcacccaccagcacattccctaccgggaaaacaagaacctgaccggcacggcccgctacgcttccatcaacacgcacctgggcattgagcaaagccgtcgagatgacctggagagcctgggctacgtgctcatgtacttcaacctgggctccctgccctggcaggggctcaaagcagccaccaagcgccagaagtatgaacggatcagcgagaagaagatgtcaacgcccatcgaggtcctctgcaaaggctatccctccgaattctcaacatacctcaacttctgccgctccctgcggtttgacgacaagcccgactactcttacctacgtcagctcttccgcaacctcttccaccggcagggcttctcctatgactacgtctttgactggaacatgctgaaattcggtgcagcccggaatcccgaggatgtggaccgggagcggcgagaacacgaacgcgaggagaggatggggcagctacgggggtccgcgacccgagccctgccccctggcccacccacgggggccactgccaaccggctccgcagtgccgccgagcccgtggcttccacgccagcctcccgcatccagccggctggcaatacttctcccagagcgatctcgcgggtcgaccgggagaggaaggtgagtatgaggctgcacaggggtgcgcccgccaacgtctcctcctcagacctcactgggcggcaagaggtctcccggatcccagcctcacagacaagtgtgccatttgaccatctcgggaagtgaggagagcccccattggaccagtgtttgcttagtgtcttcactgtattttctttaaaaaaaaaaaaaaaaaaaaaaaggcaaaaataaaccactcaaaagaacaacaaaaaaacccagcacaaaaccgacgatggagtttgtttctttgatttctttgccaatggcaagaagatgagatgccctcagcactgaggattcttgcccccttgtggtgcccgctgcccccaaccttcaggctgccagatgctcccctgacaacaccaggctacaggagccagacgccagggcctgcccggcctcctgttcctgcccccacccaccacctgcctggagaggaacgggtcgggtccgtgtcggagaagtgacaggtcccagagccaaagccggccctcaagcatcatcagggagtggtgtagtcagttgaaggcagttcccaccgagttttccgagcctcagaatccaggagatacgcacagccccacccactctgagatgacagtggctgacttcccgtgctgggcttttccattgaggagcctggagtcagggctgggttttggattaacccatccttcctagttaacacctttttgtttttattttattttatttttgtttgttttctccgtgtgtgtgttttcctaatttatttacctctgtttcccctttttcctttttttttttaattaaagagcaaagctttt

SEQ ID NO: 4712 - DNA, 1580 bp, Homo sapiens
  source 1..1580: mol_type = unassigned DNA
cggtgcgagagcgcgcgagccggcggcgggggcgggcgggcgggcaggaggccgggaggagggaggcggcggcggcggcggcggcggcggcgagagcccagagccagagcccggccggggccgagcggagcgcggcggcggcggcggcggcggcggctgggccgggagaggctggcgcgccgggcggctccgcgaatcctccggcatccgccccggcgggccgcccccgcccgcggcagccccccgagcagtggcccggcatcggcgccttcccggcgggcaagagtgagccatggagctacgtgtggggaacaagtaccgcctgggacggaagatcgggagcgggtccttcggagatatctacctgggtgccaacatcgcctctggtgaggaagtcgccatcaagctggagtgtgtgaagacaaagcacccccagctgcacatcgagagcaagttctacaagatgatgcagggtggcgtggggatcccgtccatcaagtggtgcggagctgagggcgactacaacgtgatggtcatggagctgctggggcctagcctcgaggacctgttcaacttctgttcccgcaaattcagcctcaagacggtgctgctcttggccgaccagatgatcagccgcatcgagtatatccactccaagaacttcatccaccgggacgtcaagcccgacaacttcctcatggggctggggaagaagggcaacctggtctacatcatcgacttcggcctggccaagaagtaccgggacgcccgcacccaccagcacattccctaccgggaaaacaagaacctgaccggcacggcccgctacgcttccatcaacacgcacctgggcattgagcaaagccgtcgagatgacctggagagcctgggctacgtgctcatgtacttcaacctgggctccctgccctggcaggggctcaaagcagccaccaagcgccagaagtatgaacggatcagcgagaagaagatgtcaacgcccatcgaggtcctctgcaaaggctatccctccgaattctcaacatacctcaacttctgccgctccctgcggtttgacgacaagcccgactactcttacctacgtcagctcttccgcaacctcttccaccggcagggcttctcctatgactacgtctttgactggaacatgctgaaattcggtgcagcccggaatcccgaggatgtggaccgggagcggcgagaacacgaacgcgaggagaggatggggcagctacgggggtccgcgacccgagccctgccccctggcccacccacgggggccactgccaaccggctccgcagtgccgccgagcccgtggcttccacgccagcctcccgcatccagccggctggcaatacttctcccagagcgatctcgcgggtcgaccgggagaggaaggtgagtatgaggctgcacaggggtgcgcccgccaacgtctcctcctcagacctcactgggcggcaagaggtctcccggatcccagcctcacagacaagtgtgccatttgaccatctcgggaagtgaggagagcccccattggaccagtgtttgcttaggtgag

SEQ ID NO: 4713 - DNA, 996 bp, Homo sapiens
  source 1..996: mol_type = unassigned DNA
ggggacgaggaggagggggcctgttattttgcaggctcgcgggggaggccccccggccggcctgcctccgcttccccccgctgggccctccgaggccccggccggccaggcggccaccccggctgtgatttggggacgctgagggagggggcttggggtgctgggcgccggatactgttgattcgggcccgcgtagcgtttcatcggacaatcaccggcgccccctgctctcccggccccggcgcccggacctgggggttcgcaaggctgcgcccgctcgttggatgacgggcgtttgggggtcctaagcaagagtgagccatggagctacgtgtggggaacaagtaccgcctgggacggaagatcgggagcgggtccttcggagatatctacctgggtgccaacatcgcctctggtgaggaagtcgccatcaagctggagtgtgtgaagacaaagcacccccagctgcacatcgagagcaagttctacaagatgatgcagggtggcgtggggatcccgtccatcaagtggtgcggagctgagggcgactacaacgtgatggtcatggagctgctggggcctagcctcgaggacctgttcaacttctgttcccgcaaattcagcctcaagacggtgctgctcttggccgaccagatgatcagccgcatcgagtatatccactccaagaacttcatccaccgggacgtcaagcccgacaacttcctcatggggctggggaagaagggcaacctggtctacatcatcgacttcggcctggccaagaagtaccgggacgcccgcacccaccagcacattccctaccgggaaaacaagaacctgaccggcacggcccgctacgcttccatcaacacgcacctgggcattgagcaaagccgtcgagatgacctggagagcctgggctacgtgctcatgtacttcaacctgggctccctgccctggcaggggctcaaagcagccaccaagcgccagaagtat

SEQ ID NO: 4714 - DNA, 763 bp, Homo sapiens
  source 1..763: mol_type = unassigned DNA
ccgcaacctcttccaccggcagggcttctcctatgactacgtctttgactggaacatgctgaaattcggtgcagcccggaatcccgaggatgtggaccgggagcggcgagaacacgaacgcgaggagaggatggggcagctacgggggtccgcgacccgagccctgccccctggcccacccacgggggccactgccaaccggctccgcagtgccgccgagcccgtggcttccacgccagcctcccgcatccagccggctggcaatacttctcccagagcgatctcgcgggtcgaccgggagaggaaggtgagtatgaggctgcacaggggtgcgcccgccaacgtctcctcctcagacctcactgggcggcaagaggtctcccggatcccagcctcacagacaagtgtgccatttgaccatctcgggaagtgaggagagcccccattggaccagtgtttgcttaggcagtagtccgacacgtcgggggactcaactttacactgggacaatctgtgtgtggtctgttttgtagaaattcatccacacaagagagtggaggcatgaacagggctggccttcctcggatctcaggcccaggaaccaagctgtccatggcgggctgggcagatatttgggggtggggtggggagatgctcaccaggagggcagagaagggagagaatccgtttctgtcacatgaagatggatctcctagcgtgctgggccttgagccaggctctggggcccagagggagatagacc

SEQ ID NO: 4715 - DNA, 1662 bp, Homo sapiens
  source 1..1662: mol_type = unassigned DNA
ctgcccaaagtttgtcctattaggcccgccagggtactctgcgactccgggacgagggcggggccgcgctagtggttccggttcggctccagccgcccctcggctcctcgccttccccctcccgtccgccttctcccctccctcccgctcctgggaaagagagaaaccaccgctgcgggtgggtagagaagcacttggcgcctcggggaggggaccgcgcccgcctcatttgcgccttgcagcactgctggaccaggttacaagatgttcacctaagattgagacctagtgactacatttcctacgggaacaaataaatggtttttcatctcccggagatacattacaaacaaatatggtgctaaaagaactccttacctttctctgactacaatttatttggacatacttttgtattgaagagaggtatacatactgaagctacttgctgtactataggagactctgtcctgtaggatcatggaccatcctagtagggaaaaggatgaaagacaacggacaactaaacccatggcacaaaggagtgcacactgctctcgaccatctggctcctcatcgtcctctggggttcttatggtgggacccaacttcagggttggcaagaagataggatgtgggaacttcggagagctcagattaggtaaaaatctctacaccaatgaatatgtagcaatcaaactggaaccaataaaatcacgtgctccacagcttcatttagagtacagattttataaacagcttggcagtgcaggtgaaggtctcccacaggtgtattactttggaccatgtgggaaatataatgccatggtgctggagctccttggccctagcttggaggacttgtttgacctctgtgaccgaacatttactttgaagacggtgttaatgatagccatccagctgctttctcgaatggaatacgtgcactcaaagaacctcatttaccgagatgtcaagccagagaacttcctgattggtcgacaaggcaataagaaagagcatgttatacacattatagactttggactggccaaggaatacattgaccccgaaaccaaaaaacacataccttatagggaacacaaaagtttaactggaactgcaagatatatgtctatcaacacgcatcttggcaaagagcaaagccggagagatgatttggaagccctaggccatatgttcatgtatttccttcgaggcagcctcccctggcaaggactcaaggctgacacattaaaagagagatatcaaaaaattggtgacaccaaaaggaatactcccattgaagctctctgtgagaactttccagaggagatggcaacctaccttcgatatgtcaggcgactggacttctttgaaaaacctgattatgagtatttacggaccctcttcacagacctctttgaaaagaaaggctacacctttgactatgcctatgattgggttgggagacctattcctactccagtagggtcagttcacgtagattctggtgcatctgcaataactcgagaaagccacacacatagggatcggccatcacaacagcagcctcttcgaaatcagagccttaggactgttacagctgagcattatgatgttaacaactcagccatctggcacaggggaagaggcacctaa

SEQ ID NO: 4716 - DNA, 8107 bp, Homo sapiens
  source 1..8107: mol_type = unassigned DNA
ggcggggccgcgctagtggttccggttcggctccagccgcccctcggctcctcgccttccccctcccgtccgccttctcccctccctcccgctcctgggaaagagagaaaccaccgctgcgggtgggtagagaagcacttggcgcctcggggaggggaccgcgcccgcctcatttgcgccttgcagcactgctggaccaggttacaagatgttcacctaagattgagacctagtgactacatttcctacgggaacaaataaatggtttttcatctcccggagatacattacaaacaaatatggtgctaaaagaactccttacctttctctgactacaatttatttggacatacttttgtattgaagagaggtatacatactgaagctacttgctgtactataggagactctgtcctgtaggatcatggaccatcctagtagggaaaaggatgaaagacaacggacaactaaacccatggcacaaaggagtgcacactgctctcgaccatctggctcctcatcgtcctctggggttcttatggtgggacccaacttcagggttggcaagaagataggatgtgggaacttcggagagctcagattaggtaaaaatctctacaccaatgaatatgtagcaatcaaactggaaccaataaaatcacgtgctccacagcttcatttagagtacagattttataaacagcttggcagtgcaggtgaaggtctcccacaggtgtattactttggaccatgtgggaaatataatgccatggtgctggagctccttggccctagcttggaggacttgtttgacctctgtgaccgaacatttactttgaagacggtgttaatgatagccatccagctgctttctcgaatggaatacgtgcactcaaagaacctcatttaccgagatgtcaagccagagaacttcctgattggtcgacaaggcaataagaaagagcatgttatacacattatagactttggactggccaaggaatacattgaccccgaaaccaaaaaacacataccttatagggaacacaaaagtttaactggaactgcaagatatatgtctatcaacacgcatcttggcaaagagcaaagccggagagatgatttggaagccctaggccatatgttcatgtatttccttcgaggcagcctcccctggcaaggactcaaggctgacacattaaaagagagatatcaaaaaattggtgacaccaaaaggaatactcccattgaagctctctgtgagaactttccagaggagatggcaacctaccttcgatatgtcaggcgactggacttctttgaaaaacctgattatgagtatttacggaccctcttcacagacctctttgaaaagaaaggctacacctttgactatgcctatgattgggttgggagacctattcctactccagtagggtcagttcacgtagattctggtgcatctgcaataactcgagaaagccacacacatagggatcggccatcacaacagcagcctcttcgaaatcaggtggttagctcaaccaatggagagctgaatgttgatgatcccacgggagcccactccaatgcaccaatcacagctcatgccgaggtggaggtagtggaggaagctaagtgctgctgtttctttaagaggaaaaggaagaagactgctcagcgccacaagtgaccagtgcctcccaggagtcctcaggccctggggactctgactcaattgtacctgcagctcctgccatttctcattggaagggactcctctttgggggagggtggatatccaaaccaaaaagaagaaaacagatgcccccagaaggggccagtgcgggcagccagggcctagtgggtcattggccatctccgcctgcctaaggctctgagcaggtcccagagctgctgttcctccactgcttgcccatagggctgcctggttgactctccttcccattgtttacagtgaaggtgtcattcacaaaaactcaaggactgctattctccttcttccccttagtttactcctggtttttaccccaccctcaaccctctccagcataaaacctagtgagctaaaggctttgtctgcagaaggagatcaagaggctgggggtaaggccaagaaggtaggaggaaaatggcagacctgggctggagaagaaccttctccgtatcccaggtgtgcctggcagtatggtttcctcttcctctgtgcctgtgcagcattcatcccagctggccttggggttcaggttccttcttccctccctcctgtgaagttacactgtaggacacaagctgtgagcaatctgcagtctactgtccctgtgtgttggcgttcttagcttttttgacaaactcttttctccaggtagtaggacaatgaaaattgttctaagcaaaggaaagaaaactgactttgttgcacttttagtttttttaaaaaaaacaaaaacaaaaacatggcagatgcatattgtgtctggttatattgggggttttacttttacctgttttgagggggatggggccggccaagccattcagagagaacatgggtccagaggacattctcagtggaaagagtttgatctgcagcacccagaagagaagccaaactcggtgtcattctgagtgaacactcaggttggcaagaaaacatacttgaattttcattcatcttctcagcagctgaagaatgtccctaccagagcatcttgacctaatcagcttacagtttgaaaacctagctctccagaacatgagatgagccagccgagccagactgtgaccaggaaacagctcatcccagagaaggagatgcttaacaaaaaaaaattgaaattgtttcccatgctgccagggacttccaactagatagccatgtgacgtcctggtgacttgggggaaaaattagtgatgaaacagccaccaccatattgccattagtggaaaaaaagaggacagtgaacctgccttccacctgccagagggacctcagggtgtggcattatagggccaggaaaagaaaatcggtgtatcctatctgccccaatagctgagctgtagcatttgggctggcctgccttatcagaaaccaagcttatgaagatcttctcccagcaggtccatagcagtaggcttaggatgcagtatatggggccgcatttaaaaggagggaaagattgtttggtgctggaacattccagggaaaaggagactggaatgaaaggtctgaaattatcttctcaattggactccttccagaaaggtggccgtgcctctaagcatgtttttcccagtatgccctaggcctccccccatggtgttttcatatgaggtactactgtgaaggatctggttcctcattcactgtttgacaagtctttcatgtgtggagttactcttctcatgcccaattttcatttgagtttagtggcttaaccaaacaatgactcctcattccagcggtgacagaagagaaagggtcatttacatcaggaaagaggtcttgtatctgggagtagagagctaaccatggagcacagtggctggtgggtgacttagtctgatggtttgtggaccatagaagtcttcacctctggtttgaggtgcagggctgtcttttgtactggagggtgtggggatattttctgatagttgccatttcttgaaaaattcccttgatgtaccttacacagagcagaaataacattaacatggatcagaggtactgggcttcatctgttccattggaccttggctagggaatatcatttcactggcatcaaacctgcttagcttatgaaaagatggtaatatgtcatttctataaatgtttctatatatgaaacataaagtggcagggagatacaatatcacaccccttccccacaaggactgtgaatattgggatttatgtccttgccattacctagtggttacagccctatcactaaaatttacatcgtttctcagttgggatttgggcattgctaacttactgtatagaaagtttaacttttcctcacccctgtatagaaaatgccttgcctctcaagagagggcagagggggggccaggtgcagtggctcacgcctgtaatcccagcagtttgggaggccaaggcaagtggatcatgtgaggtcaagagttcgagaccagcctggccaacatggtgaaaccccgtctctacaaaaaatacaaaaattagctgggcatggtggcatgctcccgtagtcccagctactcgggaggctgaggcaggagaatcacttgagcctgggaggcagaagttgcagtgagccgagatcgcaccactgcactccagcctgggcaacagagtgagactctgtctaaaaagaaaaaaaaaaaagggcagagggaaatggtgggaatgcctggagcatcctggcactctatactctactgagtgcctctcttcagcccctcaccctgcttccacacacacacacacaaaagcaaaggcactgaccagcttggctgcagggcaagctgccttgcagctggatttgcgactttttttttgtcttaaaatttttactggatcagttgtaggggactgtacttcctaagacactgttctcaccttccaacctcacaaatctcttactagatatttggtttttataacaagggtaaagaatcccaggtccctttagcatgcagagtaatggtgatccctccagagccattggcacttcaaagtggtcccagacctgggagattctggtgggatcttccttaaaaataagcaaaaaacctgagtaccctagatgcaattggccatttgtttcaggcccatcagcgaatcagggctccctcctcaaccctactgctacagttccttagctgtatgcctcagccagatccttggggttagggcatgcactcgctgactgtccccacccatccacttgctctgtagtttctgagctttctccatttcacaagtatggtgcctaacgatctttttctttaggattgatgcagttgtttttcctgaaagctaactcagcatctattcataaaaacccttaatagtatacattaggagttttcccaagctctacagtccctcagacattgcatcctaaacagatttgaggcacacaggccaagactccaccaaggcataaatggtcccccctactcccttttgaccagggtatcacttgtgtctctgcagtaagagttggtcaagttgctctacgcaccttggtgctttccagagatctcactccagactgcccccaagggtggatagagtatcctgacagccagtgtgcactcatgactgccttaattaacattcttctgctattatggagcctgtccagcaataaacagggtctaggaaggtacaagattagcttccagttaaaatcccattttatattggaatgcatgagctacagatgacagcagagatcctgaggtttctagacatgttgattgtctcttttttctaaatgaactccaagtacttagaaaacagtccctgtccatcagccagaaaaggtgaccatcacccctaaagtaatttccaaacttagttcagtgggaagatatgctggtagtgcatattcagtgttgattttcagtgctagtaaccacttttaatgccagaaatatgtaacaatgataatgtaacgtcaaagtggttactaaagattatagccttaacttttttatgtaaaagataaaatccattcctcctcccagtgagcaagcatggcttgcatttctcaaaaatgagaacttccatggcagccaagaaaacgtcttctcagaggaactttcgtttgatgcatctcccaagcccacatgcctcctgtgttccagccacctcttccatttcacatttaaaccagctctccattcccattgagttgccctaacaacattgtctccagtgtcagaaccatattaaggttcgtttctcagattgggagcctgcaacaccatacagccaacattgcctttgccacgccactgccaccatccccaccattgccctatggtgggcagatgaattccagaaaccctcagggagccaggataattaggcaacccatctgaattggccacgtaagtgacaggcacttatctctcgggttcttgcttttgcagactccagggaagtcctgtctagaggtcgatggcagagactcctagtctttcccatgaggggttgataggaatcaaattgggattcctttggctttgggttttgtttttttgttgttgtttttggttttcagtttgttttttggtgtatggggggtgattttgtttctgaataagaaaaagaagaggcaaccatggcccttatgtgggtttatcctttttgagcaatgttttagccacaagtaaggaatcttgaaagtcttttgtccagcaagcagtcttaaaaatgtttttcctaactccttttgcaggtgactaagtacaaaaaaatagttttctcattgtattcaaaatagtgagtaggttccctggataatacacagtggtagttgacatattttctcaaaacacaaccagaaaacccacttccggtatttgtaaatcacctttcaagggaaaaagtgaacacgtattccttgtatttctagtttgattaccaaacctgatgttacaaagaaacctccgttctgtagacagaatttcttttatttttcttcttttactcctcacaatcactttcccagtgccatcaccatctataaggtctcagagcagaggattattcatggtaataagtgggggtgtggtgcagccattccagtaacacccacaagaggacagctgttctgaatgtccccacccacccctctttcagtacaggtgagacattttcagttcatgagctccagaccaaatcccaggccagcccttgcaccaaaagccttttttagaaggcttatcagtctattaggaatgtctcaggaaagatgagccatttctttggggagaaatatatttacagatggaagtgtgtgactgcgtgtctgtgtgtgtgtgtggtgtgtgtgcgcacgtgagtgcgtgtgttcatctatgtgcatttcacttccataaagacccagcccaagctgctgggaaccatgtgttcctgagtattctcagaggttaaacaagtgacaagtgagcttctgaaattagtgtctcagcaagctggctttaggaatgagccccattttatcaagcagagaaaaaaaataacagcagaaaagataaagataaaccaaaaatatataccccccaatggaaaataatgttgattcagcaattcccataggatgtattacatgctctaatttattatattattatttatctgtctttgatctttgcccattgtactcttaaaaagatgttgggatgttgattgcgatttttaaacaactagataatgtataaatcagcagtggaaatcagttttaatgtgtggatgtgtctgattattgttaaatgcctctttttttactttttttttttttagatgtataatgtttcataaaccctggcactggtcacaaagctcagctgtgaaaatgaaatttgtagtatttttaaacatgaatgtcaatttcaagtgtatttgaaatggttcctccaggagagatatttgtgcaccattaggaaaatcttctctgcagaggaagtagccttctttggagaaaatggaaaatgggttctgatatgtgatctcagagtagcccatttcctagggcaccatggaaaacacaaatgtgatctttaagtatacctcttccccagtttggggaggaaaggactcagtttgcaccctttttgtatgtaaaataaaatgtcttacctttcttggctacttctgcttgtttggttggttgattggtttgtctgtttttaatctccctcggctcatttgtaattaacaatctagctaggactaactttgatgcgattcaagactcctgtgaacaaaaataatttggcattcttgtttcattccttggattaaatattgtcttctcctgtgagtcacttcaaaaataaatactgctgtctctcttcgagtgctgaa

SEQ ID NO: 4717 - DNA, 1824 bp, Homo sapiens
  source 1..1824: mol_type = unassigned DNA
accagccaggagccacccatcctccagcacactgagcagcaagctggacacacggcacactgatccaaatgggtaaggggatggtggcgatgctcattctgggtctgctacttctggcgctgctcctacccgtgcaggtttcttcatttgttcctttaaccagtatgccggaagctactgcagccgaaaccacaaagccctccaacagtgccctacagcctacagccggtctccttgtggtcttgcttgcccttctacatctctaccattaagagagcatgtcctttgcaacctgatcacacaaatgatgaaaaagaatagaactttctcattcatctttgaataacgtctccttgtttaccctggtattctagaatgttacaagatgttcacctaagattgagacctagtgactacatttcctacgggaacaaataaatggtttttcatctcccggagatacattacaaacaaatatggtgctaaaagaactccttacctttctctgactacaatttatttggacatacttttgtattgaagagaggtatacatactgaagctacttgctgtactataggagactctgtcctgtaggatcatggaccatcctagtagggaaaaggatgaaagacaacggacaactaaacccatggcacaaaggagtgcacactgctctcgaccatctggctcctcatcgtcctctggggttcttatggtgggacccaacttcagggttggcaagaagataggatgtgggaacttcggagagctcagattaggtaaaaatctctacaccaatgaatatgtagcaatcaaactggagctccttggccctagcttggaggacttgtttgacctctgtgaccgaacatttactttgaagacggtgttaatgatagccatccagctgctttctcgaatggaatacgtgcactcaaagaacctcatttaccgagatgtcaagccagagaacttcctgattggtcgacaaggcaataagaaagagcatgttatacacattatagactttggactggccaaggaatacattgaccccgaaaccaaaaaacacataccttatagggaacacaaaagtttaactggaactgcaagatatatgtctatcaacacgcatcttggcaaagagcaaagccggagagatgatttggaagccctaggccatatgttcatgtatttccttcgaggcagcctcccctggcaaggactcaaggctgacacattaaaagagagatatcaaaaaattggtgacaccaaaaggaatactcccattgaagctctctgtgagaactttccagaggagatggcaacctaccttcgatatgtcaggcgactggacttctttgaaaaacctgattatgagtatttacggaccctcttcacagacctctttgaaaagaaaggctacacctttgactatgcctatgattgggttgggagacctattcctactccagtagggtcagttcacgtagattctggtgcatctgcaataactcgagaaagccacacacatagggatcggccatcacaacagcagcctcttcgaaatcaggtggttagctcaaccaatggagagctgaatgttgatgatcccacgggagcccactccaatgcaccaatcacagctcatgccgaggtggaggtagtggaggaagctaagtgctgctgtttctttaagaggaaaaggaagaagactgctcagcgccacaagtgaccagtgcctcccaggagtcctcaggccctggggactctgactcaattgtacctgcagctcctgccatttctcattggaagggactc

SEQ ID NO: 4718 - DNA, 2877 bp, Homo sapiens
  source 1..2877: mol_type = unassigned DNA
ccccgctggcagacgctggcggcgtaaggcgcgcgggccccggagcgggcgcggcggagcgcggcgagcccggcgcctcccgtcccgaacatgcggaggccggcccaggcggcgcgggagccggagcgggggcccaagcggcaccggagccggagcgcgagggggcgcggggcccggagcgggggtccgcgctgcgctgctgaggccgggccggccgcccagacgctgcccgcgggcccggccacggcggagccaagctgtgagccgtgagctttgaggcggtgggatgtgtcagcagaatgtctcctgcccccgagagcgaccccgaggccactgagaagagcagcgcggcctggccggcccgaacgcctgcgtctcagtagctgggagccacgggcccacgcccgcccaccggccgcagtgatgttctagccacagaggagccaagacctcaggtttccagagacttgggatttgcacggcagcagagtcaccgtggagaggccagggtatcacaaacttatggattttgacaagaaaggagggaaaggggagacggaggagggccggagaatgtccaaggccggcgggggccggagcagccacggcatccggagctcggggaccagctcgggggtcctgatggtgggccccaacttccgcgtcggcaagaagatcggctgcggcaacttcggggagctccgcctaggaaagaatctctatacaaatgaatacgtggctatcaaattggagccgatcaagtcccgggccccgcagctgcacctggagtaccggttctacaagcagctcagcgccacagagggcgtccctcaggtctactacttcggtccgtgcgggaagtacaacgccatggtgctggagctgctggggcccagcctggaggacctgttcgacctgtgcgaccggaccttcacgctcaagacggtgctgatgatcgccatccagctgatcacgcgcatggagtatgtgcacaccaagagcctaatctaccgggacgtgaagcccgagaacttcctggtgggccgcccggggaccaagcggcagcatgccatccacatcatcgacttcgggctggccaaggagtacatcgaccccgagaccaagaagcacatcccgtaccgcgagcacaagagcctgacgggcacggcgcgctacatgagcatcaacacgcacctgggcaaggagcagagccgccgcgacgacctggaggcgctgggccacatgttcatgtacttcctgcgcggcagcctcccctggcaggggctcaaggccgacacgctcaaggagcggtaccagaagatcggggacaccaaacgcgccacgcccatcgaggtgctctgcgagaacttcccagaggagatggccacgtacctgcgctatgtgcggcgcctggacttcttcgagaagcccgactatgactacctgcggaagctcttcaccgacctcttcgaccgcagtggcttcgtgttcgactatgagtacgactgggccgggaagcccctgccgacccccatcggcaccgtccacaccgacctgccctcccagcctcagctccgggacaaaacccagccgcacagcaaaaaccaggcgttgaactccaccaacggggagctgaatgcggacgaccccacggccggccactccaacgccccgatcacagcgcctgcagaggtggaggtggccgatgaaaccaaatgctgctgtttcttcaagaggagaaagagaaaatcgctgcagcgacacaagtgaccctgggcgcgtgcagccccctgaatcttctccgtgcagccccttggggcgcgaccttgtgcgaggccctcggggcccacccacagcggcccagggccagaccctggctggaagccagaacgcagactgcaggggccgcgcctggctcaggcggccccacccccgggacgtggggtcacttccttcatgtaagactttggccgaaatttctacacctgtgtctagtcctcccctccaagagcattaactatttaaaacaaggaaaagaggaaaaaaaaaacagaggcccgccctaccccactcctgcccctccgtttctttgctgaagtgagtagtgtgatcctggaggccccccggcctggccccgccccgccagccgcccccgttagcgtcataaagtccagcttgtctccctcgatccaaaggccgttttctcgaggggagggcaggcccggcctggaggggtgctgtggagctgtcttgcccaggccctcctgggagggggacaggcattgttgccaggggtgaggccgtgccccaggcctccccgaaaccaaaggggaaggcaggggtggggccgtggctgaagccggctccccaaccaaaatgctgcaccaaagctcgggcgccgcgggcacggctgctgcagtctcttcccagcctggccctggcaaggggcgggtgggcgctgccaggcgggtgcttctcgacgcacttgctcccggaggctgcgccccggcgcctggaacccgaggtgggaggaccggttggtgtcaccctgctcggccctcagccctgccgcgtggggcgcgtgggcacggagcttcctgcctctctgctccgacacccggcaagcagccggagacaaaacgccttaaagcccccggcccagccctgcaggtatattgcaggggcctgggggcggccctggactggcgggcggttccccagtggggtgccctggaggctgccgggcagagtggagcagcttggggccgtgcccagggcggtggctgtgagtctagtttttgctttaccaagtgtacagaaatggcatttacgtttctctgatgctcccttgaagccatagaatttaggggctttttt

SEQ ID NO: 4719 - DNA, 1579 bp, Homo sapiens
  source 1..1579: mol_type = unassigned DNA
agtacatcgaccccgagaccaagaagcacatcccgtaccgcgagcacaagagcctgacgggcacggcgcgctacatgagcatcaacacgcacctgggcaaggagcagagccgccgcgacgacctggaggcgctgggccacatgttcatgtacttcctgcgcggcagcctcccctggcaggggctcaaggccgacacgctcaaggagcggtaccagaagatcggggacaccaaacgcgccacgcccatcgaggtgctctgcgagaacttcccagaggagatggccacgtacctgcgctatgtgcggcgcctggacttcttcgagaagcccgactatgactacctgcggaagctcttcaccgacctcttcgaccgcagtggcttcgtgttcgactatgagtacgactgggccgggaagcccctgccgacccccatcggcaccgtccacaccgacctgccctcccagcctcagctccgggacaaaacccagccccctgaatcttctccgtgcagccccttggggcgcgaccttgtgcgaggccctcggggcccacccacagcggcccagggccagaccctggctggaagccagaacgcagactgcaggggccgcgcctggctcaggcggccccacccccgggacgtggggtcacttccttcatgtaagactttggccgaaatttctacacctgtgtctagtcctcccctccaagagcattaactatttaaaacaaggaaaagaggaaaaaaaaaacagaggcccgccctaccccactcctgcccctccgtttctttgctgaagtgagtagtgtgatcctggaggccccccggcctggccccgccccgccagccgcccccgttagcgtcataaagtccagcttgtctccctcgatccaaaggccgttttctcgaggggagggcaggcccggcctggaggggtgctgtggagctgtcttgcccaggccctcctgggagggggacaggcattgttgccaggggtgaggccgtgccccaggcctccccgaaaccaaaggggaaggcaggggtggggccgtggctgaagccggctccccaaccaaaatgctgcaccaaagctcgggcgccgcgggcacggctgctgcagtctcttcccagcctggccctggcaaggggcgggtgggcgctgccaggcgggtgcttctcgacgcacttgctcccggaggctgcgccccggcgcctggaacccgaggtgggaggaccggttggtgtcaccctgctcggccctcagccctgccgcgtggggcgcgtgggcacggagcttcctgcctctctgctccgacacccggcaagcagccggagacaaaacgccttaaagcccccggcccagccctgcaggtatattgcaggggcctgggggcggccctggactggcgggcggttccccagtggggtgccctggaggctgccgggcagagtggagcagcttggggccgtgcccagggcggtggctgtgagtctagtttttgctttaccaagtgtacagaaatggcatttacgtttctctgatgctcccttgaagccatagaatttaggggctttttt

SEQ ID NO: 4720 - DNA, 4366 bp, Homo sapiens
  source 1..4366: mol_type = unassigned DNA
actcggctgttttcgctgatgcgggcagcttgggggccgccgccgctaaacagacgctttcctttttaattttttttccatgtgttcacttccgggtccggcgtcgatccggatgcccgaggcagaaggatgtttgacctccggataagcgaggcgctgctgtgcattcattccgggctgcatcggtggcgacagcagaggctcgggcggcgactctccggccagcggcggcggtaggaggcaccagcggcagtgcagggaccgaatccgagcagcgctgcgttacctctctctctcgctccttcccccctacctcgctcgctcgctcgctcgctccctgcgtggctcgctttcctcctccggccgccggcgggtgtgatgtgccgccgccgctgcccccgccggcgctgacggactgggggcgccgcccgcgcccgggaccgacccctctgctcgcggccgcgcctttgagctctctatcaatatcagctcacatcattgaaaagataattttgaagacatgttttgctgaaaagacactaagaaaaattttacgaatgggatgaacatgctccagttaattgactacctactgcaatttgaatgttaacattacccatctggtacagttacctagtgatgtacctattttcacaataccctgtttcagtgtgcttgtcttgattaaagaattcaaagtggagtaccgcaaacttgatatggaaaataaaaagaaagacaaggacaaatcagatgatagaatggcacgacctagtggtcgatcgggacacaacactcgaggaactgggtcttcatcgtctggagttttaatggttggacctaactttagagttggaaaaaaaattggatgtggcaattttggagaattacgattagggaaaaatttatacacaaatgaatatgtggcaattaagttggagcccatgaaatcaagagcaccacagctacatttggaatacagattctataagcagttaggatctggagatggtatacctcaagtttactatttcggcccttgtggtaaatacaatgctatggtgctggaactgctgggacctagtttggaagacttgtttgacttgtgtgacagaacattttctcttaaaacagttctcatgatagctatacaactgatttctcgcatggaatatgtccattcaaagaacttgatatacagagatgtaaaacctgagaacttcttaataggacgaccaggaaacaaaacccagcaagttattcacattatagattttggtttggcaaaggaatatattgatccggagacaaagaaacacataccatacagagaacacaagagccttacaggaacagctagatatatgagcataaacacacatttaggaaaagaacaaagtagaagagacgatttagaagctttaggtcatatgttcatgtattttctgagaggcagtcttccttggcaaggcttaaaggctgacacattaaaggagaggtatcagaaaattggagatacaaaacgggctacaccaatagaagtgttatgtgaaaattttccagaaatggcaacatatcttcgttatgtaagaaggctagatttttttgaaaaaccagactatgactacttaagaaagctttttactgacttgtttgatcgaaaaggatatatgtttgattatgaatatgactggattggtaaacagttgcctactccagtgggtgcagttcagcaagatcctgctctgtcatcaaacagagaagcacatcaacacagagataagatgcaacaatccaaaaaccaggttgtaagttctacaaatggagagttaaacacagatgaccccaccgcaggacgttcaaatgcacccatcacagcccctactgaagtagaagtgatggatgaaaccaactgccagaaagtgttgaacatgtggtgctgctgttttttcaaacgaaggaaaaggaaaaccatacagcgccacaaatgactctggacacagacagatcctggggagttacttacatgttcatctgctgtcttgtgattaaaatcatctctgtagtgaccacgtatattttcaaggactcactcttagaaacaaaaatgtcatactttcatacttcattttgtggttgtcttacattctttttctttttttttttttctctaatttaacctttatggaagctttaaagttttgtcaaaacatgagtgctttgcccatcagtgaatggaatggaccaatgaggtggtatcaatgaatatagttccatagaacattttccagaagttcttctgttgtagaaagcagtacagtatcttaagtgtcaaccagttatatacctaatctggttttttataacttctgtaagagcataatcaaacaggaattttcttttctcagtggataatacaacagagaaaacagagttgcccaaatatttaaaagaagttattccttgagaagttcatattttgtgacatctgcattgatttcagtattactgatggtactgttattcataagtcatattaacattctctccgtgaaatcatggtacagtcactgcccagaggtactgaggaaaaagcaatatgggttcggcagatggtggtggtaaaatgaatcttaaggagtgtggtaaatatgtgctccgcttttgttgcatcactatgtgaagtactgtgttgcagaagtggcaaaagcgcttatttttaaaaatgcaaaatatttgtacaatgtaactttatgcttccaaataataatgtatgttagacagcaagaaatgaatactttaaaaagtgatgtatgttggagttataaagaaatacactaaggagaggtagtaaatgtgaaccttgttgcagtgtataaggtggaagcctaaagaaatctcaccgaaacttactgctgaatgattacattctcccttaagcagaaaactttggatgtgccatgcaatggtgtctgtgtaattattttgctctttgattaaaaaaaagacccccagcaataaaaagtgggtcactctatgccctctgtgcacattagtctcttgtattcaactttgctgattctctggaattttcctactctttagcataattttgatgattgaaaaatattttggaaaggatgggtcaggtgctttgcctccatagtcttttgaagtgcctgcatatgaacaacaacaacaacaacaaaaaattctgtaaaaaaggaagcccattccacttttcaagtatgctttgttttaagccataaagacacacatgtagttttgtcacattctactagccaaaattttcaagaagggttaaaacaaagactggctagaaagataattattttgaataaatctcatattcatctttcatttatataattgttacttattcctcccatgcagtctcttcgttgtctttaagtgtgtgcctccaggcatgcttatttatttttattgtctcaaggtaacatttaagatgtatattaaagtaaagctacatttttttacttcattattgcatttacagggatttaattgtactttgtaatttatttttcttattagccaaaagtttaatgcatttttttttgatgaattaggcacccacatgaacaccacaaatcaggacattgtttatcattgttgctatgaatcctatgaatgatcttttttttattttaaagacctacacttaacctacaaaacatttgctgtataatttggtcaacagtttctatctatctgtatactgtcatgatgtcttaaactgcaggagttacatactgagtttatatttttatttgctttgagcaaggtagataaacattttggccattataatgtgaaaccacttcttctttctttacagtatttgaccaaacttgtgtgtctatgatatttgtaaatacatgcgaatatctgtatttcttatcataagcctatttagttttattctcagtagggttttttggattgtacagtgtttatatgatctgaactccttatacataagaaggtgtgtatattaatccaattatggacttaaaatattttaaaagtataaatacccttatttgctgcaaagaccagtgtgtaggcatttgctttttagcaatatttttaagtgctccattttaatgccgaggaataagtcttttggcaacacaaactggtcaataataggtaatgcaggtatgttcaggttaagccaacaatgttttgcatttttatgcttattttctgtcaacactaatgaagtcaacattgcctgaatgtctgaataatgaaacacatccctgtttaaaagtatgtaactgaaaaagaaataaaaaaaaataaaagtagtttttttaaa

SEQ ID NO: 4721 - DNA, 4047 bp, Homo sapiens
  source 1..4047: mol_type = unassigned DNA
gaattcaaagtggagtaccgcaaacttgatatggaaaataaaaagaaagacaaggacaaatcagatgatagaatggcacgacctagtggtcgatcgggacacaacactcgaggaactgggtcttcatcgtctggagttttaatggttggacctaactttagagttggaaaaaaaattggatgtggcaattttggagaattacgattagggaaaaatttatacacaaatgaatatgtggcaattaagttggagcccatgaaatcaagagcaccacagctacatttggaatacagattctataagcagttaggatctggagatggtatacctcaagtttactatttcggcccttgtggtaaatacaatgctatggtgctggaactgctgggacctagtttggaagacttgtttgacttgtgtgacagaacattttctcttaaaacagttctcatgatagctatacaactgatttctcgcatggaatatgtccattcaaagaacttgatatacagagatgtaaaacctgagaacttcttaataggacgaccaggaaacaaaacccagcaagttattcacattatagattttggtttggcaaaggaatatattgatccggagacaaagaaacacataccatacagagaacacaagagccttacaggaacagctagatatatgagcataaacacacatttaggaaaagaacaaagtagaagagacgatttagaagctttaggtcatatgttcatgtattttctgagaggcagtcttccttggcaaggcttaaaggctgacacattaaaggagaggtatcagaaaattggagatacaaaacgggctacaccaatagaagtgttatgtgaaaattttccagaaatggcaacatatcttcgttatgtaagaaggctagatttttttgaaaaaccagactatgactacttaagaaagctttttactgacttgtttgatcgaaaaggatatatgtttgattatgaatatgactggattggtaaacagttgcctactccagtgggtgcagttcagcaagatcctgctctgtcatcaaacagagaagcacatcaacacagagataagatgcaacaatccaaaaaccagtcggcagaccacagggcagcttgggactcccagcaggcaaatccccaccatttgagagctcaccttgcagcagacagacatggtggctcggtacaggttgtaagttctacaaatggagagttaaacacagatgaccccaccgcaggacgttcaaatgcacccatcacagcccctactgaagtagaagtgatggatgaaaccaactgccagaaagtgttgaacatgtggtgctgctgttttttcaaacgaaggaaaaggaaaaccatacagcgccacaaatgactctggacacagacagatcctggggagttacttacatgttcatctgctgtcttgtgattaaaatcatctctgtagtgaccacgtatattttcaaggactcactcttagaaacaaaaatgtcatactttcatacttcattttgtggttgtcttacattctttttctttttttttttttctctaatttaacctttatggaagctttaaagttttgtcaaaacatgagtgctttgcccatcagtgaatggaatggaccaatgaggtggtatcaatgaatatagttccatagaacattttccagaagttcttctgttgtagaaagcagtacagtatcttaagtgtcaaccagttatatacctaatctggttttttataacttctgtaagagcataatcaaacaggaattttcttttctcagtggataatacaacagagaaaacagagttgcccaaatatttaaaagaagttattccttgagaagttcatattttgtgacatctgcattgatttcagtattactgatggtactgttattcataagtcatattaacattctctccgtgaaatcatggtacagtcactgcccagaggtactgaggaaaaagcaatatgggttcggcagatggtggtggtaaaatgaatcttaaggagtgtggtaaatatgtgctccgcttttgttgcatcactatgtgaagtactgtgttgcagaagtggcaaaagcgcttatttttaaaaatgcaaaatatttgtacaatgtaactttatgcttccaaataataatgtatgttagacagcaagaaatgaatactttaaaaagtgatgtatgttggagttataaagaaatacactaaggagaggtagtaaatgtgaaccttgttgcagtgtataaggtggaagcctaaagaaatctcaccgaaacttactgctgaatgattacattctcccttaagcagaaaactttggatgtgccatgcaatggtgtctgtgtaattattttgctctttgattaaaaaaaagacccccagcaataaaaagtgggtcactctatgccctctgtgcacattagtctcttgtattcaactttgctgattctctggaattttcctactctttagcataattttgatgattgaaaaatattttggaaaggatgggtcaggtgctttgcctccatagtcttttgaagtgcctgcatatgaacaacaacaacaacaacaaaaaattctgtaaaaaaggaagcccattccacttttcaagtatgctttgttttaagccataaagacacacatgtagttttgtcacattctactagccaaaattttcaagaagggttaaaacaaagactggctagaaagataattattttgaataaatctcatattcatctttcatttatataattgttacttattcctcccatgcagtctcttcgttgtctttaagtgtgtgcctccaggcatgcttatttatttttattgtctcaaggtaacatttaagatgtatattaaagtaaagctacatttttttacttcattattgcatttacagggatttaattgtactttgtaatttatttttcttattagccaaaagtttaatgcatttttttttgatgaattaggcacccacatgaacaccacaaatcaggacattgtttatcattgttgctatgaatcctatgaatgatcttttttttattttaaagacctacacttaacctacaaaacatttgctgtataatttggtcaacagtttctatctatctgtatactgtcatgatgtcttaaactgcaggagttacatactgagtttatatttttatttgctttgagcaaggtagataaacattttggccattataatgtgaaaccacttcttctttctttacagtatttgaccaaacttgtgtgtctatgatatttgtaaatacatgcgaatatctgtatttcttatcataagcctatttagttttattctcagtagggttttttggattgtacagtgtttatatgatctgaactccttatacataagaaggtgtgtatattaatccaattatggacttaaaatattttaaaagtataaatacccttatttgctgcaaagaccagtgtgtaggcatttgctttttagcaatatttttaagtgctccattttaatgccgaggaataagtcttttggcaacacaaactggtcaataataggtaatgcaggtatgttcaggttaagccaacaatgttttgcatttttatgcttattttctgtcaacactaatgaagtcaacattgcctgaatgtctgaataatgaaacacatccctgtttaaaagtatgtaactgaaaaagaaataaaaaaaaataaaagtagtttttttaaacttgctctttcccatttcctctaaagatgggtaaaataatgtcactccctaatttaagataggaattataaaaatttggtttatttagtctgttatatatgagaagcagagctaaaggaatatgcttttgttattttatgttttgttttgctttcttgaaatccagtggtaaaaagcacacactaggaaggatctaagctttctttaatataaaaaaaattatacttctctgaactgtttaatagagcaataattaaatacatcttctgataaa

SEQ ID NO: 4722 - DNA, 2424 bp, Homo sapiens
  source 1..2424: mol_type = unassigned DNA
gaattcaaagtggagtaccgcaaacttgatatggaaaataaaaagaaagacaaggacaaatcagatgatagaatggcacgacctagtggtcgatcgggacacaacactcgaggaactgggtcttcatcgtctggagttttaatggttggacctaactttagagttggaaaaaaaattggatgtggcaattttggagaattacgattagggaaaaatttatacacaaatgaatatgtggcaattaagttggagcccatgaaatcaagagcaccacagctacatttggaatacagattctataagcagttaggatctggagatggtatacctcaagtttactatttcggcccttgtggtaaatacaatgctatggtgctggaactgctgggacctagtttggaagacttgtttgacttgtgtgacagaacattttctcttaaaacagttctcatgatagctatacaactgatttctcgcatggaatatgtccattcaaagaacttgatatacagagatgtaaaacctgagaacttcttaataggacgaccaggaaacaaaacccagcaagttattcacattatagattttggtttggcaaaggaatatattgatccggagacaaagaaacacataccatacagagaacacaagagccttacaggaacagctagatatatgagcataaacacacatttaggaaaagaacaaagtagaagagacgatttagaagctttaggtcatatgttcatgtattttctgagaggcagtcttccttggcaaggcttaaaggctgacacattaaaggagaggtatcagaaaattggagatacaaaacgggctacaccaatagaagtgttatgtgaaaattttccagaaatggcaacatatcttcgttatgtaagaaggctagatttttttgaaaaaccagactatgactacttaagaaagctttttactgacttgtttgatcgaaaaggatatatgtttgattatgaatatgactggattggtaaacagttgcctactccagtgggtgcagttcagcaagatcctgctctgtcatcaaacagagaagcacatcaacacagagataagatgcaacaatccaaaaaccagtcggcagaccacagggcagcttgggactcccagcaggcaaatccccaccatttgagagctcaccttgcagcagacagacatggtggctcggtacaggttgtaagttctacaaatggagagttaaacacagatgaccccaccgcaggacgttcaaatgcacccatcacagcccctactgaagtagaagtgatggatgaaaccaagtgctgctgttttttcaaacgaaggaaaaggaaaaccatacagcgccacaaatgactctggacacagacagatcctggggagttacttacatgttcatctgctgtcttgtgattaaaatcatctctgtagtgaccacgtatattttcaaggactcactcttagaaacaaaaatgtcatactttcatacttcattttgtggttgtcttacattctttttctttttttttttttctctaatttaacctttatggaagctttaaagttttgtcaaaacatgagtgctttgcccatcagtgaatggaatggaccaatgaggtggtatcaatgaatatagttccatagaacattttccagaagttcttctgttgtagaaagcagtacagtatcttaagtgtcaaccagttatatacctaatctggttttttataacttctgtaagagcataatcaaacaggaattttcttttctcagtggataatacaacagagaaaacagagttgcccaaatatttaaaagaagttattccttgagaagttcatattttgtgacatctgcattgatttcagtattactgatggtactgttattcataagtcatattaacattctctccgtgaaatcatggtacagtcactgcccagaggtactgaggaaaaagcaatatgggttcggcagatggtggtggtaaaatgaatcttaaggagtgtggtaaatatgtgctccgcttttgttgcatcactatgtgaagtactgtgttgcagaagtggcaaaagcgcttatttttaaaaatgcaaaatatttgtacaatgtaactttatgcttccaaataataatgtatgttagacagcaagaaatgaatactttaaaaagtgatgtatgttggagttataaagaaatacactaaggagaggtagtaaatgtgaaccttgttgcagtgtataaggtggaagcctaaagaaatctcaccgaaacttactgctgaatgattacattctcccttaagcagaaaactttggatgtgccatgcaatggtgtctgtgtaattattttgctctttgattaaaaaaaagacccccagcaataaaaagtgggtcactctatgcc

SEQ ID NO: 4723 - DNA, 4438 bp, Homo sapiens
  source 1..4438: mol_type = unassigned DNA
actcggctgttttcgctgatgcgggcagcttgggggccgccgccgctaaacagacgctttcctttttaattttttttccatgtgttcacttccgggtccggcgtcgatccggatgcccgaggcagaaggatgtttgacctccggataagcgaggcgctgctgtgcattcattccgggctgcatcggtggcgacagcagaggctcgggcggcgactctccggccagcggcggcggtaggaggcaccagcggcagtgcagggaccgaatccgagcagcgctgcgttacctctctctctcgctccttcccccctacctcgctcgctcgctcgctcgctccctgcgtggctcgctttcctcctccggccgccggcgggtgtgatgtgccgccgccgctgcccccgccggcgctgacggactgggggcgccgcccgcgcccgggaccgacccctctgctcgcggccgcgcctttgagctctctatcaatatcagctcacatcattgaaaagataattttgaagacatgttttgctgaaaagacactaagaaaaattttacgaatgggatgaacatgctccagttaattgactacctactgcaatttgaatgttaacattacccatctggtacagttacctagtgatgtacctattttcacaataccctgtttcagtgtgcttgtcttgattaaagaattcaaagtggagtaccgcaaacttgatatggaaaataaaaagaaagacaaggacaaatcagatgatagaatggcacgacctagtggtcgatcgggacacaacactcgaggaactgggtcttcatcgtctggagttttaatggttggacctaactttagagttggaaaaaaaattggatgtggcaattttggagaattacgattagggaaaaatttatacacaaatgaatatgtggcaattaagttggagcccatgaaatcaagagcaccacagctacatttggaatacagattctataagcagttaggatctggagatggtatacctcaagtttactatttcggcccttgtggtaaatacaatgctatggtgctggaactgctgggacctagtttggaagacttgtttgacttgtgtgacagaacattttctcttaaaacagttctcatgatagctatacaactgatttctcgcatggaatatgtccattcaaagaacttgatatacagagatgtaaaacctgagaacttcttaataggacgaccaggaaacaaaacccagcaagttattcacattatagattttggtttggcaaaggaatatattgatccggagacaaagaaacacataccatacagagaacacaagagccttacaggaacagctagatatatgagcataaacacacatttaggaaaagaacaaagtagaagagacgatttagaagctttaggtcatatgttcatgtattttctgagaggcagtcttccttggcaaggcttaaaggctgacacattaaaggagaggtatcagaaaattggagatacaaaacgggctacaccaatagaagtgttatgtgaaaattttccagaaatggcaacatatcttcgttatgtaagaaggctagatttttttgaaaaaccagactatgactacttaagaaagctttttactgacttgtttgatcgaaaaggatatatgtttgattatgaatatgactggattggtaaacagttgcctactccagtgggtgcagttcagcaagatcctgctctgtcatcaaacagagaagcacatcaacacagagataagatgcaacaatccaaaaaccagtcggcagaccacagggcagcttgggactcccagcaggcaaatccccaccatttgagagctcaccttgcagcagacagacatggtggctcggtacaggttgtaagttctacaaatggagagttaaacacagatgaccccaccgcaggacgttcaaatgcacccatcacagcccctactgaagtagaagtgatggatgaaaccaagtgctgctgttttttcaaacgaaggaaaaggaaaaccatacagcgccacaaatgactctggacacagacagatcctggggagttacttacatgttcatctgctgtcttgtgattaaaatcatctctgtagtgaccacgtatattttcaaggactcactcttagaaacaaaaatgtcatactttcatacttcattttgtggttgtcttacattctttttctttttttttttttctctaatttaacctttatggaagctttaaagttttgtcaaaacatgagtgctttgcccatcagtgaatggaatggaccaatgaggtggtatcaatgaatatagttccatagaacattttccagaagttcttctgttgtagaaagcagtacagtatcttaagtgtcaaccagttatatacctaatctggttttttataacttctgtaagagcataatcaaacaggaattttcttttctcagtggataatacaacagagaaaacagagttgcccaaatatttaaaagaagttattccttgagaagttcatattttgtgacatctgcattgatttcagtattactgatggtactgttattcataagtcatattaacattctctccgtgaaatcatggtacagtcactgcccagaggtactgaggaaaaagcaatatgggttcggcagatggtggtggtaaaatgaatcttaaggagtgtggtaaatatgtgctccgcttttgttgcatcactatgtgaagtactgtgttgcagaagtggcaaaagcgcttatttttaaaaatgcaaaatatttgtacaatgtaactttatgcttccaaataataatgtatgttagacagcaagaaatgaatactttaaaaagtgatgtatgttggagttataaagaaatacactaaggagaggtagtaaatgtgaaccttgttgcagtgtataaggtggaagcctaaagaaatctcaccgaaacttactgctgaatgattacattctcccttaagcagaaaactttggatgtgccatgcaatggtgtctgtgtaattattttgctctttgattaaaaaaaagacccccagcaataaaaagtgggtcactctatgccctctgtgcacattagtctcttgtattcaactttgctgattctctggaattttcctactctttagcataattttgatgattgaaaaatattttggaaaggatgggtcaggtgctttgcctccatagtcttttgaagtgcctgcatatgaacaacaacaacaacaacaaaaaattctgtaaaaaaggaagcccattccacttttcaagtatgctttgttttaagccataaagacacacatgtagttttgtcacattctactagccaaaattttcaagaagggttaaaacaaagactggctagaaagataattattttgaataaatctcatattcatctttcatttatataattgttacttattcctcccatgcagtctcttcgttgtctttaagtgtgtgcctccaggcatgcttatttatttttattgtctcaaggtaacatttaagatgtatattaaagtaaagctacatttttttacttcattattgcatttacagggatttaattgtactttgtaatttatttttcttattagccaaaagtttaatgcatttttttttgatgaattaggcacccacatgaacaccacaaatcaggacattgtttatcattgttgctatgaatcctatgaatgatcttttttttattttaaagacctacacttaacctacaaaacatttgctgtataatttggtcaacagtttctatctatctgtatactgtcatgatgtcttaaactgcaggagttacatactgagtttatatttttatttgctttgagcaaggtagataaacattttggccattataatgtgaaaccacttcttctttctttacagtatttgaccaaacttgtgtgtctatgatatttgtaaatacatgcgaatatctgtatttcttatcataagcctatttagttttattctcagtagggttttttggattgtacagtgtttatatgatctgaactccttatacataagaaggtgtgtatattaatccaattatggacttaaaatattttaaaagtataaatacccttatttgctgcaaagaccagtgtgtaggcatttgctttttagcaatatttttaagtgctccattttaatgccgaggaataagtcttttggcaacacaaactggtcaataataggtaatgcaggtatgttcaggttaagccaacaatgttttgcatttttatgcttattttctgtcaacactaatgaagtcaacattgcctgaatgtctgaataatgaaacacatccctgtttaaaagtatgtaactgaaaaagaaataaaaaaaaataaaagtagtttttttaaa

SEQ ID NO: 4724 - DNA, 4462 bp, Homo sapiens
  source 1..4462: mol_type = unassigned DNA
actcggctgttttcgctgatgcgggcagcttgggggccgccgccgctaaacagacgctttcctttttaattttttttccatgtgttcacttccgggtccggcgtcgatccggatgcccgaggcagaaggatgtttgacctccggataagcgaggcgctgctgtgcattcattccgggctgcatcggtggcgacagcagaggctcgggcggcgactctccggccagcggcggcggtaggaggcaccagcggcagtgcagggaccgaatccgagcagcgctgcgttacctctctctctcgctccttcccccctacctcgctcgctcgctcgctcgctccctgcgtggctcgctttcctcctccggccgccggcgggtgtgatgtgccgccgccgctgcccccgccggcgctgacggactgggggcgccgcccgcgcccgggaccgacccctctgctcgcggccgcgcctttgagctctctatcaatatcagctcacatcattgaaaagataattttgaagacatgttttgctgaaaagacactaagaaaaattttacgaatgggatgaacatgctccagttaattgactacctactgcaatttgaatgttaacattacccatctggtacagttacctagtgatgtacctattttcacaataccctgtttcagtgtgcttgtcttgattaaagaattcaaagtggagtaccgcaaacttgatatggaaaataaaaagaaagacaaggacaaatcagatgatagaatggcacgacctagtggtcgatcgggacacaacactcgaggaactgggtcttcatcgtctggagttttaatggttggacctaactttagagttggaaaaaaaattggatgtggcaattttggagaattacgattagggaaaaatttatacacaaatgaatatgtggcaattaagttggagcccatgaaatcaagagcaccacagctacatttggaatacagattctataagcagttaggatctggagatggtatacctcaagtttactatttcggcccttgtggtaaatacaatgctatggtgctggaactgctgggacctagtttggaagacttgtttgacttgtgtgacagaacattttctcttaaaacagttctcatgatagctatacaactgatttctcgcatggaatatgtccattcaaagaacttgatatacagagatgtaaaacctgagaacttcttaataggacgaccaggaaacaaaacccagcaagttattcacattatagattttggtttggcaaaggaatatattgatccggagacaaagaaacacataccatacagagaacacaagagccttacaggaacagctagatatatgagcataaacacacatttaggaaaagaacaaagtagaagagacgatttagaagctttaggtcatatgttcatgtattttctgagaggcagtcttccttggcaaggcttaaaggctgacacattaaaggagaggtatcagaaaattggagatacaaaacgggctacaccaatagaagtgttatgtgaaaattttccagaaatggcaacatatcttcgttatgtaagaaggctagatttttttgaaaaaccagactatgactacttaagaaagctttttactgacttgtttgatcgaaaaggatatatgtttgattatgaatatgactggattggtaaacagttgcctactccagtgggtgcagttcagcaagatcctgctctgtcatcaaacagagaagcacatcaacacagagataagatgcaacaatccaaaaaccagtcggcagaccacagggcagcttgggactcccagcaggcaaatccccaccatttgagagctcaccttgcagcagacagacatggtggctcggtacaggttgtaagttctacaaatggagagttaaacacagatgaccccaccgcaggacgttcaaatgcacccatcacagcccctactgaagtagaagtgatggatgaaaccaactgccagaaagtgttgaacatgtggtgctgctgttttttcaaacgaaggaaaaggaaaaccatacagcgccacaaatgactctggacacagacagatcctggggagttacttacatgttcatctgctgtcttgtgattaaaatcatctctgtagtgaccacgtatattttcaaggactcactcttagaaacaaaaatgtcatactttcatacttcattttgtggttgtcttacattctttttctttttttttttttctctaatttaacctttatggaagctttaaagttttgtcaaaacatgagtgctttgcccatcagtgaatggaatggaccaatgaggtggtatcaatgaatatagttccatagaacattttccagaagttcttctgttgtagaaagcagtacagtatcttaagtgtcaaccagttatatacctaatctggttttttataacttctgtaagagcataatcaaacaggaattttcttttctcagtggataatacaacagagaaaacagagttgcccaaatatttaaaagaagttattccttgagaagttcatattttgtgacatctgcattgatttcagtattactgatggtactgttattcataagtcatattaacattctctccgtgaaatcatggtacagtcactgcccagaggtactgaggaaaaagcaatatgggttcggcagatggtggtggtaaaatgaatcttaaggagtgtggtaaatatgtgctccgcttttgttgcatcactatgtgaagtactgtgttgcagaagtggcaaaagcgcttatttttaaaaatgcaaaatatttgtacaatgtaactttatgcttccaaataataatgtatgttagacagcaagaaatgaatactttaaaaagtgatgtatgttggagttataaagaaatacactaaggagaggtagtaaatgtgaaccttgttgcagtgtataaggtggaagcctaaagaaatctcaccgaaacttactgctgaatgattacattctcccttaagcagaaaactttggatgtgccatgcaatggtgtctgtgtaattattttgctctttgattaaaaaaaagacccccagcaataaaaagtgggtcactctatgccctctgtgcacattagtctcttgtattcaactttgctgattctctggaattttcctactctttagcataattttgatgattgaaaaatattttggaaaggatgggtcaggtgctttgcctccatagtcttttgaagtgcctgcatatgaacaacaacaacaacaacaaaaaattctgtaaaaaaggaagcccattccacttttcaagtatgctttgttttaagccataaagacacacatgtagttttgtcacattctactagccaaaattttcaagaagggttaaaacaaagactggctagaaagataattattttgaataaatctcatattcatctttcatttatataattgttacttattcctcccatgcagtctcttcgttgtctttaagtgtgtgcctccaggcatgcttatttatttttattgtctcaaggtaacatttaagatgtatattaaagtaaagctacatttttttacttcattattgcatttacagggatttaattgtactttgtaatttatttttcttattagccaaaagtttaatgcatttttttttgatgaattaggcacccacatgaacaccacaaatcaggacattgtttatcattgttgctatgaatcctatgaatgatcttttttttattttaaagacctacacttaacctacaaaacatttgctgtataatttggtcaacagtttctatctatctgtatactgtcatgatgtcttaaactgcaggagttacatactgagtttatatttttatttgctttgagcaaggtagataaacattttggccattataatgtgaaaccacttcttctttctttacagtatttgaccaaacttgtgtgtctatgatatttgtaaatacatgcgaatatctgtatttcttatcataagcctatttagttttattctcagtagggttttttggattgtacagtgtttatatgatctgaactccttatacataagaaggtgtgtatattaatccaattatggacttaaaatattttaaaagtataaatacccttatttgctgcaaagaccagtgtgtaggcatttgctttttagcaatatttttaagtgctccattttaatgccgaggaataagtcttttggcaacacaaactggtcaataataggtaatgcaggtatgttcaggttaagccaacaatgttttgcatttttatgcttattttctgtcaacactaatgaagtcaacattgcctgaatgtctgaataatgaaacacatccctgtttaaaagtatgtaactgaaaaagaaataaaaaaaaataaaagtagtttttttaaa

SEQ ID NO: 4725 - DNA, 1979 bp, Homo sapiens
  source 1..1979: mol_type = unassigned DNA
ctctctatcaatatcagctcacatcattgaaaagataattttgaagacatgttttgctgaaaagacactaagaaaaattttacgaatgggatgaacatgctccagttaattgactacctactgcaatttgaatgttaacattacccatctggtacagttacctagtgatgtacctattttcacaataccctgtttcagtgtgcttgtcttgattaaagaattcaaagtggagtaccgcaaacttgatatggaaaataaaaagaaagacaaggacaaatcagatgatagaatggcacgacctagtggtcgatcgggacacaacactcgaggaactgggtcttcatcgtctggagttttaatggttggacctaactttagagttggaaaaaaaattggatgtggcaattttggagaattacgattagggaaaaatttatacacaaatgaatatgtggcaattaagttggagcccatgaaatcaagagcaccacagctacatttggaatacagattctataagcagttaggatctggagatggtatacctcaagtttactatttcggcccttgtggtaaatacaatgctatggtgctggaactgctgggacctagtttggaagacttgtttgacttgtgtgacagaacattttctcttaaaacagttctcatgatagctatacaactgatttctcgcatggaatatgtccattcaaagaacttgatatacagagatgtaaaacctgagaacttcttaataggacgaccaggaaacaaaacccagcaagttattcacattatagattttggtttggcaaaggaatatattgatccggagacaaagaaacacataccatacagagaacacaagagccttacaggaacagctagatatatgagcataaacacacatttaggaaaagaacaaagtagaagagacgatttagaagctttaggtcatatgttcatgtattttctgagaggcagtcttccttggcaaggcttaaaggctgacacattaaaggagaggtatcagaaaattggagatacaaaacgggctacaccaatagaagtgttatgtgaaaattttccagaagaaatggcaacatatcttcgttatgtaagaaggctagatttttttgaaaaaccagactatgactacttaagaaagctttttactgacttgtttgatcgaaaaggatatatgtttgattatgaatatgactggattggtaaacagttgcctactccagtgggtgcagttcagcaagatcctgctctgtcatcaaacagagaagcacatcaacacagagataagatgcaacaatccaaaaaccaggttgtaagttctacaaatggagagttaaacacagatgaccccaccgcaggacgttcaaatgcacccatcacagcccctactgaagtagaagtgatggatgaaaccaactgccagaaagtgttgaacatgtggtgctgctgttttttcaaacgaaggaaaaggaaaaccatacagcgccacaaatgactctggacacagacagatcctggggagttacttacatgttcatctgctgtcttgtgattaaaatcatctctgtagtgaccacgtatattttcaaggactcactcttagaaacaaaaatgtcatactttcatacttcattttgtggttgtcttacattctttttctttttttttttttctctaatttaacctttatggaagctttaaagttttgtcaaaacatgagtgctttgcccatcagtgaatggaatggaccaatgaggtggtatcaatgaatatagttccatagaacattttccagaagttcttctgttgtagaaagcagtacagtatcttaagtgtcaaccagttatatacctaatctggttttttataacttctgtaagagcataatcaaacaggaattttcttttctcagtggataatacaacagagaaaacagagttgcccaaatattt

SEQ ID NO: 4726 - DNA, 2580 bp, Homo sapiens
  source 1..2580: mol_type = unassigned DNA
agctctctatcaatatcagctcacatcattgaaaagataattttgaagacatgttttgctgaaaagacactaagaaaaattttacgaatgggatgaacatgctccagttaattgactacctactgcaatttgaatgttaacattacccatctggtacagttacctagtgatgtacctattttcacaataccctgtttcagtgtgcttgtcttgattaaagaattcaaagtggagtaccgcaaacttgatatggaaaataaaaagaaagacaaggacaaatcagatgatagaatggcacgacctagtggtcgatcgggacacaacactcgaggaactgggtcttcatcgtctggagttttaatggttggacctaactttagagttggaaaaaaaattggatgtggcaattttggagaattacgattagggaaaaatttatacacaaatgaatatgtggcaattaagttggagcccatgaaatcaagagcaccacagctacatttggaatacagattctataagcagttaggatctggagatggtatacctcaagtttactatttcggcccttgtggtaaatacaatgctatggtgctggaactgctgggacctagtttggaagacttgtttgacttgtgtgacagaacattttctcttaaaacagttctcatgatagctatacaactgatttctcgcatggaatatgtccattcaaagaacttgatatacagagatgtaaaacctgagaacttcttaataggacgaccaggaaacaaaacccagcaagttattcacattatagattttggtttggcaaaggaatatattgatccggagacaaagaaacacataccatacagagaacacaagagccttacaggaacagctagatatatgagcataaacacacatttaggaaaagaacaaagtagaagagacgatttagaagctttaggtcatatgttcatgtattttctgagaggcagtcttccttggcaaggcttaaaggctgacacattaaaggagaggtatcagaaaattggagatacaaaacgggctacaccaatagaagtgttatgtgaaaattttccagaaatggcaacatatcttcgttatgtaagaaggctagatttttttgaaaaaccagactatgactacttaagaaagctttttactgacttgtttgatcgaaaaggatatatgtttgattatgaatatgactggattggtaaacagttgcctactccagtgggtgcagttcagcaagatcctgctctgtcatcaaacagagaagcacatcaacacagagataagatgcaacaatccaaaaaccaggttgtaagttctacaaatggagagttaaacacagatgaccccaccgcaggacgttcaaatgcacccatcacagcccctactgaagtagaagtgatggatgaaaccaactgccagaaagtgttgaacatgtggtgctgctgttttttcaaacgaaggaaaaggaaaaccatacagcgccacaaatgactctggacacagacagatcctggggagttacttacatgttcatctgctgtcttgtgattaaaatcatctctgtagtgaccacgtatattttcaaggactcactcttagaaacaaaaatgtcatactttcatacttcattttgtggttgtcttacattctttttctttttttttttttctctaatttaacctttatggaagctttaaagttttgtcaaaacatgagtgctttgcccatcagtgaatggaatggaccaatgaggtggtatcaatgaatatagttccatagaacattttccagaagttcttctgttgtagaaagcagtacagtatcttaagtgtcaaccagttatatacctaatctggttttttataacttctgtaagagcataatcaaacaggaattttcttttctcagtggataatacaacagagaaaacagagttgcccaaatatttaaaagaagttattccttgagaagttcatattttgtgacatctgcattgatttcagtattactgatggtactgttattcataagtcatattaacattctctccgtgaaatcatggtacagtcactgcccagaggtactgaggaaaaagcaatatgggttcggcagatggtggtggtaaaatgaatcttaaggagtgtggtaaatatgtgctccgcttttgttgcatcactatgtgaagtactgtgttgcagaagtggcaaaagcgcttatttttaaaaatgcaaaatatttgtacaatgtaactttatgcttccaaataataatgtatgttagacagcaagaaatgaatactttaaaaagtgatgtatgttggagttataaagaaatacactaaggagaggtagtaaatgtgaaccttgttgcagtgtataaggtggaagcctaaagaaatctcaccgaaacttactgctgaatgattacattctcccttaagcagaaaactttggatgtgccatgcaatggtgtctgtgtaattattttgctctttgattaaaaaaaagacccccagcaataaaaagtgggtcactctatgccctctgtgca

SEQ ID NO: 4727 - DNA, 908 bp, Homo sapiens
  source 1..908: mol_type = unassigned DNA
ggaggaagcgaccaggtccggcacgaaggagggagaggtggcctgaggagcggaggggggatgtgtggattccggtgaaagggacctgacaatcgcccccaacccctgacgtgaagatgagcagctcagaggaggtgtcctggatttcctggttctgtgggctccgtggcaatgaattcttctgtgaagtggatgaagactacatccaggacaaatttaatcttactggactcaatgagcaggtccctcactatcgacaagctctagacatgatcttggacctggagcctgatgaagaactggaagacaaccccaaccagagtgacctgattgagcaggcagccgagatgctttatggattgatccacgcccgctacatccttaccaaccgtggcatcgcccagatgttggaaaagtaccagcaaggagactttggttactgtcctcgtgtgtactgtgagaaccagccaatgcttcccattggcctttcagacatcccaggtgaagccatggtgaagctctactgccccaagtgcatggatgtgtacacacccaagtcatcaagacaccatcacacggatggcgcctacttcggcactggtttccctcacatgctcttcatggtgcatcccgagtaccggcccaagagacctgccaaccagtttgtgcccaggctctacggtttcaagatccatccgatggcctaccagctgcagctccaagccgccagcaacttcaagagcccagtcaagacgattcgctgattccctcccccacctgtcctgcagtctttgacttttcctttcttttttgccaccctttcaggaaccctgtatggtttttagtttaaattaaaggagtcgttatcgtggtgggaatatgaaataaagtagaagaaaaggccatga

SEQ ID NO: 4728 - DNA, 936 bp, Homo sapiens
  source 1..936: mol_type = unassigned DNA
tgtggattccggtgaaagggacctgacaatcgcccccaacccgtgagaaaaggaggagcccagttcttgcttgagaatgataaacttggaaacccttgggaaaggcgtgggggtcatgcagagacttgtattgctgacgtgaagatgagcagctcagaggaggtgtcctggatttcctggttctgtgggctccgtggcaatgaattcttctgtgaagtggatgaagactacatccaggacaaatttaatcttactggactcaatgagcaggtccctcactatcgacaagctctagacatgatcttggacctggagcctgatgaagaactggaagacaaccccaaccagagtgacctgattgagcaggcagccgagatgctttatggattgatccacgcccgctacatccttaccaaccgtggcatcgcccagatgttggaaaagtaccagcaaggagactttggttactgtcctcgtgtgtactgtgagaaccagccaatgcttcccattggcctttcagacatcccaggtgaagccatggtgaagctctactgccccaagtgcatggatgtgtacacacccaagtcatcaagacaccatcacacggatggcgcctacttcggcactggtttccctcacatgctcttcatggtgcatcccgagtaccggcccaagagacctgccaaccagtttgtgcccaggctctacggtttcaagatccatccgatggcctaccagctgcagctccaagccgccagcaacttcaagagcccagtcaagacgattcgctgattccctcccccacctgtcctgcagtctttgacttttcctttcttttttgccaccctttcaggaaccctgtatggtttttagtttaaattaaaggagtcgttatcgtggtgggaatatgaaataaagtagaagaaaaggccatga

SEQ ID NO: 4729 - DNA, 948 bp, Homo sapiens
  source 1..948: mol_type = unassigned DNA
cttccccaccctccctaatttccactccccccaccccacttcgcctgccgcggtcgggtccgcggcctgcgctgtagcggtcgccgccgttccctggaagtagcaacttccctaccccaccccagtcctggtccccgtccagccgctgacgtgaagatgagcagctcagaggaggtgtcctggatttcctggttctgtgggctccgtggcaatgaattcttctgtgaagtggatgaagactacatccaggacaaatttaatcttactggactcaatgagcaggtccctcactatcgacaagctctagacatgatcttggacctggagcctgatgaagaactggaagacaaccccaaccagagtgacctgattgagcaggcagccgagatgctttatggattgatccacgcccgctacatccttaccaaccgtggcatcgcccagatgttggaaaagtaccagcaaggagactttggttactgtcctcgtgtgtactgtgagaaccagccaatgcttcccattggcctttcagacatcccaggtgaagccatggtgaagctctactgccccaagtgcatggatgtgtacacacccaagtcatcaagacaccatcacacggatggcgcctacttcggcactggtttccctcacatgctcttcatggtgcatcccgagtaccggcccaagagacctgccaaccagtttgtgcccaggctctacggtttcaagatccatccgatggcctaccagctgcagctccaagccgccagcaacttcaagagcccagtcaagacgattcgctgattccctcccccacctgtcctgcagtctttgacttttcctttcttttttgccaccctttcaggaaccctgtatggtttttagtttaaattaaaggagtcgttatcgtggtgggaatatgaaataaagtagaagaaaaggccatga

SEQ ID NO: 4730 - DNA, 908 bp, Homo sapiens
  source 1..908: mol_type = unassigned DNA
ggaggaagcgaccaggtccggcacgaaggagggagaggtggcctgaggagcggaggggggatgtgtggattccggtgaaagggacctgacaatcgcccccaacccctgacgtgaagatgagcagctcagaggaggtgtcctggatttcctggttctgtgggctccgtggcaatgaattcttctgtgaagtggatgaagactacatccaggacaaatttaatcttactggactcaatgagcaggtccctcactatcgacaagctctagacatgatcttggacctggagcctgatgaagaactggaagacaaccccaaccagagtgacctgattgagcaggcagccgagatgctttatggattgatccacgcccgctacatccttaccaaccgtggcatcgcccagatgttggaaaagtaccagcaaggagactttggttactgtcctcgtgtgtactgtgagaaccagccaatgcttcccattggcctttcagacatcccaggtgaagccatggtgaagctctactgccccaagtgcatggatgtgtacacacccaagtcatcaagacaccatcacacggatggcgcctacttcggcactggtttccctcacatgctcttcatggtgcatcccgagtaccggcccaagagacctgccaaccagtttgtgcccaggctctacggtttcaagatccatccgatggcctaccagctgcagctccaagccgccagcaacttcaagagcccagtcaagacgattcgctgattccctcccccacctgtcctgcagtctttgacttttcctttcttttttgccaccctttcaggaaccctgtatggtttttagtttaaattaaaggagtcgttattgtggtgggaatatgaaataaagtagaagaaaaggccatga

SEQ ID NO: 4731 - DNA, 2487 bp, Homo sapiens
  source 1..2487: mol_type = unassigned DNA
cttcgcctgccgcggtcgggtccgcggcctgcgctgtagcggtcgccgccgttccctggaagtagcaacttccctaccccaccccagtcctggtccccgtccagccgctgacgtgaagatgagcagctcagaggaggtgtcctggatttcctggttctgtgggctccgtggcaatgaattcttctgtgaagtggatgaagactacatccaggacaaatttaatcttactggactcaatgagcaggtccctcactatcgacaagctctagacatgatcttggacctggagcctgatgaagaactggaagacaaccccaaccagagtgacctgattgagcaggcagccgagatgctttatggattgatccacgcccgctacatccttaccaaccgtggcatcgcccagatgttggaaaagtaccagcaaggagactttggttactgtcctcgtgtgtactgtgagaaccagccaatgcttcccattggcctttcagacatcccaggtgaagccatggtgaagctctactgccccaagtgcatggatgtgtacacacccaagtcatcaagacaccatcacacggatggcgcctacttcggcactggtttccctcacatgctcttcatggtgcatcccgagtaccggcccaagagacctgccaaccagtttgtgcccagttcctgttcccgacatccggacgtgccacttctgcctcgtagaagacccttctgtaggatgcatttcaggctcagagaagtgtaccatcagcagctcatccctgtgcatggtgatcaccatctattatgatgtcaaggttcgcttcatcgttcgaggctgtggacagtacatttcctaccgctgccaagaaaaacgcaacacctactttgcagagtactggtatcaggcccagtgctgtcagtacgattattgcaactcctggtcaagcccccaactccagagctctctgccggagccccatgacaggcccctggccctgcctctgtctgactcccagattcagtggttctaccaggccctgaacctctccctgcccctccccaatttccatgctgggacggagcctgatggcctggaccccatggtcacactgtccctgaacctgggcttgtcttttgctgagctgtgccgcatgtacttgttcctcaatagttcaggacttttggttcttccccaggctggactcttgacacctcacccttcctgaattccacagtgcaaatatctttctgtaacaccctcagcatcctgcactgccctctctgaaaacacccacattctttggtcactgtgatttcttaggcctccgtctgttgtaccactagcatctatatgacttttgtgtaattttctctcttgaactctggtgctgtttttttgtttgtttgagacaaagtctcgctctgtcacccagggtggagtgcagtggcatgatctctgctcactacaacctccacctcccgggttccagcgattctcctgcctcagcctcccgagtagctgggactacaggcgtgcaccaccacgcctggctaattttttgtatttttagtagagacggggtttcaccatgttggtcaggctggtctcgaactcctgacctcgtaatctgccctcctcgacctcccaaagtgccgggattacaggtgtgagccactgtgcctggctgagctctggtgctgttcttccccctagaaaagaatctctagtgtggattctgcccagacaggctgacctgagaaaggcacagtggttcctccattccttccccatcatctgagtgttccagtatcccccatccctctcaatccagtcacctgcctattgacatctagctctgtttcccctgtcttgtccatgtctctaagacccagtaccagactgaactagcagcaagaaggacgaggaggccgggcatggtggctcacgccggtaatcccagcactttgggaggccgaggtgggcggatcacttgagattgggagtttgagaccagcctggccaacatggtaaaacccgctctctattaaaaatagaaaaatcagctgggtgtggtggcacacctctgtaatcccagctactcaggaggctgagacaggagaatcacttgaacccgggaggcagaggttgcagtgagccgagatcgcgccactgcactccagcctgggtgacacagtgagactccgtctccaaaaaaaaggatgaggaatagaattctgtgcagatgtcctgacttggcaattttgtgtccctgcctcactgtctccaccaacccccgcctgtcctagtgttgttctgcctcctgtcctctcttgctctcttgtcagtctctggcttcctcggccccatttcacttcactgagtcctgacacccatctccctaggggcctgtgagaggagagggaagggtctgttctgctcagctccatgtcccccattttcctccacaataaactgggactgggctaaaa

SEQ ID NO: 4732 - DNA, 948 bp, Homo sapiens
  source 1..948: mol_type = unassigned DNA
cttccccaccctccctaatttccactccccccaccccacttcgcctgccgcggtcgggtccgcggcctgcgctgtagcggtcgccgccgttccctggaagtagcaacttccctaccccaccccagtcctggtccccgtccagccgctgacgtgaagatgagcagctcagaggaggtgtcctggatttcctggttctgtgggctccgtggcaatgaattcttctgtgaagtggatgaagactacatccaggacaaatttaatcttactggactcaatgagcaggtccctcactatcgacaagctctagacatgatcttggacctggagcctgatgaagaactggaagacaaccccaaccagagtgacctgattgagcaggcagccgagatgctttatggattgatccacgcccgctacatccttaccaaccgtggcatcgcccagatgttggaaaagtaccagcaaggagactttggttactgtcctcgtgtgtactgtgagaaccagccaatgcttcccattggcctttcagacatcccaggtgaagccatggtgaagctctactgccccaagtgcatggatgtgtacacacccaagtcatcaagacaccatcacacggatggcgcctacttcggcactggtttccctcacatgctcttcatggtgcatcccgagtaccggcccaagagacctgccaaccagtttgtgcccaggctctacggtttcaagatccatccgatggcctaccagctgcagctccaagccgccagcaacttcaagagcccagtcaagacgattcgctgattccctcccccacctgtcctgcagtctttgacttttcctttcttttttgccaccctttcaggaaccctgtatggtttttagtttaaattaaaggagtcgttattgtggtgggaatatgaaataaagtagaagaaaaggccatga

SEQ ID NO: 4733 - DNA, 936 bp, Homo sapiens
  source 1..936: mol_type = unassigned DNA
tgtggattccggtgaaagggacctgacaatcgcccccaacccgtgagaaaaggaggagcccggttcttgcttgagaatgataaacttggaaacccttgggaaaggcgtgggggtcatgcagagacttgtattgctgacgtgaagatgagcagctcagaggaggtgtcctggatttcctggttctgtgggctccgtggcaatgaattcttctgtgaagtggatgaagactacatccaggacaaatttaatcttactggactcaatgagcaggtccctcactatcgacaagctctagacatgatcttggacctggagcctgatgaagaactggaagacaaccccaaccagagtgacctgattgagcaggcagccgagatgctttatggattgatccacgcccgctacatccttaccaaccgtggcatcgcccagatgttggaaaagtaccagcaaggagactttggttactgtcctcgtgtgtactgtgagaaccagccaatgcttcccattggcctttcagacatcccaggtgaagccatggtgaagctctactgccccaagtgcatggatgtgtacacacccaagtcatcaagacaccatcacacggatggcgcctacttcggcactggtttccctcacatgctcttcatggtgcatcccgagtaccggcccaagagacctgccaaccagtttgtgcccaggctctacggtttcaagatccatccgatggcctaccagctgcagctccaagccgccagcaacttcaagagcccagtcaagacgattcgctgattccctcccccacctgtcctgcagtctttgacttttcctttcttttttgccaccctttcaggaaccctgtatggtttttagtttaaattaaaggagtcgttattgtggtgggaatatgaaataaagtagaagaaaaggccatga

SEQ ID NO: 4734 - DNA, 1061 bp, Homo sapiens
  source 1..1061: mol_type = unassigned DNA
ccccacaatgcccttcgccttcctcaacgtggcccccgctccaagcccattttctggagccaggaatccactctgtgggttaggaaaggccctcaggaggcggagggaaacctgtggaatgccgagaagccgtgtaatgaaataacgtcacgcctgcccctcaccattactctgaccagggttcgaaggtcacacttagagcctaaggggaaatggagaagtgcaaagggacgagcagaatggctggcaccacctcagctgacgtgaagatgagcagctcagaggaggtgtcctggatttcctggttctgtgggctccgtggcaatgaattcttctgtgaagtggatgaagactacatccaggacaaatttaatcttactggactcaatgagcaggtccctcactatcgacaagctctagacatgatcttggacctggagcctgatgaagaactggaagacaaccccaaccagagtgacctgattgagcaggcagccgagatgctttatggattgatccacgcccgctacatccttaccaaccgtggcatcgcccagatgttggaaaagtaccagcaaggagactttggttactgtcctcgtgtgtactgtgagaaccagccaatgcttcccattggcctttcagacatcccaggtgaagccatggtgaagctctactgccccaagtgcatggatgtgtacacacccaagtcatcaagacaccatcacacggatggcgcctacttcggcactggtttccctcacatgctcttcatggtgcatcccgagtaccggcccaagagacctgccaaccagtttgtgcccaggctctacggtttcaagatccatccgatggcctaccagctgcagctccaagccgccagcaacttcaagagcccagtcaagacgattcgctgattccctcccccacctgtcctgcagtctttgacttttcctttcttttttgccaccctttcaggaaccctgtatggtttttagtttaaattaaaggagtcgttattgtggtgggaatatgaaataaagtagaagaaaaggccatga

SEQ ID NO: 4735 - DNA, 908 bp, Homo sapiens; identical to SEQ ID NO: 4730
  source 1..908: mol_type = unassigned DNA

SEQ ID NO: 4736 - DNA, 2487 bp, Homo sapiens
  source 1..2487: mol_type = unassigned DNA
cttcgcctgccgcggtcgggtccgcggcctgcgctgtagcggtcgccgccgttccctggaagtagcaacttccctaccccaccccagtcctggtccccgtccagccgctgacgtgaagatgagcagctcagaggaggtgtcctggatttcctggttctgtgggctccgtggcaatgaattcttctgtgaagtggatgaagactacatccaggacaaatttaatcttactggactcaatgagcaggtccctcactatcgacaagctctagacatgatcttggacctggagcctgatgaagaactggaagacaaccccaaccagagtgacctgattgagcaggcagccgagatgctttatggattgatccacgcccgctacatccttaccaaccgtggcatcgcccagatgttggaaaagtaccagcaaggagactttggttactgtcctcgtgtgtactgtgagaaccagccaatgcttcccattggcctttcagacatcccaggtgaagccatggtgaagctctactgccccaagtgcatggatgtgtacacacccaagtcatcaagacaccatcacacggatggcgcctacttcggcactggtttccctcacatgctcttcatggtgcatcccgagtaccggcccaagagacctgccaaccagtttgtgcccagttcctgttcccgacatccggacgtgccacttctgcctcgtagaagacccttctgtaggatgcatttcaggctcagagaagtgtaccatcagcagctcatccctgtgcatggtgatcaccatctattatgatgtcaaggttcgcttcatcgttcgaggctgtggacagtacatttcctaccgctgccaagaaaaacgcaacacctactttgcagagtactggtatcaggcccagtgctgtcagtacgattattgcaactcctggtcaagcccccaactccagagctctctgccggagccccatgacaggcccctggccctgcctctgtctgactcccagattcagtggttctaccaggccctgaacctctccctgcccctccccaatttccatgctgggacggagcctgatggcctggaccccatggtcacactgtccctgaacctgggcttgtcttttgctgagctgcgccgcatgtacttgttcctcaatagttcaggacttttggttcttccccaggctggactcttgacacctcacccttcctgaattccacagtgcaaatatctttctgtaacaccctcagcatcctgcactgccctctctgaaaacacccacattctttggtcactgtgatttcttaggcctccgtctgttgtaccactagcatctatatgacttttgtgtaattttctctcttgaactctggtgctgtttttttgtttgtttgagacaaagtctcgctctgtcacccagggtggagtgcagtggcatgatctctgctcactacaacctccacctcccgggttccagcgattctcctgcctcagcctcccgagtagctgggactacaggcgtgcaccaccacgcctggctaattttttgtatttttagtagagacggggtttcaccatgttggtcaggctggtctcgaactcctgacctcgtaatctgccctcctcgacctcccaaagtgccgggattacaggtgtgagccactgtgcctggctgagctctggtgctgttcttccccctagaaaagaatctctagtgtggattctgcccagacaggctgacctgagaaaggcacagtggttcctccattccttccccatcatctgagtgttccagtatcccccatccctctcaatccagtcacctgcctattgacatctagctctgtttcccctgtcttgtccatgtctctaagacccagtaccagactgaactagcagcaagaaggacgaggaggccgggcatggtggctcacgccggtaatcccagcactttgggaggccgaggtgggcggatcacttgagattgggagtttgagaccagcctggccaacatggtaaaacccgctctctattaaaaatagaaaaatcagctgggtgtggtggcacacctctgtaatcccagctactcaggaggctgagacaggagaatcacttgaacccgggaggcagaggttgcagtgagccgagatcgcgccactgcactccagcctgggtgacacagtgagactccgtctccaaaaaaaaggatgaggaatagaattctgtgcagatgtcctgacttggcaattttgtgtccctgcctcactgtctccaccaacccccgcctgtcctagtgttgttctgcctcctgtcctctcttgctctcttgtcagtctctggcttcctcggccccatttcacttcactgagtcctgacacccatctccctaggggcctgtgagaggagagggaagggtctgttctgctcagctccatgtcccccattttcctccacaataaactgggactgggctaaaa

SEQ ID NO: 4737 - DNA, 2487 bp, Homo sapiens
  source 1..2487: mol_type = unassigned DNA
cttcgcctgccgcggtcgggtccgcggcctgcgctgtagcggtcgccgccgttccctggaagtagcaacttccctaccccaccccagtcctggtccccgtccagccgctgacgtgaagatgagcagctcagaggaggtgtcctggatttcctggttctgtgggctccgtggcaatgaattcttctgtgaagtggatgaagactacatccaggacaaatttaatcttactggactcaatgagcaggtccctcactatcgacaagctctagacatgatcttggacctggagcctgatgaagaactggaagacaaccccaaccagagtgacctgattgagcaggcagccgagatgctttatggattgatccacgcccgctacatccttaccaaccgtggcatcgcccagatgttggaaaagtaccagcaaggagactttggttactgtcctcgtgtgtactgtgagaaccagccaatgcttcccattggcctttcagacatcccaggtgaagccatggtgaagctctactgccccaagtgcatggatgtgtacacacccaagtcatcaagacaccatcacacggatggcgcctacttcggcactggtttccctcacatgctcttcatggtgcatcccgagtaccggcccaagagacctgccaaccagtttgtgcccagttcctgttcccgacatccggacgtgccacttctgcctcgtagaagacccttctgtaggatgcatttcaggctcagagaagtgtaccatcagcagctcatccctgtgcatggtgatcaccatctattatgatgtcaaggttcgcttcatcgttcgaggctgtggacagtacatttcctaccgctgccaagaaaaacgcaacacctactttgcagagtactggtatcaggcccagtgctgtcagtacgattattgcaactcctggtcaagcccccaactccagagctctctgccggagccccatgacaggcccctggccctgcctctgtctgactcccagattcagtggttctaccaggccctgaacctctccctgcccctccccaatttccatgctgggacggagcctgatggcctggaccccatggtcacactgtccctgaacctgggcttgtcttttgctgagctgcgccgcatgtacttgttcctcaatagttcaggacttttggttcttccccaggctggactcttgacacctcacccttcctgaattccacagtgcaaatatctttctgtaacaccctcagcatcctgcactgccctctctgaaaacacccacattctttggtcactgtgatttcttaggcctccgtctgttgtaccactagcatctatatgacttttgtgtaattttctctcttgaactctggtgctgtttttttgtttgtttgagacaaagtctcgctctgtcacccagggtggagtgcagtggcatgatctctgctcactacaacctccacctcccgggttccagcgattctcctgcctcagcctcccgagtagctgggactacaggcgtgcaccaccacgcctggctaattttttgtatttttagtagagacggggtttcaccatgttggtcaggctggtctcgaactcctgacctcgtaatctgccctcctcgacctcccaaagtgccgggattacaggtgtgagccactgtgcctgtctgagctctggtgctgttcttccccctagaaaagaatctctagtgtggattctgcccagacaggctgacctgagaaaggcacagtggttcctccattccttccccatcatctgagtgttccagtatcccccatccctctcaatccagtcacctgcctattgacatctagctctgtttcccctgtcttgtccatgtctctaagacccagtaccagactgaactagcagcaagaaggacgaggaggccgggcatggtggctcacgccggtaatcccagcactttgggaggccgaggtgggcggatcacttgagattgggagtttgagaccagcctggccaacatggtaaaacccgctctctattaaaaatagaaaaatcagctgggtgtggtggcacacctctgtaatcccagctactcaggaggctgagacaggagaatcacttgaacccgggaggcagaggttgcagtgagccgagatcgcgccactgcactccagcctgggtgacacagtgagactccgtctccaaaaaaaaggatgaggaatagaattctgtgcagatgtcctgacttggcaattttgtgtccctgcctcactgtctccaccaacccccgcctgtcctggtgttgttctgcctcctgtcctctcttgctctcttgtcagtctctggcttcctcggccccatttcacttcactgagtcctgacacccatctccctaggggcctgtgagaggagagggaagggtctgttctgctcagctccatgtcccccattttcctccacaataaactgggactgggctaaaa

SEQ ID NO: 4738 - DNA, 908 bp, Homo sapiens; identical to SEQ ID NO: 4727
  source 1..908: mol_type = unassigned DNA

SEQ ID NO: 4739 - DNA, 1061 bp, Homo sapiens
  source 1..1061: mol_type = unassigned DNA
ccccacaatgcccttcgccttcctcaacgtggcccccgctccaagcccattttctggagccaggaatccactctgtgggttaggaaaggccctcaggaggcggagggaaacctgtggaatgccgagaagccgtgtaatgaaataacgtcacgcctgcccctcaccattactctgaccagggttcgaaggtcacacttagagcctaaggggaaatggagaagtgcaaagggacgagcagaatggctggcaccacctcagctgacgtgaagatgagcagctcagaggaggtgtcctggatttcctggttctgtgggctccgtggcaatgaattcttctgtgaagtggatgaagactacatccaggacaaatttaatcttactggactcaatgagcaggtccctcactatcgacaagctctagacatgatcttggacctggagcctgatgaagaactggaagacaaccccaaccagagtgacctgattgagcaggcagccgagatgctttatggattgatccacgcccgctacatccttaccaaccgtggcatcgcccagatgttggaaaagtaccagcaaggagactttggttactgtcctcgtgtgtactgtgagaaccagccaatgcttcccattggcctttcagacatcccaggtgaagccatggtgaagctctactgccccaagtgcatggatgtgtacacacccaagtcatcaagacaccatcacacggatggcgcctacttcggcactggtttccctcacatgctcttcatggtgcatcccgagtaccggcccaagagacctgccaaccagtttgtgcccaggctctacggtttcaagatccatccgatggcctaccagctgcagctccaagccgccagcaacttcaagagcccagtcaagacgattcgctgattccctcccccacctgtcctgcagtctttgtcttttcctttcttttttgccaccctttcaggaaccctgtatggtttttagtttaaattaaaggagtcgttatcgtggtgggaatatgaaataaagtagaagaaaaggccatga

SEQ ID NO: 4740 - DNA, 948 bp, Homo sapiens
  source 1..948: mol_type = unassigned DNA
cttccccaccctccctaatttccactccccccaccccacttcgcctgccgcggtcgggtccgcggcctgcgctgtagcggtcgccgccgttccctggaagtagcaacttccctaccccaccccagtcctggtccccgtccagccgctgacgtgaagatgagcagctcagaggaggtgtcctggatttcctggttctgtgggctccgtggcaatgaattcttctgtgaagtggatgaagactacatccaggacaaatttaatcttactggactcaatgagcaggtccctcactatcgacaagctctagacatgatcttggacctggagcctgatgaagaactggaagacaaccccaaccagagtgacctgattgagcaggcagccgagatgctttatggattgatccacgcccgctacatccttaccaaccgtggcatcgcccagatgttggaaaagtaccagcaaggagactttggttactgtcctcgtgtgtactgtgagaaccagccaatgcttcccattggcctttcagacatcccaggtgaagccatggtgaagctctactgccccaagtgcatggatgtgtacacacccaagtcatcaagacaccatcacacggatggcgcctacttcggcactggtttccctcacatgctcttcatggtgcatcccgagtaccggcccaagagacctgccaaccagtttgtgcccaggctctacggtttcaagatccatccgatggcctaccagctgcagctccaagccgccagcaacttcaagagcccagtcaagacgattcgctgattccctcccccacctgtcctgcagtctttgtcttttcctttcttttttgccaccctttcaggaaccctgtatggtttttagtttaaattaaaggagtcgttatcgtggtgggaatatgaaataaagtagaagaaaaggccatga

SEQ ID NO: 4741 - DNA, 1061 bp, Homo sapiens
  source 1..1061: mol_type = unassigned DNA
ccccacaatgcccttcgccttcctcaacgtggcccccgctccaagcccattttctggagccaggaatccactctgtgggttaggaaaggccctcaggaggcggagggaaacctgtggaatgccgagaagccgtgtaatgaaataacgtcacgcctgcccctcaccattactctgaccagggttcgaaggtcacacttagagcctaaggggaaatggagaagtgcaaagggacgagcagaatggctggcaccacctcagctgacgtgaagatgagcagctcagaggaggtgtcctggatttcctggttctgtgggctccgtggcaatgaattcttctgtgaagtggatgaagactacatccaggacaaatttaatcttactggactcaatgagcaggtccctcactatcgacaagctctagacatgatcttggacctggagcctgatgaagaactggaagacaaccccaaccagagtgacctgattgagcaggcagccgagatgctttatggattgatccacgcccgctacatccttaccaaccgtggcatcgcccagatgttggaaaagtaccagcaaggagactttggttactgtcctcgtgtgtactgtgagaaccagccaatgcttcccattggcctttcagacatcccaggtgaagccatggtgaagctctactgccccaagtgcatggatgtgtacacacccaagtcatcaagacaccatcacacggatggcgcctacttcggcactggtttccctcacatgctcttcatggtgcatcccgagtaccggcccaagagacctgccaaccagtttgtgcccaggctctacggtttcaagatccatccgatggcctaccagctgcagctccaagccgccagcaacttcaagagcccagtcaagacgattcgctgattccctcccccacctgtcctgcagtctttgacttttcctttcttttttgccaccctttcaggaaccctgtatggtttttagtttaaattaaaggagtcgttatcgtggtgggaatatgaaataaagtagaagaaaaggccatga

SEQ ID NO: 4742 - DNA, 1061 bp, Homo sapiens; identical to SEQ ID NO: 4741
  source 1..1061: mol_type = unassigned DNA

SEQ ID NO: 4743 - DNA, 908 bp, Homo sapiens; identical to SEQ ID NO: 4727
  source 1..908: mol_type = unassigned DNA

SEQ ID NO: 4744 - DNA, 908 bp, Homo sapiens
  source 1..908: mol_type = unassigned DNA
ggaggaagcgaccaggtccggcacgaaggagggagaggtggcctgaggagcggaggggggatgtgtggattccggtgaaagggacctgacaatcgcccccaacccctgacgtgaagatgagcagctcagaggaggtgtcctggatttcctggttctgtgggctccgtggcaatgaattcttctgtgaagtggatgaagactacatccaggacaaatttaatcttactggactcaatgagcaggtccctcactatcgacaagctctagacatgatcttggacctggagcctgatgaagaactggaagacaaccccaaccagagtgacctgattgagcaggcagccgagatgctttatggattgatccacgcccgctacatccttaccaaccgtggcatcgcccagatgttggaaaagtaccagcaaggagactttggttactgtcctcgtgtgtactgtgagaaccagccaatgcttcccattggcctttcagacatcccaggtgaagccatggtgaagctctactgccccaagtgcatggatgtgtacacacccaagtcatcaagacaccatcacacggatggcgcctacttcggcactggtttccctcacatgctcttcatggtgcatcccgagtaccggcccaagagacctgccaaccagtttgtgcccaggctctacggtttcaagatccatccgatggcctaccagctgcagctccaagccgccagcaacttcaagagcccagtcaagacgattcgctgattccctcccccacctgtcctgcagtctttgtcttttcctttcttttttgccaccctttcaggaaccctgtatggtttttagtttaaattaaaggagtcgttatcgtggtgggaatatgaaataaagtagaagaaaaggccatga

SEQ ID NO: 4745 - DNA, 1061 bp, Homo sapiens; identical to SEQ ID NO: 4734
  source 1..1061: mol_type = unassigned DNA

SEQ ID NO: 4746 - DNA, 936 bp, Homo sapiens
  source 1..936: mol_type = unassigned DNA
tgtggattccggtgaaagggacctgacaatcgcccccaacccgtgagaaaaggaggagcccagttcttgcttgagaatgataaacttggaaacccttgggaaaggcgtgggggtcatgcagagacttgtattgctgacgtgaagatgagcagctcagaggaggtgtcctggatttcctggttctgtgggctccgtggcaatgaattcttctgtgaagtggatgaagactacatccaggacaaatttaatcttactggactcaatgagcaggtccctcactatcgacaagctctagacatgatcttggacctggagcctgatgaagaactggaagacaaccccaaccagagtgacctgattgagcaggcagccgagatgctttatggattgatccacgcccgctacatccttaccaaccgtggcatcgcccagatgttggaaaagtaccagcaaggagactttggttactgtcctcgtgtgtactgtgagaaccagccaatgcttcccattggcctttcagacatcccaggtgaagccatggtgaagctctactgccccaagtgcatggatgtgtacacacccaagtcatcaagacaccatcacacggatggcgcctacttcggcactggtttccctcacatgctcttcatggtgcatcccgagtaccggcccaagagacctgccaaccagtttgtgcccaggctctacggtttcaagatccatccgatggcctaccagctgcagctccaagccgccagcaacttcaagagcccagtcaagacgattcgctgattccctcccccacctgtcctgcagtctttgtcttttcctttcttttttgccaccctttcaggaaccctgtatggtttttagtttaaattaaaggagtcgttatcgtggtgggaatatgaaataaagtagaagaaaaggccatga

SEQ ID NO: 4747 - DNA, 2487 bp, Homo sapiens; identical to SEQ ID NO: 4731
  source 1..2487: mol_type = unassigned DNA

SEQ ID NO: 4748 - DNA, 1061 bp, Homo sapiens; identical to SEQ ID NO: 4741
  source 1..1061: mol_type = unassigned DNA

SEQ ID NO: 4749 - DNA, 948 bp, Homo sapiens; identical to SEQ ID NO: 4729
  source 1..948: mol_type = unassigned DNA

SEQ ID NO: 4750 - DNA, 936 bp, Homo sapiens; identical to SEQ ID NO: 4728
  source 1..936: mol_type = unassigned DNA

SEQ ID NO: 4751 - DNA, 948 bp, Homo sapiens; identical to SEQ ID NO: 4732
  source 1..948: mol_type = unassigned DNA

SEQ ID NO: 4752 - DNA, 948 bp, Homo sapiens; identical to SEQ ID NO: 4729
  source 1..948: mol_type = unassigned DNA

SEQ ID NO: 4753 - DNA, 936 bp, Homo sapiens; identical to SEQ ID NO: 4733
  source 1..936: mol_type = unassigned DNA

SEQ ID NO: 4754 - DNA, 948 bp, Homo sapiens; identical to SEQ ID NO: 4729
  source 1..948: mol_type = unassigned DNA

SEQ ID NO: 4755 - DNA, 908 bp, Homo sapiens; identical to SEQ ID NO: 4727
  source 1..908: mol_type = unassigned DNA

SEQ ID NO: 4756 - DNA, 936 bp, Homo sapiens; identical to SEQ ID NO: 4728
  source 1..936: mol_type = unassigned DNA

SEQ ID NO: 4757 - DNA, 936 bp, Homo sapiens
  source 1..936: mol_type = unassigned DNA
tgtggattccggtgaaagggacctgacaatcgcccccaacccgtgagaaaaggaggagcccggttcttgcttgagaatgataaacttggaaacccttgggaaaggcgtgggggtcatgcagagacttgtattgctgacgtgaagatgagcagctcagaggaggtgtcctggatttcctggttctgtgggctccgtggcaatgaattcttctgtgaagtggatgaagactacatccaggacaaatttaatcttactggactcaatgagcaggtccctcactatcgacaagctctagacatgatcttggacctggagcctgatgaagaactggaagacaaccccaaccagagtgacctgattgagcaggcagccgagatgctttatggattgatccacgcccgctacatccttaccaaccgtggcatcgcccagatgttggaaaagtaccagcaaggagactttggttactgtcctcgtgtgtactgtgagaaccagccaatgcttcccattggcctttcagacatcccaggtgaagccatggtgaagctctactgccccaagtgcatggatgtgtacacacccaagtcatcaagacaccatcacacggatggcgcctacttcggcactggtttccctcacatgctcttcatggtgcatcccgagtaccggcccaagagacctgccaaccagtttgtgcccaggctctacggtttcaagatccatccgatggcctaccagctgcagctccaagccgccagcaacttcaagagcccagtcaagacgattcgctgattccctcccccacctgtcctgcagtctttgacttttcctttcttttttgccaccctttcaggaaccctgtatggtttttagtttaaattaaaggagtcgttatcgtggtgggaatatgaaataaagtagaagaaaaggccatga

SEQ ID NO: 4758 - DNA, 5755 bp, Homo sapiens
  source 1..5755: mol_type = unassigned DNA
gggggaggcggccggtgccgcggggccgccgccgcctctgagccgcgccgagctcacgagcgcagccgcgtcgctgcggccccggccgcgccatggggaaggagcaggagctggtgcaggcggtgaaggcggaggacgtagggaccgcgcagaggctgctgcagaggccgcggcccgggaaggccaagctcctgggttccaccaagaagatcaatgtcaacttccaggacccggatggcttctcggctctgcaccatgcggccctgaacggcaacacggaattgatcagcctgctgctggaggcccaggccgctgtggacatcaaggacaacaaaggcatgcggccgctgcactatgcggcctggcagggccggaaggagcccatgaagctggtgctgaaggcgggctcggccgtgaacatcccgtctgatgagggccacatccccctgcacctggcggcccagcatggtcactatgatgtgtctgagatgctgctacagcaccagtctaacccgtgcatggtggacaactcggggaagacgcccctggacctggcctgcgagttcggccgcgttggggtggtccagctgctcctcagcagcaatatgtgtgcggcgctgctggagccccggccgggagacgccaccgaccccaacggcaccagccctttgcacctcgcagctaaaaacggccacatcgacatcatcaggctcctcctccaagccggcatcgacattaaccgccagaccaagtccggcacggccctgcacgaggctgcgctctgcggaaagacagaggtggtgcggctgctgctggatagcgggatcaatgcccacgtgaggaacacctacagccagacagccctggacatcgtgcaccagttcaccacgtcccaggccagcagggagatcaagcagctgttgcgagaggcctcagcggccctgcaggtccgggcgaccaaggattattgcaacaattacgacctgaccagcctcaacgtgaaggcaggggacatcatcacagtcctcgagcagcatccggatggccggtggaagggctgcatccatgacaaccggacgggcaatgaccgggtgggctacttcccgtcctccctgggcgaggccattgtcaagcgagcaggttcccgagcaggcactgaaccaagcctgccccagggaagcagctcatcgggaccctctgcacccccagaggagatctgggtgctgaggaagccttttgcaggtggggaccgaagcggcagcattagcggcatggctggcggccggggcagcgggggtcacgccctacacgcgggctctgaaggcgtcaagctcctggcaacggtgctttcccagaagtccgtctctgagtccggcccgggggacagccccgccaagcctccggaaggctctgcaggtgtggcccggtcccagcctccagtggcccacgccgggcaggtctatggggagcagccgcccaagaagctggagccagcatcggagggcaagagctctgaggccgtgagccagtggctcaccgcgttccagctgcagctctacgcccccaacttcatcagcgccggctacgacctgcccaccatcagccgcatgactcccgaggacctcacggccattggtgtcaccaagccgggccaccggaagaagatcgcggcagagatcagcggcctaagcatccctgactggctgcctgagcacaaacccgctaacctggccgtgtggctgtccatgatcggcctggcccagtactacaaggtgttggtggacaatggctacgagaacattgatttcatcaccgacatcacctgggaggacctgcaggagatcggcatcaccaagctggggcaccagaagaagctgatgctcgctgtgaggaagctggcagagctgcagaaggctgaatacgccaagtatgaggggggccccctgcgccggaaggcgccccagtctcttgaagtgatggccatcgagtcgccgcccccgcctgagcccacaccggccgactgccagtcccctaaaatgaccaccttccaggacagcgagctcagtgacgagctgcaggctgccatgactggcccggctgaggtggggcccaccactgagaagccctccagccacctgccacccaccccgagggccaccacgcggcaggactccagcctgggtggtcgggcacggcacatgagcagctcgcaggagctgctgggagatgggccccctgggcccagcagccccatgtctcgaagccaggagtacctcctggatgagggccccgcccccggcaccccgcccagggaggcccggcccggccgccacggccacagcatcaagagggccagcgtgccccccgtgcctggcaagccacggcaggtcctcccaccaggcactagccacttcacgcccccccagacgcccaccaaaacccgaccaggctctccccaggcccttgggggacctcatggtccagccccagctacggccaaggtgaagcccaccccgcagctgctgccgccgacagagcgccccatgtcaccccgctccctgcctcagtcaccgacgcaccgcggctttgcctacgtgctgccccagcccgtggagggcgaggtggggccggctgccccggggcctgcgcccccacccgtgccgacggctgtgcccacactgtgcctgccccctgaggccgacgcggagccggggcggcccaagaagcgggcccacagcctgaatcgctatgcggcgtccgacagcgagccggagcgggacgagctgctggtgcctgcggctgccggcccctatgccacggtccagcggcgcgtgggccgcagccactcagtgagggcgcccgcaggtgccgacaagaacgtcaaccgcagccagtcctttgccgtgcggccccgaaagaaggggcccccgccgcccccacccaagcgctccagctcggccctggctagtgccaacctggcggatgagccggtgcctgacgccgagcctgaggatggcctgctgggggtccgggcacagtgccggcgggccagtgacctggccggcagcgtggacacgggtagtgccggcagtgtgaagagcatcgcggccatgctggagctgtcctccattgggggtgggggccgggctgcccgcaggcctcctgagggccaccccactccccgccctgccagcccagagccgggccgggtggccaccgtgctggcctcagtgaaacacaaagaggccatcgggcctggcggggaggtggtgaaccggcgccgcacgctcagcgggccagtcaccggacttctggccactgcccgccgggggcctggggagtcggcagacccaggcccctttgtggaggatggcactggccggcagcggcctcggggtccctccaagggcgaggcgggtgtcgaaggcccgcccttggccaaggtggaagccagcgccacactcaagaggcgcatccgggccaagcagaaccagcaggagaacgtcaagttcatcctgaccgagtctgacacggtcaagcgcaggcccaaggccaaggagcgggaggccgggcctgagccaccaccgccactgtccgtgtaccataatggcactggcaccgtgcgccgccgaccggcctcggagcaggctgggcctccggagctgcctccaccgcccccgcctgccgaacccccgcccaccgacctggcgcacctacccccattgcccccgcccgagggcgaagcccggaagccggccaagccgcctgtctctcccaagcccgtcctgacgcagcctgtgcccaagctccagggctcgcccacacccacctccaagaaggtgccgctgccaggccctggcagcccagaggtgaagcgcgcccacggcacgccaccgcccgtgtctcccaagccgccgccgccgcccacagcgcccaagcccgtcaaggcggtcgcggggctgccttcgggcagcgccggcccttcacccgcaccctcgcccgcgcgacagccgcccgccgccctcgccaagccgcccggtacgccgccctcgctgggcgccagccccgccaagcccccgtcccccggcgcgcccgcgctgcacgtgcccgccaagcccccgcgagccgccgccgccgccgccgccgccgccgccgcgccccccgccccgcccgaaggcgcctcgccaggggacagcgcccggcagaaactggaggagacaagcgcgtgcctggccgcggcgctgcaggcggtggaggagaagatccggcaggaggacgcgcagggcccgcgcgactcggcggcggaaaagagcactggcagcatcctggacgacatcggcagcatgttcgacgacctggccgaccagctggatgccatgctggagtgaacgccgcctggccgggccctcccgcgccgcccgggccctccccgcacactgacctatacctcaggatgggcgcgtctgggcgcggcgcgagcggccgggcagggccctgcagaagcacaactccggcccctggacccgggccggggcgcccaccggggaccgcctggccgggggctccaagggctctaggcagaccctgcgcccgcgggtcctccccacctgctgctccccgtgcaatacctgctgggcctcctgcccgcgcgggaggggagggcgccccgggaccagggatggggcagcgcacaggcccgggcccagcacagaactgcccatcgggacgcccggccagccgctcgggcgcagcacaagggacaggggaccaaggtcagggcccccctgccccaccgcacccccagaatataagctatcaagagtattaatttattgggaatgagctgaggcggatttccccagagaaacaaaaaggtataactttaacaaatatatatttaaagaaagaaatattattgattctatagaaaaccatttaccaactgaaaggacacgaagtctagctccggacaaaagctgttagaggcccaggctgtctgcctgcggtccttcctccggccagagtggaggccccaggctgctagcacaggtggaaggctggggcccgggggcgggtgctctgccgggggctcctccgtgcttctctcctaagttctctgcgccccaagaactcgaggttgtgccttgctctcggcggccgtgtcctcctcctggcgtggctgcgtcccagggcgcgggtgggtttggtgaatgtgggtgtgtcagcgtggcagccacgtggaagcagggcatgtagcaggccaggccacgggcttgcagctcctctgagggtgtgcctggccccctctccaggggctgtgcaggcagcccatccaccccagtggagttcccacggacgcttctgctcatggtccaaggctgtgttgtgtggtcattctcgccctcccttttcctctctcctcctgccccctccaagaagtactgactggtctcctctatcgtgtttgctgatccacagtgttgggcacaactttgacgtttcttaaaaaaaaaatttaaaaaatgccgaaaaccagcgattgtggtgtggggcgggtggaggcggctggcggaggtggcgtcccggcgtgcagggccccttcctgctgtctcaccccgtgtttccctgcgagtggacgtgcccagctgtccccccaggcctctcctcagagggcggcacaggctgggctccagcaggtgggcaggggaggtctgggcaaggcgctgccgtcggctgtcaataaacagcaggaaac

SEQ ID NO: 4759 - DNA, 2660 bp, Homo sapiens
  source 1..2660: mol_type = unassigned DNA
cgcagccgcgtcgctgcggccccggccgcgccatggggaaggagcaggagctggtgcaggcggtgaaggcggaggacgtagggaccgcgcagaggctgctgcagaggccgcggcccgggaaggccaagctcctgggttccaccaagaagatcaatgtcaacttccaggacccggatggcttctcggctctgcaccatgcggccctgaacggcaacacggaattgatcagcctgctgctggaggcccaggccgctgtggacatcaaggacaacaaaggcatgcggccgctgcactatgcggcctggcagggccggaaggagcccatgaagctggtgctgaaggcgggctcggccgtgaacatcccgtctgatgagggccacatccccctgcacctggcggcccagcatggtcactatgatgtgtctgagatgctgctacagcaccagtctaacccgtgcatggtggacaactcggggaagacgcccctggacctggcctgcgagttcggccgcgttggggtggtccagctgctcctcagcagcaatatgtgtgcggcgctgctggagccccggccgggagacgccaccgaccccaacggcaccagccctttgcacctcgcagctaaaaacggccacatcgacatcatcaggctcctcctccaagccggcatcgacattaaccgccagaccaagtccggcacggccctgcacgaggctgcgctctgcggaaagacagaggtggtgcggctgctgctggatagcgggatcaatgcccacgtgaggaacacctacagccagacagccctggacatcgtgcaccagttcaccacgtcccaggccagcagggagatcaagcagctgttgcgagaggcctcagcggccctgcaggtccgggcgaccaaggattattgcaacaattacgacctgaccagcctcaacgtgaaggcaggggacatcatcacagtcctcgagcagcatccggatggccggtggaagggctgcatccatgacaaccggacgggcaatgaccgggtgggctacttcccgtcctccctgggcgaggccattgtcaagcgagcaggttcccgagcaggcactgaaccaagcctgccccagggaagcagctcatcgggaccctctgcacccccagaggagatctgggtgctgaggaagccttttgcaggtggggaccgaagcggcagcattagcggcatggctggcggccggggcagcgggggtcacgccctacacgcgggctctgaaggcgtcaagctcctggcaacggtgctttcccagaagtccgtctctgagtccggcccgggggacagccccgccaagcctccggaaggctctgcaggtgtggcccggtcccagcctccagtggcccacgccgggcaggtctatggggagcagccgcccaagaagctggagccagcatcggagggcaagagctctgaggccgtgagccagtggctcaccgcgttccagctgcagctctacgcccccaacttcatcagcgccggctacgacctgcccaccatcagccgcatgactcccgaggacctcacggccattggtgtcaccaagccgggccaccggaagaagatcgcggcagagatcagcggcctaagcatccctgactggctgcctgagcacaaacccgctaacctggccgtgtggctgtccatgatcggcctggcccagtactacaaggtgttggtggacaatggctacgagaacattgatttcatcaccgacatcacctgggaggacctgcaggagatcggcatcaccaagctggggcaccagaagaagctgatgctcgctgtgaggaagctggcagagctgcagaaggctgaatacgccaagtatgaggggggccccctgcgccggaaggcgccccagtctcttgaagtgatggccatcgagtcgccgcccccgcctgagcccacaccggccgactgccagtcccctaaaatgaccaccttccaggacagcgagctcagtgacgagctgcaggctgccatgactggcccggctgaggtggggcccaccactgagaagccctccagccacctgccacccaccccgagggccaccacgcggcaggactccagcctgggtggtcgggcacggcacatgagcagctcgcaggagctgctgggagatgggccccctgggcccagcagccccatgtctcgaagccaggagtacctcctggatgagggccccgcccccggcaccccgcccagggaggcccggcccggccgccacggccacagcatcaagagggccagcgtgccccccgtgcctggcaagccacggcaggtcctcccaccaggcactagccacttcacgcccccccagacgcccaccaaaacccgaccaggctctccccaggcccttgggggacctcatggtccagccccagctacggccaaggtgaagcccaccccgcagctgctgccgccgacagagcgccccatgtcaccccgctccctgcctcagtcaccgacgcagcgcacaggcccgggcccagcacagaactgcccatcgggacgcccggccagccgctcgggcgcagcacaagggacaggggaccaaggtcagggcccccctgccccaccgcacccccagaatataagctatcaagagtattaa

SEQ ID NO: 4760 - DNA, 4977 bp, Homo sapiens
  source 1..4977: mol_type = unassigned DNA
gggaggggcgggatttcctgcgggaggcgccgagccggccttggaaaaggagaaggagaaaggggggcaggggggagtgggagccaccgtcctgagtgccagggaccgagcagggccagccggaccccggcgggcggccgggagagagccctgagaccagtgcaccgctgctgcctgaggcccaagggaatgctggctgctctctgggtgggcactggtgttccacagccaagccgggaagattggtgtgcccagtcccagcccatcctggagctgtcggaagccacaagctgatatccatccagatttccatgtagccttcaccccctcaaagattagctttccttcgtgtggtggcagttcacggagcacctttgggagtatccctcagtacctgacgaggagcccactgcctgggacacctgacttgctcccccggaaccgggagccctccaaggggctgtggcatggcgccctgacgccccagcttggacccgttgcctgcctttgccctggactcctgagtgtagagctcagcccaggagccagtatgggtcgtgaacaggacctgatcctcgccgtcaagaatggagatgtgaccggtgtgcagaaactggtggcgaaggtcaaggccacaaagacaaagctcctgggctccacaaagaggctcaacgtgaactaccaggatgctgatggattctctgccctccaccacgctgctttggggggcagcctggagctcatagccttgctgctagaggctcaggccactgttgacatcaaggacagcaatggcatgcgcccgctgcactacgcagcctggcagggccggctggagcctgtgaggctgctgctgcgcgcctctgcggctgtcaatgccgcctcgctggacggacagatccccctgcacctggctgcacagtatggacattatgaggtgtcagaaatgctcctccagcatcagtccaacccatgcctggtcaacaaggccaagaagacgcccctggacctggcctgtgaatttggccgactcaaggtggcccagctgcttctgaacagccacttatgtgtggcactgctggagggtgaggccaaagacccgtgtgaccccaactacaccacgcccctgcacttggctgccaagaatggccacagagaagtcatcaggcagctcctgagagctgggatcgagatcaaccgccagaccaagacgggtacggcgctccacgaggccgcactgtatggcaagaccgaggtggtgcggctgcttctggagggaggtgtggacgtgaacatccggaatacgtataaccagacggcgctggacatagtgaatcagttcaccacctcccaggccagccgggaaatcaagcagctactgcgggaggcctcagggatcctgaaggtccgagcgctcaaggatttctggaacctccacgatcccactgctctcaatgtccgggcaggggatgtcatcacggtgctagaacagcatcccgacggccgctggaagggccacatccacgagagccagaggggcacagaccgcataggctacttccccccgggcattgtcgaggtggtcagcaagcgggtgggcatccctgcagcccgcctcccctccgcacccacccccctgcgcccaggcttctcccggacaccgcagcctcctgccgaagaacccccgcaccctcttacctacagccagcttcctcgggtgggcctcagcccagacagcccagcaggtgacaggaatagtgtgggcagtgagggcagcgtgggcagcatccgcagtgccggcagcgggcagagctctgagggcactaatggccatggccctggcctcctgattgagaacgcccagccactgccctctgctggagaggaccaggtgctgccaggactccacccgccgtccctggcagacaacctgagccaccgccctctggccaactgccgctctggggagcagatcttcacccaggacgtgcggccagaacagctgctggaggggaaggacgcgcaggccattcataactggctaagcgagttccagctggagggctacactgcccactttctgcaggccggctatgatgtgcctaccatcagccgcatgacacctgaggacctgacggccatcggggtgaccaagcctgggcacaggaagaagatcgcctcagagatcgctcagctcagcatcgccgagtggctgcccagctacatcccaacggacctgctggagtggctgtgtgcactggggctgccacagtaccacaagcagctggtgagcagcggctacgactccatggggctggtggccgacctcacctgggaggagctgcaggagattggggtcaacaagctcgggcatcagaagaagctcatgctgggggtgaagcggctggcggagcttcggcggggcctgctgcagggggaggccctcagcgaaggcgggcgccggctggccaagggtccggagctgatggccatcgagggactggagaacggagaaggcccagctacagctggcccacggctcctcaccttccagggcagcgaactaagcccagagctacaggcggccatggcagggggtggccctgaaccactccccctcccacctgcccgctctcccagccaggagagcatcggggcacgctcacgggggtctggccactcacaggaacagcctgccccacagcccagcggtggagatcccagccccccccaggagaggaacctcccagagggcacagagcggccccctaagctttgttcttcacttcctggccaaggacccccaccctatgtttttatgtacccccagggctcaccctctagcccggccccagggccacctcctggcgcaccctgggccttctcctacttggccgggccccctgccactcccccagacccgcctcgacctaagcgccggtcccacagcctaagccgccctggccccacagagggggatgctgagggggaggccgaagggccagtgggcagcaccctaggcagttatgctacccttacccggcggccaggacgcagtgcccttgtccggaccagtcctagtgtgaccccaaccccagctcgggggactcctcgcagccagtcctttgccctgcgggcccggcgcaaaggccccccgcccccgccccccaagcgcctcagctccgtctctggccccagcccggagccacctccactagatgagagcccagggcccaaggaaggggccacagggccccgaaggcgaacactgagtgaacctgctggcccctcagagccccctggcccacctgccccggctgggcccgcgtcagacacggaggaggaggagccaggccctgaggggacgcccccatctcggggcagctctggggaagggctgccgtttgcagaggaagggaacctgaccatcaaacagcgcccgaagcccgctggccccccgccccgagagacacccgtgccccccggcctcgatttcaacctcacggaatcagacactgttaagcggaggcccaagtgccgggagagagagccactgcagaccgcactgctggccttcggagtggccagtgccacgcctggccccgctgccccactgccttccccaactcctggcgagtctcctccagcttctagccttccccagcccgagcccagcagccttccagcccaaggagttccaaccccccttgctcccagccccgccatgcagcctccagtgccgccctgcccagggccaggtctggaaagctcagcagctagtcggtggaatggggagacagaacccccggccgcccctgctgccctcctcaaggtgcccggagcaggaacagcccccaagcctgtgtcggtggcctgcacccagctggcattttctggccctaagctagcgccccggctcggcccccgcccagtgcctcctccacggcctgagagcactgggactgtgggcccaggccaggcccagcagagactggagcagaccagctcgtccctggcagctgcactgagagccgcagagaagagcattggcaccaaggagcaagagggcacccccagcgcctccaccaagcacattctggatgacatcagcaccatgttcgacgccctggctgaccagctggacgccatgctggactgagccctccagcagtgcccactgtgacctgccgaagtccactgcctttgccccagcacagaagaggcccctgccaccctagggacgggccaagggctggtcaggctgaagtgcccctcctagcagggccccttcccactcagcccgcggctgtgggcaccacagctcttgtggggcagcccaccttagaacctgactagcgagggacctccgctgcatctcagcaaagcccctcccagggtttgatcgattgagcaggacagccctgctcctggacagggaccctggtaagagctctctcctcagggaggaagtaggggtggggctttgggggtgctttctctgtaccccccagcccatgtcccaagttgtgccaagggaatgcctcttgccacccaccatcctgcccaggccctgagaggctggaggaggcgtgtgtctggccgggccccctctccgtaggtgtacagaggacatgtaaatacacagcggtggtgcccaggcagctcctgcccccgccttccctcactgaggcagggctagcaggggtgggaggcagtggggttaacagatcccacaagtcctaacttttcaattgtaaatgttattttctaagcagagagaaatgcatatattttaaatggaatttattctatcaactgcctgagaggacacaatgggggaggggcttcggaccacagcaggagccccgactgcccacctgagggcagggagagcctgaccccattggcccaggccctggctctgtaaccattaacctcttcccccaactaacaccaatgaaaacaccattccacgtg

SEQ ID NO: 4761 - DNA, 4486 bp, Homo sapiens
  source 1..4486: mol_type = unassigned DNA
ctctcgggagggactgcatcccgccacccagctgcctcatcccaaactgtccaggctgttggaagaggagggctaatggaagagtgggcagcttgaagggtgctctgtgtctcttccctgctgaccgcattgtctccactggggctcagagagagctcctgggctccacaaagaggctcaacgtgaactaccaggatgctgatggattctctgccctccaccacgctgctttggggggcagcctggagctcatagccttgctgctagaggctcaggccactgttgacatcaaggacagcaatggcatgcgcccgctgcactacgcagcctggcagggccggctggagcctgtgaggctgctgctgcgcgcctctgcggctgtcaatgccgcctcgctggacggacagatccccctgcacctggctgcacagtatggacattatgaggtgtcagaaatgctcctccagcatcagtccaacccatgcctggtcaacaaggccaagaagacgcccctggacctggcctgtgaatttggccgactcaaggtggcccagctgcttctgaacagccacttatgtgtggcactgctggagggtgaggccaaagacccgtgtgaccccaactacaccacgcccctgcacttggctgccaagaatggccacagagaagtcatcaggcagctcctgagagctgggatcgagatcaaccgccagaccaagacgggtacggcgctccacgaggccgcactgtatggcaagaccgaggtggtgcggctgcttctggagggaggtgtggacgtgaacatccggaatacgtataaccagacggcgctggacatagtgaatcagttcaccacctcccaggccagccgggaaatcaagcagctactgcgggaggcctcagggatcctgaaggtccgagcgctcaaggatttctggaacctccacgatcccactgctctcaatgtccgggcaggggatgtcatcacggtgctagaacagcatcccgacggccgctggaagggccacatccacgagagccagaggggcacagaccgcataggctacttccccccgggcattgtcgaggtggtcagcaagcgggtgggcatccctgcagcccgcctcccctccgcacccacccccctgcgcccaggcttctcccggacaccgcagcctcctgccgaagaacccccgcaccctcttacctacagccagcttcctcgggtgggcctcagcccagacagcccagcaggtgacaggaatagtgtgggcagtgagggcagcgtgggcagcatccgcagtgccggcagcgggcagagctctgagggcactaatggccatggccctggcctcctgattgagaacgcccagccactgccctctgctggagaggaccaggtgctgccaggactccacccgccgtccctggcagacaacctgagccaccgccctctggccaactgccgctctggggagcagatcttcacccaggacgtgcggccagaacagctgctggaggggaaggacgcgcaggccattcataactggctaagcgagttccagctggagggctacactgcccactttctgcaggccggctatgatgtgcctaccatcagccgcatgacacctgaggacctgacggccatcggggtgaccaagcctgggcacaggaagaagatcgcctcagagatcgctcagctcagcatcgccgagtggctgcccagctacatcccaacggacctgctggagtggctgtgtgcactggggctgccacagtaccacaagcagctggtgagcagcggctacgactccatggggctggtggccgacctcacctgggaggagctgcaggagattggggtcaacaagctcgggcatcagaagaagctcatgctgggggtgaagcggctggcggagcttcggcggggcctgctgcagggggaggccctcagcgaaggcgggcgccggctggccaagggtccggagctgatggccatcgagggactggagaacggagaaggcccagctacagctggcccacggctcctcaccttccagggcagcgaactaagcccagagctacaggcggccatggcagggggtggccctgaaccactccccctcccacctgcccgctctcccagccaggagagcatcggggcacgctcacgggggtctggccactcacaggaacagcctgccccacagcccagcggtggagatcccagccccccccaggagaggaacctcccagagggcacagagcggccccctaagctttgttcttcacttcctggccaaggacccccaccctatgtttttatgtacccccagggctcaccctctagcccggccccagggccacctcctggcgcaccctgggccttctcctacttggccgggccccctgccactcccccagacccgcctcgacctaagcgccggtcccacagcctaagccgccctggccccacagagggggatgctgagggggaggccgaagggccagtgggcagcaccctaggcagttatgctacccttacccggcggccaggacgcagtgcccttgtccggaccagtcctagtgtgaccccaaccccagctcgggggactcctcgcagccagtcctttgccctgcgggcccggcgcaaaggccccccgcccccgccccccaagcgcctcagctccgtctctggccccagcccggagccacctccactagatgagagcccagggcccaaggaaggggccacagggccccgaaggcgaacactgagtgaacctgctggcccctcagagccccctggcccacctgccccggctgggcccgcgtcagacacggaggaggaggagccaggccctgaggggacgcccccatctcggggcagctctggggaagggctgccgtttgcagaggaagggaacctgaccatcaaacagcgcccgaagcccgctggccccccgccccgagagacacccgtgccccccggcctcgatttcaacctcacggaatcagacactgttaagcggaggcccaagtgccgggagagagagccactgcagaccgcactgctggccttcggagtggccagtgccacgcctggccccgctgccccactgccttccccaactcctggcgagtctcctccagcttctagccttccccagcccgagcccagcagccttccagcccaaggagttccaaccccccttgctcccagccccgccatgcagcctccagtgccgccctgcccagggccaggtctggaaagctcagcagctagtcggtggaatggggagacagaacccccggccgcccctgctgccctcctcaaggtgcccggagcaggaacagcccccaagcctgtgtcggtggcctgcacccagctggcattttctggccctaagctagcgccccggctcggcccccgcccagtgcctcctccacggcctgagagcactgggactgtgggcccaggccaggcccagcagagactggagcagaccagctcgtccctggcagctgcactgagagccgcagagaagagcattggcaccaaggagcaagagggcacccccagcgcctccaccaagcacattctggatgacatcagcaccatgttcgacgccctggctgaccagctggacgccatgctggactgagccctccagcagtgcccactgtgacctgccgaagtccactgcctttgccccagcacagaagaggcccctgccaccctagggacgggccaagggctggtcaggctgaagtgcccctcctagcagggccccttcccactcagcccgcggctgtgggcaccacagctcttgtggggcagcccaccttagaacctgactagcgagggacctccgctgcatctcagcaaagcccctcccagggtttgatcgattgagcaggacagccctgctcctggacagggaccctggtaagagctctctcctcagggaggaagtaggggtggggctttgggggtgctttctctgtaccccccagcccatgtcccaagttgtgccaagggaatgcctcttgccacccaccatcctgcccaggccctgagaggctggaggaggcgtgtgtctggccgggccccctctccgtaggtgtacagaggacatgtaaatacacagcggtggtgcccaggcagctcctgcccccgccttccctcactgaggcagggctagcaggggtgggaggcagtggggttaacagatcccacaagtcctaacttttcaattgtaaatgttattttctaagcagagagaaatgcatatattttaaatggaatttattctatcaactgcctgagaggacacaatgggggaggggcttcggaccacagcaggagccccgactgcccacctgagggcagggagagcctgaccccattggcccaggccctggctctgtaaccattaacctcttcccccaactaacaccaatgaaaacaccattccacgtg

SEQ ID NO: 4762 - DNA, 1306 bp, Homo sapiens
  source 1..1306: mol_type = unassigned DNA
gtgtacatgatttcattctgttcactttgttatgtcaaaaagaagaaaacaccttctgcttcctattttccaaaggaaagcagttatacacgagatcagagtctaattttatcttggcaaagaaaaagagaatttgaggactgggaattttccattcagggtaatatcaacaagctggtccactgagaggagagcaagcctgttgaaattgtttttgctttcacagctttttcctgtccggggagcaggagaagccatggctgatgagaaaccatccaacggtgttctggtccacatggtgaagttgctgatcaagacctttctagatggcatttttgatgatttgatggaaaataatgtattaaatacagatgagatacaccttataggaaaatgtctaaagtttgtggtgagcaatgctgaaaacctggttgatgatatcactgagacagctcaaactgcaggcaaaatatttagggaacacctgtggaattccaaaaaacagctgagttcagatatatccagtgatggagaaagagaggcgaacatgcctggcctcaacatccgcaacaaagaattcaactatcttcataatcgaaatggttctgaacttgaccttttggggatgcgagatctacttgaaaaccttggatactcagtggttataaaagagaatctcacagctcaggaaatggaaacagcactaaggcagtttgctgctcacccagagcaccagtcctcagacagcacattcctggtgtttatgtcacatagcatcctgaatggaatctgtgggaccaagcactgggatcaagagccagatgttcttcacgatgacaccatctttgaaattttcaacaaccgtaactgccagagtctgaaagacaaacccaaggtcatcatcatgcaagcctgccgaggcaatggtgctgggattgtttggttcaccactgacagtggaaaagccggtgcagatactcatggtcggctcttgcaaggtaacatctgtaatgatgctgttacaaaggctcatgtggaaaaggacttcattgctttcaaatcttccacaccacataatgtttcttggagacatgaaacaaatggctctgtcttcatttcccaaattatctactacttcagagagtattcttggagtcatcatctagaggaaatttttcaaaaggttcaacattcatttgagaccccaaatatactgacccagctgcccaccattgaaagactatccatgacacgatatttctatctctttcctgggaattaaaactcataagaagcaactcaggta

SEQ ID NO: 4763 - DNA, 1451 bp, Homo sapiens
  source 1..1451: mol_type = unassigned DNA
ccggggagcaggagaagccatggctgatgagaaaccatccaacggtgttctggtccacatggtgaagttgctgatcaagacctttctagatggcatttttgatgatttgatggaaaataatgtattaaatacagatgagatacaccttataggaaaatgtctaaagtttgtggtgagcaatgctgaaaacctggttgatgatatcactgagacagctcaaactgcaggcaaaatatttagggaacacctgtggaattccaaaaaacagctgagttcagatatatccagtgatggagaaagagaggcgaacatgcctggcctcaacatccgcaacaaagaattcaactatcttcataatcgaaatggttctgaacttgaccttttggggatgcgagatctacttgaaaaccttggatactcagtggttataaaagagaatctcacagctcaggaaatggaaacagcactaaggcagtttgctgctcacccagagcaccagtcctcagacagcacattcctggtgtttatgtcacatagcatcctgaatggaatctgtgggaccaagcactgggatcaagagccagatgttcttcacgatgacaccatctttgaaattttcaacaaccgtaactgccagagtctgaaagacaaacccaaggtcatcatcatgcaagcctgccgaggcaatggtgctgggattgtttggttcaccactgacagtggaaaagccggtgcagatactcatggtcggctcttgcaaggtaacatctgtaatgatgctgttacaaaggctcatgtggaaaaggacttcattgctttcaaatcttccacaccacataatgtttcttggagacatgaaacaaatggctctgtcttcatttcccaaattatctactacttcagagagtattcttggagtcatcatctagaggaaatttttcaaaaggttcaacattcatttgagaccccaaatatactgacccagctgcccaccattgaaagactatccatgacacgatatttctatctctttcctgggaattaaaactcataagaagcaactcaggaaaatgaaggcattatggtgtctatgaatctgctattagaaaaggtcaatttttgattaagaatatttttataccaaactgctcagctgtccaccttttcaaataccaggctaaaatcaatctcatatttttgctaaattaatgcttaataaatttttattataaaattgtgcttgttttctaattttgtcataaattaagtcatgcttataggagaaaaaattaagtattaaaaatcataaaaaatgaagaaataatcatcatcaacctttttaaaactattcataaaaactcaagttttttatatagcttatttattttgtatatccaattttgtgtgcttttattatattgttataacattactactagtaataaaactat

SEQ ID NO: 4764 - DNA, 2673 bp, Homo sapiens
  source 1..2673: mol_type = unassigned DNA
acatctcccggcggcgggccgcggaagcagtgcagacgcggctcctagcggatgggtgctattgtgaggcggttgtagaagagtttcgtgagtgctcgcagctcatacctgtggctgtgtatccgtggccacagctggttggcgtcgccttgaaatcccaggccgtgaggagttagcgagccctgctcacactcggcgctctggttttcggtgggtgtgccctgcacctgcctcttcccccattctcattaataaaggtatccatggagaacactgaaaactcagtggattcaaaatccattaaaaatttggaaccaaagatcatacatggaagcgaatcaatggactctggaatatccctggacaacagttataaaatggattatcctgagatgggtttatgtataataattaataataagaattttcataaaagcactggaatgacatctcggtctggtacagatgtcgatgcagcaaacctcagggaaacattcagaaacttgaaatatgaagtcaggaataaaaatgatcttacacgtgaagaaattgtggaattgatgcgtgatgtttctaaagaagatcacagcaaaaggagcagttttgtttgtgtgcttctgagccatggtgaagaaggaataatttttggaacaaatggacctgttgacctgaaaaaaataacaaactttttcagaggggatcgttgtagaagtctaactggaaaacccaaacttttcattattcaggcctgccgtggtacagaactggactgtggcattgagacagacagtggtgttgatgatgacatggcgtgtcataaaataccagtggaggccgacttcttgtatgcatactccacagcacctggttattattcttggcgaaattcaaaggatggctcctggttcatccagtcgctttgtgccatgctgaaacagtatgccgacaagcttgaatttatgcacattcttacccgggttaaccgaaaggtggcaacagaatttgagtccttttcctttgacgctacttttcatgcaaagaaacagattccatgtattgtttccatgctcacaaaagaactctatttttatcactaaagaaatggttggttggtggttttttttagtttgtatgccaagtgagaagatggtatatttggtactgtatttccctctcattttgacctactctcatgctgcagagggtactttaagacatactccttccatcaaatagaaccactatgaagctacctcaaacttccagtcaggtagttgcaattgaattaaattaggaataaataaaaatggatactggtgcagtcattatgagaggcaatgattgttaatttacagctttcatgattagcaagttacagtgatgctgtgctatgaattttcaagtaattgtgaaaaagttaaacattgaagtaatgaatttttatgatattccccccacttaagactgtgtattctagttttgtcaaactgtagaaatgatgatgtggaagaacttaggcatctgtgggcatggtcaaaggctcaaacctttattttagaattgatatacacggatgacttaactgcatttttagaccatttatctgggattatggttttgtgatgtttgtcctgaacacttttgttgtaaaaaaataataataatgtttaatattgagaaagaaactaatattttatgtgagagaaagtgtgagcaaactaacttgacttttaaggctaaaacttaacattcatagaggggtggagttttaactgtaaggtgctacaatgcccctggatctaccagcataaatatcttctgatttgtccctatgcatatcagttgagcttcatataccagcaatatatctgaagagctattatataaaaaccccaaactgttgattattagccaggtaatgtgaataaattctataggaacatatgaaaatacaacttaaataataaacagtggaatataaggaaagcaataaatgaatgggctgagctgcctgtaacttgagagtagatggtttgagcctgagcagagacatgactcagcctgttccatgaaggcagagccatggaccacgcaggaagggcctacagcccatttctccatacgcactggtatgtgtggatgatgctgccagggcgccatcgccaagtaagaaagtgaagcaaatcagaaacttgtgaagtggaaatgttctaaaggtggtgaggcaataaaaatcatagtactctttgtagcaaaattcttaagtatgttattttctgttgaagtttacaatcaaaggaaaatagtaatgttttatactgtttactgaaagaaaaagacctatgagcacataggactctagacggcatccagccggaggccagagctgagccctcagcccgggaggcaggctccaggcctcagcaggtgcggagccgtcactgcaccaagtctcactggctgtcagtatgacatttcacgggagatttcttgttgctcaaaaaatgagctcgcatttgtcaatgacagtttcttttttcttactagacctgtaacttttgtaaatacacatagcatgtaatggtatcttaaagtgtgtttctatgtgacaattttgtacaaatttgttattttccatttttatttcaaaatatacattcaaacttaaaatta

SEQ ID NO: 4765 - DNA, 2621 bp, Homo sapiens
  source 1..2621: mol_type = unassigned DNA
atccgtggccacagctggttggcgtcgccttgaaatcccaggccgtgaggagttagcgagccctgctcacactcggcgctctggttttcggtgggtgtgccctgcacctgcctcttcccccattctcaatgagatcaccatcctcagaataatttgtaccccgctgggcactagctaatggaggtgatgtcatgctaagcagcacttcagtgagttttgcgggaaccaaagctctgctcccaggagtgtggatttggtgctttcatgtggaaaaagcggatgatgacaagtagagagcaaatgtgcgcatgtctgatgctttaataaaggtatccatggagaacactgaaaactcagtggattcaaaatccattaaaaatttggaaccaaagatcatacatggaagcgaatcaatggactctggaatatccctggacaacagttataaaatggattatcctgagatgggtttatgtataataattaataataagaattttcataaaagcactggaatgacatctcggtctggtacagatgtcgatgcagcaaacctcagggaaacattcagaaacttgaaatatgaagtcaggaataaaaatgatcttacacgtgaagaaattgtggaattgatgcgtgatgtttctaaagaagatcacagcaaaaggagcagttttgtttgtgtgcttctgagccatggtgaagaaggaataatttttggaacaaatggacctgttgacctgaaaaataacaaactttttcagaggggatcgttgtagaagtctaactggaaaacccaaacttttcattattcaggttattattcttggcgaaattcaaaggatggctcctggttcatccagtcgctttgtgccatgctgaaacagtatgccgacaagcttgaatttatgcacattcttacccgggttaaccgaaaggtggcaacagaatttgagtccttttcctttgacgctacttttcatgcaaagaaacagattccatgtattgtttccatgctcacaaaagaactctatttttatcactaaagaaatggttggttggtggttttttttagtttgtatgccaagtgagaagatggtatatttggtactgtatttccctctcattttgacctactctcatgctgcagagggtactttaagacatactccttccatcaaatagaaccactatgaagctacctcaaacttccagtcaggtagttgcaattgaattaaattaggaataaataaaaatggatactggtgcagtcattatgagaggcaatgattgttaatttacagctttcatgattagcaagttacagtgatgctgtgctatgaattttcaagtaattgtgaaaaagttaaacattgaagtaatgaatttttatgatattccccccacttaagactgtgtattctagttttgtcaaactgtagaaatgatgatgtggaagaacttaggcatctgtgggcatggtcaaaggctcaaacctttattttagaattgatatacacggatgacttaactgcatttttagaccatttatctgggattatggttttgtgatgtttgtcctgaacacttttgttgtaaaaaaataataataatgtttaatattgagaaagaaactaatattttatgtgagagaaagtgtgagcaaactaacttgacttttaaggctaaaacttaacattcatagaggggtggagttttaactgtaaggtgctacaatgcccctggatctaccagcataaatatcttctgatttgtccctatgcatatcagttgagcttcatataccagcaatatatctgaagagctattatataaaaaccccaaactgttgattattagccaggtaatgtgaataaattctataggaacatatgaaaatacaacttaaataataaacagtggaatataaggaaagcaataaatgaatgggctgagctgcctgtaacttgagagtagatggtttgagcctgagcagagacatgactcagcctgttccatgaaggcagagccatggaccacgcaggaagggcctacagcccatttctccatacgcactggtatgtgtggatgatgctgccagggcgccatcgccaagtaagaaagtgaagcaaatcagaaacttgtgaagtggaaatgttctaaaggtggtgaggcaataaaaatcatagtactctttgtagcaaaattcttaagtatgttattttctgttgaagtttacaatcaaaggaaaatagtaatgttttatactgtttactgaaagaaaaagacctatgagcacataggactctagacggcatccagccggaggccagagctgagccctcagcccgggaggcaggctccaggcctcagcaggtgcggagccgtcactgcaccaagtctcactggctgtcagtatgacatttcacgggagatttcttgttgctcaaaaaatgagctcgcatttgtcaatgacagtttcttttttcttactagacctgtaacttttgtaaatacacatagcatgtaatggtatcttaaagtgtgtttctatgtgacaattttgtacaaatttgttattttccatttttatttcaaaatatacattcaaacttaaaatt

SEQ ID NO: 4766 - DNA, 549 bp, Homo sapiens
  source 1..549: mol_type = unassigned DNA
agtgcagacgcggctcctagcggatgggtgctattgtgaggcggttgtagaagagtttcgtgagtgctcgcagctcatacctgtggctgtgtatccgtggccacagctggttggcgtcgccttgaaatcccaggccgtgaggagttagcgagccctgctcacactcggcgctctggttttcgttaataaaggtatccatggagaacactgaaaactcagtggattcaaaatccattaaaaatttggaaccaaagatcatacatggaagcgaatcaatggactctggaatatccctggacaacagttataaaatggattatcctgagatgggtttatgtataataattaataataagaattttcataaaagcactggaatgacatctcggtctggtacagatgtcgatgcagcaaacctcagggaaacattcagaaacttgaaatatgaagtcaggaataaaaatgatcttacacgtgaagaaattgtggaattgatgcgtgatgtttctaaagaagatcacagcaaaaggagcagttttgtttgtgtgc

SEQ ID NO: 4767 - DNA, 2540 bp, Homo sapiens
  source 1..2540: mol_type = unassigned DNA
aggggcgggcgggaggcggggctggcgctggagcacatctcccggcggcgggccgcggaagcagtgcagacgcggctcctagcggatgggtgctattgtgaggcggttgtagaagttaataaaggtatccatggagaacactgaaaactcagtggattcaaaatccattaaaaatttggaaccaaagatcatacatggaagcgaatcaatggactctggaatatccctggacaacagttataaaatggattatcctgagatgggtttatgtataataattaataataagaattttcataaaagcactggaatgacatctcggtctggtacagatgtcgatgcagcaaacctcagggaaacattcagaaacttgaaatatgaagtcaggaataaaaatgatcttacacgtgaagaaattgtggaattgatgcgtgatgtttctaaagaagatcacagcaaaaggagcagttttgtttgtgtgcttctgagccatggtgaagaaggaataatttttggaacaaatggacctgttgacctgaaaaaaataacaaactttttcagaggggatcgttgtagaagtctaactggaaaacccaaacttttcattattcaggcctgccgtggtacagaactggactgtggcattgagacagacagtggtgttgatgatgacatggcgtgtcataaaataccagtggaggccgacttcttgtatgcatactccacagcacctggttattattcttggcgaaattcaaaggatggctcctggttcatccagtcgctttgtgccatgctgaaacagtatgccgacaagcttgaatttatgcacattcttacccgggttaaccgaaaggtggcaacagaatttgagtccttttcctttgacgctacttttcatgcaaagaaacagattccatgtattgtttccatgctcacaaaagaactctatttttatcactaaagaaatggttggttggtggttttttttagtttgtatgccaagtgagaagatggtatatttggtactgtatttccctctcattttgacctactctcatgctgcagagggtactttaagacatactccttccatcaaatagaaccactatgaagctacctcaaacttccagtcaggtagttgcaattgaattaaattaggaataaataaaaatggatactggtgcagtcattatgagaggcaatgattgttaatttacagctttcatgattagcaagttacagtgatgctgtgctatgaattttcaagtaattgtgaaaaagttaaacattgaagtaatgaatttttatgatattccccccacttaagactgtgtattctagttttgtcaaactgtagaaatgatgatgtggaagaacttaggcatctgtgggcatggtcaaaggctcaaacctttattttagaattgatatacacggatgacttaactgcatttttagaccatttatctgggattatggttttgtgatgtttgtcctgaacacttttgttgtaaaaaaataataataatgtttaatattgagaaagaaactaatattttatgtgagagaaagtgtgagcaaactaacttgacttttaaggctaaaacttaacattcatagaggggtggagttttaactgtaaggtgctacaatgcccctggatctaccagcataaatatcttctgatttgtccctatgcatatcagttgagcttcatataccagcaatatatctgaagagctattatataaaaaccccaaactgttgattattagccaggtaatgtgaataaattctataggaacatatgaaaatacaacttaaataataaacagtggaatataaggaaagcaataaatgaatgggctgagctgcctgtaacttgagagtagatggtttgagcctgagcagagacatgactcagcctgttccatgaaggcagagccatggaccacgcaggaagggcctacagcccatttctccatacgcactggtatgtgtggatgatgctgccagggcgccatcgccaagtaagaaagtgaagcaaatcagaaacttgtgaagtggaaatgttctaaaggtggtgaggcaataaaaatcatagtactctttgtagcaaaattcttaagtatgttattttctgttgaagtttacaatcaaaggaaaatagtaatgttttatactgtttactgaaagaaaaagacctatgagcacataggactctagacggcatccagccggaggccagagctgagccctcagcccgggaggcaggctccaggcctcagcaggtgcggagccgtcactgcaccaagtctcactggctgtcagtatgacatttcacgggagatttcttgttgctcaaaaaatgagctcgcatttgtcaatgacagtttcttttttcttactagacctgtaacttttgtaaatacacatagcatgtaatggtatcttaaagtgtgtttctatgtgacaattttgtacaaatttgttattttccatttttatttcaaaatatacattcaaacttaaaatta

SEQ ID NO: 4768 - DNA, 1340 bp, Homo sapiens
  source 1..1340: mol_type = unassigned DNA
cagaagcctttgtgatctcacctgttggaatgcactaatgttttctgagccccttaaatatcttgtctacattcttttaagaagctcttcaccaactgtcagaaggcaaccacagaaaaaagccacttaaggtgttggaatccctgggcaaagatttcctcactggtgttttggataacttggtggaacaaaatgtactgaactggaaggaagaggaaaaaaagaaatattacgatgctaaaactgaagacaaagttcgggtcatggcagactctatgcaagagaagcaacgtatggcaggacaaatgcttcttcaaaccttttttaacatagaccaaatatcccccaataaaaaagctcatccgaatatggaggctggaccacctgagtcaggagaatctacagatgccctcaagctttgtcctcatgaagaattcctgagactatgtaaagaaagagctgaagagatctatccaataaaggagagaaacaaccgcacacgcctggctctcatcatatgcaatacagagtttgaccatctgcctccgaggaatggagctgactttgacatcacagggatgaaggagctacttgagggtctggactatagtgtagatgtagaagagaatctgacagccagggatatggagtcagcgctgagggcatttgctaccagaccagagcacaagtcctctgacagcacattcttggtactcatgtctcatggcatcctggagggaatctgcggaactgtgcatgatgagaaaaaaccagatgtgctgctttatgacaccatcttccagatattcaacaaccgcaactgcctcagtctgaaggacaaacccaaggtcatcattgtccaggcctgcagaggtgcaaaccgtggggaactgtgggtcagagactctccagcatccttggaagtggcctcttcacagtcatctgagaacctagaggaagatgctgtttacaagacccacgtggagaaggacttcattgctttctgctcttcaacgccacacaacgtgtcctggagagacagcacaatgggctctatcttcatcacacaactcatcacatgcttccagaaatattcttggtgctgccacctagaggaagtatttcggaaggtacagcaatcatttgaaactccaagggccaaagctcaaatgcccaccatagaacgactgtccatgacaagatatttctacctctttcctggcaattgaaaatggaagccacaagcagcccagccctccttaatcaacttcaaggagcaccttcattagtacagcttgcatatttaacattttgtatttcaataaaagtgaagacaaacg

SEQ ID NO: 4769 - DNA, 500 bp, Homo sapiens
  source 1..500: mol_type = unassigned DNA
aaaagaagttgagaaccagagaaaccgacctaaggggattctcccatttggcccgtcctaccctaaagtcaccacctgctgcttttctggagcgcttaccagtgaccaagaggaacagaacacagagcagcctggcagtgtccaagcaacaagcctccgctcctccttcctgcaccctggggctcctgaaactcacatgggtaaaaaagatacagtaaagacataaataccacatttgacaaatggaaaaaaaggagtgtccagaaaagagtagcagcagtgaggaagagctgccgagacgggacagtggatccagtaggaacatagatgcatccaaactcattagactacaaggatcacggaaactgttggttgacaatagcatacgggaactgcaatacacaaaaactggaattttttttcaggctgaggcctgtgtgacaaatgatacgtaagggacatctatttgttgggaaaaaattaaagatttggaattttgc

SEQ ID NO: 4770 - DNA, 3934 bp, Homo sapiens
  source 1..3934: mol_type = unassigned DNA
ccccgtgcgcctcttgcccgcagaccctgaggacacggccatgccgggccgggcggaggcgggggaggccgaggaggaggccggggccggctcggggtctgaggcggaggaggacgcgctgtgggagcgaatcgagggcgtccggcatcggctggctcgcgccctgaacccggccaagctcacgccgtatctgcgccagtgccgggtcatcgacgagcaggacgaggaggaggtgctgagcacctaccgcttcccgtgccgcgtcaaccgcaccgggcgcctgatggacatcttgcgctgccgtggcaagaggggctatgaggccttcctggaagccctggagttctactaccccgaacacttcacgctgctcacgggccaggaacccgcccagcgctgctccatgatcctcgatgaggaggggcctgagggcctgacccaattcttgatgacagaggtgcgacggctgcgggaagctcgcaagagccagctgcagcgggagcagcaactgcaggcccggggccgggtgctcgaggaggagcgggcagggctggagcagcggctgcgggaccagcagcaggctcaggagcgctgtcaacggctgcgggaggactgggaggcgggcagcctggagctgctgcggctcaaggatgagaactacatgatcgccatgcgcctggcacagctcagtgaggagaagaactcggctgtacttcgcagccgtgacctgcagctggcggtggatcagctcaagctcaaagtgagtcggctggaggaagagtgtgcactgcttcgaagggccaggggcccgccccctggggcagaggagaaggagaaggagaaggagaaggagaaggagccagacaatgtggaccttgtctctgagctgcgtgctgagaaccagcggctgacggcgtcactgcgggagttgcaggagggcctgcagcaggaggcgagccggccgggggccccgggctccgagcgcatcctgctggacatcctagagcatgactggcgggaggcgcaggacagcaggcaggagctgtgccagaagctgcatgccgtgcagggggagctgcagtgggccgaggagctgcgcgaccagtacctgcaggagatggaagacctgcggctcaagcaccgcacgctgcagaaggactgtgacctgtacaagcaccgcatggccactgtcctggcccaactggaggagattgagaaggagcgagaccaggccatccagagccgtgaccggatccagttgcagtactcacagagcctcatcgagaaggaccagtaccgcaagcaggtgcggggcctggaggcggagcgggatgagctgctgacaacgctcaccagcctggagggcaccaaggctctgctggaggttcagctgcagcgggcccagggtggcacctgcctcaaggcctgtgcctcctcccattccctgtgctccaacctcagcagcacttggagcctgagcgagttcccctcccctctgggaggcccagaagcaactggggaggcagctgtcatggggggacctgagcctcacaactcggaggaagccacagacagtgaaaaggagatcaatcggctctccatcctgcccttcccccccagtgccggctccatcctccgccggcagcgtgaggaagaccccgcaccccctaagagatccttcagcagcatgtcagacatcacagggagtgtgacacttaagccctggtcccctggcctctcttcgtcctcatcctctgacagcgtgtggcctttgggaaagccggaaggcctcctggctcggggctgtggcctggacttcctcaacaggtctctggctattcgggtgtctggccggagccccccagggggcccagagccgcaggacaagggaccagatggactgtcgttttatggggacagatggtctggggctgtggtgcgcagggtgctgtctgggcctgggtccgccaggatggaaccaagagagcaaagggtggaagctgctggtctggagggggcgtgcctggaagccgaggcccagcagagaaccttgctctggaatcaggggtccacactcccctccctgatggactcgaaggcctgccagtccttccacgaggccctagaagcctgggcaaagggaccaggtgccgagcccttctacattcgtgccaacctcaccttgcctgagagggcagatccccatgccctttgcgtgaaagcccaagagatccttcgactggtggactcggcatacaagcggaggcaggaatggttctgcacccgggttgaccccctcactctgcgggacctggaccggggcaccgtgcccaattatcagagagcccagcagctcctagaagttcaggagaaatgcctgccctccagccggcaccgaggcccccgcagtaatctgaagaagagagccctggaccagctgcggctggtgaggcccaagcccgtgggggcgcctgcaggggactccccggatcagctgctgctggagccctgtgcagagccggagcggagcctcagaccctacagtttggtgcggccgctactggtgtctgccctgcggcccgtggtgctgttgcctgagtgcctggcgccccggctcatccgtaacctgctagacctgcccagctcccggctggacttccaagtgtgcccagcggaaagcctctctggggaggaactgtgcccatcctcagcgcctggagcccccaaggctcagcctgccacccctgggctaggcagcaggatccgggccatccaggagtctgttgggaagaagcactgcctgctggagctgggtgctcggggtgtgcgggagctggtgcagaacgagatctaccccatcgtcatccacgtggaggtgactgagaagaatgtccgggaagtcaggggtctgctgggccggccgggctggcgggactcagagctgctgcggcagtgccgtggctcagagcaggtgctctgggggctgccctgctcctgggtgcaggtgcccgcccatgagtggggacacgcagaggagctggccaaggtggtgcgcggccgcatcctgcaggagcaggcccgcctcgtgtgggtggagtgcggcagcagcagaggctgccccagcagcagtgaggcctgaggctcatctgatacctgcaccttctccccaagccagcgtggaccctggtgtctatggtgaagctgggccctcccaccctgagccttcctagacccttggactctcagatgcagggcccttggctctggcctctcacccccaaggctgtctctggccctgccgagcctatgggagtcccgggacagagtgcccactcccctctacttgctgctctgggcctccccacctttcctggggtctccacattcccactagtgggtcttatgtgtgtctgtgtcttctccttaaacactcgccctggagtctgttctcacacctgtgcgcaggtttgcacactcaagttctcatgggcaggctcaggtctgtcccgctgccctgggcacgaggtctcctgaggacctgggcctgttctgctcctaggagacctgagcccgttaccgcgtgactcccaccatccagctcgcgctcctcgtggattcagccatgcatggactggggtgttccctggcccatggtcacctgtgcccctcgtgtctcctcacatgggtgtctgtggttctctcctgtgtaaatgtcacgccccacccctgtttcatgtgggcactaacacgtgtgcgttcctggcgggcacactcaggaccgtgcctcacagggcccactccctgcctatgcctccctcttggggggccgaggagggcggctgctctgtcatgagaatgtacggcccgtggatgattaacgggcctttttcacttagaagctgcacattatggagcattaaacacttttgtcata

SEQ ID NO: 4771 - DNA, 4113 bp, Homo sapiens
  source 1..4113: mol_type = unassigned DNA
ggcgtgcagacggacgcgcggggtggccgggggccggacgcacgacccggggcgggcggcaatgtggggaggcccgggcagcccaggaggctgcggggacgggggcggagccgggggcgccacgggcaccgcccccctgcgccggcggagccgccgcccgagtgcggacccgggagcccgaggcgactgtagcgtgcgggaccctgaggacacggccatgccgggccgggcggaggcgggggaggccgaggaggaggccggggccggctcggggtctgaggcggaggaggacgcgctgtgggagcgaatcgagggcgtccggcatcggctggctcgcgccctgaacccggccaagctcacgccgtatctgcgccagtgccgggtcatcgacgagcaggacgaggaggaggtgctgagcacctaccgcttcccgtgccgcgtcaaccgcaccgggcgcctgatggacatcttgcgctgccgtggcaagaggggctatgaggccttcctggaagccctggagttctactaccccgaacacttcacgctgctcacgggccaggaacccgcccagcgctgctccatgatcctcgatgaggaggggcctgagggcctgacccaattcttgatgacagaggtgcgacggctgcgggaagctcgcaagagccagctgcagcgggagcagcaactgcaggcccggggccgggtgctcgaggaggagcgggcagggctggagcagcggctgcgggaccagcagcaggctcaggagcgctgtcaacggctgcgggaggactgggaggcgggcagcctggagctgctgcggctcaaggatgagaactacatgatcgccatgcgcctggcacagctcagtgaggagaagaactcggctgtacttcgcagccgtgacctgcagctggcggtggatcagctcaagctcaaagtgagtcggctggaggaagagtgtgcactgcttcgaagggccaggggcccgccccctggggcagaggagaaggagaaggagaaggagaaggagaaggagccagacaatgtggaccttgtctctgagctgcgtgctgagaaccagcggctgacggcgtcactgcgggagttgcaggagggcctgcagcaggaggcgagccggccgggggccccgggctccgagcgcatcctgctggacatcctagagcatgactggcgggaggcgcaggacagcaggcaggagctgtgccagaagctgcatgccgtgcagggggagctgcagtgggccgaggagctgcgcgaccagtacctgcaggagatggaagacctgcggctcaagcaccgcacgctgcagaaggactgtgacctgtacaagcaccgcatggccactgtcctggcccaactggaggagattgagaaggagcgagaccaggccatccagagccgtgaccggatccagttgcagtactcacagagcctcatcgagaaggaccagtaccgcaagcaggtgcggggcctggaggcggagcgggatgagctgctgacaacgctcaccagcctggagggcaccaaggctctgctggaggttcagctgcagcgggcccagggtggcacctgcctcaaggcctgtgcctcctcccattccctgtgctccaacctcagcagcacttggagcctgagcgagttcccctcccctctgggaggcccagaagcaactggggaggcagctgtcatggggggacctgagcctcacaactcggaggaagccacagacagtgaaaaggagatcaatcggctctccatcctgcccttcccccccagtgccggctccatcctccgccggcagcgtgaggaagaccccgcaccccctaagagatccttcagcagcatgtcagacatcacagggagtgtgacacttaagccctggtcccctggcctctcttcgtcctcatcctctgacagcgtgtggcctttgggaaagccggaaggcctcctggctcggggctgtggcctggacttcctcaacaggtctctggctattcgggtgtctggccggagccccccagggggcccagagccgcaggacaagggaccagatggactgtcgttttatggggacagatggtctggggctgtggtgcgcagggtgctgtctgggcctgggtccgccaggatggaaccaagagagcaaagggtggaagctgctggtctggagggggcgtgcctggaagccgaggcccagcagagaaccttgctctggaatcaggggtccacactcccctccctgatggactcgaaggcctgccagtccttccacgaggccctagaagcctgggcaaagggaccaggtgccgagcccttctacattcgtgccaacctcaccttgcctgagagggcagatccccatgccctttgcgtgaaagcccaagagatccttcgactggtggactcggcatacaagcggaggcaggaatggttctgcacccgggttgaccccctcactctgcgggacctggaccggggcaccgtgcccaattatcagagagcccagcagctcctagaagttcaggagaaatgcctgccctccagccggcaccgaggcccccgcagtaatctgaagaagagagccctggaccagctgcggctggtgaggcccaagcccgtgggggcgcctgcaggggactccccggatcagctgctgctggagccctgtgcagagccggagcggagcctcagaccctacagtttggtgcggccgctactggtgtctgccctgcggcccgtggtgctgttgcctgagtgcctggcgccccggctcatccgtaacctgctagacctgcccagctcccggctggacttccaagtgtgcccagcggaaagcctctctggggaggaactgtgcccatcctcagcgcctggagcccccaaggctcagcctgccacccctgggctaggcagcaggatccgggccatccaggagtctgttgggaagaagcactgcctgctggagctgggtgctcggggtgtgcgggagctggtgcagaacgagatctaccccatcgtcatccacgtggaggtgactgagaagaatgtccgggaagtcaggggtctgctgggccggccgggctggcgggactcagagctgctgcggcagtgccgtggctcagagcaggtgctctgggggctgccctgctcctgggtgcaggtgcccgcccatgagtggggacacgcagaggagctggccaaggtggtgcgcggccgcatcctgcaggagcaggcccgcctcgtgtgggtggagtgcggcagcagcagaggctgccccagcagcagtgaggcctgaggctcatctgatacctgcaccttctccccaagccagcgtggaccctggtgtctatggtgaagctgggccctcccaccctgagccttcctagacccttggactctcagatgcagggcccttggctctggcctctcacccccaaggctgtctctggccctgccgagcctatgggagtcccgggacagagtgcccactcccctctacttgctgctctgggcctccccacctttcctggggtctccacattcccactagtgggtcttatgtgtgtctgtgtcttctccttaaacactcgccctggagtctgttctcacacctgtgcgcaggtttgcacactcaagttctcatgggcaggctcaggtctgtcccgctgccctgggcacgaggtctcctgaggacctgggcctgttctgctcctaggagacctgagcccgttaccgcgtgactcccaccatccagctcgcgctcctcgtggattcagccatgcatggactggggtgttccctggcccatggtcacctgtgcccctcgtgtctcctcacatgggtgtctgtggttctctcctgtgtaaatgtcacgccccacccctgtttcatgtgggcactaacacgtgtgcgttcctggcgggcacactcaggaccgtgcctcacagggcccactccctgcctatgcctccctcttggggggccgaggagggcggctgctctgtcatgagaatgtacggcccgtggatgattaacgggcctttttcacttagaagctgcacattatggagcattaaacacttttgtcataga

SEQ ID NO: 4772 - DNA, 3127 bp, Homo sapiens
  source 1..3127: mol_type = unassigned DNA
gcacttggctggggtgtgggtctgggggcaagatcttgggcccagggtctacctgtatgggccaggctcagccccttgaagacccctagtcatgggggtgggagtaggtcttgggaatggcctccgtctgctgccctggatggaggcgagccggccgggggccccgggctccgagcgcatcctgctggacatcctagagcatgactggcgggaggcgcaggacagcaggcaggagctgtgccagaagctgcatgccgtgcagggggagctgcagtgggccgaggagctgcgcgaccagtacctgcaggagatggaagacctgcggctcaagcaccgcacgctgcagaaggactgtgacctgtacaagcaccgcatggccactgtcctggcccaactggaggagattgagaaggagcgagaccaggccatccagagccgtgaccggatccagttgcagtactcacagagcctcatcgagaaggaccagtaccgcaagcaggtgcggggcctggaggcggagcgggatgagctgctgacaacgctcaccagcctggagggcaccaaggctctgctggaggttcagctgcagcgggcccagggtggcacctgcctcaaggcctgtgcctcctcccattccctgtgctccaacctcagcagcacttggagcctgagcgagttcccctcccctctgggaggcccagaagcaactggggaggcagctgtcatggggggacctgagcctcacaactcggaggaagccacagacagtgaaaaggagatcaatcggctctccatcctgcccttcccccccagtgccggctccatcctccgccggcagcgtgaggaagaccccgcaccccctaagagatccttcagcagcatgtcagacatcacagggagtgtgacacttaagccctggtcccctggcctctcttcgtcctcatcctctgacagcgtgtggcctttgggaaagccggaaggcctcctggctcggggctgtggcctggacttcctcaacaggtctctggctattcgggtgtctggccggagccccccagggggcccagagccgcaggacaagggaccagatggactgtcgttttatggggacagatggtctggggctgtggtgcgcagggtgctgtctgggcctgggtccgccaggatggaaccaagagagcaaagggtggaagctgctggtctggagggggcgtgcctggaagccgaggcccagcagagaaccttgctctggaatcaggggtccacactcccctccctgatggactcgaaggcctgccagtccttccacgaggccctagaagcctgggcaaagggaccaggtgccgagcccttctacattcgtgccaacctcaccttgcctgagagggcagatccccatgccctttgcgtgaaagcccaagagatccttcgactggtggactcggcatacaagcggaggcaggaatggttctgcacccgggttgaccccctcactctgcgggacctggaccggggcaccgtgcccaattatcagagagcccagcagctcctagaagttcaggagaaatgcctgccctccagccggcaccgaggcccccgcagtaatctgaagaagagagccctggaccagctgcggctggtgaggcccaagcccgtgggggcgcctgcaggggactccccggatcagctgctgctggagccctgtgcagagccggagcggagcctcagaccctacagtttggtgcggccgctactggtgtctgccctgcggcccgtggtgctgttgcctgagtgcctggcgccccggctcatccgtaacctgctagacctgcccagctcccggctggacttccaagtgtgcccagcggaaagcctctctggggaggaactgtgcccatcctcagcgcctggagcccccaaggctcagcctgccacccctgggctaggcagcaggatccgggccatccaggagtctgttgggaagaagcactgcctgctggagctgggtgctcggggtgtgcgggagctggtgcagaacgagatctaccccatcgtcatccacgtggaggtgactgagaagaatgtccgggaagtcaggggtctgctgggccggccgggctggcgggactcagagctgctgcggcagtgccgtggctcagagcaggtgctctgggggctgccctgctcctgggtgcaggtgcccgcccatgagtggggacacgcagaggagctggccaaggtggtgcgcggccgcatcctgcaggagcaggcccgcctcgtgtgggtggagtgcggcagcagcagaggctgccccagcagcagtgaggcctgaggctcatctgatacctgcaccttctccccaagccagcgtggaccctggtgtctatggtgaagctgggccctcccaccctgagccttcctagacccttggactctcagatgcagggcccttggctctggcctctcacccccaaggctgtctctggccctgccgagcctatgggagtcccgggacagagtgcccactcccctctacttgctgctctgggcctccccacctttcctggggtctccacattcccactagtgggtcttatgtgtgtctgtgtcttctccttaaacactcgccctggagtctgttctcacacctgtgcgcaggtttgcacactcaagttctcatgggcaggctcaggtctgtcccgctgccctgggcacgaggtctcctgaggacctgggcctgttctgctcctaggagacctgagcccgttaccgcgtgactcccaccatccagctcgcgctcctcgtggattcagccatgcatggactggggtgttccctggcccatggtcacctgtgcccctcgtgtctcctcacatgggtgtctgtggttctctcctgtgtaaatgtcacgccccacccctgtttcatgtgggcactaacacgtgtgcgttcctggcgggcacactcaggaccgtgcctcacagggcccactccctgcctatgcctccctcttggggggccgaggagggcggctgctctgtcatgagaatgtacggcccgtggatgattaacgggcctttttcacttagaagctgcacattatggagcattaaacacttttgtcata

SEQ ID NO: 4773 - DNA, 2140 bp, Homo sapiens
  source 1..2140: mol_type = unassigned DNA
agtgcactcatagtccagcaaactggccatgcacgtctgctcccagcttggtggtcacaccacagctgcccaccccccataccaggccaacttctggctgcacactccgaactggtgattggttaggggcatgggattttgtttgaagctgtgaagacagccacggtcacactgtggcagctctgtagcccttcatagtttagaggcctctgcccacttgctgtcttgtttgattcttgcaacacctttgggaggcaaatgatggggccaggggattgactgggcccattttactgatgaggaaactgaggcccagaggaggtggatcagctcaagctcaaagtgagtcggctggaggaagagtgtgcactgcttcgaagggccaggggcccgccccctggggcagaggagaaggagaaggagaaggagaaggagaaggagccagacaatgtggaccttgtctctgagctgcgtgctgagaaccagcggctgacggcgtcactgcgggagttgcaggagggcctgcagcaggaggcgagccggccgggggccccgggctccgagcgcatcctgctggacatcctagagcatgactggcgggaggcgcaggacagcaggcaggagctgtgccagaagctgcatgccgtgcagggggagctgcagtgggccgaggagctgcgcgaccagtacctgcaggagatggaagacctgcggctcaagcaccgcacgctgcagaaggactgtgacctgtacaagcaccgcatggccactgtcctggcccaactggaggagattgagaaggagcgagaccaggccatccagagccgtgaccggatccagttgcagtactcacagagcctcatcgagaaggaccagtaccgcaagcaggtgcggggcctggaggcggagcgggatgagctgctgacaacgctcaccagcctggagggcaccaaggctctgctggaggttcagctgcagcgggcccagggtggcacctgcctcaaggcctgtgcctcctcccattccctgtgctccaacctcagcagcacttggagcctgagcgagttcccctcccctctgggaggcccagaagcaactggggaggcagctgtcatggggggacctgagcctcacaactcggaggaagccacagacagtgaaaaggagatcaatcggctctccatcctgcccttcccccccagtgccggctccatcctccgccggcagcgtgaggaagaccccgcaccccctaagagatccttcagcagcatgtcagacatcacagggagtgtgacacttaagccctggtcccctggcctctcttcgtcctcatcctctgacagcgtgtggcctttgggaaagccggaaggcctcctggctcggggctgtggcctggacttcctcaacaggtctctggctattcgggtgtctggccggagccccccagggggcccagagccgcaggacaagggaccagatggactgtcgttttatggggacagatggtctggggctgtggtgcgcagggtgctgtctgggcctgggtccgccaggatggaaccaagagagcaaagggtggaagctgctggtctggagggggcgtgcctggaagccgaggcccagcagagaaccttgctctggaatcaggggtccacactcccctccctgatggactcgaaggcctgccagtccttccacgaggccctagaagcctgggcaaagggaccaggtgccgagcccttctacattcgtgccaacctcaccttgcctgagagggcagatccccatgccctttgcgtgaaagcccaagagatccttcgactggtggactcggcatacaagcggaggcaggaatggttctgcacccgggttgaccccctcactctgcgggacctggaccggggcaccgtgcccaattatcagagagcccagcagctcctagaagttcaggagaaatgcctgccctccagccggcaccgaggcccccgcagtaatctgaagaagagagccctggaccagctgcggctggtgaggcccaagcccgtgggggcgcctgcaggggactccccggatcagctgctgctggagccctgtgcagagccggagcggagcctcagaccctacagtttggtgcggccgc

SEQ ID NO: 4774 - DNA, 584 bp, Homo sapiens
  source 1..584: mol_type = unassigned DNA
gactcctgcccgcgccgcccgcagccccctcccggccctgcagcccctgggcgggcggcgcccctcggaggacggctccgggcccggggggacggagggcctggtcgcctggaggaagccggaggcctgcgtggaggaggcgccccgcgcagctggctggcggagcatgagcgccccaggaggagagagaatttgagaggaacacgaggaacccccaggacccagctggctcacaaccgcatcccaagcactgcaagtccagatgcaacgggagcctggctcaagggacgacaagatccagccggaaagtgtagaagtcacaccccaatggcgggatagcagcccctgtgtgtgagcacccctccatgccaggaggagggccagagatggatgactacatggagacgctgaaggatgaagaggacgccttgtgggagaatgtggagtgtaaccggcacatgctcagccgctatatcaaccctgccaagctcacgccctacctgcgtcagtgtaaggtcattgatgagcaggatgaagatgaagtgcttaatgcccctatgctgccatccaagatcaaccgagca

SEQ ID NO: 4775 - DNA, 4366 bp, Homo sapiens
  source 1..4366: mol_type = unassigned DNA
agtctcatttcctgtcgggttttgcatttccctcccccgcccctcccagcctatgacatactttctctccttttttctctcctgcctcctctggccttcggactcctgcccgcgccgcccgcagccccctcccggccctgcagcccctgggcgggcggcgcccctcggaggacggctccgggcccggggggacggagggcctggtcgcctggaggaagccggaggcctgcgtggaggaggcgccccgcgcagctggctggcggagcatgagcgccccagatcccaagcactgcaagtccagatgcaacgggagcctggctcaagggacgacaagatccagccggaaagtgtagaagtcacaccccaatggcgggatagcagcccctgtgtgtgagcacccctccatgccaggaggagggccagagatggatgactacatggagacgctgaaggatgaagaggacgccttgtgggagaatgtggagtgtaaccggcacatgctcagccgctatatcaaccctgccaagctcacgccctacctgcgtcagtgtaaggtcattgatgagcaggatgaagatgaagtgcttaatgcccctatgctgccatccaagatcaaccgagcaggccggctgttggacattctacataccaaggggcaaaggggctatgtggtcttcttggagagcctagaattttattacccagaactgtacaaactggtgactgggaaagagcccactcggagattctccaccattgtggtggaggaaggccacgagggcctcacgcacttcctgatgaacgaggtcatcaagctgcagcagcagatgaaggccaaggacctgcaacgctgcgagctgctggccaggttgcggcagctggaggatgagaagaagcagatgacgctgacgcgcgtggagctgctaaccttccaggagcggtactacaagatgaaggaagagcgggacagctacaatgacgagctggtcaaggtgaaggacgacaactacaacttagccatgcgctacgcacagctcagtgaggagaagaacatggcggtcatgaggagccgagacctccaactcgagatcgatcagctaaagcaccggttgaataagatggaggaggaatgtaagctggagagaaatcagtctctaaaactgaagaatgacattgaaaatcggcccaagaaggagcaggttctggaactggagcgggagaatgaaatgctgaagaccaaaaaccaggagctgcagtccatcatccaggccgggaagcgcagcctgccagactcagacaaggccatcctggacatcttggaacacgaccgcaaggaggccctggaggacaggcaggagctggtcaacaggatctacaacctgcaggaggaggcccgccaggcagaggagctgcgagacaagtacctggaggagaaggaggacctggagctcaagtgctcgaccctgggaaaggactgtgaaatgtacaagcaccgcatgaacacggtcatgctgcagctggaggaggtggagcgggagcgggaccaggccttccactcccgagatgaagctcagacacagtactcgcagtgcttaatcgaaaaggacaagtacaggaagcagatccgcgagctggaggagaagaacgacgagatgaggatcgagatggtgcggcgggaggcctgcatcgtcaacctggagagcaagctgcggcgcctctccaaggacagcaacaacctggaccagagtctgcccaggaacctgccagtaaccatcatctctcaggactttggggatgccagccccaggaccaatggtcaagaagctgacgattcttccacctcggaggagtcacctgaagacagcaagtacttcctgccctaccatccgccccagcgcaggatgaacctgaagggcatccagctgcagagagccaaatcccccatcagcctgaagcgaacatcagattttcaagccaaggggcacgaggaagaaggcacggacgccagccctagctcctgcggatctctgcccatcaccaactccttcaccaagatgcagcccccccggagccgcagcagcatcatgtcaatcaccgccgagcccccgggaaacgactccatcgtcagacgctacaaggaggacgcgccccatcgcagcacagtcgaagaagacaatgacagcggcgggtttgacgccttagatctggatgatgacagtcacgaacgctactccttcggaccctcctccatccactcctcctcctcctcccaccaatccgagggcctggatgcctacgacctggagcaggtcaacctcatgttcaggaagttctctctggaaagacccttccggccttcggtcacctctgtggggcacgtgcggggcccagggccctcggtgcagcacacgacgctgaatggcgacagcctcacctcccagctcaccctgctggggggcaacgcgcgagggagcttcgtgcactcggtcaagcctggctctctggccgagaaagccggcctccgtgagggccaccagctgctgctgctagaaggctgcatccgaggcgagaggcagagtgtcccgttggacacatgcaccaaagaggaagcccactggaccatccagaggtgcagcggccccgtcacgctgcactacaaggtcaaccacgaagggtaccggaagctggtgaaggacatggaggacggcctgatcacatcgggggactcgttctacatccggctgaacctgaacatctccagccagctggacgcctgcaccatgtccctgaagtgtgacgatgttgtgcacgtccgtgacaccatgtaccaggacaggcacgagtggctgtgcgcgcgggtcgaccctttcacagaccatgacctggatatgggcaccatacccagctacagccgagcccagcagctcctcctggtgaaactgcagcgcctgatgcaccgaggcagccgggaggaggtagacggcacccaccacaccctgcgggcactccggaacaccctgcagccagaagaagcgctttcaacaagcgacccccgggtcagcccccgtctctcgcgagcaagcttcctttttggccagctccttcagttcgtcagcaggtccgagaacaagtataagcggatgaacagcaacgagcgggtccgcatcatctcggggagtccgctagggagcctggcccggtcctcgctggacgccaccaagctcttgactgagaagcaggaagagctggaccctgagagcgagctgggcaagaacctcagcctcatcccctacagcctggtacgcgccttctactgcgagcgccgccggcccgtgctcttcacacccaccgtgctggccaagacgctggtgcagaggctgctcaactcgggaggtgccatggagttcaccatctgcaagtcagatatcgtcacaagagatgagttcctcagaaggcagaagacggagaccatcatctactcccgagagaagaaccccaacgcgttcgaatgcatcgcccctgccaacattgaagctgtggccgccaagaacaagcactgcctgctggaggctgggatcggctgcacaagagacttgatcaagtccaacatctaccccatcgtgctcttcatccgggtgtgtgagaagaacatcaagaggttcagaaagctgctgccccgacctgagacggaggaggagttcctgcgcgtgtgccggctgaaggagaaggagctggaggccctgccgtgcctgtacgccacggtggaacctgacatgtggggcagcgtagaggagctgctccgcgttgtcaaggacaagatcggcgaggagcagcgcaagaccatctgggtggacgaggaccagctgtgaggcgggcgccctgggcagagagactctgtggcgcggggcatcctatgaggcaggcaccctgggcagagagatgcagtgggtgcggggggatcctgtggcccacagagctgccccagcagacgctccgccccacccggtgatggagccccggggggacagtcgtgcctggggaggagcagggtacagcccattcccccagccctggctgacctggcctagcagtttggccctgctggccttagcagggagacaggggagcaaagaacgccaagccggaggcccgaggccagccggcctctcgagagccagagcagcagttgaatgtaatgctggggacaggcatgctgccgccagtagggcggggacccggacagccaggtgactaccagtcctggggacacactcaccataaacacatccccaggcaggacagatcggggaaggggtgtgtaccaggctatgatttctcttgcattaaaatgtattattatttcttt

SEQ ID NO: 4776 - DNA, 4221 bp, Homo sapiens
  source 1..4221: mol_type = unassigned DNA
ccacaaggaccccggatcagagagtgctccgagctgggttgccccactgtgcttgtatctgcactctccaacactaggcatcattgacatgttaaagcttagccaaatagaattgttctttgtcattctttttttaacttttacttattcattaggatgatttcataatatatttcctggtttagaggaaacaggaacaatggctaccgagagtactccctcagagatcatagaaagagaaagaaaaaagttgcttgaaatccttcaacatgatcctgattctatcttagacacgttaacttctcggaggctgatttctgaggaagagtatgagactctggagaatgttacagatctcctgaagaaaagtcggaagctgttaattttggtacagaaaaagggagaggcgacctgtcagcattttctcaagtgtttatttagtacttttccacagtcagctgccatttgcggcttaaggcatgaagttttaaaacatgagaatacagtacctcctcaatctatgggggcaagcagtaattcagaagatgctttttctcctggaataaaacagcctgaagcccctgagatcacagtgttcttcagtgagaaggaacacttggatttggaaacctctgagtttttcagggacaagaaaactagttatagggaaacagctttgtctgccaggaagaatgagaaggaatatgacacaccagaagtcacattatcatattcagttgagaaagttggatgtgaagttccagcaactattacatatataaaagatggacagagatatgaggagctagatgattctttatacttaggaaaagaggaatatctaggatctgttgacacccctgaagatgcagaagccactgtggaagaggaggtttatgatgacccagagcacgttggatatgatggtgaagaggacttcgagaattcagaaaccacagagttctctggtgaagaaccaagttatgagggatcagaaaccagcctttcattggaggaggaacaggagaaaagtatagaagaaagaaaaaaggtgtttaaagatgtcctgttatgtttgaacatggatagaagcagaaaggttctgccagattttgttaaacaattctccttagatcgaggatgtaagtggacccctgagagtccaggagacttagcctggaatttcctgatgaaagttcaagcacgagatgtgaccgctagggattcaatcctcagtcacaaggttctggatgaagatagcaaggaggatttgctggctggagtggagaatttggaaattcgagacatacaaaccattaatccccttgacgtgctttgtgccaccatgctgtgttcagatagctctttgcaacgccaagtcatgtcaaacatgtatcagtgccagtttgctcttcccctgctactgccagatgcagaaaacaacaaaagcatcttaatgctgggggccatgaaagacattgtgaagaagcagtcaacacagttttcaggggggcctacagaggatacagaaaagtttctgactctcatgaagatgcctgtcatctcttttgtgcgtctaggatactgtagcttctctaagtccagaatcctcaacacacttctcagccctgcccagttgaaattacacaaaatctttcttcatcaagatttgcctcttttggtgcttccccggcaaatctctgatggcctggttgagataacatggtgttttcctgatagcgatgatagaaaggaaaacccctttttccaaaagcctgttgctctggctaatctccgtggaaatctagaaagcttttggactcagtttggttttttgatggaagtttcttcagctgtgttttttttcactgactgtttaggtgagaaggaatgggacttgctaatgtttttaggagaggctgccattgaaagatgctactttgttctcagttcccaagccagggagagtgaagaggctcaaatttttcagaggatactgaacttgaagccagcacagctactgttttgggagaggggagatgctggggatagaaggaagaacatggagggccttcaagctgccctccaggaagtgatgttctcttcttgcctcagatgtgtgtctgtggaggatatggccgccctggccagggagctggggattcaggtagatgaagactttgaaaacactcagagaattcaagtttcctctggagaaaacatggctgggacagctgaaggtgagggtcagcaaagacacagtcagctaaaaagctcatctaaaagccaggctctaatgccaattcaagagcctgggactcaatgtgagctcagccagaatcttcagaatctctatggtaccccagtattcaggcctgttctagagaactcctggctctttccaaccagaattggaggtaactttaaccatgtttccttgaaagcctcctgggttatgggccgcccctttgggtcagagcagaggcctaagtggttccatcctttgccttttcagaatgcaggggcccagggccgaggtaaaagttttggtattcaatccttccatccccagatattttattcaggtgaaagattcatgaaattttccagagttgctcggggatgtcactcgaatggaacatttgggagactgccaagacccatttgtcagcatgtacaggcctgccctgagagaccacaaatgatgggaactcttgaaaggtctagggcagtagcctccaagataggtcactcctattccctggattcacagccagcaagagcagtagggaagccatggcctcagcaagcttgcaccagggtaacagagttaactgaagcaactggaaaactgataagaacatcccatattggaaagcctcaccctcagtcctttcaaccagcagcagccacacaaaaactaagacctgcttctcagcaaggagtccagatgaagacacaaggtggggcttcaaatccagctctccaaatagggtcccatcccatgtgcaagagctctcagttcaaatccgatcagtccaacccatccacagtcaaacactcccagcctaaacccttccattctgtgccctctcaacctaaatcctctcagacaaaatcctgtcagtcccagccctcccaaactaaaccttctccatgcaaatctactcagcctaagccaagccagccctggcctccccagtctaagccttctcagcccagaccccctcaacctaagtcatcctcaaccaatccttcacaagctaaggcacaccactcaaaagcagggcagaagaggggagggaagcattaaagagctaactccagagatctataaagcatatcctttacccaggccattcctatcatatagtaagcagaagagttgccatgaaagtaaaagactactgtcattagcatgtaaaacaaagaaagatatacatgactgaattggatatctttgtttgtttgtttgagacagagtttcactcttgttgcccaggctggagtgcaatggcacgatctcggctcaccgcaacctctgcttcctggcttaaagtgattctcctgcctcagcctctcgagtagctgggattacaggcatgcaccaccacacccagctaattttgtatttttagtagaggcagggtttctccatgttggtcaggctggtcttgaactcccgacctcaggtgatccgcccacctaggcctctcaaagtgttgggattacgtgtgtaagccacagtgcccagcccgaattggatatctttaagatatctgtaagtgttatatccctaaccaagaagaaaaatatgaaaataattaagactagaatcaagcagtagataattgaatccaatcttgggtattattagataatgtataacttgcacccagggaatgggggtctatgagacaaccccacttggagaagaatggggttagggtctctaattgcaaagtgactgtacaataggacgaaagttgcctctgtgtctgagaaagtatcttagttgttggctgctccagaggtatctttgtcaaaagcttctggttcaatatcagccactgagcagataaccctgcttatttggtgtggttaaatcaactagcttctgctaatagccccaatttgcttgaatgggaaaactctctcatttgacccttataggtagaaataatgaattaacaaccaataaaattaatcatttggcattaa

SEQ ID NO: 4777 - DNA, 1085 bp, Homo sapiens
  source 1..1085: mol_type = unassigned DNA
attctttttttaacttttacttattcattaggatgatttcataatatatttcctggtttagaggaaacaggaacaatggctaccgagagtactccctcagagatcatagaaagagaaagaaaaaagttgcttgaaatccttcaacatgatcctgattctatcttagacacgttaacttctcggaggctgatttctgaggaagagtatgagactctggagaatgttacagatctcctgaagaaaagtcggaagctgttaattttggtacagaaaaagggagaggcgacctgtcagcattttctcaagtgtttatttagtacttttccacagtcagctgccatttgcggcttaaggccagaagttttaaaacatgagaatacagtacctcctcaatctatgggggcaagcagtaattcagaagatgctttttctcctggaataaaacagcctgaagcccctgagatcacagtgttcttcagtgagaaggaacacttggatttggaaacctctgagtttttcagggacaagaaaactagttatagggaaacagctttgtctgccaggaagaatgagaaggaatatgacacaccagaagtcacattatcatattcagttgagaaagttggatgtgaagttccagcaactattacatatataaaagatggacagagatatgaggagctagatgattctttatacttaggaaaagaggaatatctaggatctgttgacacccctgaagatgcagaagccactgtggaagaggaggtttatgatgacccagagcacgttggatatgatggtgaagaggacttcgagaattcagaaaccacagagttctctggtgaagaaccaagttatgagggatcagaaaccagcctttcattggaggaggaacaggagaaaagtatagaaggctggtctcgaactcatgggcttaagcgatcctcccacgttggcctcccaaagtgctgggattacaggcgtgagccaccctgcctggcctgaaaattctgcctcaaacatctcaaacatccatttatattttgtacaagaaagtaaataaaatttttctttttaacatt

SEQ ID NO: 4778 - DNA, 1555 bp, Homo sapiens
  source 1..1555: mol_type = unassigned DNA
aggaacaatggctaccgagagtactccctcagagatcatagaaagagaaagaaaaaagttgcttgaaatccttcaacatgatcctgattctatcttagacacgttaacttctcggaggctgatttctgaggaagagtatgagactctggagaatgttacagatctcctgaagaaaagtcggaagctgttaattttggtacagaaaaagggagaggcgacctgtcagcattttctcaagtgtttatttagtacttttccacagtcagctgccatttgcggcttaaggcatgaagttttaaaacatgagaatacagtacctcctcaatctatgggggcaagcagtaattcagaagatgctttttctcctggaataaaacagcctgaagcccctgagatcacagtgttcttcagtgagaaggaacacttggatttggaaacctctgagtttttcagggacaagaaaactagttatagggaaacagctttgtctgccaggaagaatgagaaggaatatgacacaccagaagtcacattatcatattcagttgagaaagttggatgtgaagttccagcaactattacatatataaaagatggacagagatatgaggagctagatgattctttatacttaggaaaagaggaatatctaggatctgttgacacccctgaagatgcagaagccactgtggaagaggaggtttatgatgacccagagcacgttggatatgatggtgaagaggacttcgagaattcagaaaccacagagttctctggtgaagaaccaagttatgagggatcagaaaccagcctttcattggaggaggaacaggagaaaagtatagaagaaagaaaaaaggtgtttaaagatgtcctgttatgtttgaacatggatagaagcagaaaggttctgccagattttgttaaacaattctccttagatcgaggatgtaagtggacccctgagagtccaggagacttagcctggaatttcctgatgaaagttcaagcacgagatgtgaccgctagggattcaatcctcagtcacaaggttctggatgaagatagcaaggaggatttgctggctggagtggagaatttggaaattcgagacatacaaaccattaatccccttgacgtgctttgtgccaccatgctgtgttcagatagctctttgcaacgccaagtcatgtcaaacatgtatcagtgccagtttgctcttcccctgctactgccagatgcagaaaacaacaaaagcatcttaatgctgggggccatgaaagacattgtgaagaagcagtcaacacagttttcaggggggcctacagaggatacagaaaagtttctgactctcatgaagactttgaaaacactcagagaattcaagtttcctctggagaaaacatggctgggacagctgaaggtgagggtcagcaaagacacagtcagctaaaaagctcatctaaaagccaggctctaatgccaattcaagagcctgggactcaatgtgagctcagccagaatcttcagaatctctatggtaccccagtattca

SEQ ID NO: 4779 - DNA, 1890 bp, Homo sapiens
  source 1..1890: mol_type = unassigned DNA
acagagcagcctggcagtgtccaagcaacaagcctccgctcctccttcctgcaccctggggctcctgaaactcacatgggtaaaaaagatacagtaaagacataaataccacatttgacaaatggaaaaaaaggagtgtccagaaaagagtagcagcagtgaggaagagctgccgagacgggtatacagggagctaccctgtgtttctgagaccctttgtgacatctcacattttttccaagaagatgatgagacagaggcagagccattattgttccgtgctgttcctgagtgtcaactatctgggggggacattcccaggagacatttgctcagaagagaatcaaatagtttcctcttatgcttctaaagtctgttttgagatcgaagaagattataaaaatcgtcagtttctggggcctgaaggaaatgtggatgttgagttgattgataagagcacaaacagatacagcgtttggttccccactgctggctggtatctgtggtcagccacaggcctcggcttcctggtaagggatgaggtcacagtgacgattgcgtttggttcctggagtcagcacctggccctggacctgcagcaccatgaacagtggctggtgggcggccccttgtttgatgtcactgcagagccagaggaggctgtcgccgaaatccacctcccccacttcatctccctccaagcaggtgaggtggacgtctcctggtttctcgttgcccattttaagaatgaagggatggtcctggagcatccagcccgggtggagcctttctatgctgtcctggaaagccccagcttctctctgatgggcatcctgctgcggatcgccagtgggactcgcctctccatccccatcacttccaacacattgatctattatcacccccaccccgaagatattaagttccacttgtaccttgtccccagcgacgccttgctaacaaaggcgatagatgatgaggaagatcgcttccatggtgtgcgcctgcagacttcgcccccaatggaacccctgaactttggttccagttatattgtgtctaattctgctaacctgaaagtaatgcccaaggagttgaaattgtcctacaggagccctggagaaattcagcacttctcaaaattctatgctgggcagatgaaggaacccattcaacttgagattactgaaaaaagacatgggactttggtgtgggatactgaggtgaagccagtggatctccagcttgtagctgcatcagcccctcctcctttctcagggttactgtggcaacgccaacctttgaatccccctcctgcgcgctgagcggctcgtaaccatggagaccgaagcaggtttcccgcgtccgcctcctcacccagagactgcagccccggcgcccagaccctttggacaaggagatccaagcgggccccacaatgctcagcgggtaaagagctcctccccactcctctcccgccagcagacgaaggaaacaccccgcagcctgcacatgctcagatggagctctgggcccgcgggttctactgcgcaggccctcacactcagcaaagggacttggacgcgaaagcgctggtggcgctcagccggctgggagttgtagctttctggctgctacagcaggagatacaggtggccaatgggtgagctggctggaggtaggaacaaggttaaggaagctgggatcttcgtgcagactggatcgtcactatagcaacaatgaaacatcgggaagggctagttctgctaggcagtctgccattttcattctttcatctttttttttaactcaaagcttactttgcaacaggcactgttctaggcactggggatacaatggaaaacaaaatagagcttctattttggcggg

SEQ ID NO: 4780 - DNA, 5215 bp, Homo sapiens
  source 1..5215: mol_type = unassigned DNA
ctagttctcaacttcttttgaaataatgttcatagagaaggagggctgtctgagattcgagggaaacaagctctcaggacttccggtcgccatgatggctgtgggcggtaaacgcggttagtgcaagcatctgggccatcttcaatggtaaaaaagatacagtaaagacataaataccacatttgacaaatggaaaaaaaggagtgtccagaaaagagtagcagcagtgaggaagagctgccgagacgggtatacagggagctaccctgtgtttctgagaccctttgtgacatctcacattttttccaagaagatgatgagacagaggcagagccattattgttccgtgctgttcctgagtgtcaactatctgggggggacattcccaggagacatttgctcagaagagaatcaaatagtttcctcttatgcttctaaagtctgttttgagatcgaagaagattataaaaatcgtcagtttctggggcctgaaggaaatgtggatgttgagttgattgataagagcacaaacagatacagcgtttggttccccactgctggctggtatctgtggtcagccacaggcctcggcttcctggtaagggatgaggtcacagtgacgattgcgtttggttcctggagtcagcacctggccctggacctgcagcaccatgaacagtggctggtgggcggccccttgtttgatgtcactgcagagccagaggaggctgtcgccgaaatccacctcccccacttcatctccctccaaggtgaggtggacgtctcctggtttctcgttgcccattttaagaatgaagggatggtcctggagcatccagcccgggtggagcctttctatgctgtcctggaaagccccagcttctctctgatgggcatcctgctgcggatcgccagtgggactcgcctctccatccccatcacttccaacacattgatctattatcacccccaccccgaagatattaagttccacttgtaccttgtccccagcgacgccttgctaacaaaggcgatagatgatgaggaagatcgcttccatggtgtgcgcctgcagacttcgcccccaatggaacccctgaactttggttccagttatattgtgtctaattctgctaacctgaaagtaatgcccaaggagttgaaattgtcctacaggagccctggagaaattcagcacttctcaaaattctatgctgggcagatgaaggaacccattcaacttgagattactgaaaaaagacatgggactttggtgtgggatactgaggtgaagccagtggatctccagcttgtagctgcatcagcccctcctcctttctcaggtgcagcctttgtgaaggagaaccaccggcaactccaagccaggatgggggacctgaaaggggtgctcgatgatctccaagacaatgaggttcttactgagaatgagaaggagctggtggagcaggaaaagacacggcagagcaagaatgaggccttgctgagcatggtggagaagaaaggggacctggccctggacgtgctcttcagaagcattagtgaaagggacccttacctcgtgtcctatcttagacagcagaatttgtaaaatgagtcagttaggtagtctggaagagagaatccagcgttctcattggaaatggataaacagaaatgtgatcattgatttcagtgttcaagacagaagaagactgggtaacatctatcacacaggctttcaggacagacttgtaacctggcatgtacctattgactgtatcctcatgcattttcctcaagaatgtctgaagaaggtagtaatattccttttaaattttttccaaccattgcttgatatatcactattttatccattgacatgattcttgaagacccaggataaaggacatccggataggtgtgtttatgaaggatggggcctggaaaggcaacttttcctgattaatgtgaaaaataattcctatggacactccgtttgaagtatcaccttctcataactaaaagcagaaaagctaacaaaagcttctcagctgaggacactcaaggcatacatgatgacagtcttttttttttttgtatgttaggactttaacactttatctatggctactgttattagaacaatgtaaatgtatttgctgaaagagagcacaaaaatgggagaaaatgcaaacatgagcagaaaatattttcccactggtgtgtagcctgctacaaggagttgttgggttaaatgttcatggtcaactccaaggaatactgagatgaaatgtggtaaatcaactccacagaaccaccaaaaagaaaatgagggtaattcagcttattctgagacagacattcctggcaatgtaccatacaaaaaataagccaactctgacatttggattctaccatagactctgtcattttgtagccatttcagctgtcttttgattaatgttttcgtggcacacatatttccatccttttatgtttaatctgtttaaaacaagttcctagtagacaccatctggttgagtcagttttttttatggtgtattttgaacccattctgatagtctcttttaactggaagatttcaattacttacgttaatgtaattattaatatgttaggatttatcctcagtcagccagtttgttatgtcttttctattctactgttatcacatttgtaccacttaaagtggaatctaggcactttatcaccatttagatcctattaccttttctcatctaggatatagttatcttctacataatctttctgtatcttaaaacccatcaataaattattatatattttctacttttaatcactcagaagatttaaaaaactcatgagaagagtaatctgttatgtttttccagatatttaccatttctgttgctcttccttcattattttccaaatttcgttctgcaaatttccacttcctctgatagacgttttttagttcttttagagtggttctgataggtacagattctcttattttttgcttcctctgaggacatctttttctcaccttcattctcagtgatgttttttgcttgtagtatttttagttgacattgttttctgttcagcagtttccttttagcttccgtatttcctgatgagaaatctgcagtcattcaaattgttgtttccctgtatgtagtgtgtcatttttctgtcagatttcaaggtatttatctttagtttttagccatttcattatgttggggatgagtttccttgttttattccctttggaatttgctccaattcataaatttgcagttttatgtcttttaccaaacttagaggttttcagcctaatttctaaaaatactttttattagcctgattttcatctttataggaaatagtttaagtgatgacaagttccaatagcttatatgcccagaaggccttcaaaataagaattttgaaagaatacagaaaacaaacttttatatccttctcatgtcttctactgtaaaattcatatgctttgctactctaaacctagtttgaaatcaacagtcttgagaatagatgaaaattttgatgaatagtggaattcttttaaatggaaacctcttacatgtgattttccttgccatctagaaataaaccatagtatttatgttgaatcaatcaatattatattttgtttttttcctcctcttctgagactcttattgtggaaatgttagacttttatgttttcctaaatgtccctgatattctacttatttagaacatcttttcattttttccattattctgattgggtaattttaatttgtctattttcaaatttgctggagtgttcacctgttgttatctgtgtcgtcccactgagtgcattcaccaccttttaaattttggtcactgtatgtatcagttctaaaatttccattttgttctctatattttaaatttcttgccttatattctattttcctgcaaatgtgtcagcatttgcttgtttgagctttttttttttcaagacagggtctcaactctgttacccaggctggagtgcagtggtgcgatctcagctcactgcaacctctgcctcctggttcaagcgattattgtgcctcagcctccagagtagctgggattacaggcatgcaccaccacagcccagctaattttttgtatttttagtagagacagagttttgctatgttggccaggctggttttgaactcctggcctcaagtgatccacccacctcagcctcccaaagtgctgggattacaggccactacacctggcacatttgagtatttttttttttttttttttttttttgagatggagtctcgctctgtcatctaggctggagtgcagtggtgtgatctcagctcactgcagcctctgtctcccgggctcaagcgattctcttgcctcagcctcctgagtagctaggactacaggtgcatgccaacacgcccggctaatttttttttaaaaatatttttagtagagacagggtttcaccattttggccaggatggtcttgatctcctgacctcatgatccacccgcctcggccttccaaagtgctgggattacaggcatgagccaccgtgcctggcctcatttgagtatttttataatgtctcttttaaagtctttgtcagataatttcactgtacatgttattcagtgtttggtgtccactgagttgtcatttgccagacaagtggagatttttgcagctcatccttgtattctcagtagttccgatatgtaccctcgaaatgtgaatgttatcttatgagactctgttttatttgtatccaacagaagatgtttattatttatttggctttctgtgaactgaggtcttaatatcagctcattttaaaagtctttgcagtggtattcggatctatcctgtgtgtgcctatgagattgggtgcagtgtatcctgttagctccattctcagggcgtttgaatgtgaattaggaccagcgcaatgaatgctcaagttggggttgggcgttagaattcataaaagtctttatatgctcagattctgcagctccatcctcttcatgattgtgatcgtaaggacagtggaattttgcagttgtctataccttatcttgaagtagaactaaattgttacatttgaagaatgtacttcataaatttacaaaaataaaaaaataggttaatgttatt

SEQ ID NO: 4781 - DNA, 5263 bp, Homo sapiens
  source 1..5263: mol_type = unassigned DNA
ggtaaaaaagatacagtaaagacataaataccacatttgacaaatggaaaaaaaggagtgtccagaaaagagtagcagcagtgaggaagagctgccgagacgggacagtggatccagtaggaacatagatgcatccaaactcattagactacaaggatcacggaaactgttggttgacaatagcatacgggaactgcaatacacaaaaactggaattttttttcaggctgaggcctgtgtgacaaatgatacggtatacagggagctaccctgtgtttctgagaccctttgtgacatctcacattttttccaagaagatgatgagacagaggcagagccattattgttccgtgctgttcctgagtgtcaactatctgggggggacattcccagtgtatcagaagagcaggaatcttcagagggacaagattcaggagacatttgctcagaagagaatcaaatagtttcctcttatgcttctaaagtctgttttgagatcgaagaagattataaaaatcgtcagtttctggggcctgaaggaaatgtggatgttgagttgattgataagagcacaaacagatacagcgtttggttccccactgctggctggtatctgtggtcagccacaggcctcggcttcctggtaagggatgaggtcacagtgacgattgcgtttggttcctggagtcagcacctggccctggacctgcagcaccatgaacagtggctggtgggcggccccttgtttgatgtcactgcagagccagaggaggctgtcgccgaaatccacctcccccacttcatctccctccaagcaggtgaggtggacgtctcctggtttctcgttgcccattttaagaatgaagggatggtcctggagcatccagcccgggtggagcctttctatgctgtcctggaaagccccagcttctctctgatgggcatcctgctgcggatcgccagtgggactcgcctctccatccccatcacttccaacacattgatctattatcacccccaccccgaagatattaagttccacttgtaccttgtccccagcgacgccttgctaacaaaggcgatagatgatgaggaagatcgcttccatggtgtgcgcctgcagacttcgcccccaatggaacccctgaactttggttccagttatattgtgtctaattctgctaacctgaaagtaatgcccaaggagttgaaattgtcctacaggagccctggagaaattcagcacttctcaaaattctatgctgggcagatgaaggaacccattcaacttgagattactgaaaaaagacatgggactttggtgtgggatactgaggtgaagccagtggatctccagcttgtagctgcatcagcccctcctcctttctcaggtgcagcctttgtgaaggagaaccaccggcaactccaagccaggatgggggacctgaaaggggtgctcgatgatctccaagacaatgaggttcttactgagaatgagaaggagctggtggagcaggaaaagacacggcagagcaagaatgaggccttgctgagcatggtggagaagaaaggggacctggccctggacgtgctcttcagaagcattagtgaaagggacccttacctcgtgtcctatcttagacagcagaatttgtaaaatgagtcagttaggtagtctggaagagagaatccagcgttctcattggaaatggataaacagaaatgtgatcattgatttcagtgttcaagacagaagaagactgggtaacatctatcacacaggctttcaggacagacttgtaacctggcatgtacctattgactgtatcctcatgcattttcctcaagaatgtctgaagaaggtagtaatattccttttaaattttttccaaccattgcttgatatatcactattttatccattgacatgattcttgaagacccaggataaaggacatccggataggtgtgtttatgaaggatggggcctggaaaggcaacttttcctgattaatgtgaaaaataattcctatggacactccgtttgaagtatcaccttctcataactaaaagcagaaaagctaacaaaagcttctcagctgaggacactcaaggcatacatgatgacagtcttttttttttttgtatgttaggactttaacactttatctatggctactgttattagaacaatgtaaatgtatttgctgaaagagagcacaaaaatgggagaaaatgcaaacatgagcagaaaatattttcccactggtgtgtagcctgctacaaggagttgttgggttaaatgttcatggtcaactccaaggaatactgagatgaaatgtggtaaatcaactccacagaaccaccaaaaagaaaatgagggtaattcagcttattctgagacagacattcctggcaatgtaccatacaaaaaataagccaactctgacatttggattctaccatagactctgtcattttgtagccatttcagctgtcttttgattaatgttttcgtggcacacatatttccatccttttatgtttaatctgtttaaaacaagttcctagtagacaccatctggttgagtcagttttttttatggtgtattttgaacccattctgatagtctcttttaactggaagatttcaattacttacgttaatgtaattattaatatgttaggatttatcctcagtcagccagtttgttatgtcttttctattctactgttatcacatttgtaccacttaaagtggaatctaggcactttatcaccatttagatcctattaccttttctcatctaggatatagttatcttctacataatctttctgtatcttaaaacccatcaataaattattatatattttctacttttaatcactcagaagatttaaaaaactcatgagaagagtaatctgttatgtttttccagatatttaccatttctgttgctcttccttcattattttccaaatttcgttctgcaaatttccacttcctctgatagacgttttttagttcttttagagtggttctgataggtacagattctcttattttttgcttcctctgaggacatctttttctcaccttcattctcagtgatgttttttgcttgtagtatttttagttgacattgttttctgttcagcagtttccttttagcttccgtatttcctgatgagaaatctgcagtcattcaaattgttgtttccctgtatgtagtgtgtcatttttctgtcagatttcaaggtatttatctttagtttttagccatttcattatgttggggatgagtttccttgttttattccctttggaatttgctccaattcataaatttgcagttttatgtcttttaccaaacttagaggttttcagcctaatttctaaaaatactttttattagcctgattttcatctttataggaaatagtttaagtgatgacaagttccaatagcttatatgcccagaaggccttcaaaataagaattttgaaagaatacagaaaacaaacttttatatccttctcatgtcttctactgtaaaattcatatgctttgctactctaaacctagtttgaaatcaacagtcttgagaatagatgaaaattttgatgaatagtggaattcttttaaatggaaacctcttacatgtgattttccttgccatctagaaataaaccatagtatttatgttgaatcaatcaatattatattttgtttttttcctcctcttctgagactcttattgtggaaatgttagacttttatgttttcctaaatgtccctgatattctacttatttagaacatcttttcattttttccattattctgattgggtaattttaatttgtctattttcaaatttgctggagtgttcacctgttgttatctgtgtcgtcccactgagtgcattcaccaccttttaaattttggtcactgtatgtatcagttctaaaatttccattttgttctctatattttaaatttcttgccttatattctattttcctgcaaatgtgtcagcatttgcttgtttgagctttttttttttcaagacagggtctcaactctgttacccaggctggagtgcagtggtgcgatctcagctcactgcaacctctgcctcctggttcaagcgattattgtgcctcagcctccagagtagctgggattacaggcatgcaccaccacagcccagctaattttttgtatttttagtagagacagagttttgctatgttggccaggctggttttgaactcctggcctcaagtgatccacccacctcagcctcccaaagtgctgggattacaggccactacacctggcacatttgagtatttttttttttttttttttttttttgagatggagtctcgctctgtcatctaggctggagtgcagtggtgtgatctcagctcactgcagcctctgtctcccgggctcaagcgattctcttgcctcagcctcctgagtagctaggactacaggtgcatgccaacacgcccggctaatttttttttaaaaatatttttagtagagacagggtttcaccattttggccaggatggtcttgatctcctgacctcatgatccacccgcctcggccttccaaagtgctgggattacaggcatgagccaccgtgcctggcctcatttgagtatttttataatgtctcttttaaagtctttgtcagataatttcactgtacatgttattcagtgtttggtgtccactgagttgtcatttgccagacaagtggagatttttgcagctcatccttgtattctcagtagttccgatatgtaccctcgaaatgtgaatgttatcttatgagactctgttttatttgtatccaacagaagatgtttattatttatttggctttctgtgaactgaggtcttaatatcagctcattttaaaagtctttgcagtggtattcggatctatcctgtgtgtgcctatgagattgggtgcagtgtatcctgttagctccattctcagggcgtttgaatgtgaattaggaccagcgcaatgaatgctcaagttggggttgggcgttagaattcataaaagtctttatatgctcagattctgcagctccatcctcttcatgattgtgatcgtaaggacagtggaattttgcagttgtctataccttatcttgaagtagaactaaattgttacatttgaagaatgtacttcataaatttacaaaaataaaaaaataggttaatgttatt

SEQ ID NO: 4782 - DNA, 5210 bp, Homo sapiens
  source 1..5210: mol_type = unassigned DNA
tgaccaagaggaacagaacacagagcagcctggcagtgtccaagcaacaagcctccgctcctccttcctgcaccctggggctcctgaaactcacatgggtaaaaaagatacagtaaagacataaataccacatttgacaaatggaaaaaaaggagtgtccagaaaagagtagcagcagtgaggaagagctgccgagacgggtatacagggagctaccctgtgtttctgagaccctttgtgacatctcacattttttccaagaagatgatgagacagaggcagagccattattgttccgtgctgttcctgagtgtcaactatctgggggggacattcccagtgtatcagaagagcaggaatcttcagagggacaagattcaggagacatttgctcagaagagaatcaaatagtttcctcttatgcttctaaagtctgttttgagatcgaagaagattataaaaatcgtcagtttctggggcctgaaggaaatgtggatgttgagttgattgataagagcacaaacagatacagcgtttggttccccactgctggctggtatctgtggtcagccacaggcctcggcttcctggtaagggatgaggtcacagtgacgattgcgtttggttcctggagtcagcacctggccctggacctgcagcaccatgaacagtggctggtgggcggccccttgtttgatgtcactgcagagccagaggaggctgtcgccgaaatccacctcccccacttcatctccctccaagcaggtgaggtggacgtctcctggtttctcgttgcccattttaagaatgaagggatggtcctggagcatccagcccgggtggagcctttctatgctgtcctggaaagccccagcttctctctgatgggcatcctgctgcggatcgccagtgggactcgcctctccatccccatcacttccaacacattgatctattatcacccccaccccgaagatattaagttccacttgtaccttgtccccagcgacgccttgctaacaaaggcgatagatgatgaggaagatcgcttccatggtgtgcgcctgcagacttcgcccccaatggaacccctgaactttggttccagttatattgtgtctaattctgctaacctgaaagtaatgcccaaggagttgaaattgtcctacaggagccctggagaaattcagcacttctcaaaattctatgctgggcagatgaaggaacccattcaacttgagattactgaaaaaagacatgggactttggtgtgggatactgaggtgaagccagtggatctccagcttgtagctgcatcagcccctcctcctttctcaggtgcagcctttgtgaaggagaaccaccggcaactccaagccaggatgggggacctgaaaggggtgctcgatgatctccaagacaatgaggttcttactgagaatgagaaggagctggtggagcaggaaaagacacggcagagcaagaatgaggccttgctgagcatggtggagaagaaaggggacctggccctggacgtgctcttcagaagcattagtgaaagggacccttacctcgtgtcctatcttagacagcagaatttgtaaaatgagtcagttaggtagtctggaagagagaatccagcgttctcattggaaatggataaacagaaatgtgatcattgatttcagtgttcaagacagaagaagactgggtaacatctatcacacaggctttcaggacagacttgtaacctggcatgtacctattgactgtatcctcatgcattttcctcaagaatgtctgaagaaggtagtaatattccttttaaattttttccaaccattgcttgatatatcactattttatccattgacatgattcttgaagacccaggataaaggacatccggataggtgtgtttatgaaggatggggcctggaaaggcaacttttcctgattaatgtgaaaaataattcctatggacactccgtttgaagtatcaccttctcataactaaaagcagaaaagctaacaaaagcttctcagctgaggacactcaaggcatacatgatgacagtcttttttttttttgtatgttaggactttaacactttatctatggctactgttattagaacaatgtaaatgtatttgctgaaagagagcacaaaaatgggagaaaatgcaaacatgagcagaaaatattttcccactggtgtgtagcctgctacaaggagttgttgggttaaatgttcatggtcaactccaaggaatactgagatgaaatgtggtaaatcaactccacagaaccaccaaaaagaaaatgagggtaattcagcttattctgagacagacattcctggcaatgtaccatacaaaaaataagccaactctgacatttggattctaccatagactctgtcattttgtagccatttcagctgtcttttgattaatgttttcgtggcacacatatttccatccttttatgtttaatctgtttaaaacaagttcctagtagacaccatctggttgagtcagttttttttatggtgtattttgaacccattctgatagtctcttttaactggaagatttcaattacttacgttaatgtaattattaatatgttaggatttatcctcagtcagccagtttgttatgtcttttctattctactgttatcacatttgtaccacttaaagtggaatctaggcactttatcaccatttagatcctattaccttttctcatctaggatatagttatcttctacataatctttctgtatcttaaaacccatcaataaattattatatattttctacttttaatcactcagaagatttaaaaaactcatgagaagagtaatctgttatgtttttccagatatttaccatttctgttgctcttccttcattattttccaaatttcgttctgcaaatttccacttcctctgatagacgttttttagttcttttagagtggttctgataggtacagattctcttattttttgcttcctctgaggacatctttttctcaccttcattctcagtgatgttttttgcttgtagtatttttagttgacattgttttctgttcagcagtttccttttagcttccgtatttcctgatgagaaatctgcagtcattcaaattgttgtttccctgtatgtagtgtgtcatttttctgtcagatttcaaggtatttatctttagtttttagccatttcattatgttggggatgagtttccttgttttattccctttggaatttgctccaattcataaatttgcagttttatgtcttttaccaaacttagaggttttcagcctaatttctaaaaatactttttattagcctgattttcatctttataggaaatagtttaagtgatgacaagttccaatagcttatatgcccagaaggccttcaaaataagaattttgaaagaatacagaaaacaaacttttatatccttctcatgtcttctactgtaaaattcatatgctttgctactctaaacctagtttgaaatcaacagtcttgagaatagatgaaaattttgatgaatagtggaattcttttaaatggaaacctcttacatgtgattttccttgccatctagaaataaaccatagtatttatgttgaatcaatcaatattatattttgtttttttcctcctcttctgagactcttattgtggaaatgttagacttttatgttttcctaaatgtccctgatattctacttatttagaacatcttttcattttttccattattctgattgggtaattttaatttgtctattttcaaatttgctggagtgttcacctgttgttatctgtgtcgtcccactgagtgcattcaccaccttttaaattttggtcactgtatgtatcagttctaaaatttccattttgttctctatattttaaatttcttgccttatattctattttcctgcaaatgtgtcagcatttgcttgtttgagctttttttttttcaagacagggtctcaactctgttacccaggctggagtgcagtggtgcgatctcagctcactgcaacctctgcctcctggttcaagcgattattgtgcctcagcctccagagtagctgggattacaggcatgcaccaccacagcccagctaattttttgtatttttagtagagacagagttttgctatgttggccaggctggttttgaactcctggcctcaagtgatccacccacctcagcctcccaaagtgctgggattacaggccactacacctggcacatttgagtatttttttttttttttttttttttttgagatggagtctcgctctgtcatctaggctggagtgcagtggtgtgatctcagctcactgcagcctctgtctcccgggctcaagcgattctcttgcctcagcctcctgagtagctaggactacaggtgcatgccaacacgcccggctaatttttttttaaaaatatttttagtagagacagggtttcaccattttggccaggatggtcttgatctcctgacctcatgatccacccgcctcggccttccaaagtgctgggattacaggcatgagccaccgtgcctggcctcatttgagtatttttataatgtctcttttaaagtctttgtcagataatttcactgtacatgttattcagtgtttggtgtccactgagttgtcatttgccagacaagtggagatttttgcagctcatccttgtattctcagtagttccgatatgtaccctcgaaatgtgaatgttatcttatgagactctgttttatttgtatccaacagaagatgtttattatttatttggctttctgtgaactgaggtcttaatatcagctcattttaaaagtctttgcagtggtattcggatctatcctgtgtgtgcctatgagattgggtgcagtgtatcctgttagctccattctcagggcgtttgaatgtgaattaggaccagcgcaatgaatgctcaagttggggttgggcgttagaattcataaaagtctttatatgctcagattctgcagctccatcctcttcatgattgtgatcgtaaggacagtggaattttgcagttgtctataccttatcttgaagtagaactaaattgttacatttgaagaatgtacttcataaatttacaaaaataaaaaaataggttaatgttatt

SEQ ID NO: 4783 - DNA, 1267 bp, Homo sapiens
  source 1..1267: mol_type = unassigned DNA
gactgtggagttaagcagaacccatcaggaagtgcacaggcgtccggcgtgctcctccctccctgcagccccgggcagcatctcccagaggctccgcggcccaggctcctggtgtgtctgcagtgcaggtggctcctggaagaccctcagcctgcctgctgaggccatgtcggactacgagaacgatgacgagtgctggagcgtcctggagggcttccgggtgacgctcacctcggtcatcgacccctcacgcatcacaccttacctgcggcagtgcaaggtcctgaaccccgatgatgaggagcaggtgctcagcgaccccaacctggtcatccgcaaacggaaagtgggtgtgctcctggacatcctgcagcggaccggccacaagggctacgtggccttcctcgagagcctggagctctactacccgcagctgtacaagaaggtcacaggcaaggagccggcccgcgtcttctccatgatcatcgacgcgtccggggagtcaggcctgactcagctgctgatgactgaggtcatgaagctgcagaagaaggtgcaggacctgaccgcgctgctgagctccaaagatgacttcatcaaggagctgcgggtgaaggacagcctgctgcgcaagcaccaggagcgtgtgcagaggctcaaggaggagtgcgaggccggcagccgcgagctcaagcgctgcaaggaggagaactacgacctggccatgcgcctggcgcaccagagtgaggagaagggcgccgcgctcatgcggaaccgtgacctgcagctggagattgaccagctcaagcacagcctcatgaaggccgaggacgactgcaaggtggagcgcaagcacacgctgaagctcaggcacgccatggagcagcggcccagccaggagctgctgtgggagctgcagcaggagaaggccctgctccaggcccgggtgcaggagctggaggcctccgtccaggaggggaagctggacaggagcagcccctacatccaggtactggaggaggactggcggcaggcgctgcgggaccaccaggagcaggccaacaccatcttctccctgcgcaaggacctccgccagggcgaggcccgacgcctccggtgcatggaggagaaggagatgttcgagctgcagtgcctggcactacgtaaggactccaagatgtacaaggaccgcatcgaggccatcctgctgcagatggaggaggtcgccattgagcgggaccagagcacacaaatggaggggctgtga

SEQ ID NO: 4784 - DNA, 2123 bp, Homo sapiens
  source 1..2123: mol_type = unassigned DNA
gactgtggagttaagcagaacccatcaggaagtgcacaggcgtccggcgtgctcctccctccctgcagccccgggcagcatctcccagaggctccgcggcccaggctcctggtgtgtctgcagtgcaggtggctcctggaagaccctcagcctgcctgctgaggccatgtcggactacgagaacgatgacgagtgctggagcgtcctggagggcttccgggtgacgctcacctcggtcatcgacccctcacgcatcacaccttacctgcggcagtgcaaggtcctgaaccccgatgatgaggagcaggtgctcagcgaccccaacctggtcatccgcaaacggaaagtgggtgtgctcctggacatcctgcagcggaccggccacaagggctacgtggccttcctcgagagcctggagctctactacccgcagctgtacaagaaggtcacaggcaaggagccggcccgcgtcttctccatgatcatcgacgcgtccggggagtcaggcctgactcagctgctgatgactgaggtcatgaagctgcagaagaaggtgcaggacctgaccgcgctgctgagctccaaagatgacttcatcaaggagctgcgggtgaaggacagcctgctgcgcaagcaccaggagcgtgtgcagaggctcaaggaggagtgcgaggccggcagccgcgagctcaagcgctgcaaggaggagaactacgacctggccatgcgcctggcgcaccagagtgaggagaagggcgccgcgctcatgcggaaccgtgacctgcagctggagattgaccagctcaagcacagcctcatgaaggccgaggacgactgcaaggtggagcgcaagcacacgctgaagctcaggcacgccatggagcagcggcccagccaggagctgctgtgggagctgcagcaggagaaggccctgctccaggcccgggtgcaggagctggaggcctccgtccaggaggggaagctggacaggagcagcccctacatccaggtactggaggaggactggcggcaggcgctgcgggaccaccaggagcaggccaacaccatcttctccctgcgcaaggacctccgccagggcgaggcccgacgcctccggtgcatggaggagaaggagatgttcgagctgcagtgcctggcactacgtaaggactccaagatgtacaaggaccgcatcgaggccatcctgctgcagatggaggaggtcgccattgagcgggaccaggccatagccacgcgggaggagctgcacgcacagcacgcccggggcctgcaggagaaggacgcgctgcgcaagcaggtgcgggagctgggcgagaaggcggatgagctgcagctgcaggtgttccagtgtgaggcgcagctactggccgtggagggcaggctcaggcggcagcagctggagacgctcgtcctgagctccgacctggaagatggctcacccaggaggtcccaggagctctcactcccccaggacctggaggacacccagctctcagacaaaggctgccttgccggcggggggagcccgaaacagccctttgcagctctgcaccaggagcaggttttgcggaacccccatgacgcaggcctgagcagcggggagccgcccgagaaggagcggcggcgcctcaaagagagttttgagaactaccgcaggaagcgcgccctcaggaagatgcagaaaggatggcggcagggggaggaggaccgggagaacaccacgggcagcgacaacaccgacactgagggctcctagccgcagcagcgcaggccccgaccagggcacacccaccggcccggcctcctgccacccgggggtgccgacgccctggggcgcagacttccccgagccgtcgctgacttggcctggaacgaggaatctggtgccctgaaaggcccagccggactgccgggcattggggccgtttgttaagcggcactcattttgcggaggccatgcgggtgctcaccacccccatgcacacgccatctgtgtaacttcaggatctgttctgtttcaccatgtaacacacaatacatgcatgcattgtattagtgttagaaaacacagctgcgtaaataaacagcacgggtgacccgca

SEQ ID NO: 4785 - DNA, 1814 bp, Homo sapiens
  source 1..1814: mol_type = unassigned DNA
gactgtggagttaagcagaacccatcaggaagtgcacaggcgtccggcgtgctcctccctccctgcagccccgggcagcatctcccagaggctccgcggcccaggctcctggtgtgtctgcagtgcaggtggctcctggaagaccctcagcctgcctgctgaggccatgtcggactacgagaacgatgacgagtgctggagcgtcctggagggcttccgggtgacgctcacctcggtcatcgacccctcacgcatcacaccttacctgcggcagtgcaaggtcctgaaccccgatgatgaggagcaggtgctcagcgaccccaacctggtcatccgcaaacggaaagtgggtgtgctcctggacatcctgcagcggaccggccacaagggctacgtggccttcctcgagagcctggagctctactacccgcagctgtacaagaaggtcacaggcaaggagccggcccgcgtcttctccatgatcatcgacgcgtccggggagtcaggcctgactcagctgctgatgactgaggtcatgaagctgcagaagaaggtgcaggacctgaccgcgctgctgagctccaaagatgacttcatcaaggagctgcgggtgaaggacagcctgctgcgcaagcaccaggagcgtgtgcagaggctcaaggaggagtgcgaggccggcagccgcgagctcaagcgctgcaaggaggagaactacgacctggccatgcgcctggcgcaccagagtgaggagaagggcgccgcgctcatgcggaaccgtgacctgcagctggagattgaccagctcaagcacagcctcatgaaggccgaggacgactgcaaggtggagcgcaagcacacgctgaagctcaggcacgccatggagcagcggcccagccaggagctgctgtgggagctgcagcaggagaaggccctgctccaggcccgggtgcaggagctggaggcctccgtccaggaggggaagctggacaggagcagcccctacatccaggtactggaggaggactggcggcaggcgctgcgggaccaccaggagcaggccaacaccatcttctccctgcgcaaggacctccgccagggcgaggcccgacgcctccggtgcatggaggagaaggagatgttcgagctgcagtgcctggcactacgtaaggactccaagatgtacaaggaccgcatcgaggccatcctgctgcagatggaggaggtcgccattgagcgggaccaggccatagccacgcgggaggagctgcacgcacagcacgcccggggcctgcaggagaaggacgcgctgcgcaagcaggtgcgggagctgggcgagaaggcggatgagctgcagctgcaggtgttccagtgtgaggcgcagctactggccgtggagggcaggctcaggcggcagcagctggagacgctcgtcctgagctccgacctggaagatggctcacccaggaggtcccaggagctctcactcccccaggacctggaggacacccagctctcagacaaaggctgccttgccggcggggggagcccgaaacagccctttgcagctctgcaccaggagcaggttttgcggaacccccatgacgcaggcccagccggactgccgggcattggggccgtttgttaagcggcactcattttgcggaggccatgcgggtgctcaccacccccatgcacacgccatctgtgtaacttcaggatctgttctgtttcaccatgtaacacacaatacatgcatgcattgtattagtgttagaaaacacagctgcgtaaataaacagcacgggtgacccgca

SEQ ID NO: 4786 - DNA, 4405 bp, Homo sapiens
  source 1..4405: mol_type = unassigned DNA
gcatgcgcgcccgcggcgctccatcccaaacacacacacatttttcccccggacttggaaagtcacccaaagccgccccaagtgcaggcaaacagaccttgctgactgaaggcaaagactcctccatcccacctgccctcccagctgccacggccatcgacccctcctttacaaggggctcctgcaactccccagcagcacgtgttggaatggacttcggaccctggcctcttgggatgcaaaggatgaagtgacacccccagctacatccgaggaggttctaggacctgctacgagagtttgggaccaaggagaagagaatggatcttggaacagctgagggcacccggtgcacggacccgcctgcaggcaagcccgccatggcgcccaaacgcaagggtggcctgaagctgaacgccatctgcgccaagctgagccgccaggtggtggtggagaagcgagctgacgccggctcccacacggagggcagcccatcgcagccccgggaccaagagcgcagtggccctgagtctggggcagcccgggccccccgcagcgaggaagacaagagacgggcagtgatcgagaagtgggtgaacggggagtacagcgaggagccggcacccacacccgtgttggggcggattgcccgcgagggcctggagctgcctcccgagggtgtctacatggtgcagccccaggggtgcagcgatgaggaagaccacgcggaggagccctccaaggacggcggtgccctggaggagaaggattcggacggggcagcctccaaggaggacagcggccccagcaccaggcaggcttcaggagaggcctcctcgctgcgggactacgcggcctccaccatgaccgagttcctcggcatgtttggctatgatgaccagaacacgcgggacgagctggccaggaagatcagctttgagaagctgcacgcgggctccaccccggaggcagccacctcctccatgctgcccacctccgaggataccctcagcaagcgggcgcggttctctaagtatgaggagtacatccgcaagctcaaggctggcgagcagctctcctggccggcccccagcaccaagaccgaggagcgggtgggcaaggaggtggtgggcaccctgcccggcctgcggctgcccagcagcacggcccacctggagaccaaggccaccatcctgcccctgccgtcgcacagcagtgtccagatgcagaacctggtagcccgggcctccaagtacgacttcttcatccaaaaactgaagaccggcgagaatctgcggccccagaacgggagcacctacaagaagccatccaagtacgacctggagaatgtcaagtacctgcacctcttcaaacccggggagggcagccccgacatgggcggggccatcgccttcaagacaggcaaggtggggcgcccttccaagtacgacgtccggggcatccagaagccaggccccgccaaggttccgcccacccccagcctggctcccgcacccctcgccagcgtgcccagtgcccccagcgcccccgggccagggccagagcctcctgcctccctgtccttcaacactcccgagtacctgaagtcaaccttctccaaaacagactccatcaccacggggaccgtctccactgtcaagaacggactgcccacagataaaccagccgtcactgaagatgtaaacatttaccagaaatatattgccaggttctcgggcagccagcactgtggccacatccactgtgcctaccagtaccgcgagcactaccactgccttgaccctgagtgtaactaccagaggttcacgagtaagcaggacgtgatccgccactacaacatgcacaagaagcgcgacaactccctgcagcacggcttcatgcgtttcagcccgctggacgactgcagcgtctactaccacggctgccacctcaatgggaagagcacccactatcactgcatgcaggtgggctgtaacaaggtgtacacgagcacgtctgacgtgatgacccacgagaacttccacaagaagaatacccagctcattaacgacggcttccagcgcttccgagccaccgaagactgtggcacagccgactgccagttctacggacagaagaccacgcacttccactgcaggcgccccggctgcacattcactttcaagaacaagtgtgacatcgagaagcacaagagctaccacatcaaggacgatgcctacgccaaggacggcttcaagaagttctacaagtacgaggagtgcaagtacgagggctgcgtgtacagcaaggctaccaaccacttccactgcatccgcgccggctgcggcttcaccttcacctccaccagccagatgacctctcacaagcgcaagcatgagcgccggcacatccgctcctcgggcgcgctggggctgccgccctcgctgctgggcgccaaggacacggagcacgaggagtccagcaacgacgaccttgttgacttctccgccctgagcagcaagaactccagcctgagcgcctcccctaccagccagcagtcctctgcgtccctggctgccgccactgccgccaccgaggctgggcccagtgccaccaaacctcccaacagcaagatctcggggctgctgccccagggcctgcctggctcaatccccctggccctggccctctccaactcgggcctgcccacccccacgccctacttccccatactggctggccgtgggagcacctccctgcctgtgggcacccccagcctcctgggtgccgtgtcgtctgggtcagcagcctcagccacccctgacacacccacgctggtcgcctcgggagctggagactcagcccccgtggctgccgcctctgtcccggcaccacccgcctccatcatggagaggatctctgcaagcaagggcctcatctcgcccatgatggccaggctggctgcagctgccctcaagccctctgccacctttgacccaggaagcgggcagcaggtcaccccagccaggttccccccggcccaagtgaagccggaacccggtgagagcaccggcgccccaggcccccacgaagcctcccaggaccgcagtctagacctgactgtgaaggagcccagcaacgaatcaaatggccacgcagtcccggcaaattcatctcttttatcctcgcttatgaataagatgtctcagggcaaccctggcctgggcagcctgctgaacatcaaggcggaagcggaggggagccccgctgcggagccctcgcccttcctaggcaaggccgtgaaggcgctggttcaggagaagttggcagagccctggaaggtgtacctgcgcaggtttggtacaaaggacttctgtgacggccagtgtgacttcctccacaaggcccacttccactgcgtggtggaggaatgcggcgcgctcttcagcaccttggacggggccatcaagcacgcaaacttccacttccggacagagggaggagcagcaaaaggaaacacagaggctgcctttccggcctcggccgccgagaccaaacctcccatggccccctcgtcccctccggtccctcctgtcaccacggccacggtgtcctctctggaggggcccgctcccagcccggcctccgtgccctccacccccaccctgctcgcctggaagcagctggcttccaccataccccagatgcctcagatcccagcgtcagtgcctcacctgcccgcctcgcccttggcaacgacttctctagagaacgccaagccccaggtcaaacccggattcctccagttccaggagaagtgagtccctcgatgagccgggagtcccgcgttcccctcgcgtctcgggagtaggtgctagcaagggcgctaggaggccctgttcctcactgcggatggtgctgctgtccccagcctctctggggcatggccatcgggtgatgtccttctagccaaagatgctgctgctcctacctcactgcctgtcccagagcaggccagcccgcgtgggccgatggtggcggcagtggctactgctcctgcagggcatgtggtgatcctgccagggccaggtggggtggactgggcgtggtggtcctcagaggacaactcccagcctgacaaggagggctgcgtctccctccgagcctccgtattggcctcctctgtggctcacacccatggctgaatctctgcagggcacgtgaagtcacgggtaggggccaggcccctccaggccgtcactggcctgcacagtggtctgagctcttgggtggaagggaccctcctcactggatggtggtggctccttgcagggagaacggtgactttgtattgtcatgtgtgcggcttcctgttctcaataaaagtaataaattggattattta

SEQ ID NO: 4787 - DNA, 7936 bp, Homo sapiens
  source 1..7936: mol_type = unassigned DNA
atgcgcgcccgcggcgctccatcccaaacacacacacatttttcccccggacttggaaagtcacccaaagccgccccaagtgcaggcaaacagaccttgctgactgaaggcaaagactcctccatcccacctgccctcccagctgccacggccatcgacccctcctttacaaggggctcctgcaactccccagcagcacgtgttggaatggacttcggaccctggcctcttgggatgcaaaggatgaagtgacacccccagctacatccgaggaggttctaggacctgctacgagagtttgggaccaaggagaagagaatggatcttggaacagctgagggcacccggtgcacggacccgcctgcaggcaagcccgccatggcgcccaaacgcaagggtggcctgaagctgaacgccatctgcgccaagctgagccgccaggtggtggtggagaagcgagctgacgccggctcccacacggagggcagcccatcgcagccccgggaccaagagcgcagtggccctgagtctggggcagcccgggccccccgcagcgaggaagacaagagacgggcagtgatcgagaagtgggtgaacggggagtacagcgaggagccggcacccacacccgtgttggggcggattgcccgcgagggcctggagctgcctcccgagggtgtctacatggtgcagccccaggggtgcagcgatgaggaagaccacgcggaggagccctccaaggacggcggtgccctggaggagaaggattcggacggggcagcctccaaggaggacagcggccccagcaccaggcaggcttcaggagaggcctcctcgctgcgggactacgcggcctccaccatgaccgagttcctcggcatgtttggctatgatgaccagaacacgcgggacgagctggccaggaagatcagctttgagaagctgcacgcgggctccaccccggaggcagccacctcctccatgctgcccacctccgaggataccctcagcaagcgggcgcggttctctaagtatgaggagtacatccgcaagctcaaggctggcgagcagctctcctggccggcccccagcaccaagaccgaggagcgggtgggcaaggaggtggtgggcaccctgcccggcctgcggctgcccagcagcacggcccacctggagaccaaggccaccatcctgcccctgccgtcgcacagcagtgtccagatgcagaacctggtagcccgggcctccaagtacgacttcttcatccaaaaactgaagaccggcgagaatctgcggccccagaacgggagcacctacaagaagccatccaagtacgacctggagaatgtcaagtacctgcacctcttcaaacccggggagggcagccccgacatgggcggggccatcgccttcaagacaggcaaggtggggcgcccttccaagtacgacgtccggggcatccagaagccaggccccgccaaggttccgcccacccccagcctggctcccgcacccctcgccagcgtgcccagtgcccccagcgcccccgggccagggccagagcctcctgcctccctgtccttcaacactcccgagtacctgaagtcaaccttctccaaaacagactccatcaccacggggaccgtctccactgtcaagaacggactgcccacagataaaccagccgtcactgaagatgtaaacatttaccagaaatatattgccaggttctcgggcagccagcactgtggccacatccactgtgcctaccagtaccgcgagcactaccactgccttgaccctgagtgtaactaccagaggttcacgagtaagcaggacgtgatccgccactacaacatgcacaagaagcgcgacaactccctgcagcacggcttcatgcgtttcagcccgctggacgactgcagcgtctactaccacggctgccacctcaatgggaagagcacccactatcactgcatgcaggtgggctgtaacaaggtgtacacgagcacgtctgacgtgatgacccacgagaacttccacaagaagaatacccagctcattaacgacggcttccagcgcttccgagccaccgaagactgtggcacagccgactgccagttctacggacagaagaccacgcacttccactgcaggcgccccggctgcacattcactttcaagaacaagtgtgacatcgagaagcacaagagctaccacatcaaggacgatgcctacgccaaggacggcttcaagaagttctacaagtacgaggagtgcaagtacgagggctgcgtgtacagcaaggctaccaaccacttccactgcatccgcgccggctgcggcttcaccttcacctccaccagccagatgacctctcacaagcgcaagcatgagcgccggcacatccgctcctcgggcgcgctggggctgccgccctcgctgctgggcgccaaggacacggagcacgaggagtccagcaacgacgaccttgttgacttctccgccctgagcagcaagaactccagcctgagcgcctcccctaccagccagcagtcctctgcgtccctggctgccgccactgccgccaccgaggctgggcccagtgccaccaaacctcccaacagcaagatctcggggctgctgccccagggcctgcctggctcaatccccctggccctggccctctccaactcgggcctgcccacccccacgccctacttccccatactggctggccgtgggagcacctccctgcctgtgggcacccccagcctcctgggtgccgtgtcgtctgggtcagcagcctcagccacccctgacacacccacgctggtcgcctcgggagctggagactcagcccccgtggctgccgcctctgtcccggcaccacccgcctccatcatggagaggatctctgcaagcaagggcctcatctcgcccatgatggccaggctggctgcagctgccctcaagccctctgccacctttgacccaggaagcgggcagcaggtcaccccagccaggttccccccggcccaagtgaagccggaacccggtgagagcaccggcgccccaggcccccacgaagcctcccaggaccgcagtctagacctgactgtgaaggagcccagcaacgaatcaaatggccacgcagtcccggcaaattcatctcttttatcctcgcttatgaataagatgtctcagggcaaccctggcctgggcagcctgctgaacatcaaggcggaagcggaggggagccccgctgcggagccctcgcccttcctaggcaaggccgtgaaggcgctggttcaggagaagttggcagagccctggaaggtgtacctgcgcaggtttggtacaaaggacttctgtgacggccagtgtgacttcctccacaaggcccacttccactgcgtggtggaggaatgcggcgcgctcttcagcaccttggacggggccatcaagcacgcaaacttccacttccggacagagggaggagcagcaaaaggaaacacagaggctgcctttccggcctcggccgccgagaccaaacctcccatggccccctcgtcccctccggtccctcctgtcaccacggccacggtgtcctctctggaggggcccgctcccagcccggcctccgtgccctccacccccaccctgctcgcctggaagcagctggcttccaccataccccagatgcctcagatcccagcgtcagtgcctcacctgcccgcctcgcccttggcaacgacttctctagagaacgccaagccccaggtcaaacccggattcctccagttccaggagaacgatccttgcctcgccacggactgcaagtacgccaacaagttccacttccactgtctctttgggaactgcaagtacgtctgcaaaacgtctggcaaggccgaatcccactgcctggaccacatcaaccccaacaacaacctggtgaacgtgcgagaccagtttgcatactactctctgcagtgtctctgtcccaaccagcactgcgagttccgaatgcgtgggcactaccactgcctccgcaccggctgctattttgtgaccaacatcaccaccaagctcccctggcacatcaagaagcatgagaaggcggagcggcgggcagccaatggcttcaaatacttcaccaagcgcgaggagtgtggcaggctaggttgcaagtacaaccaggtgaacagccacttccactgcatccgggagggctgccagttctccttcctcctcaagcaccagatgacctcccacgcgcggaagcacatgcggaggatgctggggaagaacttcgaccgcgtgcccccctcccagggccccccaggcctgatggatgctgagacagatgagtgcatggactacactggctgcagcccaggcgccatgtcctctgagtcatccaccatggaccggagctgctccagcacccccgtgggtaacgagagcaccgcggcagggaacaccatctctatgccgacagcctcgggggccaaaaagcgcttctggatcatcgaggacatgtcgcccttcggcaagcggcggaagacggcgtcctcccggaagatgctggacgagggcatgatgctggagggcttccggcgcttcgacctttacgaggactgcaaggacgcagcttgtcagttctcgctcaaggtcacccactaccactgcacgcgcgagaactgcggctacaagttctgcgggcgcacgcacatgtacaagcacgcgcagcaccacgaccgcgtggacaacctggtgctggacgacttcaagcgcttcaaggcctcactcagctgccacttcgccgactgccccttctcgggcaccagcacgcacttccactgcctgcgctgccgcttccgctgcaccgacagcaccaaggtcacggcgcatcgcaagcaccacggcaaacaggacgtgatcagcgccgcgggcttctgccagttcagctccagcgccgactgcgccgtgcccgactgcaagtacaagctcaagtgctcgcacttccactgcaccttcccgggctgccgccacacggtggtgggcatgtcgcagatggactcgcacaagcgcaagcacgagaagcaggagcgcggcgagcccgcggcagagggccccgcgcccgggcctcccatcagtctggacggctccctgtcgctgggcgccgagccgggctcgctgctcttcctgcagtcggcggccgccggcctgggcctggcgctgggcgacgcgggcgaccccggcccgcccgacgccgccgcccccgggccgcgcgagggcgccgccgccgccgccgccgcagctggggagtcctcgcaggaggacgaggaggaggagctggagctgccggaggaggaggccgaagacgacgaggacgaggacgacgacgaggacgacgacgacgaggacgacgacgaggacgacgacgacgaggacctgcgcaccgactcggaggagtcgctgcccgaggcggcggcggaggcggcgggcgcgggcgcgcggaccccggccttggcggcgctggcggccctgggcgcccccggccccgcgcccactgcagcctcctcgccctagcggcgcccgcgggtggccctggcggcggcctcggcctcggcctcgggagcggcgccgccccgcgcgaagcggcccctgggcagagccccgcgccccgccggtgcttccggaccccgagtccgtctcaggacagaggcggggacccctctggtgctccgcggccgaggacacaggcggcggcggtggccctgctctagggaggccgggtctcttcagggaaacagaaggtgctcttgtcccggggtagggaacctaggagcaggggtcccgggcgaatgcggcgcagctcccggccgctgccccggcgcccctccccgcggccgattcggccccgcgaccattgctcaggactgggacgggcgctgggggccaccgggacccccaccgcgcgccaccagggcggggtggctcctggagccgctggcggggcctccctcatgcagctaggatcctcccccctgcccagggggagacgggcagaaggcagtcagcacgggtgacactacagggaccgtggaggaagcctcacgggagtagcagccgcggagctccagctcagccccaccccagggcccggctgctcccccaggcctgggtcgggtctgtttggcgactccctggccccagcctccgccccagggaaaccgaggctgcgtccaaaacccagagtagcccgctgggggccggggcggggtctcggccaccctggtggtgcaaacaggaaggatgcgcctggttttggctttaatgttcaaaatggaaaaaaatacaagaaagttgtacagtatttttcctgtaaaggttattattctacatagaacaaaaaggaagaaagcaggcgtggtgagagtgcagacccgcctgggcccggcctgaggttggaggctcagtcccgtttatcctgtgggatttggtccagggtttttgtagaggccttaactgtttgaggctgtctgtcttcacaatagcactgatgggagctgcgtgattccaactcttaacttgaattttgtagagacaagaaaaaaggactattactgttgatccaagtttgtagttaatttaacatttgagttctctcttggtgatgcgtgtggctttatagggcttttttttttttccagtttgttttattactttgtttgggatgcttcttcgctggtgcagtctacccagattgggttccctttgcaaaacatcccccttcctggagatgatgatgccatcgaagcccgggccagggcctgacctggcaggcacacacctggccagtggctctgaggtccccggggaccgagtcccctgcgagggcaggctgcccgaggccacacctgcccaccttccctactccaggccaccagctggtgtcagattgggccaccgggagagaacaggcctaggagggaatggaaggctggcggggaggctgtcatccagaagcctcctccccagaggtctccaggaggaacctggctcaactggggggcagtggtttacttttcccttttttcttcctttcttttgtcctctcagctgcccacagccagaaagccaggaccacccgaactggacagggagcagggagggaggagtggtcgcacggagcgtacctgattcaacaggaaatcagttattttctaaaacagcccctaccagagcctcctgaactctgtgggcaccacgtgctgctgtgagcatctgcccagacagtgacccgccacaggccccgggcgtctgtggaaggagttttgtaaaggaaaaaaaaacacacacacacaaacattttttcaatgtagcaaaatcaaacttaaaaaaaaaaaagaagaaaagaagaagatgccgacagtgcggagtctagccttttgtaaacttcatattgcacactaggactataagccattgctagctcattttgaattttaacgtgtaatttttgttttattttctttctgtggggaaacaatgcttgatccaccaatgctctttttaatgttttataactatgtatgtgtatatatataaatatcaaataatatgtatgcacatatgtgtgtgtatatatctatatgtatatacatatatagatatatagagatatatagagaggttttgagacaaaaaaaatacagaacgtgaaacccgagctgaacagcgtgtgctctgattacttgaatctggtctcctcggcacctggttattaagaactgaatatttttccacttgaatttagtgctattagaaatttaatatatgtgttttatttatttgatttttttttttttttttgcatgactgatgcaaggtttgacattttcactcaataaaaactggaaaaaaa

SEQ ID NO: 4788 - DNA, 5637 bp, Homo sapiens
  source 1..5637: mol_type = unassigned DNA
caggagttagaagccgctcttcacagagatgacgtggagtttatcagtgacctgattgcctgcctgcttcagggctgctatcaacgaagagatatcacgcctcagacattccacagctacctagaggacatcatcaactaccgctgggagctcgaagaagggaagcccaaccctctgagggaagccagtttccaggacctgcctcttcgcacacgggtggagatcctgcaccgactctgtgattaccggctggatgcagacgatgtcttcgatcttctaaagggcctggatgcagacagtctccgtgtggagccattgggtgaagacaattctggggcactatattggtatttctatggaacacgaatgtacaaagaggacccggtgcaaggaaaatccaatggagaactctctttgagcagggaaagtgaaggacaaaaaaatgtctcaagtattcctggaaaaacgggaaaaagaagaggaagacccccaaaacggaagaaactgcaggaggagattctgttgagtgaaaagcaggaagaaaattccttggcatccgagccacagacaagacatgggtcccaagggccaggccaaggtacttggtggctcctgtgccagacagaagaggaatggagacaggtcaccgagagttttcgcgagaggacctcccttcgagaacggcagctctacaagctcctcagtgaggacttcctgcctgagatctgcaacatgatcgcccagaagggaaaacgtccacagcgcacaaaggcagagttgcatcctaggtggatgtctgaccacctgtccatcaaacccgtcaagcaagaggagactcctgtgctgaccagaatagaaaaacaaaagcgcaaagaggaggaagaagagcgtcagattcttctagcagtgcagaagaaggagcaggagcagatgctaaaggaagagaggaaacgcgagttggaggagaaggtcaaggcagtggaaggtatgtgcagtgtccgcgtggtctggagaggtgcatgtctgtcgaccagccgtcctgtagatcgagcgaagaggagaaagctcagggaagaaagggcatggctgctggctcaaggaaaggagctccctccagaactttcccatctggaccccaattcccccatgagagaggaaaaaaagactaaagacctctttgagttggatgatgatttcactgctatgtataaagttctagacgtggtaaaggctcacaaggattcctggcccttcttggaacctgtggatgaatcttatgcccctaactattatcagattattaaggcccccatggatatttccagcatggagaagaaactgaatggaggtttatactgtaccaaggaggaatttgtaaatgacatgaagaccatgttcaggaattgtcgaaagtataatggggaaagtagtgagtataccaagatgtctgataatttagagaggtgtttccatcgggcaatgatgaaacattttcctggagaagatggagacacagatgaagaattttggattcgagaggatgaaaagcgggagaaaagacggagtcgggctgggcgaagtggtgggagccatgtttggacccgctccagggacccagaagggtccagcaggaaacagcagcccatggagaatggaggaaagtcgttgccccccacacgccgagcgccctcttctggggacgatcagagcagcagctccacacagcccccgcgggaggtgggcacttccaatggccgaggtttttctcatcccctgcattgtggtgggacacccagccaggcaccctttttaaaccagatgaggccagcagtaccaggaacatttggccctctgcgaggatcagatcctgccaccttgtatggctcctctggagtcccggagccacaccccggggagcctgtgcagcagcgtcagcctttcaccatgcagcctccagttggaattaacagcctccgaggacccaggctaggcacaccagaggagaagcaaatgtgcggggggctgacacacctttctaacatgggcccacaccctggatccttgcagcttgggcagataagtggcccaagtcaggatggaagcatgtatgctccagctcagttccagccaggattcattcctccccggcatgggggggctccagcccggccaccagactttcctgaaagctcagaaattcctcccagccatatgtatcgatcgtacaagtacctgaatcgagtacactctgccgtctggaatgggaaccatggtgctacgaaccaaggacccttgggcccagatgagaagccccacctggggccaggaccctctcaccagcctcgcactctcggtcacgtgatggattcccgagtcatgagaccacctgtcccccccaaccagtggactgaacaatcaggcttcctacctcatggagttccttcctcagggtacatgcgaccgccctgcaagtctgccggacatcggttacagccacctccagtgccagcacccagttctttgtttggagcacctgcccaggctcttcggggggtgcagggaggggactccatgatggacagcccagagatgattgcgatgcagcagctctcctcccgcgtctgccccccaggtgtgccttaccacccccaccagcctgcacacccccgtttacctggcccttttccgcaggtagctcacccaatgtcagtcactgtgtcagcccccaagcctgccctgggcaaccctgggagggcaccggagaacagtgaagcacaagagcctgagaatgaccaagcagagccgttgcctggccttgaagagaaaccaccaggtgttggtacttcagagggggtctacctcacacaactacctcaccccacacctcccctgcagactgactgcaccaggcagagctcaccacaagaaagggaaacagtgggcccggagctcaaaagcagctcctccgaatctgcggacaactgtaaagcaatgaagggcaagaatccctggccctcggatagcagctaccccggcccagccgcccaagggtgcgtgagagacctctccacggtggcagacaggggcgctctatccgagaacggagtcattggggaagcatctccttgtggatcggaggggaagggccttggtagcagtggttccgaaaagctgctctgccccagaggcagaacgttgcaggaaaccatgccatgcacgggacagaacgcagcgacaccgcccagcacagaccccggtttgacgggaggcactgtgagccagtttcccccgctgtatatgcctggcctagagtacccgaattcagctgcccattaccacatcagtccaggcctgcagggtgtgggccctgtgatgggagggaagtccccagcatcccatccccagcattttcccccaaggggctttcagtctaaccacccacattctggaggctttccccggtatcgccccccacaaggaatgaggtattcctaccacccaccgccacagccttcctaccaccactatcagcgaactccttactatgcctgtccacagagcttttctgactggcagagacctctccatccccagggaagcccaagcggacccccagccagtcagcctcccccaccaaggtccctcttctcagataagaatgccatggccagtctgcaaggctgtgagacactgaatgctgccttaacttctccaacccgtatggatgcagtggctgctaaagtcccaaatgacgggcagaatcctggtccagaggaagagaagctggatgaatctatggagaggccagagagtcccaaagaatttttagacctggacaaccataacgcagctaccaagcggcagagctcgttgtcagccagcgagtatctctatggaactcctccgcctctgagttcaggaatgggatttggttcatctgcatttccaccccacagtgtgatgctgcagacggggcctccctatacccctcagcggccggccagtcactttcagcccagggcttactcttcccctgtggctgccctcccacctcaccacccaggggccacccagcccaacggcctctctcaggagggtcccatctatcgctgccaggaagaaggcctgggtcactttcaagctgtgatgatggaacaaattggcactagaagtggaataagaggacctttccaggaaatgtacagaccatcaggaatgcagatgcacccggtccagtcgcaggcctcgttcccaaagacccccacagcagcaacatcacaggaggaggtgccgcctcataagcctccaacacttcccctggatcagagctagtccaaggaggaaatgagccccaagcaatggaaagctgcacacgaagactggaatgtggagaactggggagtgccctgtcagctctattcccatcacctgctccaccccttcacggcgacccactcgtgccatacttgagctggagccagtcacgggccctaaaaggacactccttagatgactgacacacagattgcaaaggtcctcggccagggatctcttgcacagctgatgtagacagtcaggcaaaactaatgaacgtggagttaatgatgacttttccaaatcctgagacacttttcagggaaaatcactttaaacttgggggagggggtatactcaagaatggagtggtgcttttaaactttgatgagcagctaaactcaggtatatatttggggaagggactactcttagtattaatggttttggagctgggtccagtttacagaattttcatgttgccttttaaaataatttttgttggtggtgaatgtattgtacataaagtgggaagggtgggtggggatgcggaagaaatgggggtcctaactggtgggcacacagcactggagtgatttttatctgtttacaatcatgtcacactgaatacttatgggagccggagatgagggtaggaaaggtttgatcttgtaatgtgtcactgtgtttccttagtggccagccagccttcagaatagctaaaggccttccttccttccagtcagcctgagagagaacacctgtcccctaagcacctggtgtctccattggaggcagactgctctcaggagactactagaagcttcagcccggaagacaggctgctctctcatgctggtggcccaaattgagaaagtggtgtcccttcctgattttgccaccagccctaccgaatagttgtaaaccagtatcaggaattgggatcgctagagtgtttcacgtattagaagatgaatcgtcctcatcacagacctccctgtcaggactgtgatctagaaggcatcacacacagctttctggcacgaatcacattttgtggaagtgactactcaggtttgtatattttagtatcaataaagaattgcacaggtttgaataggaaaaatgtattctatagatttacagtttgaatttaggaatatttcagtatatatagtttttattcgttttaagtgaatcatagtaaaatcagtcatggtgatttaaaatagctatcaagaacaagttcttggaattatctgttgtatctgtgataggaaaccattttacagtattaaattactttattacagttgtagagtt

SEQ ID NO: 4789 - DNA, 1448 bp, Homo sapiens
  source 1..1448: mol_type = unassigned DNA
aaaggaaaaaggatgaacaaatgcctgtgtggtttcacttatatagtactcagcttgacgccatgtgaaatgaagaggagttagaagccgctcttcacagagatgacgtggagtttatcagtgacctgattgcctgcctgcttcagggctgctatcaacgaagagatatcacgcctcagacattccacagctacctagaggacatcatcaactaccgctgggagctcgaagaagggaagcccaaccctctgagggaagccagtttccaggacctgcctcttcgcacacgggtggagatcctgcaccgactctgtgattaccggctggatgcagacgatgtcttcgatcttctaaagggcctggatgcagacagtctccgtgtggagccattgggtgaagacaattctggggcactatattggtatttctatggaacacgaatgtacaaagaggacccggtgcaaggaaaatccaatggagaactctctttgagcagggaaagtgaaggacaaaaaaatgtctcaagtattcctggaaaaacgggaaaaagaagaggaagacccccaaaacggaagaaactgcaggaggagattctgttgagtgaaaagcaggaagaaaattccttggcatccgagccacagacaagacatgggtcccaagggccaggccaaggtacttggtggctcctgtgccagacagaagaggaatggagacaggtcaccgagagttttcgcgagaggacctcccttcgagaacggcagctctacaagctcctcagtgaggacttcctgcctgagatctgcaacatgatcgcccagaaggagactcctgtgctgaccagaatagaaaaacaaaagcgcaaagaggaggaagaagagcgtcagattcttctagcagtgcagaagaaggagcaggagcagatgctaaaggaagagaggaaacgcgagttggaggagaaggtcaaggcagtggaaggtatgtgcagtgtccgcgtggtctggagaggtgcatgtctgtcgaccagccgtcctgtagatcgagcgaagaggagaaagctcagggaagaaagggcatggctgctggctcaaggaaaggagctccctccagaactttcccatctggaccccaattcccccatgagagaggaaaaaaagactaaagacctctttgagttggatgatgatttcactgctatgtataaagttctagacgtggtaaaggctcacaaggattcctggcccttcttggaacctgtggatgaatcttatgcccctaactattatcagattattaaggcccccatggatatttccagcatggagaagaaactgaatggaggtttatactgtaccaaggaggaatttgtaaatgacatgaagaccatgttcaggaattgtcgaaagtataatggggaaagtagtggtaagcagggaaggagtttgtgctag

SEQ ID NO: 4790 - DNA, 2302 bp, Homo sapiens
  source 1..2302: mol_type = unassigned DNA
actcggggcaacaggcagatttgcctgctgagggtggagacccacgagccgaggcctcctgcagtgttctgcacagcaaaccgcacgctatggctgacagccgggatcccgccagcgaccagatgcagcactggaaggagcagcgggccgcgcagaaagctgatgtcctgaccactggagctggtaacccagtaggagacaaacttaatgttattacagtagggccccgtgggccccttcttgttcaggatgtggttttcactgatgaaatggctcattttgaccgagagagaattcctgagagagttgtgcatgctaaaggagcaggggcctttggctactttgaggtcacacatgacattaccaaatactccaaggcaaaggtatttgagcatattggaaagaagactcccatcgcagttcggttctccactgttgctggagaatcgggttcagctgacacagttcgggaccctcgtgggtttgcagtgaaattttacacagaagatggtaactgggatctcgttggaaataacacccccattttcttcatcagggatcccatattgtttccatcttttatccacagccaaaagagaaatcctcagacacatctgaaggatccggacatggtctgggacttctggagcctacgtcctgagtctctgcatcaggtttctttcttgttcagtgatcgggggattccagatggacatcgccacatgaatggatatggatcacatactttcaagctggttaatgcaaatggggaggcagtttattgcaaattccattataagactgaccagggcatcaaaaacctttctgttgaagatgcggcgagactttcccaggaagatcctgactatggcatccgggatctttttaacgccattgccacaggaaagtacccctcctggactttttacatccaggtcatgacatttaatcaggcagaaacttttccatttaatccattcgatctcaccaaggtttggcctcacaaggactaccctctcatcccagttggtaaactggtcttaaaccggaatccagttaattactttgctgaggttgaacagatagccttcgacccaagcaacatgccacctggcattgaggccagtcctgacaaaatgcttcagggccgcctttttgcctatcctgacactcaccgccatcgcctgggacccaattatcttcatatacctgtgaactgtccctaccgtgctcgagtggccaactaccagcgtgacggcccgatgtgcatgcaggacaatcagggtggtgctccaaattactaccccaacagctttggtgctccggaacaacagccttctgccctggagcacagcatccaatattctggagaagtgcggagattcaacactgccaatgatgataacgttactcaggtgcgggcattctatgtgaacgtgctgaatgaggaacagaggaaacgtctgtgtgagaacattgccggccacctgaaggatgcacaaattttcatccagaagaaagcggtcaagaacttcactgaggtccaccctgactacgggagccacatccaggctcttctggacaagtacaatgctgagaagcctaagaatgcgattcacacctttgtgcagtccggatctcacttggcggcaagggagaaggcaaatctgtgaggccggggccctgcacctgtgcagcgaagcttagcgttcatccgtgtaacccgctcatcactggatgaagattctcctgtgctagatgtgcaaatgcaagctagtggcttcaaaatagagaatcccactttctatagcagattgtgtaacaattttaatgctatttccccaggggaaaatgaaggttaggatttaacagtcatttaaaaaaaaaatttgttttgacggatgattggattattcatttaaaatgattagaaggcaagtttctagctagaaatatgattttatttgacaaaatttgttgaaattatgtatgtttacatatcacctcatggcctattatattaaaatatggctataaatatataaaaagaaaagataaagatgatctactcagaaatttttatttttctaaggttctcataggaaaagtacatttaatacagcagtgtcatcagaagataacttgagcaccgtcatggcttaatgtttattcctgataataattgatcaaattcatttttttcactggagttacattaatgttaattcagcactgatttcacaacagatcaatttgtaattgcttacatttttacaataaataatctgtacgtaagaacaga

SEQ ID NO: 4791 - DNA, 2437 bp, Homo sapiens
  source 1..2437: mol_type = unassigned DNA
cggggacaccctggccaccgccgcgcggacaccctcacgaggacaccccggccgcgcggacacctaccgcggggacgccccgaccccatcctacctgctgcgccccgcgccgcgccccgcaccccgcccgccacggcctgcgtccgccaccggaagcgccctcctaatccccgcagcgccaccgccattgccgccatcgtcgtggggcttctggggcagctagggctgcccgccgcgctgcctgcgccggaccggggcgggtccagtcccgggcgggccgtcgcgggagagaaataacatctgctttgctgccgagctcagaggagaccccagacccctcccgcagccagagggctggagcctgctcagaggtgctttgaagatgccggaggccccgcctctgctgttggcagctgtgttgctgggcctggtgctgctggtggtgctgctgctgcttctgaggcactggggctggggcctgtgccttatcggctggaacgagttcatcctgcagcccatccacaacctgctcatgggtgacaccaaggagcagcgcatcctgaaccacgtgctgcagcatgcggagcccgggaacgcacagagcgtgctggaggccattgacacctactgcgagcagaaggagtgggccatgaacgtgggcgacaagaaaggcaagatcgtggacgccgtgattcaggagcaccagccctccgtgctgctggagctgggggcctactgtggctactcagctgtgcgcatggcccgcctgctgtcaccaggggcgaggctcatcaccatcgagatcaaccccgactgtgccgccatcacccagcggatggtggatttcgctggcgtgaaggacaaggtcacccttgtggttggagcgtcccaggacatcatcccccagctgaagaagaagtatgatgtggacacactggacatggtcttcctcgaccactggaaggaccggtacctgccggacacgcttctcttggaggaatgtggcctgctgcggaaggggacagtgctactggctgacaacgtgatctgcccaggtgcgccagacttcctagcacacgtgcgcgggagcagctgctttgagtgcacacactaccaatcgttcctggaatacagggaggtggtggacggcctggagaaggccatctacaagggcccaggcagcgaagcagggccctgactgcccccccggcccccctctcgggctctctcacccagcctggtactgaaggtgccagacgtgctcctgctgaccttctgcggctccgggctgtgtcctaaatgcaaagcacacctcggccgaggcctgcgccctgacatgctaacctctctgaactgcaacactggattgttcttttttaagactcaatcatgacttctttactaacactggctagctatattatcttatatactaatatcatgttttaaaaatataaaatagaaattaagaatctaaatatttagatataactcgacttagtacatccttctcaactgccattcccctgctgcccttgacttgggcaccaaacattcaaagctccccttgacggacgctaacgctaagggcggggcccctagctggctgggttctgggtggcacgcctggcccactggcctcccagccacagtggtgcagaggtcagccctcctgcagctaggccaggggcacctgttagccccatggggacgactgccggcctgggaaacgaagaggagtcagccagcattcacacctttctgaccaagcaggcgctggggacaggtggaccccgcagcagcaccagcccctctgggccccatgtggcacagagtggaagcatctccttccctactccccactgggccttgcttacagaagaggcaatggctcagaccagctcccgcatccctgtagttgcctccctggcccatgagtgaggatgcagtgctggtttctgcccacctacacctagagctgtccccatctcctccaaggggtcagactgctagccacctcagaggctccaagggcccagttcccaggcccaggacaggaatcaaccctgtgctagctgagttcacctgcaccgagaccagcccctagccaagattctactcctgggctcaaggcctggctagcccccagccagcccactcctatggatagacagaccagtgagcccaagtggacaagtttggggccacccagggaccagaaacagagcctctgcaggacacagcagatgggcacctgggaccacctccacccagggccctgccccagacgcgcagaggcccgacacaagggagaagccagccacttgtgccagacctgagtggcagaaagcaaaaagttcctttgctgctttaatttttaaattttcttacaaaaatttaggtgtttaccaatagtcttattttggcttatttttaa

SEQ ID NO: 4792 - DNA, 1548 bp, Homo sapiens
  source 1..1548: mol_type = unassigned DNA
atccccgcagcgccaccgccattgccgccatcgtcgtggggcttctggggcagctagggctgcccgccgcgctgcctgcgccggaccggggcgggtccagtcccgggcgggccgtcgcgggagagaaataacatctgctttgctgccgagctcagaggagaccccagacccctcccgcagccagagggctggagcctgctcagaggtgctttgaagaggatccctgggctgcctggggaagcacccagggccagggagtgtgaccctgcaggctccacacaggactgccagaggcacacacctgctctgtctacccgagggcaccagagggcacgagaaggctggctccctggcgctgacacgtcaggcaactgaggcacaaggctggcatttctgaaccttgcccctctgcaaacacaagggggcgatggtggcactccaagcaaaggggcgtgtgggtgctgcaggaggagcacagagcactggcgcccctcccctcccgccctgcagatgccggaggccccgcctctgctgttggcagctgtgttgctgggcctggtgctgctggtggtgctgctgctgcttctgaggcactggggctggggcctgtgccttatcggctggaacgagttcatcctgcagcccatccacaacctgctcatgggtgacaccaaggagcagcgcatcctgaaccacgtgctgcagcatgcggagcccgggaacgcacagagcgtgctggaggccattgacacctactgcgagcagaaggagtgggccatgaacgtgggcgacaagaaaggcaagatcgtggacgccgtgattcaggagcaccagccctccgtgctgctggagctgggggcctactgtggctactcagctgtgcgcatggcccgcctgctgtcaccaggggcgaggctcatcaccatcgagatcaaccccgactgtgccgccatcacccagcggatggtggatttcgctggcgtgaaggacaaggtcacccttgtggttggagcgtcccaggacatcatcccccagctgaagaagaagtatgatgtggacacactggacatggtcttcctcgaccactggaaggaccggtacctgccggacacgcttctcttggaggaatgtggcctgctgcggaaggggacagtgctactggctgacaacgtgatctgcccaggtgcgccagacttcctagcacacgtgcgcgggagcagctgctttgagtgcacacactaccaatcgttcctggaatacagggaggtggtggacggcctggagaaggccatctacaagggcccaggcagcgaagcagggccctgactgcccccccggcccccctctcgggctctctcacccagcctggtactgaaggtgccagacgtgctcctgctgaccttctgcggctccgggctgtgtcctaaatgcaaagcacacctcggccgaggcctgcgccctgacatgctaacctctctgaactgcaacactggattgttcttttttaagactcaatcatgacttctttactaacactggctagctata

SEQ ID NO: 4793 - DNA, 1339 bp, Homo sapiens
  source 1..1339: mol_type = unassigned DNA
cccgcatgagcaggcagagtggagataacacggatcgctgtgtacactgtgtgctccggttgttgcatccgagggttgatcggatggtggttcccatccagatccaagtcctggcccctgatcacagagaaacacagctggacattaaagtgaaataacatctgctttgctgccgagctcagaggagaccccagacccctcccgcagccagagggctggagcctgctcagaggtgctttgaagatgccggaggccccgcctctgctgttggcagctgtgttgctgggcctggtgctgctggtggtgctgctgctgcttctgaggcactggggctggggcctgtgccttatcggctggaacgagttcatcctgcagcccatccacaacctgctcatgggtgacaccaaggagcagcgcatcctgaaccacgtgctgcagcatgcggagcccgggaacgcacagagcgtgctggaggccattgacacctactgcgagcagaaggagtgggccatgaacgtgggcgacaagaaaggcaagatcgtggacgccgtgattcaggagcaccagccctccgtgctgctggagctgggggcctactgtggctactcagctgtgcgcatggcccgcctgctgtcaccaggggcgaggctcatcaccatcgagatcaaccccgactgtgccgccatcacccagcggatggtggatttcgctggcgtgaaggacaaggtcacccttgtggttggagcgtcccaggacatcatcccccagctgaagaagaagtatgatgtggacacactggacatggtcttcctcgaccactggaaggaccggtacctgccggacacgcttctcttggaggaatgtggcctgctgcggaaggggacagtgctactggctgacaacgtgatctgcccaggtgcgccagacttcctagcacacgtgcgcgggagcagctgctttgagtgcacacactaccaatcgttcctggaatacagggaggtggtggacggcctggagaaggccatctacaagggcccaggcagcgaagcagggccctgactgcccccccggcccccctctcgggctctctcacccagcctggtactgaaggtgccagacgtgctcctgctgaccttctgcggctccgggctgtgtcctaaatgcaaagcacacctcggccgaggcctgcgccctgacatgctaacctctctgaactgcaacactggattgttcttttttaagactcaatcatgacttctttactaacactggctagctatattatcttatatactaatatcatgttttaaaaatataaaatagaaattaagaatctaaa

SEQ ID NO: 4794 - DNA, 1457 bp, Homo sapiens
  source 1..1457: mol_type = unassigned DNA
ccgccattgccgccatcgtcgtggggcttctggggcagctagggctgcccgccgcgctgcctgcgccggaccggggcgggtccagtcccgggcgggccgtcgcgggagagaaataacatctgctttgctgccgagctcagaggagaccccagacccctcccgcagccagagggctggagcctgctcagaggtgctttgaagggtctgtgacctgaacccctgggcttctgcctcaggcctcctgtgctctgctctctgcctgctgggtcccctcaccaggcttctgtctggttcccaggctacctgcctggagggtcacaccaggaggatttcaaacaggtttcaagtggggtcacttgccatcactgtgccccacgagatgccggaggccccgcctctgctgttggcagctgtgttgctgggcctggtgctgctggtggtgctgctgctgcttctgaggcactggggctggggcctgtgccttatcggctggaacgagttcatcctgcagcccatccacaacctgctcatgggtgacaccaaggagcagcgcatcctgaaccacgtgctgcagcatgcggagcccgggaacgcacagagcgtgctggaggccattgacacctactgcgagcagaaggagtgggccatgaacgtgggcgacaagaaaggcaagatcgtggacgccgtgattcaggagcaccagccctccgtgctgctggagctgggggcctactgtggctactcagctgtgcgcatggcccgcctgctgtcaccaggggcgaggctcatcaccatcgagatcaaccccgactgtgccgccatcacccagcggatggtggatttcgctggcgtgaaggacaaggtcacccttgtggttggagcgtcccaggacatcatcccccagctgaagaagaagtatgatgtggacacactggacatggtcttcctcgaccactggaaggaccggtacctgccggacacgcttctcttggaggaatgtggcctgctgcggaaggggacagtgctactggctgacaacgtgatctgcccaggtgcgccagacttcctagcacacgtgcgcgggagcagctgctttgagtgcacacactaccaatcgttcctggaatacagggaggtggtggacggcctggagaaggccatctacaagggcccaggcagcgaagcagggccctgactgcccccccggcccccctctcgggctctctcacccagcctggtactgaaggtgccagacgtgctcctgctgaccttctgcggctccgggctgtgtcctaaatgcaaagcacacctcggccgaggcctgcgccctgacatgctaacctctctgaactgcaacactggattgttcttttttaagactcaatcatgacttctttactaacactggctagctatattatcttatatactaatatcatgttttaaaaatataaaat

SEQ ID NO: 4795 - DNA, 871 bp, Homo sapiens
  source 1..871: mol_type = unassigned DNA
acgggaggagcaagaacacagaacagagggggcaagacagctccaccaggagtcaggagtgaatcccctctgggaacgaggcactaggaagaagaacttccagcccaggagaaataacatctgctttgctgccgagctcagaggagaccccagacccctcccgcagccagagggctggagcctgctcagaggtgctttgaagatgccggaggccccgcctctgctgttggcagctgtgttgctgggcctggtgctgctggtggtgctgctgctgcttctgaggcactggggctggggcctgtgccttatcggctggaacgagttcatcctgcagcccatccacaacctgctcatgggtgacaccaaggagcagcgcatcctgaaccacgtgctgcagcatgcggagcccgggaacgcacagagcgtgctggaggccattgacacctactgcgagcagaaggagtgggccatgaacgtgggcgacaagaaaggcaagatcgtggacgccgtgattcaggagcaccagccctccgtgctgctggagctgggggcctactgtggctactcagctgtgcgcatggcccgcctgctgtcaccaggggcgaggctcatcaccatcgagatcaaccccgactgtgccgccatcacccagcggatggtggatttcgctggcgtgaaggacaaggtcacccttgtggttggagcgtcccaggacatcatcccccagctgaagaagaagtatgatgtggacacactggacatggtcttcctcgaccactggaaggaccggtacctgccggacacgcttctcttggaggaatgtggcctgctgcggaaggggacagtgctactggctgacaacgtgatctgc

SEQ ID NO: 4796 - DNA, 2035 bp, Homo sapiens
  source 1..2035: mol_type = unassigned DNA
gctgttggcagctgtgttgctgggcctggtgctgctggtggtgctgctgctgcttctgaggcactggggctggggcctgtgccttatcggctggaacgagttcatcctgcagcccatccacaacctgctcatgggtgacaccaaggagcagcgcatcctgaaccacgtgctgcagcatgcggagcccgggaacgcacagagcgtgctggaggccattgacacctactgcgagcagaaggagtgggccatgaacgtgggcgacaagaaaggcaagatcgtggacgccgtgattcaggagcaccagccctccgtgctgctggagctgggggcctactgtggctactcagctgtgcgcatggcccgcctgctgtcaccaggggcgaggctcatcaccatcgagatcaaccccgactgtgccgccatcacccagcggatggtggatttcgctggcgtgaaggacaaggtcacccttgtggttggagcgtcccaggacatcatcccccagctgaagaagaagtatgatgtggacacactggacatggtcttcctcgaccactggaaggaccggtacctgccggacacgcttctcttggaggaatgtggcctgctgcggaaggggacagtgctactggctgacaacgtgatctgcccaggtgcgccagacttcctagcacacgtgcgcgggagcagctgctttgagtgcacacactaccaatcgttcctggaatacagggaggtggtggacggcctggagaaggccatctacaagggcccaggcagcgaagcagggccctgactgcccccccggcccccctctcgggctctctcacccagcctggtactgaaggtgccagacgtgctcctgctgaccttctgcggctccgggctgtgtcctaaatgcaaagcacacctcggccgaggcctgcgccctgacatgctaacctctctgaactgcaacactggattgttcttttttaagactcaatcatgacttctttactaacactggctagctatattatcttatatactaatatcatgttttaaaaatataaaatagaaattaagaatctaaatatttagatataactcgacttagtacatccttctcaactgccattcccctgctgcccttgacttgggcaccaaacattcaaagctccccttgacggacgctaacgctaagggcggggcccctagctggctgggttctgggtggcacgcctggcccactggcctcccagccacagtggtgcagaggtcagccctcctgcagctaggccaggggcacctgttagccccatggggacgactgccggcctgggaaacgaagaggagtcagccagcattcacacctttctgaccaagcaggcgctggggacaggtggaccccgcagcagcaccagcccctctgggccccatgtggcacagagtggaagcatctccttccctactccccactgggccttgcttacagaagaggcaatggctcagaccagctcccgcatccctgtagttgcctccctggcccatgagtgaggatgcagtgctggtttctgcccacctacacctagagctgtccccatctcctccaaggggtcagactgctagccacctcagaggctccaagggcccagttcccaggcccaggacaggaatcaaccctgtgctagctgagttcacctgcaccgagaccagcccctagccaagattctactcctgggctcaaggcctggctagcccccagccagcccactcctatggatagacagaccagtgagcccaagtggacaagtttggggccacccagggaccagaaacagagcctctgcaggacacagcagatgggcacctgggaccacctccacccagggccctgccccagacgcgcagaggcccgacacaagggagaagccagccacttgtgccagacctgagtggcagaaagcaaaaagttcctttgctgctttaatttttaaattttcttacaaaaatttaggtgtttaccaatagtcttattttggcttatttttaa

SEQ ID NO: 4797 - DNA, 5931 bp, Homo sapiens
  source 1..5931: mol_type = unassigned DNA
ctgccagatcagtttgtcaccacccaggctcccttgcctttggctgggtgcaacttccattttaggtgttggatctgagggggaaaaaaaagagagagggagagagagagaaagaagagcaggaaagatcccgaaaggaggaagaggtggcgaaaaatcaactgccctgctggatttgtctttctcagcaccttggcgaagccttgggtttctttcttaaaggactgatttttagaactccacatttgaggtggagtcgaccgccagcatcttggcctctgtgaaggaacaagaggcccagtttgagaagctgacccgggcgctggaggaggaacggcgccacgtctcggcgcagctggaacgcgtccgggtctcaccacaagatgccaacccactcatggccaacggcacactcacccgccggcatcagaacggccggtttgtgggcgatgctgaccttgaaagacagaaattttcagatttgaaactcaacggaccccaggatcacagtcaccttctatatagcaccatccccaggatgcaggagccggggcagattgtggagacctacacggaggaggatcctgagggagccatgtctgtagtctctgtggagacctcagatgatgggaccactcggcgcacagagaccacggtcaagaaagtagtgaagactgtgacaacacggacagtacagccagtcgctatgggaccagacgggttgcctgtggatgcttcatcagtttctaacaactatatccagactttgggtcgtgatttccgcaagaatggcaatgggggacctggtccctatgtggggcaagctggcactgctacccttcctaggaacttccactaccctcctgatggttatagtcgccactatgaagatggttatccaggtggcagtgataactatggcagtctgtcccgggtgacccgcattgaggagcggtataggcccagcatggaaggctaccgggcacctagtagacaggatgtgtatgggccccaaccccaggttcgggtaggtgggagcagcgtggatctgcatcgctttcatccagagccttatgggctagaggatgaccagcgtagtatgggctatgatgacctggattatggtatgatgtctgattatggcactgcccgtcggactgggacaccctctgaccctcgtcggcgcctcaggagctatgaagacatgattggtgaggaggtgccatcggatcaatactactgggctcctttggcccagcatgagcgaggaagtttagcaagcttggatagcctgcgcaaaggagggcctccacctcctaattggagacagccagagctgccagaggtgatcgccatgcttggattccgcttggatgctgtcaagtccaatgcagctgcatacctgcaacacttatgctaccgcaatgacaaggtgaagactgacgtgcggaagctcaagggcatcccagtactggtgggattgttagaccatcccaaaaaggaagtgcaccttggagcctgtggagctctcaagaatatctcttttggacgtgaccaggataacaagattgccataaaaaactgtgatggtgtgcctgcccttgtgcgattgcttcgaaaggctcgtgatatggaccttactgaagttattaccggaaccctgtggaatctttcatcccatgactcaatcaaaatggagattgtggaccatgcactgcatgccttgacagatgaagtgatcattcctcattctggttgggagcgggaacctaatgaagactgtaagccacgccacattgagtgggaatcggtgctcaccaacacagctggctgccttaggaatgtaagctcagagaggagtgaagctcgccggaaacttcgggaatgtgatggtttagttgatgccctcattttcattgttcaggctgagattgggcagaaggattcagacagcaagcttgtagagaactgtgtttgccttcttcggaacttatcatatcaagttcaccgggagatcccacaggcagagcgttaccaagaggcagctcccaatgttgccaacaatactgggccacatgctgccagttgctttggggccaagaagggcaaagggaaaaaacctatagaggatccagcaaacgatacagtggatttccctaaaagaacgagtccagctcgaggctatgagctcttatttcagccagaggtggttcggatatacatctcacttcttaaggagagcaagactcctgccatcctagaagcctcagctggagctatccagaacttgtgtgctgggcgctggacgtatggtcgatacatccgctctgctctgcgtcaagagaaggctctttctgccatagctgacctcctgactaatgaacatgaacgggtggtgaaagctgcatctggagcactgagaaacctggctgtggatgctcgcaacaaagaattaattggtaaacatgctattcctaacttggtaaagaatctgccaggaggacagcagaactcctcttggaatttctctgaggacactgtcatctctattttgaacactatcaacgaggttatcgctgagaacttggaggctgccaaaaagcttcgagagacacagggtattgagaagctggtgttgatcaacaaatcagggaaccgctcagaaaaagaagttcgagcagcagcacttgtattacagacaatctggggatataaggaactgcggaagccactggaaaaagaaggatggaagaaatcagactttcaggtgaatctaaacaatgcttcccgaagccagagcagtcattcatatgatgatagtactctccctctcattgaccggaaccaaaaatcagataacaactattccacaccaaatgagagaggagaccacaatagaacactggatcgatcgggggatctaggcgacatggagccattgaagggaacaacacccttgatgcaggacgaggggcaggaatctctggaggaagagttggatgtgttggttttggatgatgaggggggccaagtgtcttacccctccatgcagaagatttagcaccactatctccgttccatctgggcttatatgtacttttattttttggtggtgaaattgactgatgattttcctttttcttcgctggactattgtgccaactgccaggctgcctcctgcccttacagccctaagtggctgccttctttccatcaactcccaacttcttcctgtgaagtttaattgtctcaacgcctccccctcccccattccctccatttttctcccaagaaacctgactcaattatttgcatattttgagaaactgctgcagattagttctttttgccagttttccctggaactcctggccttttgtggaggggagggatggagagaataggaatcttcactagaagccgtgggaagaattggaagttacatgctgtatatgcaatgtccagcagtctgataaactgacgattcttaatcaagatttttttcctgatggggaagggacttttattttcttttagagaggggaaagtgtgagctcttcccttattcctaatggctatttttgaagcaaagaaggccagcaacattggcacatgccacctggcaaaggacccttgagtaagtgaaggtctcctaaaactgggattaagaaaccttgctctcctcatctccaaggcagggaccatcaagaacctacagactccatctcttctgcaagcctcatgccaaccctgggctattgctgctgccccttaaacacaggctgtccttaacccacctctcctgccctgtgatatgtctgctgagttggcctggccatttccaagaggctgtagaaaggggagaatgtcaaggaagacttttggtagagaaggagcagaaagatgtgtttttgggaagaagaagacctctaggaggagctagtaggaatgtacatgaagcaattagtctgaaactggcttccccactcccccgtttctccttttcctatccttataggcctgtcccttgcctctgccctggattggttggcaaactaaaggacttgatgtacataactcctgtcccttttcccttacaaggtggggattgcccctggctttgcctcttctttgtgcctttggcctggggtgcatctcctcccgcccttccatgtgcctttctttgcctctgcagtctcatttctcataattttgcaaattatattttgttgctttcttacctactattggccctaaatagcagaaagaagagaagtgaccgagagaacctcagattcttcattgaggattggtatagccatgatttcagtcatagcaagcttttgctcaacagcatatgggtgggattttgcaaaaatcctattctgatgaatctcaaagtaaggctggtaagagaagtgagtggtgtgactcttactccttaggtgcccagaatttaccatcatctctgaaggagttacagggaagtggtctccccaattctcccctccctccagtattgccccctctcactttagcatatattaattagcaggttgggctagagaaatcagctgctatgcgggttgattattattattatttctaatccttttccttatttgccttctactccccttaatctaatctaaaagctctgttccatgcaactggagttccttatccctctcttccccttcccttatatattgaggctatggggtaggagaaaagtgcacaacccaccaccccctttactcgtgcattaaaatttcttatttacccttttcccccttcccatttcttcccactttcatctaccttttctggcaaaaaggagccttttgctctctgtgaccctaagagcacactgcacagggaaaattgccccatccagacctggctccactcttgatctctcttgtcctcttctgctcttttcctggtgctcttttttctcggtggggtgtgggtaatagaacagccgtgggcttttggggacctttaacttttttttctctcttttgtttataaaaaacactaaacattcaattccagagaaccaaaaatcccaccttcccaccgaacactactaaggggcttgtgttctgctccataccttttctcttttctttctgtcttgttaatgcttttaaaaacaaatgagttttttatataaataaagtttttaaagtgtgtatgtggggggtctgtgtcatttcttcacttcaagctgttatttcttccctgctttgcatctttgttacttccttatgtatcagtgtcctttccagagcaaccagaaggaggttataccaggatttattttgagctcagccccaactctttatcaagcaacattcttgttaactatatgtgaaacattttttcttctgaagattcttaaaaattgaatgtggctgaagttgaacatgggagcttattgctaatttagagataggaaactgaagcataaagaattaatgacttactttaattactggaattcttctgcaacatttgacaaaactaaccttgaataaggcccactgtaatacgtagctctcttaaatataacacttaggactagaagattagaaactaccaatcccaactacgtaataggaaaatgtaggatcaaaaggcccatgtatataagtactgaccactgggccataatgttgcttctcaggctatatgcagtcctttagtcagaagtcaataggcctatttattaatattttacagaccatattacctggattaccagggactatctttgctgcagagatcaagggttaagatctatgggaagatacttatttttctgaggtccttatgtcctgtcatataattaaagactcaagagaatttatgtgaaatgctttctgtatgcccaaatctttagattaaaattatatagctgctcct

SEQ ID NO: 4798 - DNA, 2846 bp, Homo sapiens
  source 1..2846: mol_type = unassigned DNA
agaagcagagttagataaaatgtggtgcctaccctgtgtgttcacagttctggagtggagatgatgagtaacaaaccaatattattcatgctatggcagagatgtaaacaagagctgtggttgaagagatttttctagctaattgagcaagaccaggtagaggaaggaagacgaattgaccagatggatggatggagaaggccactccagtcagtaggcaaagtctgtgaaaaaaatatgaagacttctgagatgcataccatgtctggagcacagactggaaggaaagaaaaaggagatcctctcaacattgcgattgataagatgactaagaaaacaagagatctaaggagacagcttcggaaagcagtgatggatcacatatctgactctttcctggaaaccaatgttcctttgctagttctcattgaggctgcaaagagcggaaatgaaaaggaagtgaaagaatatgcccaagttttccgtgagcatgccaacaaactggtagaggttgccaatttggcctgttccatctccaacaatgaagaaggggtgaaattagttcggatggcagccacccagattgacagcctgtgtccccaggtcatcaatgccgctctgacactggctgcccggccacagagcaaagttgctcaggataacatggacgtcttcaaagaccagtgggagaagcaggtccgagtgttgacagaggccgtggatgacatcacctcagtggatgacttcctctctgtctcagaaaatcacatcttggaggatgtgaacaagtgtgtgatagccctccaagagggcgatgtggacactctggaccggactgcaggggccatcaggggccgggcagctcgagtcatacacatcatcaatgctgagatggagaactatgaagctggggtttatactgagaaggtgttggaagctacaaaattgctttctgaaacagtgatgccacgcttcgctgaacaagtagaggttgccattgaagccctgagtgccaacgttcctcaaccgtttgaggagaatgagttcatcgatgcctctcgcctggtgtatgatggcgttcgggacatcagaaaggctgtgctgatgatcaggaccccagaagaactagaggatgattctgactttgagcaggaagattatgatgtgcgtagcaggacaagtgttcagactgaggatgaccagctcattgcagggcagagcgcacgggccatcatggcgcaactaccgcaggaggagaaggcaaaaatagctgagcaggtggagatattccatcaagagaaaagcaagctggatgcagaagtggccaaatgggacgacagcggcaatgatatcattgtactggccaagcagatgtgtatgatcatgatggaaatgacagacttcacaagaggcaaaggcccattgaaaaatacatctgatgtcattaatgctgccaagaaaattgccgaagcaggttctcgaatggacaaattagctcgtgctgtggctgatcagtgtcctgattcagcatgtaagcaggatttattagcctaccttcaacgaattgccttgtattgccatcagcttaatatctgcagcaaggtgaaggcagaagtgcagaatctgggaggagagctcattgtgtcagggctggacagtgccacatcgcttatccaggcagctaaaaacctgatgaatgctgttgtcctcacggtgaaagcatcctatgtggcctcaaccaaataccagaaggtctatgggacagcagctgtcaactcacctgttgtgtcttggaagatgaaggctccagagaagaagccccttgtgaagagagaaaagcctgaagaattccagacacgagttcgacgaggttctcagaagaaacacatttcgcctgtacaggctttaagtgaattcaaagcaatggattccttctaggacgataggttttaacaagaaagctttttctttcttttctttctttctttttctttttaattccatttttgtatgcatacctgccagctcgtatgcctctggcatggggaaattaagggaacagtgtctgtttgcatgtaagatgagatgagatcaatactactgatccatctgtagcctgggaaggagacaggacattcctgtactaaggtggcacagagctgtcctttgcaacattctcataaaattgggcacagagttcgcattggcgcaatatttatgggagtgggagggatggggaaaataaacttaactctacaaaagcaaactctaatgcatgcaagaatcattaggttggcaggtatatgcataagtgaaaaatctggaagtgtaatggtagaacataaaacttgtattgcttctgtttcagtgcaaaaatgtactagccaatacgcttaagtgtgtggcccatgaattgaacaatttaaccttgaagtctatatccgtgatattatgtcgatttttaactgaggggaaattaactagtccagcctaaaatgcttcttttaatctgcattctgtttcctcttctagttgtgccattactagtgatcatgtttttttcccccctttaatgaaaacaataaacatctatttgagacaattaaaatccttctgggggcactggaagcacaatacggtgaccaatcttgctttcatttttttttctttttaatttgaaccatgattttgctagaaatagaaggcccagtggtggaatattagagggaaggaaactgacaacgtgtgaaagttagaggcaaatacataggtgtagcttggagtgctggtatctaatataccattgtattcactaactaactcaaaataaacacatttaatcttga

SEQ ID NO: 4799 - DNA, 2820 bp, Homo sapiens
  source 1..2820: mol_type = unassigned DNA
atgtctgggttgatctgccttcaatatgggctgtggcatgggcagaagattgattttgggggccccaggagactgcttcaaagaaatagaggtgaagggagcatgacttcggcaacttcacctatcattctgaaatgggaccccaaaagtttggaaatccggacgctaacagtggaaaggctgttggagccacttgttacacaggtgactacacttgtcaacacaagcaacaaaggcccatctggtaaaaagaaagggaggtcaaagaaagcccatgtactagctgcctctgtagagcaagccactcagaatttcctggaaaagggtgaacagatcgctaaggagagtcaagatctcaaagaagagttggtggctgctgtagaggatgtgcgcaaacaaggtgagacgatgcggatcgcctcctccgagtttgcagatgacccttgctcgtcggtaaagcgcggcaccatggtacgggcggcaagggctttgctctccgcggtgacacgcttactcatcctggcggacatggcagatgtcatgagacttttatcccatctgaaaattgtggaagaggccctggaagctgtcaaaaatgctacaaatgagcaagaccttgcaaaccgttttaaagagtttgggaaagagatggtgaaacttaactatgtagcagcaagaagacaacaggagctgaaggatcctcactgtcgggatgagatggcagccgcccgaggggctctgaagaagaatgccacaatgctgtacacggcctctcaagcatttctccgccacccagatgtcgccgctacgagagccaaccgagattatgtgttcaaacaagtccaggaggccatcgccggcatctccaatgctgctcaagctacctcgcccactgacgaagccaagggccacacgggcatcggcgagctggctgcggctcttaatgagtttgacaataagattatcctggaccccatgacgttcagcgaggccaggttccggccgtccctggaggagaggctggagagcatcatcagcggcgcagcgctgatggccgactcctcctgcacgcgagacgaccggcgcgagaggatcgtggcggagtgcaacgccgtgcggcaggcgctccaggacctgctcagcgagtacatgaataatactggaaggaaagaaaaaggagatcctctcaacattgcgattgataagatgactaagaaaacaagagatctaaggagacagcttcggaaagcagtgatggatcacatatctgactctttcctggaaaccaatgttcctttgctagttctcattgaggctgcaaagagcggaaatgaaaaggaagtgaaagaatatgcccaagttttccgtgagcatgccaacaaactggtagaggttgccaatttggcctgttccatctccaacaatgaagaaggggtgaaattagttcggatggcagccacccagattgacagcctgtgtccccaggtcatcaatgccgctctgacactggctgcccggccacagagcaaagttgctcaggataacatggacgtcttcaaagaccagtgggagaagcaggtccgagtgttgacagaggccgtggatgacatcacctcagtggatgacttcctctctgtctcagaaaatcacatcttggaggatgtgaacaagtgtgtgatagccctccaagagggcgatgtggacactctggaccggactgcaggggccatcaggggccgggcagctcgagtcatacacatcatcaatgctgagatggagaactatgaagctggggtttatactgagaaggtgttggaagctacaaaattgctttctgaaacagtgatgccacgcttcgctgaacaagtagaggttgccattgaagccctgagtgccaacgttcctcaaccgtttgaggagaatgagttcatcgatgcctctcgcctggtgtatgatggcgttcgggacatcagaaaggctgtgctgatgatcaggaccccagaagaactagaggatgattctgactttgagcaggaagattatgatgtgcgtagcaggacaagtgttcagactgaggatgaccagctcattgcagggcagagcgcacgggccatcatggcgcaactaccgcaggaggagaaggcaaaaatagctgagcaggtggagatattccatcaagagaaaagcaagctggatgcagaagtggccaaatgggacgacagcggcaatgatatcattgtactggccaagcagatgtgtatgatcatgatggaaatgacagacttcacaagaggcaaaggcccattgaaaaatacatctgatgtcattaatgctgccaagaaaattgccgaagcaggttctcgaatggacaaattagctcgtgctgtggctgatcagtgtcctgattcagcatgtaagcaggatttattagcctaccttcaacgaattgccttgtattgccatcagcttaatatctgcagcaaggtgaaggcagaagtgcagaatctgggaggagagctcattgtgtcagggctggacagtgccacatcgcttatccaggcagctaaaaacctgatgaatgctgttgtcctcacggtgaaagcatcctatgtggcctcaaccaaataccagaaggtctatgggacagcagctgtcaactcacctgttgtgtcttggaagatgaaggctccagagaagaagccccttgtgaagagagaaaagcctgaagaattccagacacgagttcgacgaggttctcagaagaaacacatttcgcctgtacaggctttaagtgaattcaaagcaatggattccttctag

SEQ ID NO: 4800 - DNA, 3684 bp, Homo sapiens
  source 1..3684: mol_type = unassigned DNA
ggagcatgacttcggcaacttcacctatcattctgaaatgggaccccaaaagtttggaaatccggacgctaacagtggaaaggctgttggagccacttgttacacaggtgactacacttgtcaacacaagcaacaaaggcccatctggtaaaaagaaagggaggtcaaagaaagcccatgtactagctgcctctgtagagcaagccactcagaatttcctggaaaagggtgaacagatcgctaaggagagtcaagatctcaaagaagagttggtggctgctgtagaggatgtgcgcaaacaaggtgagacgatgcggatcgcctcctccgagtttgcagatgacccttgctcgtcggtaaagcgcggcaccatggtacgggcggcaagggctttgctctccgcggtgacacgcttactcatcctggcggacatggcagatgtcatgagacttttatcccatctgaaaattgtggaagaggccctggaagctgtcaaaaatgctacaaatgagcaagaccttgcaaaccgttttaaagagtttgggaaagagatggtgaaacttaactatgtagcagcaagaagacaacaggagctgaaggatcctcactgtcgggatgagatggcagccgcccgaggggctctgaagaagaatgccacaatgctgtacacggcctctcaagcatttctccgccacccagatgtcgccgctacgagagccaaccgagattatgtgttcaaacaagtccaggaggccatcgccggcatctccaatgctgctcaagctacctcgcccactgacgaagccaagggccacacgggcatcggcgagctggctgcggctcttaatgagtttgacaataagattatcctggaccccatgacgttcagcgaggccaggttccggccgtccctggaggagaggctggagagcatcatcagcggcgcagcgctgatggccgactcctcctgcacgcgagacgaccggcgcgagaggatcgtggcggagtgcaacgccgtgcggcaggcgctccaggacctgctcagcgagtacatgaataatactggaaggaaagaaaaaggagatcctctcaacattgcgattgataagatgactaagaaaacaagagatctaaggagacagcttcggaaagcagtgatggatcacatatctgactctttcctggaaaccaatgttcctttgctagttctcattgaggctgcaaagagcggaaatgaaaaggaagtgaaagaatatgcccaagttttccgtgagcatgccaacaaactggtagaggttgccaatttggcctgttccatctccaacaatgaagaaggggtgaaattagttcggatggcagccacccagattgacagcctgtgtccccaggtcatcaatgccgctctgacactggctgcccggccacagagcaaagttgctcaggataacatggacgtcttcaaagaccagtgggagaagcaggtccgagtgttgacagaggccgtggatgacatcacctcagtggatgacttcctctctgtctcagaaaatcacatcttggaggatgtgaacaagtgtgtgatagccctccaagagggcgatgtggacactctggaccggactgcaggggccatcaggggccgggcagctcgagtcatacacatcatcaatgctgagatggagaactatgaagctggggtttatactgagaaggtgttggaagctacaaaattgctttctgaaacagtgatgccacgcttcgctgaacaagtagaggttgccattgaagccctgagtgccaacgttcctcaaccgtttgaggagaatgagttcatcgatgcctctcgcctggtgtatgatggcgttcgggacatcagaaaggctgtgctgatgatcaggaccccagaagaactagaggatgattctgactttgagcaggaagattatgatgtgcgtagcaggacaagtgttcagactgaggatgaccagctcattgcagggcagagcgcacgggccatcatggcgcaactaccgcaggaggagaaggcaaaaatagctgagcaggtggagatattccatcaagagaaaagcaagctggatgcagaagtggccaaatgggacgacagcggcaatgatatcattgtactggccaagcagatgtgtatgatcatgatggaaatgacagacttcacaagaggcaaaggcccattgaaaaatacatctgatgtcattaatgctgccaagaaaattgccgaagcaggttctcgaatggacaaattagctcgtgctgtggctgatcagtgtcctgattcagcatgtaagcaggatttattagcctaccttcaacgaattgccttgtattgccatcagcttaatatctgcagcaaggtgaaggcagaagtgcagaatctgggaggagagctcattgtgtcagggacaggagttcagagcactttcactaccttttatgaggtagattgtgatgtcatagatgggggcagggctagtcaactttctacccacctcccaacctgtgctgagggagctccgatcgggagtggaagcagtgattcctccatgctggacagtgccacatcgcttatccaggcagctaaaaacctgatgaatgctgttgtcctcacggtgaaagcatcctatgtggcctcaaccaaataccagaaggtctatgggacagcagctgtcaactcacctgttgtgtcttggaagatgaaggctccagagaagaagccccttgtgaagagagaaaagcctgaagaattccagacacgagttcgacgaggttctcagaagaaacacatttcgcctgtacaggctttaagtgaattcaaagcaatggattccttctaggacgataggttttaacaagaaagctttttctttcttttctttctttctttttctttttaattccatttttgtatgcatacctgccagctcgtatgcctctggcatggggaaattaagggaacagtgtctgtttgcatgtaagatgagatgagatcaatactactgatccatctgtagcctgggaaggagacaggacattcctgtactaaggtggcacagagctgtcctttgcaacattctcataaaattgggcacagagttcgcattggcgcaatatttatgggagtgggagggatggggaaaataaacttaactctacaaaagcaaactctaatgcatgcaagaatcattaggttggcaggtatatgcataagtgaaaaatctggaagtgtaatggtagaacataaaacttgtattgcttctgtttcagtgcaaaaatgtactagccaatacgcttaagtgtgtggcccatgaattgaacaatttaaccttgaagtctatatccgtgatattatgtcgatttttaactgaggggaaattaactagtccagcctaaaatgcttcttttaatctgcattctgtttcctcttctagttgtgccattactagtgatcatgtttttttcccccctttaatgaaaacaataaacatctatttgagacaattaaaatccttctgggggcactggaagcacaatacggtgaccaatcttgctttcatttttttttctttttaatttgaaccatgattttgctagaaatagaaggcccagtggtggaatattagagggaaggaaactgacaacgtgtgaaagtta

SEQ ID NO: 4801 - DNA, 541 bp, Homo sapiens
  source 1..541: mol_type = unassigned DNA
tttttacatggcgggacagccatgcctcagaatgtttagcatatttatcatctcagaagggtccaacagtatttagtgtgaatgagacactgttcagattggaaatacactgtctatactgtactccagacacacctattttgcttttaaaattattctcaatatctgtcttttccatagtaacggagcatgacttcggcaacttcacctatcattctgaaatgggaccccaaaagtttggaaatccggacgctaacagtggaaaggctgttggagccacttgttacacaggtgactacacttgtcaacacaagcaacaaaggcccatctggtaaaaagaaagggaggtcaaagaaagcccatgtactagctgcctctgtagagcaagccactcagaatttcctggaaaagggtgaacagatcgctaaggagagtcaagatctcaaagaagagttggtggctgctgtagaggatgtgcgcaaacaaggtgagacgatgcggatcgcctcctccgagtttgcagatgacccttgctcgtcgg

SEQ ID NO: 4802 - DNA, 521 bp, Homo sapiens
  source 1..521: mol_type = unassigned DNA
gacccaggcgggcgggcagagcaggcggcaccgcacctcggccagaggcggctgcagcagctgctgcccttgtccctgccgccgcctctccagtcccttctgtgattaccactccagctgctgggaacgggcgagaaagaggaggaggcgagaaactcccaccgacccacagagctagtcaaaggaagcgtttcattccacctatctttggtcagaggagagggaggagtgtagaccagcattctacccactgacgacaggtcatctgtctctattattgaagaaccattgcagagcctatgctcaccttctgcgagggagcatgacttcggcaacttcacctatcattctgaaatgggaccccaaaagtttggaaatccggacgctaacagtggaaaggctgttggagccacttgttacacaggtgactacacttgtcaacacaagcaacaaaggcccatctggtaaaaagaaagggaggtcaaagaaagcccatgtactagctgcctctgtagagcaag

SEQ ID NO: 4803 - DNA, 4349 bp, Homo sapiens
  source 1..4349: mol_type = unassigned DNA
gctgaaggaagctacaatcatccaagtgggaagtaatgtctaccgatgttctgatttaagtgaatgaaggtcttctttccacctcgggaaatcttgagggttatgtaacagcagctttgaaaggcttgtgagatgtactttgtgctagtccatctcaaatcttcaccggctgtaccaagaacagaaaaaaaaaggaatttgagacgggatctcagcatgtttgccaggatggtctcagtctcttgacctcgtgatccgcctaccttggcctcccaaagtgttggaattacaggtgtgagccactgcgcccagccatcagaacaaaatatacagctggatgtttgtcacaattctaatgtccctgcaaagatgagatgcatgaatcacacagcaatctcatcaaaaagataagaaaattgagactcagagcatttaagcagccagcctggagtcacagagatttaagtctcagagccagcactcaggatgagtgccaatggaagcctgtccttggagtccagaatgaacgtcagaagcaacccagccacagcaggagactgtccatgaatgtcatctggctgaacctaaagcacctctggatttagatgcactccttcaaggaccatgggttctgcaacagtaccccctctccattgttccagctctgactcagatgggccctccttgatggcactcccagcagcacagccttagcactgggagcatgacttcggcaacttcacctatcattctgaaatgggaccccaaaagtttggaaatccggacgctaacagtggaaaggctgttggagccacttgttacacaggtgactacacttgtcaacacaagcaacaaaggcccatctggtaaaaagaaagggaggtcaaagaaagcccatgtactagctgcctctgtagagcaagccactcagaatttcctggaaaagggtgaacagatcgctaaggagagtcaagatctcaaagaagagttggtggctgctgtagaggatgtgcgcaaacaaggtgagacgatgcggatcgcctcctccgagtttgcagatgacccttgctcgtcggtaaagcgcggcaccatggtacgggcggcaagggctttgctctccgcggtgacacgcttactcatcctggcggacatggcagatgtcatgagacttttatcccatctgaaaattgtggaagaggccctggaagctgtcaaaaatgctacaaatgagcaagaccttgcaaaccgttttaaagagtttgggaaagagatggtgaaacttaactatgtagcagcaagaagacaacaggagctgaaggatcctcactgtcgggatgagatggcagccgcccgaggggctctgaagaagaatgccacaatgctgtacacggcctctcaagcatttctccgccacccagatgtcgccgctacgagagccaaccgagattatgtgttcaaacaagtccaggaggccatcgccggcatctccaatgctgctcaagctacctcgcccactgacgaagccaagggccacacgggcatcggcgagctggctgcggctcttaatgagtttgacaataagattatcctggaccccatgacgttcagcgaggccaggttccggccgtccctggaggagaggctggagagcatcatcagcggcgcagcgctgatggccgactcctcctgcacgcgagacgaccggcgcgagaggatcgtggcggagtgcaacgccgtgcggcaggcgctccaggacctgctcagcgagtacatgaataatactggaaggaaagaaaaaggagatcctctcaacattgcgattgataagatgactaagaaaacaagagatctaaggagacagcttcggaaagcagtgatggatcacatatctgactctttcctggaaaccaatgttcctttgctagttctcattgaggctgcaaagagcggaaatgaaaaggaagtgaaagaatatgcccaagttttccgtgagcatgccaacaaactggtagaggttgccaatttggcctgttccatctccaacaatgaagaaggggtgaaattagttcggatggcagccacccagattgacagcctgtgtccccaggtcatcaatgccgctctgacactggctgcccggccacagagcaaagttgctcaggataacatggacgtcttcaaagaccagtgggagaagcaggtccgagtgttgacagaggccgtggatgacatcacctcagtggatgacttcctctctgtctcagaaaatcacatcttggaggatgtgaacaagtgtgtgatagccctccaagagggcgatgtggacactctggaccggactgcaggggccatcaggggccgggcagctcgagtcatacacatcatcaatgctgagatggagaactatgaagctggggtttatactgagaaggtgttggaagctacaaaattgctttctgaaacagtgatgccacgcttcgctgaacaagtagaggttgccattgaagccctgagtgccaacgttcctcaaccgtttgaggagaatgagttcatcgatgcctctcgcctggtgtatgatggcgttcgggacatcagaaaggctgtgctgatgatcaggaccccagaagaactagaggatgattctgactttgagcaggaagattatgatgtgcgtagcaggacaagtgttcagactgaggatgaccagctcattgcagggcagagcgcacgggccatcatggcgcaactaccgcaggaggagaaggcaaaaatagctgagcaggtggagatattccatcaagagaaaagcaagctggatgcagaagtggccaaatgggacgacagcggcaatgatatcattgtactggccaagcagatgtgtatgatcatgatggaaatgacagacttcacaagaggcaaaggcccattgaaaaatacatctgatgtcattaatgctgccaagaaaattgccgaagcaggttctcgaatggacaaattagctcgtgctgtggctgatcagtgtcctgattcagcatgtaagcaggatttattagcctaccttcaacgaattgccttgtattgccatcagcttaatatctgcagcaaggtgaaggcagaagtgcagaatctgggaggagagctcattgtgtcagggctggacagtgccacatcgcttatccaggcagctaaaaacctgatgaatgctgttgtcctcacggtgaaagcatcctatgtggcctcaaccaaataccagaaggtctatgggacagcagctgtcaactcacctgttgtgtcttggaagatgaaggctccagagaagaagccccttgtgaagagagaaaagcctgaagaattccagacacgagttcgacgaggttctcagaagaaacacatttcgcctgtacaggctttaagtgaattcaaagcaatggattccttctaggacgataggttttaacaagaaagctttttctttcttttctttctttctttttctttttaattccatttttgtatgcatacctgccagctcgtatgcctctggcatggggaaattaagggaacagtgtctgtttgcatgtaagatgagatgagatcaatactactgatccatctgtagcctgggaaggagacaggacattcctgtactaaggtggcacagagctgtcctttgcaacattctcataaaattgggcacagagttcgcattggcgcaatatttatgggagtgggagggatggggaaaataaacttaactctacaaaagcaaactctaatgcatgcaagaatcattaggttggcaggtatatgcataagtgaaaaatctggaagtgtaatggtagaacataaaacttgtattgcttctgtttcagtgcaaaaatgtactagccaatacgcttaagtgtgtggcccatgaattgaacaatttaaccttgaagtctatatccgtgatattatgtcgatttttaactgaggggaaattaactagtccagcctaaaatgcttcttttaatctgcattctgtttcctcttctagttgtgccattactagtgatcatgtttttttcccccctttaatgaaaacaataaacatctatttgagacaattaaaatccttctgggggcactggaagcacaatacggtgaccaatcttgctttcatttttttttctttttaatttgaaccatgattttgctagaaatagaaggcccagtggtggaatattagagggaaggaaactgacaacgtgtgaaagttagaggcaaatacataggtgtagcttggagtgctggtatctaatataccattgtattcactaactaactcaaaataaacacatttaatcttg

SEQ ID NO: 4804 - DNA, 3839 bp, Homo sapiens
  source 1..3839: mol_type = unassigned DNA
gagcggcttcgcttccagccccgagtgaggcggagacccaggcgggcgggcagagcaggcggcaccgcacctcggccagaggcggctgcagcagctgctgcccttgtccctgccgccgcctctccagtcccttctgtgattaccactccagctgctgggaacgggcgagaaagaggaggaggcgagaaactcccaccgacccacagagggagcatgacttcggcaacttcacctatcattctgaaatgggaccccaaaagtttggaaatccggacgctaacagtggaaaggctgttggagccacttgttacacaggtgactacacttgtcaacacaagcaacaaaggcccatctggtaaaaagaaagggaggtcaaagaaagcccatgtactagctgcctctgtagagcaagccactcagaatttcctggaaaagggtgaacagatcgctaaggagagtcaagatctcaaagaagagttggtggctgctgtagaggatgtgcgcaaacaaggtgagacgatgcggatcgcctcctccgagtttgcagatgacccttgctcgtcggtaaagcgcggcaccatggtacgggcggcaagggctttgctctccgcggtgacacgcttactcatcctggcggacatggcagatgtcatgagacttttatcccatctgaaaattgtggaagaggccctggaagctgtcaaaaatgctacaaatgagcaagaccttgcaaaccgttttaaagagtttgggaaagagatggtgaaacttaactatgtagcagcaagaagacaacaggagctgaaggatcctcactgtcgggatgagatggcagccgcccgaggggctctgaagaagaatgccacaatgctgtacacggcctctcaagcatttctccgccacccagatgtcgccgctacgagagccaaccgagattatgtgttcaaacaagtccaggaggccatcgccggcatctccaatgctgctcaagctacctcgcccactgacgaagccaagggccacacgggcatcggcgagctggctgcggctcttaatgagtttgacaataagattatcctggaccccatgacgttcagcgaggccaggttccggccgtccctggaggagaggctggagagcatcatcagcggcgcagcgctgatggccgactcctcctgcacgcgagacgaccggcgcgagaggatcgtggcggagtgcaacgccgtgcggcaggcgctccaggacctgctcagcgagtacatgaataatactggaaggaaagaaaaaggagatcctctcaacattgcgattgataagatgactaagaaaacaagagatctaaggagacagcttcggaaagcagtgatggatcacatatctgactctttcctggaaaccaatgttcctttgctagttctcattgaggctgcaaagagcggaaatgaaaaggaagtgaaagaatatgcccaagttttccgtgagcatgccaacaaactggtagaggttgccaatttggcctgttccatctccaacaatgaagaaggggtgaaattagttcggatggcagccacccagattgacagcctgtgtccccaggtcatcaatgccgctctgacactggctgcccggccacagagcaaagttgctcaggataacatggacgtcttcaaagaccagtgggagaagcaggtccgagtgttgacagaggccgtggatgacatcacctcagtggatgacttcctctctgtctcagaaaatcacatcttggaggatgtgaacaagtgtgtgatagccctccaagagggcgatgtggacactctggaccggactgcaggggccatcaggggccgggcagctcgagtcatacacatcatcaatgctgagatggagaactatgaagctggggtttatactgagaaggtgttggaagctacaaaattgctttctgaaacagtgatgccacgcttcgctgaacaagtagaggttgccattgaagccctgagtgccaacgttcctcaaccgtttgaggagaatgagttcatcgatgcctctcgcctggtgtatgatggcgttcgggacatcagaaaggctgtgctgatgatcaggaccccagaagaactagaggatgattctgactttgagcaggaagattatgatgtgcgtagcaggacaagtgttcagactgaggatgaccagctcattgcagggcagagcgcacgggccatcatggcgcaactaccgcaggaggagaaggcaaaaatagctgagcaggtggagatattccatcaagagaaaagcaagctggatgcagaagtggccaaatgggacgacagcggcaatgatatcattgtactggccaagcagatgtgtatgatcatgatggaaatgacagacttcacaagaggcaaaggcccattgaaaaatacatctgatgtcattaatgctgccaagaaaattgccgaagcaggttctcgaatggacaaattagctcgtgctgtggctgatcagtgtcctgattcagcatgtaagcaggatttattagcctaccttcaacgaattgccttgtattgccatcagcttaatatctgcagcaaggtgaaggcagaagtgcagaatctgggaggagagctcattgtgtcagggctggacagtgccacatcgcttatccaggcagctaaaaacctgatgaatgctgttgtcctcacggtgaaagcatcctatgtggcctcaaccaaataccagaaggtctatgggacagcagctgtcaactcacctgttgtgtcttggaagatgaaggctccagagaagaagccccttgtgaagagagaaaagcctgaagaattccagacacgagttcgacgaggttctcagaagaaacacatttcgcctgtacaggctttaagtgaattcaaagcaatggattccttctaggacgataggttttaacaagaaagctttttctttcttttctttctttctttttctttttaattccatttttgtatgcatacctgccagctcgtatgcctctggcatggggaaattaagggaacagtgtctgtttgcatgtaagatgagatgagatcaatactactgatccatctgtagcctgggaaggagacaggacattcctgtactaaggtggcacagagctgtcctttgcaacattctcataaaattgggcacagagttcgcattggcgcaatatttatgggagtgggagggatggggaaaataaacttaactctacaaaagcaaactctaatgcatgcaagaatcattaggttggcaggtatatgcataagtgaaaaatctggaagtgtaatggtagaacataaaacttgtattgcttctgtttcagtgcaaaaatgtactagccaatacgcttaagtgtgtggcccatgaattgaacaatttaaccttgaagtctatatccgtgatattatgtcgatttttaactgaggggaaattaactagtccagcctaaaatgcttcttttaatctgcattctgtttcctcttctagttgtgccattactagtgatcatgtttttttcccccctttaatgaaaacaataaacatctatttgagacaattaaaatccttctgggggcactggaagcacaatacggtgaccaatcttgctttcatttttttttctttttaatttgaaccatgattttgctagaaatagaaggcccagtggtggaatattagagggaaggaaactgacaacgtgtgaaagttagaggcaaatacataggtgtagcttggagtgctggtatctaatataccattgtattcactaactaactcaaaataaacacatttaatcttga

SEQ ID NO: 4805 - DNA, 2583 bp, Homo sapiens
  source 1..2583: mol_type = unassigned DNA
atgacttcggcaacttcacctatcattctgaaatgggaccccaaaagtttggaaatccggacgctaacagtggaaaggctgttggagccacttgttacacaggtgactacacttgtcaacacaagcaacaaaggcccatctggtaaaaagaaagggaggtcaaagaaagcccatgtactagctgcctctgtagagcaagccactcagaatttcctggaaaagggtgaacagatcgctaaggagagtcaagatctcaaagaagagttggtggctgctgtagaggatgtgcgcaaacaaggtgagacgatgcggatcgcctcctccgagtttgcagatgacccttgctcgtcggtaaagcgcggcaccatggtacgggcggcaagggctttgctctccgcggtgacacgcttactcatcctggcggacatggcagatgtcatgagacttttatcccatctgaaaattgtggaagaggccctggaagctgtcaaaaatgctacaaatgagcaagaccttgcaaaccgttttaaagagtttgggaaagagatggtgaaacttaactatgtagcagcaagaagacaacaggagctgaaggatcctcactgtcgggatgagatggcagccgcccgaggggctctgaagaagaatgccacaatgctgtacacggcctctcaagcatttctccgccacccagatgtcgccgctacgagagccaaccgagattatgtgttcaaacaagtccaggaggccatcgccggcatctccaatgctgctcaagctacctcgcccactgacgaagccaagggccacacgggcatcggcgagctggctgcggctcttaatgagtttgacaataagattatcctggaccccatgacgttcagcgaggccaggttccggccgtccctggaggagaggctggagagcatcatcagcggcgcagcgctgatggccgactcctcctgcacgcgagacgaccggcgcgagaggatcgtggcggagtgcaacgccgtgcggcaggcgctccaggacctgctcagcgagtacatgaataatactggaaggaaagaaaaaggagatcctctcaacattgcgattgataagatgactaagaaaacaagagatctaaggagacagcttcggaaagcagtgatggatcacatatctgactctttcctggaaaccaatgttcctttgctagttctcattgaggctgcaaagagcggaaatgaaaaggaagtgaaagaatatgcccaagttttccgtgagcatgccaacaaactggtagaggttgccaatttggcctgttccatctccaacaatgaagaaggggtgaaattagttcggatggcagccacccagattgacagcctgtgtccccaggtcatcaatgccgctctgacactggctgcccggccacagagcaaagttgctcaggataacatggacgtcttcaaagaccagtgggagaagcaggtccgagtgttgacagaggccgtggatgacatcacctcagtggatgacttcctctctgtctcagaaaatcacatcttggaggatgtgaacaagtgtgtgatagccctccaagagggcgatgtggacactctggaccggactgcaggggccatcaggggccgggcagctcgagtcatacacatcatcaatgctgagatggagaactatgaagctggggtttatactgagaaggtgttggaagctacaaaattgctttctgaaacagtgatgccacgcttcgctgaacaagtagaggttgccattgaagccctgagtgccaacgttcctcaaccgtttgaggagaatgagttcatcgatgcctctcgcctggtgtatgatggcgttcgggacatcagaaaggctgtgctgatgatcaggaccccagaagaactagaggatgattctgactttgagcaggaagattatgatgtgcgtagcaggacaagtgttcagactgaggatgaccagctcattgcagggcagagcgcacgggccatcatggcgcaactaccgcaggaggagaaggcaaaaatagctgagcaggtggagatattccatcaagagaaaagcaagctggatgcagaagtggccaaatgggacgacagcggcaatgatatcattgtactggccaagcagatgtgtatgatcatgatggaaatgacagacttcacaagaggcaaaggcccattgaaaaatacatctgatgtcattaatgctgccaagaaaattgccgaagcaggttctcgaatggacaaattagctcgtgctgtggctgatcagctggacagtgccacatcgcttatccaggcagctaaaaacctgatgaatgctgttgtcctcacggtgaaagcatcctatgtggcctcaaccaaataccagaaggtctatgggacagcagctgtcaactcacctgttgtgtcttggaagatgaaggctccagagaagaagccccttgtgaagagagaaaagcctgaagaattccagacacgagttcgacgaggttctcagaagaaacacatttcgcctgtacaggctttaagtgaattcaaagcaatggattccttctag

SEQ ID NO: 4806 - DNA, 3625 bp, Homo sapiens
  source 1..3625: mol_type = unassigned DNA
atgacttcggcaacttcacctatcattctgaaatgggaccccaaaagtttggaaatccggacgctaacagtggaaaggctgttggagccacttgttacacaggtgactacacttgtcaacacaagcaacaaaggcccatctggtaaaaagaaagggaggtcaaagaaagcccatgtactagctgcctctgtagagcaagccactcagaatttcctggaaaagggtgaacagatcgctaaggagagtcaagatctcaaagaagagttggtggctgctgtagaggatgtgcgcaaacaaggtgagacgatgcggatcgcctcctccgagtttgcagatgacccttgctcgtcggtaaagcgcggcaccatggtacgggcggcaagggctttgctctccgcggtgacacgcttactcatcctggcggacatggcagatgtcatgagacttttatcccatctgaaaattgtggaagaggccctggaagctgtcaaaaatgctacaaatgagcaagaccttgcaaaccgttttaaagagtttgggaaagagatggtgaaacttaactatgtagcagcaagaagacaacaggagctgaaggatcctcactgtcgggatgagatggcagccgcccgaggggctctgaagaagaatgccacaatgctgtacacggcctctcaagcatttctccgccacccagatgtcgccgctacgagagccaaccgagattatgtgttcaaacaagtccaggaggccatcgccggcatctccaatgctgctcaagctacctcgcccactgacgaagccaagggccacacgggcatcggcgagctggctgcggctcttaatgagtttgacaataagattatcctggaccccatgacgttcagcgaggccaggttccggccgtccctggaggagaggctggagagcatcatcagcggcgcagcgctgatggccgactcctcctgcacgcgagacgaccggcgcgagaggatcgtggcggagtgcaacgccgtgcggcaggcgctccaggacctgctcagcgagtacatgaataatactggaaggaaagaaaaaggagatcctctcaacattgcgattgataagatgactaagaaaacaagagatctaaggagacagcttcggaaagcagtgatggatcacatatctgactctttcctggaaaccaatgttcctttgctagttctcattgaggctgcaaagagcggaaatgaaaaggaagtgaaagaatatgcccaagttttccgtgagcatgccaacaaactggtagaggttgccaatttggcctgttccatctccaacaatgaagaaggggtgaaattagttcggatggcagccacccagattgacagcctgtgtccccaggtcatcaatgccgctctgacactggctgcccggccacagagcaaagttgctcaggataacatggacgtcttcaaagaccagtgggagaagcaggtccgagtgttgacagaggccgtggatgacatcacctcagtggatgacttcctctctgtctcagaaaatcacatcttggaggatgtgaacaagtgtgtgatagccctccaagagggcgatgtggacactctggaccggactgcaggggccatcaggggccgggcagctcgagtcatacacatcatcaatgctgagatggagaactatgaagctggggtttatactgagaaggtgttggaagctacaaaattgctttctgaaacagtgatgccacgcttcgctgaacaagtagaggttgccattgaagccctgagtgccaacgttcctcaaccgtttgaggagaatgagttcatcgatgcctctcgcctggtgtatgatggcgttcgggacatcagaaaggctgtgctgatgatcaggaccccagaagaactagaggatgattctgactttgagcaggaagattatgatgtgcgtagcaggacaagtgttcagactgaggatgaccagctcattgcagggcagagcgcacgggccatcatggcgcaactaccgcaggaggagaaggcaaaaatagctgagcaggtggagatattccatcaagagaaaagcaagctggatgcagaagtggccaaatgggacgacagcggcaatgatatcattgtactggccaagcagatgtgtatgatcatgatggaaatgacagacttcacaagaggcaaaggcccattgaaaaatacatctgatgtcattaatgctgccaagaaaattgccgaagcaggttctcgaatggacaaattagctcgtgctgtggctgatcagtgtcctgattcagcatgtaagcaggatttattagcctaccttcaacgaattgccttgtattgccatcagcttaatatctgcagcaaggtgaaggcagaagtgcagaatctgggaggagagctcattgtgtcagggctggacagtgccacatcgcttatccaggcagctaaaaacctgatgaatgctgttgtcctcacggtgaaagcatcctatgtggcctcaaccaaataccagaaggtctatgggacagcagctgtcaactcacctgttgtgtcttggaagatgaaggctccagagaagaagccccttgtgaagagagaaaagcctgaagaattccagacacgagttcgacgaggttctcagaagaaacacatttcgcctgtacaggctttaagtgaattcaaagcaatggattccttctaggacgataggttttaacaagaaagctttttctttcttttctttctttctttttctttttaattccatttttgtatgcatacctgccagctcgtatgcctctggcatggggaaattaagggaacagtgtctgtttgcatgtaagatgagatgagatcaatactactgatccatctgtagcctgggaaggagacaggacattcctgtactaaggtggcacagagctgtcctttgcaacattctcataaaattgggcacagagttcgcattggcgcaatatttatgggagtgggagggatggggaaaataaacttaactctacaaaagcaaactctaatgcatgcaagaatcattaggttggcaggtatatgcataagtgaaaaatctggaagtgtaatggtagaacataaaacttgtattgcttctgtttcagtgcaaaaatgtactagccaatacgcttaagtgtgtggcccatgaattgaacaatttaaccttgaagtctatatccgtgatattatgtcgatttttaactgaggggaaattaactagtccagcctaaaatgcttcttttaatctgcattctgtttcctcttctagttgtgccattactagtgatcatgtttttttcccccctttaatgaaaacaataaacatctatttgagacaattaaaatccttctgggggcactggaagcacaatacggtgaccaatcttgctttcatttttttttctttttaatttgaaccatgattttgctagaaatagaaggcccagtggtggaatattagagggaaggaaactgacaacgtgtgaaagttagaggcaaatacataggtgtagcttggagtgctggtatctaatataccattgtattcactaactaactcaaaataaacacatttaatcttg

SEQ ID NO: 4807 - DNA, 697 bp, Homo sapiens
  source 1..697: mol_type = unassigned DNA
atcataagccaaattgtgagccatgatagtggcactgaatttctaaatacaagaaattgcttagacaattggtttagtatctgtatatgggcaatactctgtcctgcagtaggcagcatgtcagctgaaacaccaatcacattgaatatcgatcctcaggatctgcaggtccaaacattcaccgtggagaagctactggagcctctcataatccaggttaccacacttgtaaactgtccccagaacccttccagcaggaaaaaaggacgttcgaaaagagccagtgtccttctagcttctgtggaggaagcaacttggaatttattagacaagggagagaagattgcccaggaagctacagttttaaaggatgagcttacggcttcacttgaggaagttcgcaaagaaagtgaagctctgaaagtatcagctgagagatttacagatgacccctgttttctcccaaaaagggaggctgtggttcaagctgcccgtgccttgctggctgcggtgacgagactccttatccttgcggacatgattgatgtcatgtgcctcttgcaacatgtgtcagcttttcaaaggacatttgagtctctcaaaaatgttgccaacaaatctgacctccagaaaacctaccagaagcttgggaaggagctggaaaatttggattatttagccttcaaacgtcagcagg

SEQ ID NO: 4808 - DNA, 1083 bp, Homo sapiens
  source 1..1083: mol_type = unassigned DNA
aagcaggaaagcttatttataacttgaagggcctcattatctgactgagtagtctgtctcttttttgatagattttcttttccatctttgtggtcagactaatacaccttctgtctacttccaatttactgtaaactgggtcatggaattcaggctaagatgactcaactgcctgaggcagaaaaagaaaagattgctgagcaagttgctgatttcaagaaagtaaagagtaagctggatgctgagattgagatatgggatgatacaagcaacgacatcattgttctggccaagaacatgtgtatgatcatgatggagatgacagacttcactaggggcaaaggaccactaaagcatacaactgatgtgatctatgcagcgaaaatgatatcagaatcaggatcaaggatggatgtccttgctcggcagattgctaatcagtgcccagatccatcttgtaaacaggacttgttggcctacctggaacagattaagttctactcccaccaactgaaaatctgcagtcaagttaaagctgagatccagaacctgggaggagagctcatcatgtcagctttggacagtgtcacatccctgatccaagcagccaaaaatttaatgaatgctgtagtgcaaacagtgaaaatgtcttacattgcctcaaccaagatcatccgaatccagagtcctgctgggccccggcacccagttgtgatgtggagaatgaaggctcctgcaaaaaaacccttgattaaaagagagaagccagaggaaacgtgtgcagctgtcagacgaggctcagcaaagaaaaaaatccatccattgcaagtcatgagtgaatttagaggaagacaaatctactgaaaccactattctacatatagtgcctatatgacaaaatcctgcctaaccacactgctttattttacacttaagaagttctgtaatttcactaagttttggtgtttaactcacaaataacataaaatattgggcgctaaatcaacaaaagcaatatatatttgggatcatatcactgtcatttctgtatggtcagcacctaatagttaaggaatatttgct

SEQ ID NO: 4809 - DNA, 2999 bp, Homo sapiens
  source 1..2999: mol_type = unassigned DNA
atgtcagctgaaacaccaatcacattgaatatcgatcctcaggatctgcaggtccaaacattcaccgtggagaagctactggagcctctcataatccaggttaccacacttgtaaactgtccccagaacccttccagcaggaaaaaaggacgttcgaaaagagccagtgtccttctagcttctgtggaggaagcaacttggaatttattagacaagggagagaagattgcccaggaagctacagttttaaaggatgagcttacggcttcacttgaggaagttcgcaaagaaagtgaagctctgaaagtatcagctgagagatttacagatgacccctgttttctcccaaaaagggaggctgtggttcaagctgcccgtgccttgctggctgcggtgacgagactccttatccttgcggacatgattgatgtcatgtgcctcttgcaacatgtgtcagcttttcaaaggacatttgagtctctcaaaaatgttgccaacaaatctgacctccagaaaacctaccagaagcttgggaaggagctggaaaatttggattatttagccttcaaacgtcagcaggacttaaaatctccaaatcagagagatgaaattgcaggagcccgagcttcactgaaggagaactctcccctcttgcattcaatttgttcagcttgtttggagcattctgatgttgcttccctcaaagcaagcaaggacacagtttgtgaagaaattcagaatgctctcaatgtaatttcaaatgcttcacaagggatccagaatatgacaaccccaccagaacctcaggcagcaaccctgggaagtgcccttgatgagctggagaatttaattgtcctgaatccactcacagtaactgaggaggaaatacgaccatcactagagaaacgccttgaagccattatcagtggggctgctctgctggcggattcttcatgtacgagggacttacaccgagagcggattatcgcagaatgcaacgccattcgccaggctcttcaggatctgctttcagagtacatgaacaacgctggaaaaaaagaaaggagtaataccctgaatattgctttagacaacatgtgtaagaagacaagagaccttcgcagacagctccgcaaggctattatagatcatgtgtcagactctttcctggatacgacagtccctcttttggttctcattgaagctgctaagaatggccgggaaaaggaaataaaagaatatgctgcgatatttcatgaacacaccagcaggcttgtagaggtggcaaatcttgcttgttccatgtcaacaaatgaagatggaattaaaattgtcaaaattgcagccaatcatttggaaaccttgtgtccacagattattaatgctgcacttgctttggctgcaagacccaaaagtcaagcggtcaaaaacaccatggaaatgtacaagcgtacatgggagaatcatatacatgtcctcactgaagccgtagatgacattacaagcattgatgacttccttgctgtatctgaaagccatatcttggaagatgtcaacaagtgtatcatagccttaagagaccaggatgctgataatttagaccgtgctgcgggtgctatcagaggccgggcagcaagagttgctcacatcgtcacgggtgaaatggacagttacgagccaggggcttacacggaaggtgtaatgagaaatgttaacttccttacaagtactgtaattcctgaatttgtaacacaagtgaatgttgccttggaagccttaagcaaaagctcattgaatgtgttggatgataatcaatttgtggacatctcaaagaagatctatgatacaattcatgatatcagatgttcagtcatgatgattcggaccccagaggaactggaggatgtttctgaccttgaagaggaacacgaggtccgcagtcacaccagcattcagaccgaagggaaaactgatagggctaagatgactcaactgcctgaggcagaaaaagaaaagattgctgagcaagttgctgatttcaagaaagtaaagagtaagctggatgctgagattgagatatgggatgatacaagcaacgacatcattgttctggccaagaacatgtgtatgatcatgatggagatgacagacttcactaggggcaaaggaccactaaagcatacaactgatgtgatctatgcagcgaaaatgatatcagaatcaggatcaaggatggatgtccttgctcggcagattgctaatcagtgcccagatccatcttgtaaacaggacttgttggcctacctggaacagattaagttctactcccaccaactgaaaatctgcagtcaagttaaagctgagatccagaacctgggaggagagctcatcatgtcagctttggacagtgtcacatccctgatccaagcagccaaaaatttaatgaatgctgtagtgcaaacagtgaaaatgtcttacattgcctcaaccaagatcatccgaatccagagtcctgctgggccccggcacccagttgtgatgtggagaatgaaggctcctgcaaaaaaacccttgattaaaagagagaagccagaggaaacgtgtgcagctgtcagacgaggctcagcaaagaaaaaaatccatccattgcaagtcatgagtgaatttagaggaagacaaatctactgaaaccactattctacatatagtgcctatatgacaaaatcctgcctaaccacactgctttattttacacttaagaagttctgtaatttcactaagttttggtgtttaactcacaaataacataaaatattgggcgctaaatcaacaaaagcaatatatatttgggatcatatcactgtcatttctgtatggtcagcacctaatagttaaggaatatttgcttgttgaatgaatgaaattatcacgtgtcattcagcgtttcccatcatagagattatctactattcgttaccaaataaacacaggagaggcca

SEQ ID NO: 4810 - DNA, 3232 bp, Homo sapiens
  source 1..3232: mol_type = unassigned DNA
caacgctcagcgaaattgactgccccactgtcatctgcctctcaatttggtactctgtaactctgtgaccaccaagaagcctttttccgtcccccacaaagctctttttggaaaattccctacgggagctgaattttaagcccatttactttataggaagaaacagaaaggcagcatgtcagctgaaacaccaatcacattgaatatcgatcctcaggatctgcaggtccaaacattcaccgtggagaagctactggagcctctcataatccaggttaccacacttgtaaactgtccccagaacccttccagcaggaaaaaaggacgttcgaaaagagccagtgtccttctagcttctgtggaggaagcaacttggaatttattagacaagggagagaagattgcccaggaagctacagttttaaaggatgagcttacggcttcacttgaggaagttcgcaaagaaagtgaagctctgaaagtatcagctgagagatttacagatgacccctgttttctcccaaaaagggaggctgtggttcaagctgcccgtgccttgctggctgcggtgacgagactccttatccttgcggacatgattgatgtcatgtgcctcttgcaacatgtgtcagcttttcaaaggacatttgagtctctcaaaaatgttgccaacaaatctgacctccagaaaacctaccagaagcttgggaaggagctggaaaatttggattatttagccttcaaacgtcagcaggacttaaaatctccaaatcagagagatgaaattgcaggagcccgagcttcactgaaggagaactctcccctcttgcattcaatttgttcagcttgtttggagcattctgatgttgcttccctcaaagcaagcaaggacacagtttgtgaagaaattcagaatgctctcaatgtaatttcaaatgcttcacaagggatccagaatatgacaaccccaccagaacctcaggcagcaaccctgggaagtgcccttgatgagctggagaatttaattgtcctgaatccactcacagtaactgaggaggaaatacgaccatcactagagaaacgccttgaagccattatcagtggggctgctctgctggcggattcttcatgtacgagggacttacaccgagagcggattatcgcagaatgcaacgccattcgccaggctcttcaggatctgctttcagagtacatgaacaacgctggaaaaaaagaaaggagtaataccctgaatattgctttagacaacatgtgtaagaagacaagagaccttcgcagacagctccgcaaggctattatagatcatgtgtcagactctttcctggatacgacagtccctcttttggttctcattgaagctgctaagaatggccgggaaaaggaaataaaagaatatgctgcgatatttcatgaacacaccagcaggcttgtagaggtggcaaatcttgcttgttccatgtcaacaaatgaagatggaattaaaattgtcaaaattgcagccaatcatttggaaaccttgtgtccacagattattaatgctgcacttgctttggctgcaagacccaaaagtcaagcggtcaaaaacaccatggaaatgtacaagcgtacatgggagaatcatatacatgtcctcactgaagccgtagatgacattacaagcattgatgacttccttgctgtatctgaaagccatatcttggaagatgtcaacaagtgtatcatagccttaagagaccaggatgctgataatttagaccgtgctgcgggtgctatcagaggccgggcagcaagagttgctcacatcgtcacgggtgaaatggacagttacgagccaggggcttacacggaaggtgtaatgagaaatgttaacttccttacaagtactgtaattcctgaatttgtaacacaagtgaatgttgccttggaagccttaagcaaaagctcattgaatgtgttggatgataatcaatttgtggacatctcaaagaagatctatgatacaattcatgatatcagatgttcagtcatgatgattcggaccccagaggaactggaggatgtttctgaccttgaagaggaacacgaggtccgcagtcacaccagcattcagaccgaagggaaaactgatagggctaagatgactcaactgcctgaggcagaaaaagaaaagattgctgagcaagttgctgatttcaagaaagtaaagagtaagctggatgctgagattgagatatgggatgatacaagcaacgacatcattgttctggccaagaacatgtgtatgatcatgatggagatgacagacttcactaggggcaaaggaccactaaagcatacaactgatgtgatctatgcagcgaaaatgatatcagaatcaggatcaaggatggatgtccttgctcggcagattgctaatcagtgcccagatccatcttgtaaacaggacttgttggcctacctggaacagattaagttctactcccaccaactgaaaatctgcagtcaagttaaagctgagatccagaacctgggaggagagctcatcatgtcagctttggacagtgtcacatccctgatccaagcagccaaaaatttaatgaatgctgtagtgcaaacagtgaaaatgtcttacattgcctcaaccaagatcatccgaatccagagtcctgctgggccccggcacccagttgtgatgtggagaatgaaggctcctgcaaaaaaacccttgattaaaagagagaagccagaggaaacgtgtgcagctgtcagacgaggctcagcaaagaaaaaaatccatccattgcaagtcatgagtgaatttagaggaagacaaatctactgaaaccactattctacatatagtgcctatatgacaaaatcctgcctaaccacactgctttattttacacttaagaagttctgtaatttcactaagttttggtgtttaactcacaaataacataaaatattgggcgctaaatcaacaaaagcaatatatatttgggatcatatcactgtcatttctgtatggtcagcacctaatagttaaggaatatttgcttgttgaatgaatgaaattatcacgtgtcattcagcgtttcccatcatagagattatctactattcgttaccaaataaacacaggagaggccagagagtcctgtttatctgtaatacttcatgtacacttatcatccttatcttgaattaa

SEQ ID NO: 4811 - DNA, 2363 bp, Homo sapiens
  source 1..2363: mol_type = unassigned DNA
agggtgcttgtcaggctgtttgcttacagatgcatcataagccaaattgtgagccatgatagtggcactgaatttctaaatacaagaaattgcttagacaattggtttagtatctgtatatgggcaatactctgtcctgcagtagctgaatcgctgagaaaagagaccatgtttctacttttagaaggagaatgaaatcaacgcaaaggagagagaaacaaggcagcatgtcagctgaaacaccaatcacattgaatatcgatcctcaggatctgcaggtccaaacattcaccgtggagaagctactggagcctctcataatccaggttaccacacttgtaaactgtccccagaacccttccagcaggaaaaaaggacgttcgaaaagagccagtgtccttctagcttctgtggaggaagcaacttggaatttattagacaagggagagaagattgcccaggaagctacagttttaaaggatgagcttacggcttcacttgaggaagttcgcaaagaaagtgaagctctgaaagtatcagctgagagatttacagatgacccctgttttctcccaaaaagggaggctgtggttcaagctgcccgtgccttgctggctgcggtgacgagactccttatccttgcggacatgattgatgtcatgtgcctcttgcaacatgtgtcagcttttcaaaggacatttgagtctctcaaaaatgttgccaacaaatctgacctccagaaaacctaccagaagcttgggaaggagctggaaaatttggattatttagccttcaaacgtcagcaggacttaaaatctccaaatcagagagatgaaattgcaggagcccgagcttcactgaaggagaactctcccctcttgcattcaatttgttcagcttgtttggagcattctgatgttgcttccctcaaagcaagcaaggacacagtttgtgaagaaattcagaatgctctcaatgtaatttcaaatgcttcacaagggatccagaatatgacaaccccaccagaacctcaggcagcaaccctgggaagtgcccttgatgagctggagaatttaattgtcctgaatccactcacagtaactgaggaggaaatacgaccatcactagagaaacgccttgaagccattatcagtggggctgctctgctggcggattcttcatgtacgagggacttacaccgagagcggattatcgcagaatgcaacgccattcgccaggctcttcaggatctgctttcagagtacatgaacaacctctgtaatcaaaagtctgacctgggcctcactggagtaaaaatcaaattgttggaggaatgcattattttctggagtctctagggaagagtccattatttttgccttttccagtttctagaggtcaccctcattccttggctcatggccctctgcctccatcttctaagccagcaacgtcatgtttctctgaccctgcttccaacctcacatctctttctctgaccacaccttggaaagattctcttctttttaggactcatgtgattagtgggagccacccagattatccaggataatcctcccatctgaaggcccttaaccttaattacatctgcaaaatccctcttgccatgtcaggtaacatattcataggttctgggaatttgaatgtggacatctctgggagactcacaacattatatcaatactagtcttccctagtctctttggtggaatcattatcaatcctttcatttcgaatccattatagacagcatccctcatacactttaagctctgtgcaggcagatcacatgtctgttttgtttagttttatcccaagcctcaggcacaatgcatagaatttagaaaaagctgaattgtatttttggatgaaagagtgaatgaaatgattgcatgttgtatatgccatgtaatggagaaacagcctctctgacattaactgaaatgagtttcaagcatctactacatttatacaatggactgcctgttataaaaggtcttattttgcaaagcattaaatctcttctggaaatcaatgtaaatatccagaaataaattcttttttatcttaatctctgcatttggatgtgttagataggtgacatataattattagtaaagttaatattcaggtgatacatgactataggggattattagaactgagtgagagataatgctgctagagtaaacaagtcagatctgagctccatgcaggaactaatttgcatttctggacctctcatccacccacttgtttcttctcttggtgttttatgtggaagcacattgttggttctcattacgtatttgctgagtgaataaagaatcaaatggactggc

SEQ ID NO: 4812 - DNA, 745 bp, Homo sapiens
  source 1..745: mol_type = unassigned DNA
gtggcactgaatttctaaatacaagaaattgcttagacaattggtttagtatctgtatatgggcaatactctgtcctgcagtagctgaatcgctgagaaaagagaccatgtttctacttttagaaggagaatgaaatcaacgcaaaggagagagaaacaaggcagcatgtcagctgaaacaccaatcacattgaatatcgatcctcaggatctgcaggtccaaacattcaccgtggagaagctactggagcctctcataatccaggttaccacacttgtaaactgtccccagaacccttccagcaggaaaaaaggacgttcgaaaagagccagtgtccttctagcttctgtggaggaagcaacttggaatttattagacaagggagagaagattgcccaggaagctacagttttaaaggatgagcttacggcttcacttgaggaagttcgcaaagaaagtgaagctctgaaagtatcagctgagagatttacagatgacccctgttttctcccaaaaagggaggctgtggttcaagctgcccgtgccttgctggctgcggtgacgagactccttatccttgcggacatgattgatgtcatgtgcctcttgcaacatgtgtcagcttttcaaaggacatttgagtctctcaaaaatgttgccaacaaatctgacctccagaaaacctaccagaagcttgggaaggagctggaaaatttggattatttagccttcaaacgtcagcag

SEQ ID NO: 4813 - DNA, 1131 bp, Homo sapiens
  source 1..1131: mol_type = unassigned DNA
atgtcagctgaaacaccaatcacattgaatatcgatcctcaggatctgcaggtccaaacattcaccgtggagaagctactggagcctctcataatccaggttaccacacttgtaaactgtccccagaacccttccagcaggaaaaaaggacgttcgaaaagagccagtgtccttctagcttctgtggaggaagcaacttggaatttattagacaagggagagaagattgcccaggaagctacagttttaaaggatgagcttacggcttcacttgaggaagttcgcaaagaaagtgaagctctgaaagtatcagctgagagatttacagatgacccctgttttctcccaaaaagggaggctgtggttcaagctgcccgtgccttgctggctgcggtgacgagactccttatccttgcggacatgattgatgtcatgtgcctcttgcaacatgtgtcagcttttcaaaggacatttgagtctctcaaaaatgttgccaacaaatctgacctccagaaaacctaccagaagcttgggaaggagctggaaaatttggattatttagccttcaaacgtcagcaggacttaaaatctccaaatcagagagatgaaattgcaggagcccgagcttcactgaaggagaactctcccctcttgcattcaatttgttcagcttgtttggagcattctgatgttgcttccctcaaagcaagcaaggacacagtttgtgaagaaattcagaatgctctcaatgtaatttcaaatgcttcacaagggatccagaatatgacaaccccaccagaacctcaggcagcaaccctgggaagtgcccttgatgagctggagaatttaattgtcctgaatccactcacagtaactgaggaggaaatacgaccatcactagagaaacgccttgaagccattatcagtggggctgctctgctggcggattcttcatgtacgagggacttacaccgagagcggattatcgcagaatgcaacgccattcgccaggctcttcaggatctgctttcagagtacatgaacaacctctgtaatcaaaagtctgacctgggcctcactggagtaaaaatcaaattgttggaggaatgcattattttctggagtctctag

SEQ ID NO: 4814 - DNA, 2490 bp, Homo sapiens
  source 1..2490: mol_type = unassigned DNA
cctgtcgccgccgcctcgggcgggtgggctgactggcggcaggctcgccgcggcgcggagtcccggctgcgggatagaccgagggccatggccgcctctcccggacccgccggcgttggcggcgccggagcagtctacggctccggctcttcgggcttcgccctcgactcgggactggagatcaaaactcgctcggtggagcagacgctactcccgctggtttctcagatcaccacgcttattaatcataaagataataccaaaaagtctgataaaactctgcaagcaattcagcgtgtaggacaagctgtcaacttggcagttggaagatttgttaaagtaggagaagctatagccaatgaaaactgggatttgaaagaagaaataaatattgcttgtattgaagctaaacaagcaggagaaacaattgcagcacttacagacataaccaacttgaaccatctggaatctgatgggcagatcacaatttttacagacaaaacaggagtgataaaggctgcaagattacttctttcttcagtgacaaaagtgttgttgctggcagaccgagtagtcattaaacagataataacatcaagaaataaggttctcgcaactatggaaagactagagaaagtgaatagctttcaagagtttgtccaaatattcagtcaatttggaaatgaaatggtggagtttgcacatctgagtggagatagacaaaatgatttgaaagatgaaaagaaaaaggcaaaaatggcagcagctagggcagttcttgaaaagtgtacaatgatgcttctcacagcttcaaagacatgtctgaggcatcctaactgcgaatcagcccataaaaacaaagaaggagtatttgaccgtatgaaagtggcattggataaggtcattgaaattgtgactgactgtaaaccgaatggagagactgacatttcatctatcagtatttttactggaattaaggaattcaagatgaatattgaagctcttcgggagaatctttattttcagtccaaagagaacctttctgtgacattggaagtcatcttggagcgtatggaggactttactgattctgcctacaccagccatgagcacagagaacgcatcttggaactgtcaactcaggcgagaatggaactgcagcagttaatttctgtgtggattcaagctcaaagcaagaaaacaaaaagcatcgctgaagaactggaactcagtattttgaaaatcagtcacagtcttaatgaacttaagaaagaacttcatagtacagcgacacagctggcagcagatctattaaaataccatgctgatcatgtggttctaaaagcattaaaacttactggagtagaaggaaatttagaagctttggctgaatatgcctgtaaactctctgaacagaaagagcagcttgttgagacctgtcgattgttacgacacatatctgggacagaacctctggaaataacctgtatacatgcagaggagacatttcaggtgactggccaacagataatttctgctgctgaaacattgacattgcatccatctagtaaaattgctaaagaaaacctagatgtattttgtgaagcttgggaatcccaaattagtgacatgtcaacactgctgagagaaatcaatgacgtgtttgaaggaagacgaggagagaagtatggctacctttcacttccaaagccaatgaagaataatgcaaacctgaaatcattaaagccagacaagcctgactctgaggagcaagccaagatagcaaagcttggacttaagctgggtttgctcacctctgacgctgactgcgaaattgagaagtgggaagatcaggagaatgagattgttcaatatggacggaacatgtccagtatggcctattctctgtatttatttactagaggagaggggccactgaaaacttcccaggatttaattcatcaactagaggtttttgctgcagagggtttaaagcttacttccagtgttcaagctttttcaaaacagctgaaagacgatgacaagcttatgcttctcctggaaataaacaagctaattcctctatgccaccagctccagacagtaactaagacttctttgcagaataaagtatttctaaaggttgacaagtgtattacgaagacaagatccatgatggctctcttagtccaacttctttcactttgttataaactgctgaagaagcttcagatggaaaataacggatgggtctcagttacaaataaggacactatggatagtaaaacttgagaagcttttggggtcagatctctggaacatcatgtgatgaagctgacatttttaaaaatcaaatgatcctttatcttttcagaaattcatcaattttataaagaaaacaatattgaaattttgctctattttctgatcatgaaactgattgtaaagctttttgacaactaataaatgtcttggtaattgctagattct

SEQ ID NO: 4815 - DNA, 2201 bp, Homo sapiens
  source 1..2201: mol_type = unassigned DNA
gactggcggcaggctcgccgcggcgcggagtcccggctgcgggatagaccgagggccatggccgcctctcccggacccgccggcgttggcggcgccggagcagtctacggctccggctcttcgggcttcgccctcgactcgggactggagatcaaaactcgctcggtggagcagacgctactcccgctggtttctcagatcaccacgcttattaatcataaagataataccaaaaagtctgataaaactctgcaagcaattcagcgtgtaggacaagctgtcaacttggcagttggaagatttgttaaagtaggagaagctatagccaatgaaaactgggatttgaaagaagaaataaatattgcttgtattgaagctaaacaagcaggagaaacaattgcagcacttacagacataaccaacttgaaccatctggaatctgatgggcagatcacaatttttacagacaaaacaggagtgataaaggctgcaagattacttctttcttcagtgacaaaagtgttgttgctggcagaccgagtagtcattaaacagataataacatcaagaaataaggttctcgcaactatggaaagactagagaaagtgaatagctttcaagagtttgtccaaatattcagtcaatttggaaatgaaatggtggagtttgcacatctgagtggagatagacaaaatgatttgaaagatgaaaagaaaaaggcaaaaatggcagcagctagggcagttcttgaaaagtgtacaatgatgcttctcacagcttcaaagacatgtctgaggcatcctaactgcgaatcagcccataaaaacaaagaaggagtatttgaccgtatgaaagtggcattggataaggtcattgaaattgtgactgactgtaaaccgaatggagagactgacatttcatctatcagtatttttactggaattaaggaattcaagatgaatattgaagctcttcgggagaatctttattttcagtccaaagagaacctttctgtgacattggaagtcatcttggagcgtatggaggactttactgattctgcctacaccagccatgagcacagagaacgcatcttggaactgtcaactcaggcgagaatggaactgcagcagttaatttctgtgtggattcaagctcaaagcaagaaaacaaaaagcatcgctgaagaactggaactcagtattttgaaaatcagtcacagtcttaatgaacttaagaaagaaataatttctgctgctgaaacattgacattgcatccatctagtaaaattgctaaagaaaacctagatgtattttgtgaagcttgggaatcccaaattagtgacatgtcaacactgctgagagaaatcaatgacgtgtttgaaggaagacgaggagagaagtatggctacctttcacttccaaagccaatgaagaataatgcaaacctgaaatcattaaagccagacaagcctgactctgaggagcaagccaagatagcaaagcttggacttaagctgggtttgctcacctctgacgctgactgcgaaattgagaagtgggaagatcaggagaatgagattgttcaatatggacggaacatgtccagtatggcctattctctgtatttatttactagaggagaggggccactgaaaacttcccaggatttaattcatcaactagaggtttttgctgcagagggtttaaagcttacttccagtgttcaagctttttcaaaacagctgaaagacgatgacaagcttatgcttctcctggaaataaacaagctaattcctctatgccaccagctccagacagtaactaagacttctttgcagaataaagtatttctaaaggttgacaagtgtattacgaagacaagatccatgatggctctcttagtccaacttctttcactttgttataaactgctgaagaagcttcagatggaaaataacggatgggtctcagttacaaataaggacactatggatagtaaaacttgagaagcttttggggtcagatctctggaacatcatgtgatgaagctgacatttttaaaaatcaaatgatcctttatcttttcagaaattcatcaattttataaagaaaacaatattgaaattttgctctattttctgatcatgaaactgattgtaaagctttttgacaactaataaatgtcttggtaattgct

SEQ ID NO: 4816 - DNA, 761 bp, Homo sapiens
  source 1..761: mol_type = unassigned DNA
gggcgggtgggctgactggcggcaggctcgccgcggcgcggagtcccggctgcgggatagaccgagggccatggccgcctctcccggacccgccggcgttggcggcgccggagcagtctacggctccggctcttcgggcttcgccctcgactcgggactggagatcaaaactcgctcggtggagcagacgctactcccgctggtttctcagatcaccacgcttattaatcataaagataataccaaaaagtctgataaaactctgcaagcaattcagcgtgtaggacaagctgtcaacttggcagttggaagatttgttaaagtaggagaagctatagccaatgaaaactgggatttgaaagaagaaataaatattgcttgtattgaagctaaacaagcaggagaaacaattgcagcacttacagacataaccaacttgaaccatctggaatctgatgggcagatcacaatttttacagacaaaacaggagtgataaaggctgcaagattacttctttcttcagtgacaaaagtgttgttgctggcagaccgagtagtcattaaacagataataacatcaagaaataagagactaacaatatataacttaagacacagttaaatcagtggaaatgataattatccacaactacaaaatttctgtactcagagtccctaaatgttactgaataatctcaaaacttacagaacagatttaaactcttccagtccagaagttaatctctcagatgatggtcatg

SEQ ID NO: 4817 - DNA, 824 bp, Homo sapiens
  source 1..824: mol_type = unassigned DNA
catcaatcctggccagctgattctcctctttaccagaacaccattgagcttagtacagaagaataatgcaaacctgaaatcattaaagccagacaagcctgactctgaggagcaagccaagatagcaaagcttggacttaagctgggtttgctcacctctgacgctgactgcgaaattgagaagtgggaagatcaggagaatgagattgttcaatatggacggaacatgtccagtatggcctattctctgtatttatttactagaggagaggggccactgaaaacttcccaggatttaattcatcaactagaggtttttgctgcagagggtttaaagcttacttccagtgttcaagctttttcaaaacagctgaaagacgatgacaagcttatgcttctcctggaaataaacaagctaattcctctatgccaccagctccagacagtaactaagacttctttgcagaataaagtatttctaaaggttgacaagtgtattacgaagacaagatccatgatggctctcttagtccaacttctttcactttgttataaactgctgaagaagcttcagatggaaaataacggatgggtctcagttacaaataaggacactatggatagtaaaacttgagaagcttttggggtcagatctctggaacatcatgtgatgaagctgacatttttaaaaatcaaatgatcctttatcttttcagaaattcatcaattttataaagaaaacaatattgaaattttgctctattttctgatcatgaaactgattgtaaagctttttgacaactaataaatgtcttggtaattgc

SEQ ID NO: 4818 - DNA, 2520 bp, Homo sapiens
  source 1..2520: mol_type = unassigned DNA
ccgccgcctcgggcgggtgggctgactggcggcaggctcgccgcggcgcggagtcccggctgcgggatagaccgagggccatggccgcctctcccggacccgccggcgttggcggcgccggagcagtctacggctccggctcttcgggcttcgccctcgactcgggactggagatcaaaactcgctcggtggagcagacgctactcccgctggtttctcagatcaccacgcttattaatcataaagataataccaaaaagtctgataaaactctgcaagcaattcagcgtgtaggacaagctgtcaacttggcagttggaagatttgttaaagtaggagaagctatagccaatgaaaactgggatttgaaagaagaaataaatattgcttgtattgaagctaaacaagcaggagaaacaattgcagcacttacagacataaccaacttgaaccatctggaatctgatgggcagatcacaatttttacagacaaaacaggagtgataaaggctgcaagattacttctttcttcagtgacaaaagtgttgttgctggcagaccgagtagtcattaaacagataataacatcaagaaataaggttctcgcaactatggaaagactagagaaagtgaatagctttcaagagtttgtccaaatattcagtcaatttggaaatgaaatggtggagtttgcacatctgagtggagatagacaaaatgatttgaaagatgaaaagaaaaaggcaaaaatggcagcagctagggcagttcttgaaaagtgtacaatgatgcttctcacagcttcaaagacatgtctgaggcatcctaactgcgaatcagcccataaaaacaaagaaggagtatttgaccgtatgaaagtggcattggataaggtcattgaaattgtgactgactgtaaaccgaatggagagactgacatttcatctatcagtatttttactggaattaaggaattcaagatgaatattgaagctcttcgggagaatctttattttcagtccaaagagaacctttctgtgacattggaagtcatcttggagcgtatggaggactttactgattctgcctacaccagccatgagcacagagaacgcatcttggaactgtcaactcaggcgagaatggaactgcagcagttaatttctgtgtggattcaagctcaaagcaagaaaacaaaaagcatcgctgaagaactggaactcagtattttgaaaatcagtcacagtcttaatgaacttaagaaagaacttcatagtacagcgacacagctggcagcagatctattaaaataccatgctgatcatgtggttctaaaagcattaaaacttactggagtagaaggaaatttagaagctttggctgaatatgcctgtaaactctctgaacagaaagagcagcttgttgagacctgtcgattgttacgacacatatctgggacagaacctctggaaataacctgtatacatgcagaggagacatttcaggtgactggccaacagataatttctgctgctgaaacattgacattgcatccatctagtaaaattgctaaagaaaacctagatgtattttgtgaagcttgggaatcccaaattagtgacatgtcaacactgctgagagaaatcaatgacgtgtttgaaggaagacgaggagagaagtatggctacctttcacttccaaagccaatgaagaataatgcaaacctgaaatcattaaagccagacaagcctgactctgaggagcaagccaagatagcaaagcttggacttaagctgggtttgctcacctctgacgctgactgcgaaattgagaagtgggaagatcaggagaatgagattgttcaatatggacggaacatgtccagtatggcctattctctgtatttatttactagaggagaggggccactgaaaacttcccaggatttaattcatcaactagaggtttttgctgcagagggtttaaagcttacttccagtgttcaagctttttcaaaacagctgaaagacgatgacaagcttatgcttctcctggaaataaacaagctaattcctctatgccaccagctccagacagtaactaagacttctttgcagaataaagtatttctaaaggttgacaagtgtattacgaagacaagatccatgatggctctcttagtccaacttctttcactttgttataaactgctgaagaagagtgaaaccagatactaattgtcttaactctttccagcttcagatggaaaataacggatgggtctcagttacaaataaggacactatggatagtaaaacttgagaagcttttggggtcagatctctggaacatcatgtgatgaagctgacatttttaaaaatcaaatgatcctttatcttttcagaaattcatcaattttataaagaaaacaatattgaaattttgctctattttctgatcatgaaactgattgtaaagctttttgacaactaataaatgtcttggtaattgctagattct

SEQ ID NO: 4819 - DNA, 6135 bp, Homo sapiens
  source 1..6135: mol_type = unassigned DNA
ctgccagatcagtttgtcaccacccaggctcccttgcctttggctgggtgcaacttccattttaggtgttggatctgagggggaaaaaaaagagagagggagagagagagaaagaagagcaggaaagatcccgaaaggaggaagaggtggcgaaaaatcaactgccctgctggatttgtctttctcagcaccttggcgaagccttgggtttctttcttaaaggactgatttttagaactccacatttgagctctctccttcctgcttcctccttgctgtggtggctgggatgcttcttccatgattttttgaatctagactgggctgttctctgtgttaaaccaatcagttgcgaccttctcttaacagtgtgaagtgagggggtctctctccctccttctccttcctctgtgattcaccttcctttttaccctgccctgcggcggctccgccccttaccttcatggacgactcagaggtggagtcgaccgccagcatcttggcctctgtgaaggaacaagaggcccagtttgagaagctgacccgggcgctggaggaggaacggcgccacgtctcggcgcagctggaacgcgtccgggtctcaccacaagatgccaacccactcatggccaacggcacactcacccgccggcatcagaacggccggtttgtgggcgatgctgaccttgaaagacagaaattttcagatttgaaactcaacggaccccaggatcacagtcaccttctatatagcaccatccccaggatgcaggagccggggcagattgtggagacctacacggaggaggatcctgagggagccatgtctgtagtctctgtggagacctcagatgatgggaccactcggcgcacagagaccacggtcaagaaagtagtgaagactgtgacaacacggacagtacagccagtcgctatgggaccagacgggttgcctgtggatgcttcatcagtttctaacaactatatccagactttgggtcgtgatttccgcaagaatggcaatgggggacctggtccctatgtggggcaagctggcactgctacccttcctaggaacttccactaccctcctgatggttatagtcgccactatgaagatggttatccaggtggcagtgataactatggcagtctgtcccgggtgacccgcattgaggagcggtataggcccagcatggaaggctaccgggcacctagtagacaggatgtgtatgggccccaaccccaggttcgggtaggtgggagcagcgtggatctgcatcgctttcatccagagccttatgggctagaggatgaccagcgtagtatgggctatgatgacctggattatggtatgatgtctgattatggcactgcccgtcggactgggacaccctctgaccctcgtcggcgcctcaggagctatgaagacatgattggtgaggaggtgccatcggatcaatactactgggctcctttggcccagcatgagcgaggaagtttagcaagcttggatagcctgcgcaaaggagggcctccacctcctaattggagacagccagagctgccagaggtgatcgccatgcttggattccgcttggatgctgtcaagtccaatgcagctgcatacctgcaacacttatgctaccgcaatgacaaggtgaagactgacgtgcggaagctcaagggcatcccagtactggtgggattgttagaccatcccaaaaaggaagtgcaccttggagcctgtggagctctcaagaatatctcttttggacgtgaccaggataacaagattgccataaaaaactgtgatggtgtgcctgcccttgtgcgattgcttcgaaaggctcgtgatatggaccttactgaagttattaccggaaccctgtggaatctttcatcccatgactcaatcaaaatggagattgtggaccatgcactgcatgccttgacagatgaagtgatcattcctcattctggttgggagcgggaacctaatgaagactgtaagccacgccacattgagtgggaatcggtgctcaccaacacagctggctgccttaggaatgtaagctcagagaggagtgaagctcgccggaaacttcgggaatgtgatggtttagttgatgccctcattttcattgttcaggctgagattgggcagaaggattcagacagcaagcttgtagagaactgtgtttgccttcttcggaacttatcatatcaagttcaccgggagatcccacaggcagagcgttaccaagaggcagctcccaatgttgccaacaatactgggccacatgctgccagttgctttggggccaagaagggcaaagggaaaaaacctatagaggatccagcaaacgatacagtggatttccctaaaagaacgagtccagctcgaggctatgagctcttatttcagccagaggtggttcggatatacatctcacttcttaaggagagcaagactcctgccatcctagaagcctcagctggagctatccagaacttgtgtgctgggcgctggacgtatggtcgatacatccgctctgctctgcgtcaagagaaggctctttctgccatagctgacctcctgactaatgaacatgaacgggtggtgaaagctgcatctggagcactgagaaacctggctgtggatgctcgcaacaaagaattaattggtaaacatgctattcctaacttggtaaagaatctgccaggaggacagcagaactcctcttggaatttctctgaggacactgtcatctctattttgaacactatcaacgaggttatcgctgagaacttggaggctgccaaaaagcttcgagagacacagggtattgagaagctggtgttgatcaacaaatcagggaaccgctcagaaaaagaagttcgagcagcagcacttgtattacagacaatctggggatataaggaactgcggaagccactggaaaaagaaggatggaagaaatcagactttcaggtgaatctaaacaatgcttcccgaagccagagcagtcattcatatgatgatagtactctccctctcattgaccggaaccaaaaatcagataagaaacctgatcgggaagaaattcagatgagcaatatgggatcaaacacaaaatcactagataacaactattccacaccaaatgagagaggagaccacaatagaacactggatcgatcgggggatctaggcgacatggagccattgaagggaacaacacccttgatgcagaagatttagcaccactatctccgttccatctgggcttatatgtacttttattttttggtggtgaaattgactgatgattttcctttttcttcgctggactattgtgccaactgccaggctgcctcctgcccttacagccctaagtggctgccttctttccatcaactcccaacttcttcctgtgaagtttaattgtctcaacgcctccccctcccccattccctccatttttctcccaagaaacctgactcaattatttgcatattttgagaaactgctgcagattagttctttttgccagttttccctggaactcctggccttttgtggaggggagggatggagagaataggaatcttcactagaagccgtgggaagaattggaagttacatgctgtatatgcaatgtccagcagtctgataaactgacgattcttaatcaagatttttttcctgatggggaagggacttttattttcttttagagaggggaaagtgtgagctcttcccttattcctaatggctatttttgaagcaaagaaggccagcaacattggcacatgccacctggcaaaggacccttgagtaagtgaaggtctcctaaaactgggattaagaaaccttgctctcctcatctccaaggcagggaccatcaagaacctacagactccatctcttctgcaagcctcatgccaaccctgggctattgctgctgccccttaaacacaggctgtccttaacccacctctcctgccctgtgatatgtctgctgagttggcctggccatttccaagaggctgtagaaaggggagaatgtcaaggaagacttttggtagagaaggagcagaaagatgtgtttttgggaagaagaagacctctaggaggagctagtaggaatgtacatgaagcaattagtctgaaactggcttccccactcccccgtttctccttttcctatccttataggcctgtcccttgcctctgccctggattggttggcaaactaaaggacttgatgtacataactcctgtcccttttcccttacaaggtggggattgcccctggctttgcctcttctttgtgcctttggcctggggtgcatctcctcccgcccttccatgtgcctttctttgcctctgcagtctcatttctcataattttgcaaattatattttgttgctttcttacctactattggccctaaatagcagaaagaagagaagtgaccgagagaacctcagattcttcattgaggattggtatagccatgatttcagtcatagcaagcttttgctcaacagcatatgggtgggattttgcaaaaatcctattctgatgaatctcaaagtaaggctggtaagagaagtgagtggtgtgactcttactccttaggtgcccagaatttaccatcatctctgaaggagttacagggaagtggtctccccaattctcccctccctccagtattgccccctctcactttagcatatattaattagcaggttgggctagagaaatcagctgctatgcgggttgattattattattatttctaatccttttccttatttgccttctactccccttaatctaatctaaaagctctgttccatgcaactggagttccttatccctctcttccccttcccttatatattgaggctatggggtaggagaaaagtgcacaacccaccaccccctttactcgtgcattaaaatttcttatttacccttttcccccttcccatttcttcccactttcatctaccttttctggcaaaaaggagccttttgctctctgtgaccctaagagcacactgcacagggaaaattgccccatccagacctggctccactcttgatctctcttgtcctcttctgctcttttcctggtgctcttttttctcggtggggtgtgggtaatagaacagccgtgggcttttggggacctttaacttttttttctctcttttgtttataaaaaacactaaacattcaattccagagaaccaaaaatcccaccttcccaccgaacactactaaggggcttgtgttctgctccataccttttctcttttctttctgtcttgttaatgcttttaaaaacaaatgagttttttatataaataaagtttttaaagtgtgtatgtggggggtctgtgtcatttcttcacttcaagctgttatttcttccctgctttgcatctttgttacttccttatgtatcagtgtcctttccagagcaaccagaaggaggttataccaggatttattttgagctcagccccaactctttatcaagcaacattcttgttaactatatgtgaaacattttttcttctgaagattcttaaaaattgaatgtggctgaagttgaacatgggagcttattgctaatttagagataggaaactgaagcataaagaattaatgacttactttaattactggaattcttctgcaacatttgacaaaactaaccttgaataaggcccactgtaatacgtagctctcttaaatataacacttaggactagaagattagaaactaccaatcccaactacgtaataggaaaatgtaggatcaaaaggcccatgtatataagtactgaccactgggccataatgttgcttctcaggctatatgcagtcctttagtcagaagtcaataggcctatttattaatattttacagaccatattacctggattaccagggactatctttgctgcagagatcaagggttaagatctatgggaagatacttatttttctgaggtccttatgtcctgtcatataattaaagactcaagagaatttatgtgaaatgctttctgtatgcccaaatctttagattaaaattatatagctgctcct

SEQ ID NO: 4820 - DNA, 6286 bp, Homo sapiens
  source 1..6286: mol_type = unassigned DNA
ggctgacatcacttaggaaagcgaagggggtagggctgccagatcagtttgtcaccacccaggctcccttgcctttggctgggtgcaacttccattttaggtgttggatctgagggggaaaaaaaagagagagggagagagagagaaagaagagcaggaaagatcccgaaaggaggaagaggtggcgaaaaatcaactgccctgctggatttgtctttctcagcaccttggcgaagccttgggtttctttcttaaaggactgatttttagaactccacatttgaggtgtgtggcttttgaagaaaatgtatgtactgacgggaaaaggaggataagcaagtcgaatttttgtcttacgctctctccttcctgcttcctccttgctgtggtggctgggatgcttcttccatgattttttgaatctagactgggctgttctctgtgttaaaccaatcagttgcgaccttctcttaacagtgtgaagtgagggggtctctctccctccttctccttcctctgtgattcaccttcctttttaccctgccctgcggcggctccgccccttaccttcatggacgactcagaggtggagtcgaccgccagcatcttggcctctgtgaaggaacaagaggcccagtttgagaagctgacccgggcgctggaggaggaacggcgccacgtctcggcgcagctggaacgcgtccgggtctcaccacaagatgccaacccactcatggccaacggcacactcacccgccggcatcagaacggccggtttgtgggcgatgctgaccttgaaagacagaaattttcagatttgaaactcaacggaccccaggatcacagtcaccttctatatagcaccatccccaggatgcaggagccggggcagattgtggagacctacacggaggaggatcctgagggagccatgtctgtagtctctgtggagacctcagatgatgggaccactcggcgcacagagaccacggtcaagaaagtagtgaagactgtgacaacacggacagtacagccagtcgctatgggaccagacgggttgcctgtggatgcttcatcagtttctaacaactatatccagactttgggtcgtgatttccgcaagaatggcaatgggggacctggtccctatgtggggcaagctggcactgctacccttcctaggaacttccactaccctcctgatggttatagtcgccactatgaagatggttatccaggtggcagtgataactatggcagtctgtcccgggtgacccgcattgaggagcggtataggcccagcatggaaggctaccgggcacctagtagacaggatgtgtatgggccccaaccccaggttcgggtaggtgggagcagcgtggatctgcatcgctttcatccagagccttatgggctagaggatgaccagcgtagtatgggctatgatgacctggattatggtatgatgtctgattatggcactgcccgtcggactgggacaccctctgaccctcgtcggcgcctcaggagctatgaagacatgattggtgaggaggtgccatcggatcaatactactgggctcctttggcccagcatgagcgaggaagtttagcaagcttggatagcctgcgcaaaggagggcctccacctcctaattggagacagccagagctgccagaggtgatcgccatgcttggattccgcttggatgctgtcaagtccaatgcagctgcatacctgcaacacttatgctaccgcaatgacaaggtgaagactgacgtgcggaagctcaagggcatcccagtactggtgggattgttagaccatcccaaaaaggaagtgcaccttggagcctgtggagctctcaagaatatctcttttggacgtgaccaggataacaagattgccataaaaaactgtgatggtgtgcctgcccttgtgcgattgcttcgaaaggctcgtgatatggaccttactgaagttattaccggaaccctgtggaatctttcatcccatgactcaatcaaaatggagattgtggaccatgcactgcatgccttgacagatgaagtgatcattcctcattctggttgggagcgggaacctaatgaagactgtaagccacgccacattgagtgggaatcggtgctcaccaacacagctggctgccttaggaatgtaagctcagagaggagtgaagctcgccggaaacttcgggaatgtgatggtttagttgatgccctcattttcattgttcaggctgagattgggcagaaggattcagacagcaagcttgtagagaactgtgtttgccttcttcggaacttatcatatcaagttcaccgggagatcccacaggcagagcgttaccaagaggcagctcccaatgttgccaacaatactgggccacatgctgccagttgctttggggccaagaagggcaaagatgagtggttctccagagggaaaaaacctatagaggatccagcaaacgatacagtggatttccctaaaagaacgagtccagctcgaggctatgagctcttatttcagccagaggtggttcggatatacatctcacttcttaaggagagcaagactcctgccatcctagaagcctcagctggagctatccagaacttgtgtgctgggcgctggacgtatggtcgatacatccgctctgctctgcgtcaagagaaggctctttctgccatagctgacctcctgactaatgaacatgaacgggtggtgaaagctgcatctggagcactgagaaacctggctgtggatgctcgcaacaaagaattaattggtaaacatgctattcctaacttggtaaagaatctgccaggaggacagcagaactcctcttggaatttctctgaggacactgtcatctctattttgaacactatcaacgaggttatcgctgagaacttggaggctgccaaaaagcttcgagagacacagggtattgagaagctggtgttgatcaacaaatcagggaaccgctcagaaaaagaagttcgagcagcagcacttgtattacagacaatctggggatataaggaactgcggaagccactggaaaaagaaggatggaagaaatcagactttcaggtgaatctaaacaatgcttcccgaagccagagcagtcattcatatgatgatagtactctccctctcattgaccggaaccaaaaatcagataacaactattccacaccaaatgagagaggagaccacaatagaacactggatcgatcgggggatctaggcgacatggagccattgaagggaacaacacccttgatgcaggacgaggggcaggaatctctggaggaagagttggatgtgttggttttggatgatgaggggggccaagtgtcttacccctccatgcagaagatttagcaccactatctccgttccatctgggcttatatgtacttttattttttggtggtgaaattgactgatgattttcctttttcttcgctggactattgtgccaactgccaggctgcctcctgcccttacagccctaagtggctgccttctttccatcaactcccaacttcttcctgtgaagtttaattgtctcaacgcctccccctcccccattccctccatttttctcccaagaaacctgactcaattatttgcatattttgagaaactgctgcagattagttctttttgccagttttccctggaactcctggccttttgtggaggggagggatggagagaataggaatcttcactagaagccgtgggaagaattggaagttacatgctgtatatgcaatgtccagcagtctgataaactgacgattcttaatcaagatttttttcctgatggggaagggacttttattttcttttagagaggggaaagtgtgagctcttcccttattcctaatggctatttttgaagcaaagaaggccagcaacattggcacatgccacctggcaaaggacccttgagtaagtgaaggtctcctaaaactgggattaagaaaccttgctctcctcatctccaaggcagggaccatcaagaacctacagactccatctcttctgcaagcctcatgccaaccctgggctattgctgctgccccttaaacacaggctgtccttaacccacctctcctgccctgtgatatgtctgctgagttggcctggccatttccaagaggctgtagaaaggggagaatgtcaaggaagacttttggtagagaaggagcagaaagatgtgtttttgggaagaagaagacctctaggaggagctagtaggaatgtacatgaagcaattagtctgaaactggcttccccactcccccgtttctccttttcctatccttataggcctgtcccttgcctctgccctggattggttggcaaactaaaggacttgatgtacataactcctgtcccttttcccttacaaggtggggattgcccctggctttgcctcttctttgtgcctttggcctggggtgcatctcctcccgcccttccatgtgcctttctttgcctctgcagtctcatttctcataattttgcaaattatattttgttgctttcttacctactattggccctaaatagcagaaagaagagaagtgaccgagagaacctcagattcttcattgaggattggtatagccatgatttcagtcatagcaagcttttgctcaacagcatatgggtgggattttgcaaaaatcctattctgatgaatctcaaagtaaggctggtaagagaagtgagtggtgtgactcttactccttaggtgcccagaatttaccatcatctctgaaggagttacagggaagtggtctccccaattctcccctccctccagtattgccccctctcactttagcatatattaattagcaggttgggctagagaaatcagctgctatgcgggttgattattattattatttctaatccttttccttatttgccttctactccccttaatctaatctaaaagctctgttccatgcaactggagttccttatccctctcttccccttcccttatatattgaggctatggggtaggagaaaagtgcacaacccaccaccccctttactcgtgcattaaaatttcttatttacccttttcccccttcccatttcttcccactttcatctaccttttctggcaaaaaggagccttttgctctctgtgaccctaagagcacactgcacagggaaaattgccccatccagacctggctccactcttgatctctcttgtcctcttctgctcttttcctggtgctcttttttctcggtggggtgtgggtaatagaacagccgtgggcttttggggacctttaacttttttttctctcttttgtttataaaaaacactaaacattcaattccagagaaccaaaaatcccaccttcccaccgaacactactaaggggcttgtgttctgctccataccttttctcttttctttctgtcttgttaatgcttttaaaaacaaatgagttttttatataaataaagtttttaaagtgtgtatgtggggggtctgtgtcatttcttcacttcaagctgttatttcttccctgctttgcatctttgttacttccttatgtatcagtgtcctttccagagcaaccagaaggaggttataccaggatttattttgagctcagccccaactctttatcaagcaacattcttgttaactatatgtgaaacattttttcttctgaagattcttaaaaattgaatgtggctgaagttgaacatgggagcttattgctaatttagagataggaaactgaagcataaagaattaatgacttactttaattactggaattcttctgcaacatttgacaaaactaaccttgaataaggcccactgtaatacgtagctctcttaaatataacacttaggactagaagattagaaactaccaatcccaactacgtaataggaaaatgtaggatcaaaaggcccatgtatataagtactgaccactgggccataatgttgcttctcaggctatatgcagtcctttagtcagaagtcaataggcctatttattaatattttacagaccatattacctggattaccagggactatctttgctgcagagatcaagggttaagatctatgggaagatacttatttttctgaggtccttatgtcctgtcatataattaaagactcaagagaatttatgtgaaatgctttctgtatgcccaaatctttagattaaaattatatagctgctcctg

SEQ ID NO: 4821 - DNA, 6295 bp, Homo sapiens
  source 1..6295: mol_type = unassigned DNA
ctgccagatcagtttgtcaccacccaggctcccttgcctttggctgggtgcaacttccattttaggtgttggatctgagggggaaaaaaaagagagagggagagagagagaaagaagagcaggaaagatcccgaaaggaggaagaggtggcgaaaaatcaactgccctgctggatttgtctttctcagcaccttggcgaagccttgggtttctttcttaaaggactgatttttagaactccacatttgaggtgtgtggcttttgaagaaaatgtatgtactgacgggaaaaggaggataagcaagtcgaatttttgtcttacgctctctccttcctgcttcctccttgctgtggtggctgggatgcttcttccatgattttttgaatctagactgggctgttctctgtgttaaaccaatcagttgcgaccttctcttaacagtgtgaagtgagggggtctctctccctccttctccttcctctgtgattcaccttcctttttaccctgccctgcggcggctccgccccttaccttcatggacgactcagaggtggagtcgaccgccagcatcttggcctctgtgaaggaacaagaggcccagtttgagaagctgacccgggcgctggaggaggaacggcgccacgtctcggcgcagctggaacgcgtccgggtctcaccacaagatgccaacccactcatggccaacggcacactcacccgccggcatcagaacggccggtttgtgggcgatgctgaccttgaaagacagaaattttcagatttgaaactcaacggaccccaggatcacagtcaccttctatatagcaccatccccaggatgcaggagccggggcagattgtggagacctacacggaggaggatcctgagggagccatgtctgtagtctctgtggagacctcagatgatgggaccactcggcgcacagagaccacggtcaagaaagtagtgaagactgtgacaacacggacagtacagccagtcgctatgggaccagacgggttgcctgtggatgcttcatcagtttctaacaactatatccagactttgggtcgtgatttccgcaagaatggcaatgggggacctggtccctatgtggggcaagctggcactgctacccttcctaggaacttccactaccctcctgatggttatagtcgccactatgaagatggttatccaggtggcagtgataactatggcagtctgtcccgggtgacccgcattgaggagcggtataggcccagcatggaaggctaccgggcacctagtagacaggatgtgtatgggccccaaccccaggttcgggtaggtgggagcagcgtggatctgcatcgctttcatccagagccttatgggctagaggatgaccagcgtagtatgggctatgatgacctggattatggtatgatgtctgattatggcactgcccgtcggactgggacaccctctgaccctcgtcggcgcctcaggagctatgaagacatgattggtgaggaggtgccatcggatcaatactactgggctcctttggcccagcatgagcgaggaagtttagcaagcttggatagcctgcgcaaaggagggcctccacctcctaattggagacagccagagctgccagaggtgatcgccatgcttggattccgcttggatgctgtcaagtccaatgcagctgcatacctgcaacacttatgctaccgcaatgacaaggtgaagactgacgtgcggaagctcaagggcatcccagtactggtgggattgttagaccatcccaaaaaggaagtgcaccttggagcctgtggagctctcaagaatatctcttttggacgtgaccaggataacaagattgccataaaaaactgtgatggtgtgcctgcccttgtgcgattgcttcgaaaggctcgtgatatggaccttactgaagttattaccggaaccctgtggaatctttcatcccatgactcaatcaaaatggagattgtggaccatgcactgcatgccttgacagatgaagtgatcattcctcattctggttgggagcgggaacctaatgaagactgtaagccacgccacattgagtgggaatcggtgctcaccaacacagctggctgccttaggaatgtaagctcagagaggagtgaagctcgccggaaacttcgggaatgtgatggtttagttgatgccctcattttcattgttcaggctgagattgggcagaaggattcagacagcaagcttgtagagaactgtgtttgccttcttcggaacttatcatatcaagttcaccgggagatcccacaggcagagcgttaccaagaggcagctcccaatgttgccaacaatactgggccacatgctgccagttgctttggggccaagaagggcaaagggaaaaaacctatagaggatccagcaaacgatacagtggatttccctaaaagaacgagtccagctcgaggctatgagctcttatttcagccagaggtggttcggatatacatctcacttcttaaggagagcaagactcctgccatcctagaagcctcagctggagctatccagaacttgtgtgctgggcgctggacgtatggtcgatacatccgctctgctctgcgtcaagagaaggctctttctgccatagctgacctcctgactaatgaacatgaacgggtggtgaaagctgcatctggagcactgagaaacctggctgtggatgctcgcaacaaagaattaattggtaaacatgctattcctaacttggtaaagaatctgccaggaggacagcagaactcctcttggaatttctctgaggacactgtcatctctattttgaacactatcaacgaggttatcgctgagaacttggaggctgccaaaaagcttcgagagacacagggtattgagaagctggtgttgatcaacaaatcagggaaccgctcagaaaaagaagttcgagcagcagcacttgtattacagacaatctggggatataaggaactgcggaagccactggaaaaagaaggatggaagaaatcagactttcaggtgaatctaaacaatgcttcccgaagccagagcagtcattcatatgatgatagtactctccctctcattgaccggaaccaaaaatcagataagaaacctgatcgggaagaaattcagatgagcaatatgggatcaaacacaaaatcactagataacaactattccacaccaaatgagagaggagaccacaatagaacactggatcgatcgggggatctaggcgacatggagccattgaagggaacaacacccttgatgcaggacgaggggcaggaatctctggaggaagagttggatgtgttggttttggatgatgaggggggccaagtgtcttacccctccatgcagaagatttagcaccactatctccgttccatctgggcttatatgtacttttattttttggtggtgaaattgactgatgattttcctttttcttcgctggactattgtgccaactgccaggctgcctcctgcccttacagccctaagtggctgccttctttccatcaactcccaacttcttcctgtgaagtttaattgtctcaacgcctccccctcccccattccctccatttttctcccaagaaacctgactcaattatttgcatattttgagaaactgctgcagattagttctttttgccagttttccctggaactcctggccttttgtggaggggagggatggagagaataggaatcttcactagaagccgtgggaagaattggaagttacatgctgtatatgcaatgtccagcagtctgataaactgacgattcttaatcaagatttttttcctgatggggaagggacttttattttcttttagagaggggaaagtgtgagctcttcccttattcctaatggctatttttgaagcaaagaaggccagcaacattggcacatgccacctggcaaaggacccttgagtaagtgaaggtctcctaaaactgggattaagaaaccttgctctcctcatctccaaggcagggaccatcaagaacctacagactccatctcttctgcaagcctcatgccaaccctgggctattgctgctgccccttaaacacaggctgtccttaacccacctctcctgccctgtgatatgtctgctgagttggcctggccatttccaagaggctgtagaaaggggagaatgtcaaggaagacttttggtagagaaggagcagaaagatgtgtttttgggaagaagaagacctctaggaggagctagtaggaatgtacatgaagcaattagtctgaaactggcttccccactcccccgtttctccttttcctatccttataggcctgtcccttgcctctgccctggattggttggcaaactaaaggacttgatgtacataactcctgtcccttttcccttacaaggtggggattgcccctggctttgcctcttctttgtgcctttggcctggggtgcatctcctcccgcccttccatgtgcctttctttgcctctgcagtctcatttctcataattttgcaaattatattttgttgctttcttacctactattggccctaaatagcagaaagaagagaagtgaccgagagaacctcagattcttcattgaggattggtatagccatgatttcagtcatagcaagcttttgctcaacagcatatgggtgggattttgcaaaaatcctattctgatgaatctcaaagtaaggctggtaagagaagtgagtggtgtgactcttactccttaggtgcccagaatttaccatcatctctgaaggagttacagggaagtggtctccccaattctcccctccctccagtattgccccctctcactttagcatatattaattagcaggttgggctagagaaatcagctgctatgcgggttgattattattattatttctaatccttttccttatttgccttctactccccttaatctaatctaaaagctctgttccatgcaactggagttccttatccctctcttccccttcccttatatattgaggctatggggtaggagaaaagtgcacaacccaccaccccctttactcgtgcattaaaatttcttatttacccttttcccccttcccatttcttcccactttcatctaccttttctggcaaaaaggagccttttgctctctgtgaccctaagagcacactgcacagggaaaattgccccatccagacctggctccactcttgatctctcttgtcctcttctgctcttttcctggtgctcttttttctcggtggggtgtgggtaatagaacagccgtgggcttttggggacctttaacttttttttctctcttttgtttataaaaaacactaaacattcaattccagagaaccaaaaatcccaccttcccaccgaacactactaaggggcttgtgttctgctccataccttttctcttttctttctgtcttgttaatgcttttaaaaacaaatgagttttttatataaataaagtttttaaagtgtgtatgtggggggtctgtgtcatttcttcacttcaagctgttatttcttccctgctttgcatctttgttacttccttatgtatcagtgtcctttccagagcaaccagaaggaggttataccaggatttattttgagctcagccccaactctttatcaagcaacattcttgttaactatatgtgaaacattttttcttctgaagattcttaaaaattgaatgtggctgaagttgaacatgggagcttattgctaatttagagataggaaactgaagcataaagaattaatgacttactttaattactggaattcttctgcaacatttgacaaaactaaccttgaataaggcccactgtaatacgtagctctcttaaatataacacttaggactagaagattagaaactaccaatcccaactacgtaataggaaaatgtaggatcaaaaggcccatgtatataagtactgaccactgggccataatgttgcttctcaggctatatgcagtcctttagtcagaagtcaataggcctatttattaatattttacagaccatattacctggattaccagggactatctttgctgcagagatcaagggttaagatctatgggaagatacttatttttctgaggtccttatgtcctgtcatataattaaagactcaagagaatttatgtgaaatgctttctgtatgcccaaatctttagattaaaattatatagctgctcct

SEQ ID NO: 4822 - DNA, 6232 bp, Homo sapiens
  source 1..6232: mol_type = unassigned DNA
ctgccagatcagtttgtcaccacccaggctcccttgcctttggctgggtgcaacttccattttaggtgttggatctgagggggaaaaaaaagagagagggagagagagagaaagaagagcaggaaagatcccgaaaggaggaagaggtggcgaaaaatcaactgccctgctggatttgtctttctcagcaccttggcgaagccttgggtttctttcttaaaggactgatttttagaactccacatttgaggtgtgtggcttttgaagaaaatgtatgtactgacgggaaaaggaggataagcaagtcgaatttttgtcttacgctctctccttcctgcttcctccttgctgtggtggctgggatgcttcttccatgattttttgaatctagactgggctgttctctgtgttaaaccaatcagttgcgaccttctcttaacagtgtgaagtgagggggtctctctccctccttctccttcctctgtgattcaccttcctttttaccctgccctgcggcggctccgccccttaccttcatggacgactcagaggtggagtcgaccgccagcatcttggcctctgtgaaggaacaagaggcccagtttgagaagctgacccgggcgctggaggaggaacggcgccacgtctcggcgcagctggaacgcgtccgggtctcaccacaagatgccaacccactcatggccaacggcacactcacccgccggcatcagaacggccggtttgtgggcgatgctgaccttgaaagacagaaattttcagatttgaaactcaacggaccccaggatcacagtcaccttctatatagcaccatccccaggatgcaggagccggggcagattgtggagacctacacggaggaggatcctgagggagccatgtctgtagtctctgtggagacctcagatgatgggaccactcggcgcacagagaccacggtcaagaaagtagtgaagactgtgacaacacggacagtacagccagtcgctatgggaccagacgggttgcctgtggatgcttcatcagtttctaacaactatatccagactttgggtcgtgatttccgcaagaatggcaatgggggacctggtccctatgtggggcaagctggcactgctacccttcctaggaacttccactaccctcctgatggttatagtcgccactatgaagatggttatccaggtggcagtgataactatggcagtctgtcccgggtgacccgcattgaggagcggtataggcccagcatggaaggctaccgggcacctagtagacaggatgtgtatgggccccaaccccaggttcgggtaggtgggagcagcgtggatctgcatcgctttcatccagagccttatgggctagaggatgaccagcgtagtatgggctatgatgacctggattatggtatgatgtctgattatggcactgcccgtcggactgggacaccctctgaccctcgtcggcgcctcaggagctatgaagacatgattggtgaggaggtgccatcggatcaatactactgggctcctttggcccagcatgagcgaggaagtttagcaagcttggatagcctgcgcaaaggagggcctccacctcctaattggagacagccagagctgccagaggtgatcgccatgcttggattccgcttggatgctgtcaagtccaatgcagctgcatacctgcaacacttatgctaccgcaatgacaaggtgaagactgacgtgcggaagctcaagggcatcccagtactggtgggattgttagaccatcccaaaaaggaagtgcaccttggagcctgtggagctctcaagaatatctcttttggacgtgaccaggataacaagattgccataaaaaactgtgatggtgtgcctgcccttgtgcgattgcttcgaaaggctcgtgatatggaccttactgaagttattaccggaaccctgtggaatctttcatcccatgactcaatcaaaatggagattgtggaccatgcactgcatgccttgacagatgaagtgatcattcctcattctggttgggagcgggaacctaatgaagactgtaagccacgccacattgagtgggaatcggtgctcaccaacacagctggctgccttaggaatgtaagctcagagaggagtgaagctcgccggaaacttcgggaatgtgatggtttagttgatgccctcattttcattgttcaggctgagattgggcagaaggattcagacagcaagcttgtagagaactgtgtttgccttcttcggaacttatcatatcaagttcaccgggagatcccacaggcagagcgttaccaagaggcagctcccaatgttgccaacaatactgggccacatgctgccagttgctttggggccaagaagggcaaagggaaaaaacctatagaggatccagcaaacgatacagtggatttccctaaaagaacgagtccagctcgaggctatgagctcttatttcagccagaggtggttcggatatacatctcacttcttaaggagagcaagactcctgccatcctagaagcctcagctggagctatccagaacttgtgtgctgggcgctggacgtatggtcgatacatccgctctgctctgcgtcaagagaaggctctttctgccatagctgacctcctgactaatgaacatgaacgggtggtgaaagctgcatctggagcactgagaaacctggctgtggatgctcgcaacaaagaattaattggtaaacatgctattcctaacttggtaaagaatctgccaggaggacagcagaactcctcttggaatttctctgaggacactgtcatctctattttgaacactatcaacgaggttatcgctgagaacttggaggctgccaaaaagcttcgagagacacagggtattgagaagctggtgttgatcaacaaatcagggaaccgctcagaaaaagaagttcgagcagcagcacttgtattacagacaatctggggatataaggaactgcggaagccactggaaaaagaaggatggaagaaatcagactttcaggtgaatctaaacaatgcttcccgaagccagagcagtcattcatatgatgatagtactctccctctcattgaccggaaccaaaaatcagataacaactattccacaccaaatgagagaggagaccacaatagaacactggatcgatcgggggatctaggcgacatggagccattgaagggaacaacacccttgatgcaggacgaggggcaggaatctctggaggaagagttggatgtgttggttttggatgatgaggggggccaagtgtcttacccctccatgcagaagatttagcaccactatctccgttccatctgggcttatatgtacttttattttttggtggtgaaattgactgatgattttcctttttcttcgctggactattgtgccaactgccaggctgcctcctgcccttacagccctaagtggctgccttctttccatcaactcccaacttcttcctgtgaagtttaattgtctcaacgcctccccctcccccattccctccatttttctcccaagaaacctgactcaattatttgcatattttgagaaactgctgcagattagttctttttgccagttttccctggaactcctggccttttgtggaggggagggatggagagaataggaatcttcactagaagccgtgggaagaattggaagttacatgctgtatatgcaatgtccagcagtctgataaactgacgattcttaatcaagatttttttcctgatggggaagggacttttattttcttttagagaggggaaagtgtgagctcttcccttattcctaatggctatttttgaagcaaagaaggccagcaacattggcacatgccacctggcaaaggacccttgagtaagtgaaggtctcctaaaactgggattaagaaaccttgctctcctcatctccaaggcagggaccatcaagaacctacagactccatctcttctgcaagcctcatgccaaccctgggctattgctgctgccccttaaacacaggctgtccttaacccacctctcctgccctgtgatatgtctgctgagttggcctggccatttccaagaggctgtagaaaggggagaatgtcaaggaagacttttggtagagaaggagcagaaagatgtgtttttgggaagaagaagacctctaggaggagctagtaggaatgtacatgaagcaattagtctgaaactggcttccccactcccccgtttctccttttcctatccttataggcctgtcccttgcctctgccctggattggttggcaaactaaaggacttgatgtacataactcctgtcccttttcccttacaaggtggggattgcccctggctttgcctcttctttgtgcctttggcctggggtgcatctcctcccgcccttccatgtgcctttctttgcctctgcagtctcatttctcataattttgcaaattatattttgttgctttcttacctactattggccctaaatagcagaaagaagagaagtgaccgagagaacctcagattcttcattgaggattggtatagccatgatttcagtcatagcaagcttttgctcaacagcatatgggtgggattttgcaaaaatcctattctgatgaatctcaaagtaaggctggtaagagaagtgagtggtgtgactcttactccttaggtgcccagaatttaccatcatctctgaaggagttacagggaagtggtctccccaattctcccctccctccagtattgccccctctcactttagcatatattaattagcaggttgggctagagaaatcagctgctatgcgggttgattattattattatttctaatccttttccttatttgccttctactccccttaatctaatctaaaagctctgttccatgcaactggagttccttatccctctcttccccttcccttatatattgaggctatggggtaggagaaaagtgcacaacccaccaccccctttactcgtgcattaaaatttcttatttacccttttcccccttcccatttcttcccactttcatctaccttttctggcaaaaaggagccttttgctctctgtgaccctaagagcacactgcacagggaaaattgccccatccagacctggctccactcttgatctctcttgtcctcttctgctcttttcctggtgctcttttttctcggtggggtgtgggtaatagaacagccgtgggcttttggggacctttaacttttttttctctcttttgtttataaaaaacactaaacattcaattccagagaaccaaaaatcccaccttcccaccgaacactactaaggggcttgtgttctgctccataccttttctcttttctttctgtcttgttaatgcttttaaaaacaaatgagttttttatataaataaagtttttaaagtgtgtatgtggggggtctgtgtcatttcttcacttcaagctgttatttcttccctgctttgcatctttgttacttccttatgtatcagtgtcctttccagagcaaccagaaggaggttataccaggatttattttgagctcagccccaactctttatcaagcaacattcttgttaactatatgtgaaacattttttcttctgaagattcttaaaaattgaatgtggctgaagttgaacatgggagcttattgctaatttagagataggaaactgaagcataaagaattaatgacttactttaattactggaattcttctgcaacatttgacaaaactaaccttgaataaggcccactgtaatacgtagctctcttaaatataacacttaggactagaagattagaaactaccaatcccaactacgtaataggaaaatgtaggatcaaaaggcccatgtatataagtactgaccactgggccataatgttgcttctcaggctatatgcagtcctttagtcagaagtcaataggcctatttattaatattttacagaccatattacctggattaccagggactatctttgctgcagagatcaagggttaagatctatgggaagatacttatttttctgaggtccttatgtcctgtcatataattaaagactcaagagaatttatgtgaaatgctttctgtatgcccaaatctttagattaaaattatatagctgctcct

SEQ ID NO: 4823 - DNA, 6244 bp, Homo sapiens
  source 1..6244: mol_type = unassigned DNA
ggctgacatcacttaggaaagcgaagggggtagggctgccagatcagtttgtcaccacccaggctcccttgcctttggctgggtgcaacttccattttaggtgttggatctgagggggaaaaaaaagagagagggagagagagagaaagaagagcaggaaagatcccgaaaggaggaagaggtggcgaaaaatcaactgccctgctggatttgtctttctcagcaccttggcgaagccttgggtttctttcttaaaggactgatttttagaactccacatttgaggtgtgtggcttttgaagaaaatgtatgtactgacgggaaaaggaggataagcaagtcgaatttttgtcttacgctctctccttcctgcttcctccttgctgtggtggctgggatgcttcttccatgattttttgaatctagactgggctgttctctgtgttaaaccaatcagttgcgaccttctcttaacagtgtgaagtgagggggtctctctccctccttctccttcctctgtgattcaccttcctttttaccctgccctgcggcggctccgccccttaccttcatggacgactcagaggtggagtcgaccgccagcatcttggcctctgtgaaggaacaagaggcccagtttgagaagctgacccgggcgctggaggaggaacggcgccacgtctcggcgcagctggaacgcgtccgggtctcaccacaagatgccaacccactcatggccaacggcacactcacccgccggcatcagaacggccggtttgtgggcgatgctgaccttgaaagacagaaattttcagatttgaaactcaacggaccccaggatcacagtcaccttctatatagcaccatccccaggatgcaggagccggggcagattgtggagacctacacggaggaggatcctgagggagccatgtctgtagtctctgtggagacctcagatgatgggaccactcggcgcacagagaccacggtcaagaaagtagtgaagactgtgacaacacggacagtacagccagtcgctatgggaccagacgggttgcctgtggatgcttcatcagtttctaacaactatatccagactttgggtcgtgatttccgcaagaatggcaatgggggacctggtccctatgtggggcaagctggcactgctacccttcctaggaacttccactaccctcctgatggttatagtcgccactatgaagatggttatccaggtggcagtgataactatggcagtctgtcccgggtgacccgcattgaggagcggtataggcccagcatggaaggctaccgggcacctagtagacaggatgtgtatgggccccaaccccaggttcgggtaggtgggagcagcgtggatctgcatcgctttcatccagagccttatgggctagaggatgaccagcgtagtatgggctatgatgacctggattatggtatgatgtctgattatggcactgcccgtcggactgggacaccctctgaccctcgtcggcgcctcaggagctatgaagacatgattggtgaggaggtgccatcggatcaatactactgggctcctttggcccagcatgagcgaggaagtttagcaagcttggatagcctgcgcaaaggagggcctccacctcctaattggagacagccagagctgccagaggtgatcgccatgcttggattccgcttggatgctgtcaagtccaatgcagctgcatacctgcaacacttatgctaccgcaatgacaaggtgaagactgacgtgcggaagctcaagggcatcccagtactggtgggattgttagaccatcccaaaaaggaagtgcaccttggagcctgtggagctctcaagaatatctcttttggacgtgaccaggataacaagattgccataaaaaactgtgatggtgtgcctgcccttgtgcgattgcttcgaaaggctcgtgatatggaccttactgaagttattaccggaaccctgtggaatctttcatcccatgactcaatcaaaatggagattgtggaccatgcactgcatgccttgacagatgaagtgatcattcctcattctggttgggagcgggaacctaatgaagactgtaagccacgccacattgagtgggaatcggtgctcaccaacacagctggctgccttaggaatgtaagctcagagaggagtgaagctcgccggaaacttcgggaatgtgatggtttagttgatgccctcattttcattgttcaggctgagattgggcagaaggattcagacagcaagcttgtagagaactgtgtttgccttcttcggaacttatcatatcaagttcaccgggagatcccacaggcagagcgttaccaagaggcagctcccaatgttgccaacaatactgggccacatgctgccagttgctttggggccaagaagggcaaagggaaaaaacctatagaggatccagcaaacgatacagtggatttccctaaaagaacgagtccagctcgaggctatgagctcttatttcagccagaggtggttcggatatacatctcacttcttaaggagagcaagactcctgccatcctagaagcctcagctggagctatccagaacttgtgtgctgggcgctggacgtatggtcgatacatccgctctgctctgcgtcaagagaaggctctttctgccatagctgacctcctgactaatgaacatgaacgggtggtgaaagctgcatctggagcactgagaaacctggctgtggatgctcgcaacaaagaattaattggtaaacatgctattcctaacttggtaaagaatctgccaggaggacagcagaactcctcttggaatttctctgaggacactgtcatctctattttgaacactatcaacgaggttatcgctgagaacttggaggctgccaaaaagcttcgagagacacagggtattgagaagctggtgttgatcaacaaatcagggaaccgctcagaaaaagaagttcgagcagcagcacttgtattacagacaatctggggatataaggaactgcggaagccactggaaaaagaaggatggaagaaatcagactttcaggtgaatctaaacaatgcttcccgaagccagagcagtcattcatatgatgatagtactctccctctcattgaccggaaccaaaaatcagataagaaacctgatcgggaagaaattcagatgagcaatatgggatcaaacacaaaatcactagataacaactattccacaccaaatgagagaggagaccacaatagaacactggatcgatcgggggatctaggcgacatggagccattgaagggaacaacacccttgatgcagaagatttagcaccactatctccgttccatctgggcttatatgtacttttattttttggtggtgaaattgactgatgattttcctttttcttcgctggactattgtgccaactgccaggctgcctcctgcccttacagccctaagtggctgccttctttccatcaactcccaacttcttcctgtgaagtttaattgtctcaacgcctccccctcccccattccctccatttttctcccaagaaacctgactcaattatttgcatattttgagaaactgctgcagattagttctttttgccagttttccctggaactcctggccttttgtggaggggagggatggagagaataggaatcttcactagaagccgtgggaagaattggaagttacatgctgtatatgcaatgtccagcagtctgataaactgacgattcttaatcaagatttttttcctgatggggaagggacttttattttcttttagagaggggaaagtgtgagctcttcccttattcctaatggctatttttgaagcaaagaaggccagcaacattggcacatgccacctggcaaaggacccttgagtaagtgaaggtctcctaaaactgggattaagaaaccttgctctcctcatctccaaggcagggaccatcaagaacctacagactccatctcttctgcaagcctcatgccaaccctgggctattgctgctgccccttaaacacaggctgtccttaacccacctctcctgccctgtgatatgtctgctgagttggcctggccatttccaagaggctgtagaaaggggagaatgtcaaggaagacttttggtagagaaggagcagaaagatgtgtttttgggaagaagaagacctctaggaggagctagtaggaatgtacatgaagcaattagtctgaaactggcttccccactcccccgtttctccttttcctatccttataggcctgtcccttgcctctgccctggattggttggcaaactaaaggacttgatgtacataactcctgtcccttttcccttacaaggtggggattgcccctggctttgcctcttctttgtgcctttggcctggggtgcatctcctcccgcccttccatgtgcctttctttgcctctgcagtctcatttctcataattttgcaaattatattttgttgctttcttacctactattggccctaaatagcagaaagaagagaagtgaccgagagaacctcagattcttcattgaggattggtatagccatgatttcagtcatagcaagcttttgctcaacagcatatgggtgggattttgcaaaaatcctattctgatgaatctcaaagtaaggctggtaagagaagtgagtggtgtgactcttactccttaggtgcccagaatttaccatcatctctgaaggagttacagggaagtggtctccccaattctcccctccctccagtattgccccctctcactttagcatatattaattagcaggttgggctagagaaatcagctgctatgcgggttgattattattattatttctaatccttttccttatttgccttctactccccttaatctaatctaaaagctctgttccatgcaactggagttccttatccctctcttccccttcccttatatattgaggctatggggtaggagaaaagtgcacaacccaccaccccctttactcgtgcattaaaatttcttatttacccttttcccccttcccatttcttcccactttcatctaccttttctggcaaaaaggagccttttgctctctgtgaccctaagagcacactgcacagggaaaattgccccatccagacctggctccactcttgatctctcttgtcctcttctgctcttttcctggtgctcttttttctcggtggggtgtgggtaatagaacagccgtgggcttttggggacctttaacttttttttctctcttttgtttataaaaaacactaaacattcaattccagagaaccaaaaatcccaccttcccaccgaacactactaaggggcttgtgttctgctccataccttttctcttttctttctgtcttgttaatgcttttaaaaacaaatgagttttttatataaataaagtttttaaagtgtgtatgtggggggtctgtgtcatttcttcacttcaagctgttatttcttccctgctttgcatctttgttacttccttatgtatcagtgtcctttccagagcaaccagaaggaggttataccaggatttattttgagctcagccccaactctttatcaagcaacattcttgttaactatatgtgaaacattttttcttctgaagattcttaaaaattgaatgtggctgaagttgaacatgggagcttattgctaatttagagataggaaactgaagcataaagaattaatgacttactttaattactggaattcttctgcaacatttgacaaaactaaccttgaataaggcccactgtaatacgtagctctcttaaatataacacttaggactagaagattagaaactaccaatcccaactacgtaataggaaaatgtaggatcaaaaggcccatgtatataagtactgaccactgggccataatgttgcttctcaggctatatgcagtcctttagtcagaagtcaataggcctatttattaatattttacagaccatattacctggattaccagggactatctttgctgcagagatcaagggttaagatctatgggaagatacttatttttctgaggtccttatgtcctgtcatataattaaagactcaagagaatttatgtgaaatgctttctgtatgcccaaatctttagattaaaattatatagctgctcctg

SEQ ID NO: 4824 - DNA, 5188 bp, Homo sapiens
  source 1..5188: mol_type = unassigned DNA
gagggctgagggaagatggctgggctgcaagaggcagggggatgggcccgtcagggaggaattcttgtgaaagccgtcgtctgcctcagcacttgatgaaaacacaccgaaaaagaggctctctccttcctgcttcctccttgctgtggtggctgggatgcttcttccatgattttttgaatctagactgggctgttctctgtgttaaaccaatcagttgcgaccttctcttaacagtgtgaagtgagggggtctctctccctccttctccttcctctgtgattcaccttcctttttaccctgccctgcggcggctccgccccttaccttcatggacgactcagaggtggagtcgaccgccagcatcttggcctctgtgaaggaacaagaggcccagtttgagaagctgacccgggcgctggaggaggaacggcgccacgtctcggcgcagctggaacgcgtccgggtctcaccacaagatgccaacccactcatggccaacggcacactcacccgccggcatcagaacggccggtttgtgggcgatgctgaccttgaaagacagaaattttcagatttgaaactcaacggaccccaggatcacagtcaccttctatatagcaccatccccaggatgcaggagccggggcagattgtggagacctacacggaggaggatcctgagggagccatgtctgtagtctctgtggagacctcagatgatgggaccactcggcgcacagagaccacggtcaagaaagtagtgaagactgtgacaacacggacagtacagccagtcgctatgggaccagacgggttgcctgtggatgcttcatcagtttctaacaactatatccagactttgggtcgtgatttccgcaagaatggcaatgggggacctggtccctatgtggggcaagctggcactgctacccttcctaggaacttccactaccctcctgatggttatagtcgccactatgaagatggttatccaggtggcagtgataactatggcagtctgtcccgggtgacccgcattgaggagcggtataggcccagcatggaaggctaccgggcacctagtagacaggatgtgtatgggccccaaccccaggttcgggtaggtgggagcagcgtggatctgcatcgctttcatccagagccttatgggctagaggatgaccagcgtagtatgggctatgatgacctggattatggtatgatgtctgattatggcactgcccgtcggactgggacaccctctgaccctcgtcggcgcctcaggagctatgaagacatgattggtgaggaggtgccatcggatcaatactactgggctcctttggcccagcatgagcgaggaagtttagcaagcttggatagcctgcgcaaaggagggcctccacctcctaattggagacagccagagctgccagaggtgatcgccatgcttggattccgcttggatgctgtcaagtccaatgcagctgcatacctgcaacacttatgctaccgcaatgacaaggtgaagactgacgtgcggaagctcaagggcatcccagtactggtgggattgttagaccatcccaaaaaggaagtgcaccttggagcctgtggagctctcaagaatatctcttttggacgtgaccaggataacaagattgccataaaaaactgtgatggtgtgcctgcccttgtgcgattgcttcgaaaggctcgtgatatggaccttactgaagttattaccggaaccctgtggaatctttcatcccatgactcaatcaaaatggagattgtggaccatgcactgcatgccttgacagatgaagtgatcattcctcattctggttgggagcgggaacctaatgaagactgtaagccacgccacattgagtgggaatcggtgctcaccaacacagctggctgccttaggaatgtaagctcagagaggagtgaagctcgccggaaacttcgggaatgtgatggtttagttgatgccctcattttcattgttcaggctgagattgggcagaaggattcagacagcaagcttgtagagaactgtgtttgccttcttcggaacttatcatatcaagttcaccgggagatcccacaggcagagcgttaccaagaggcagctcccaatgttgccaacaatactgggccacatgctgccagttgctttggggccaagaagggcaaagatgagtggttctccagagggaaaaaacctatagaggatccagcaaacgatacagtggatttccctaaaagaacgagtccagctcgaggctatgagctcttatttcagccagaggtggttcggatatacatctcacttcttaaggagagcaagactcctgccatcctagaagcctcagctggagctatccagaacttgtgtgctgggcgctggacgtatggtcgatacatccgctctgctctgcgtcaagagaaggctctttctgccatagctgacctcctgactaatgaacatgaacgggtggtgaaagctgcatctggagcactgagaaacctggctgtggatgctcgcaacaaagaattaattggtaaacatgctattcctaacttggtaaagaatctgccaggaggacagcagaactcctcttggaatttctctgaggacactgtcatctctattttgaacactatcaacgaggttatcgctgagaacttggaggctgccaaaaagcttcgagagacacagggtattgagaagctggtgttgatcaacaaatcagggaaccgctcagaaaaagaagttcgagcagcagcacttgtattacagacaatctggggatataaggaactgcggaagccactggaaaaagaaggatggaagaaatcagactttcaggtgaatctaaacaatgcttcccgaagccagagcagtcattcatatgatgatagtactctccctctcattgaccggaaccaaaaatcagataagaaacctgatcgggaagaaattcagatgagcaatatgggatcaaacacaaaatcactagataacaactattccacaccaaatgagagaggagaccacaatagaacactggatcgatcgggggatctaggcgacatggagccattgaagggaacaacacccttgatgaagatttagcaccactatctccgttccatctgggcttatatgtacttttattttttggtggtgaaattgactgatgattttcctttttcttcgctggactattgtgccaactgccaggctgcctcctgcccttacagccctaagtggctgccttctttccatcaactcccaacttcttcctgtgaagtttaattgtctcaacgcctccccctcccccattccctccatttttctcccaagaaacctgactcaattatttgcatattttgagaaactgctgcagattagttctttttgccagttttccctggaactcctggccttttgtggaggggagggatggagagaataggaatcttcactagaagccgtgggaagaattggaagttacatgctgtatatgcaatgtccagcagtctgataaactgacgattcttaatcaagatttttttcctgatggggaagggacttttattttcttttagagaggggaaagtgtgagctcttcccttattcctaatggctatttttgaagcaaagaaggccagcaacattggcacatgccacctggcaaaggacccttgagtaagtgaaggtctcctaaaactgggattaagaaaccttgctctcctcatctccaaggcagggaccatcaagaacctacagactccatctcttctgcaagcctcatgccaaccctgggctattgctgctgccccttaaacacaggctgtccttaacccacctctcctgccctgtgatatgtctgctgagttggcctggccatttccaagaggctgtagaaaggggagaatgtcaaggaagacttttggtagagaaggagcagaaagatgtgtttttgggaagaagaagacctctaggaggagctagtaggaatgtacatgaagcaattagtctgaaactggcttccccactcccccgtttctccttttcctatccttataggcctgtcccttgcctctgccctggattggttggcaaactaaaggacttgatgtacataactcctgtcccttttcccttacaaggtggggattgcccctggctttgcctcttctttgtgcctttggcctggggtgcatctcctcccgcccttccatgtgcctttctttgcctctgcagtctcatttctcataattttgcaaattatattttgttgctttcttacctactattggccctaaatagcagaaagaagagaagtgaccgagagaacctcagattcttcattgaggattggtatagccatgatttcagtcatagcaagcttttgctcaacagcatatgggtgggattttgcaaaaatcctattctgatgaatctcaaagtaaggctggtaagagaagtgagtggtgtgactcttactccttaggtgcccagaatttaccatcatctctgaaggagttacagggaagtggtctccccaattctcccctccctccagtattgccccctctcactttagcatatattaattagcaggttgggctagagaaatcagctgctatgcgggttgattattattattatttctaatccttttccttatttgccttctactccccttaatctaatctaaaagctctgttccatgcaactggagttccttatccctctcttccccttcccatttcttcccactttcatctaccttttctggcaaaaaggagccttttgctctctgtgaccctaagagcacactgcacagggaaaattgccccatccagacctggctccactcttgatctctcttgtcctcttctgctcttttcctggtgctcttttttctcggtggggtgtgggtaatagaacagccgtgggcttttggggacctttaacttttttttctctcttttgtttataaaaaacactaaacattcaattccagagaaccaaaaatcccaccttcccaccgaacactactaaggggcttgtgttctgctccataccttttctcttttctttctgtcttgttaatgcttttaaaaacaaatgagttttttatataaataaagtttttaaagtgtg

SEQ ID NO: 4825 - DNA, 6313 bp, Homo sapiens
  source 1..6313: mol_type = unassigned DNA
ctgccagatcagtttgtcaccacccaggctcccttgcctttggctgggtgcaacttccattttaggtgttggatctgagggggaaaaaaaagagagagggagagagagagaaagaagagcaggaaagatcccgaaaggaggaagaggtggcgaaaaatcaactgccctgctggatttgtctttctcagcaccttggcgaagccttgggtttctttcttaaaggactgatttttagaactccacatttgaggtgtgtggcttttgaagaaaatgtatgtactgacgggaaaaggaggataagcaagtcgaatttttgtcttacgctctctccttcctgcttcctccttgctgtggtggctgggatgcttcttccatgattttttgaatctagactgggctgttctctgtgttaaaccaatcagttgcgaccttctcttaacagtgtgaagtgagggggtctctctccctccttctccttcctctgtgattcaccttcctttttaccctgccctgcggcggctccgccccttaccttcatggacgactcagaggtggagtcgaccgccagcatcttggcctctgtgaaggaacaagaggcccagtttgagaagctgacccgggcgctggaggaggaacggcgccacgtctcggcgcagctggaacgcgtccgggtctcaccacaagatgccaacccactcatggccaacggcacactcacccgccggcatcagaacggccggtttgtgggcgatgctgaccttgaaagacagaaattttcagatttgaaactcaacggaccccaggatcacagtcaccttctatatagcaccatccccaggatgcaggagccggggcagattgtggagacctacacggaggaggatcctgagggagccatgtctgtagtctctgtggagacctcagatgatgggaccactcggcgcacagagaccacggtcaagaaagtagtgaagactgtgacaacacggacagtacagccagtcgctatgggaccagacgggttgcctgtggatgcttcatcagtttctaacaactatatccagactttgggtcgtgatttccgcaagaatggcaatgggggacctggtccctatgtggggcaagctggcactgctacccttcctaggaacttccactaccctcctgatggttatagtcgccactatgaagatggttatccaggtggcagtgataactatggcagtctgtcccgggtgacccgcattgaggagcggtataggcccagcatggaaggctaccgggcacctagtagacaggatgtgtatgggccccaaccccaggttcgggtaggtgggagcagcgtggatctgcatcgctttcatccagagccttatgggctagaggatgaccagcgtagtatgggctatgatgacctggattatggtatgatgtctgattatggcactgcccgtcggactgggacaccctctgaccctcgtcggcgcctcaggagctatgaagacatgattggtgaggaggtgccatcggatcaatactactgggctcctttggcccagcatgagcgaggaagtttagcaagcttggatagcctgcgcaaaggagggcctccacctcctaattggagacagccagagctgccagaggtgatcgccatgcttggattccgcttggatgctgtcaagtccaatgcagctgcatacctgcaacacttatgctaccgcaatgacaaggtgaagactgacgtgcggaagctcaagggcatcccagtactggtgggattgttagaccatcccaaaaaggaagtgcaccttggagcctgtggagctctcaagaatatctcttttggacgtgaccaggataacaagattgccataaaaaactgtgatggtgtgcctgcccttgtgcgattgcttcgaaaggctcgtgatatggaccttactgaagttattaccggaaccctgtggaatctttcatcccatgactcaatcaaaatggagattgtggaccatgcactgcatgccttgacagatgaagtgatcattcctcattctggttgggagcgggaacctaatgaagactgtaagccacgccacattgagtgggaatcggtgctcaccaacacagctggctgccttaggaatgtaagctcagagaggagtgaagctcgccggaaacttcgggaatgtgatggtttagttgatgccctcattttcattgttcaggctgagattgggcagaaggattcagacagcaagcttgtagagaactgtgtttgccttcttcggaacttatcatatcaagttcaccgggagatcccacaggcagagcgttaccaagaggcagctcccaatgttgccaacaatactgggccacatgctgccagttgctttggggccaagaagggcaaagatgagtggttctccagagggaaaaaacctatagaggatccagcaaacgatacagtggatttccctaaaagaacgagtccagctcgaggctatgagctcttatttcagccagaggtggttcggatatacatctcacttcttaaggagagcaagactcctgccatcctagaagcctcagctggagctatccagaacttgtgtgctgggcgctggacgtatggtcgatacatccgctctgctctgcgtcaagagaaggctctttctgccatagctgacctcctgactaatgaacatgaacgggtggtgaaagctgcatctggagcactgagaaacctggctgtggatgctcgcaacaaagaattaattggtaaacatgctattcctaacttggtaaagaatctgccaggaggacagcagaactcctcttggaatttctctgaggacactgtcatctctattttgaacactatcaacgaggttatcgctgagaacttggaggctgccaaaaagcttcgagagacacagggtattgagaagctggtgttgatcaacaaatcagggaaccgctcagaaaaagaagttcgagcagcagcacttgtattacagacaatctggggatataaggaactgcggaagccactggaaaaagaaggatggaagaaatcagactttcaggtgaatctaaacaatgcttcccgaagccagagcagtcattcatatgatgatagtactctccctctcattgaccggaaccaaaaatcagataagaaacctgatcgggaagaaattcagatgagcaatatgggatcaaacacaaaatcactagataacaactattccacaccaaatgagagaggagaccacaatagaacactggatcgatcgggggatctaggcgacatggagccattgaagggaacaacacccttgatgcaggacgaggggcaggaatctctggaggaagagttggatgtgttggttttggatgatgaggggggccaagtgtcttacccctccatgcagaagatttagcaccactatctccgttccatctgggcttatatgtacttttattttttggtggtgaaattgactgatgattttcctttttcttcgctggactattgtgccaactgccaggctgcctcctgcccttacagccctaagtggctgccttctttccatcaactcccaacttcttcctgtgaagtttaattgtctcaacgcctccccctcccccattccctccatttttctcccaagaaacctgactcaattatttgcatattttgagaaactgctgcagattagttctttttgccagttttccctggaactcctggccttttgtggaggggagggatggagagaataggaatcttcactagaagccgtgggaagaattggaagttacatgctgtatatgcaatgtccagcagtctgataaactgacgattcttaatcaagatttttttcctgatggggaagggacttttattttcttttagagaggggaaagtgtgagctcttcccttattcctaatggctatttttgaagcaaagaaggccagcaacattggcacatgccacctggcaaaggacccttgagtaagtgaaggtctcctaaaactgggattaagaaaccttgctctcctcatctccaaggcagggaccatcaagaacctacagactccatctcttctgcaagcctcatgccaaccctgggctattgctgctgccccttaaacacaggctgtccttaacccacctctcctgccctgtgatatgtctgctgagttggcctggccatttccaagaggctgtagaaaggggagaatgtcaaggaagacttttggtagagaaggagcagaaagatgtgtttttgggaagaagaagacctctaggaggagctagtaggaatgtacatgaagcaattagtctgaaactggcttccccactcccccgtttctccttttcctatccttataggcctgtcccttgcctctgccctggattggttggcaaactaaaggacttgatgtacataactcctgtcccttttcccttacaaggtggggattgcccctggctttgcctcttctttgtgcctttggcctggggtgcatctcctcccgcccttccatgtgcctttctttgcctctgcagtctcatttctcataattttgcaaattatattttgttgctttcttacctactattggccctaaatagcagaaagaagagaagtgaccgagagaacctcagattcttcattgaggattggtatagccatgatttcagtcatagcaagcttttgctcaacagcatatgggtgggattttgcaaaaatcctattctgatgaatctcaaagtaaggctggtaagagaagtgagtggtgtgactcttactccttaggtgcccagaatttaccatcatctctgaaggagttacagggaagtggtctccccaattctcccctccctccagtattgccccctctcactttagcatatattaattagcaggttgggctagagaaatcagctgctatgcgggttgattattattattatttctaatccttttccttatttgccttctactccccttaatctaatctaaaagctctgttccatgcaactggagttccttatccctctcttccccttcccttatatattgaggctatggggtaggagaaaagtgcacaacccaccaccccctttactcgtgcattaaaatttcttatttacccttttcccccttcccatttcttcccactttcatctaccttttctggcaaaaaggagccttttgctctctgtgaccctaagagcacactgcacagggaaaattgccccatccagacctggctccactcttgatctctcttgtcctcttctgctcttttcctggtgctcttttttctcggtggggtgtgggtaatagaacagccgtgggcttttggggacctttaacttttttttctctcttttgtttataaaaaacactaaacattcaattccagagaaccaaaaatcccaccttcccaccgaacactactaaggggcttgtgttctgctccataccttttctcttttctttctgtcttgttaatgcttttaaaaacaaatgagttttttatataaataaagtttttaaagtgtgtatgtggggggtctgtgtcatttcttcacttcaagctgttatttcttccctgctttgcatctttgttacttccttatgtatcagtgtcctttccagagcaaccagaaggaggttataccaggatttattttgagctcagccccaactctttatcaagcaacattcttgttaactatatgtgaaacattttttcttctgaagattcttaaaaattgaatgtggctgaagttgaacatgggagcttattgctaatttagagataggaaactgaagcataaagaattaatgacttactttaattactggaattcttctgcaacatttgacaaaactaaccttgaataaggcccactgtaatacgtagctctcttaaatataacacttaggactagaagattagaaactaccaatcccaactacgtaataggaaaatgtaggatcaaaaggcccatgtatataagtactgaccactgggccataatgttgcttctcaggctatatgcagtcctttagtcagaagtcaataggcctatttattaatattttacagaccatattacctggattaccagggactatctttgctgcagagatcaagggttaagatctatgggaagatacttatttttctgaggtccttatgtcctgtcatataattaaagactcaagagaatttatgtgaaatgctttctgtatgcccaaatctttagattaaaattatatagctgctcct

SEQ ID NO: 4826 - DNA, 5832 bp, Homo sapiens
  source 1..5832: mol_type = unassigned DNA
ctgccagatcagtttgtcaccacccaggctcccttgcctttggctgggtgcaacttccattttaggtgttggatctgagggggaaaaaaaagagagagggagagagagagaaagaagagcaggaaagatcccgaaaggaggaagaggtggcgaaaaatcaactgccctgctggatttgtctttctcagcaccttggcgaagccttgggtttctttcttaaaggactgatttttagaactccacatttgagaacggccggtttgtgggcgatgctgaccttgaaagacagaaattttcagatttgaaactcaacggaccccaggatcacagtcaccttctatatagcaccatccccaggatgcaggagccggggcagattgtggagacctacacggaggaggatcctgagggagccatgtctgtagtctctgtggagacctcagatgatgggaccactcggcgcacagagaccacggtcaagaaagtagtgaagactgtgacaacacggacagtacagccagtcgctatgggaccagacgggttgcctgtggatgcttcatcagtttctaacaactatatccagactttgggtcgtgatttccgcaagaatggcaatgggggacctggtccctatgtggggcaagctggcactgctacccttcctaggaacttccactaccctcctgatggttatagtcgccactatgaagatggttatccaggtggcagtgataactatggcagtctgtcccgggtgacccgcattgaggagcggtataggcccagcatggaaggctaccgggcacctagtagacaggatgtgtatgggccccaaccccaggttcgggtaggtgggagcagcgtggatctgcatcgctttcatccagagccttatgggctagaggatgaccagcgtagtatgggctatgatgacctggattatggtatgatgtctgattatggcactgcccgtcggactgggacaccctctgaccctcgtcggcgcctcaggagctatgaagacatgattggtgaggaggtgccatcggatcaatactactgggctcctttggcccagcatgagcgaggaagtttagcaagcttggatagcctgcgcaaaggagggcctccacctcctaattggagacagccagagctgccagaggtgatcgccatgcttggattccgcttggatgctgtcaagtccaatgcagctgcatacctgcaacacttatgctaccgcaatgacaaggtgaagactgacgtgcggaagctcaagggcatcccagtactggtgggattgttagaccatcccaaaaaggaagtgcaccttggagcctgtggagctctcaagaatatctcttttggacgtgaccaggataacaagattgccataaaaaactgtgatggtgtgcctgcccttgtgcgattgcttcgaaaggctcgtgatatggaccttactgaagttattaccggaaccctgtggaatctttcatcccatgactcaatcaaaatggagattgtggaccatgcactgcatgccttgacagatgaagtgatcattcctcattctggttgggagcgggaacctaatgaagactgtaagccacgccacattgagtgggaatcggtgctcaccaacacagctggctgccttaggaatgtaagctcagagaggagtgaagctcgccggaaacttcgggaatgtgatggtttagttgatgccctcattttcattgttcaggctgagattgggcagaaggattcagacagcaagcttgtagagaactgtgtttgccttcttcggaacttatcatatcaagttcaccgggagatcccacaggcagagcgttaccaagaggcagctcccaatgttgccaacaatactgggccacatgctgccagttgctttggggccaagaagggcaaagatgagtggttctccagagggaaaaaacctatagaggatccagcaaacgatacagtggatttccctaaaagaacgagtccagctcgaggctatgagctcttatttcagccagaggtggttcggatatacatctcacttcttaaggagagcaagactcctgccatcctagaagcctcagctggagctatccagaacttgtgtgctgggcgctggacgtatggtcgatacatccgctctgctctgcgtcaagagaaggctctttctgccatagctgacctcctgactaatgaacatgaacgggtggtgaaagctgcatctggagcactgagaaacctggctgtggatgctcgcaacaaagaattaattggtaaacatgctattcctaacttggtaaagaatctgccaggaggacagcagaactcctcttggaatttctctgaggacactgtcatctctattttgaacactatcaacgaggttatcgctgagaacttggaggctgccaaaaagcttcgagagacacagggtattgagaagctggtgttgatcaacaaatcagggaaccgctcagaaaaagaagttcgagcagcagcacttgtattacagacaatctggggatataaggaactgcggaagccactggaaaaagaaggatggaagaaatcagactttcaggtgaatctaaacaatgcttcccgaagccagagcagtcattcatatgatgatagtactctccctctcattgaccggaaccaaaaatcagataagaaacctgatcgggaagaaattcagatgagcaatatgggatcaaacacaaaatcactagataacaactattccacaccaaatgagagaggagaccacaatagaacactggatcgatcgggggatctaggcgacatggagccattgaagggaacaacacccttgatgcaggacgaggggcaggaatctctggaggaagagttggatgtgttggttttggatgatgaggggggccaagtgtcttacccctccatgcagaagatttagcaccactatctccgttccatctgggcttatatgtacttttattttttggtggtgaaattgactgatgattttcctttttcttcgctggactattgtgccaactgccaggctgcctcctgcccttacagccctaagtggctgccttctttccatcaactcccaacttcttcctgtgaagtttaattgtctcaacgcctccccctcccccattccctccatttttctcccaagaaacctgactcaattatttgcatattttgagaaactgctgcagattagttctttttgccagttttccctggaactcctggccttttgtggaggggagggatggagagaataggaatcttcactagaagccgtgggaagaattggaagttacatgctgtatatgcaatgtccagcagtctgataaactgacgattcttaatcaagatttttttcctgatggggaagggacttttattttcttttagagaggggaaagtgtgagctcttcccttattcctaatggctatttttgaagcaaagaaggccagcaacattggcacatgccacctggcaaaggacccttgagtaagtgaaggtctcctaaaactgggattaagaaaccttgctctcctcatctccaaggcagggaccatcaagaacctacagactccatctcttctgcaagcctcatgccaaccctgggctattgctgctgccccttaaacacaggctgtccttaacccacctctcctgccctgtgatatgtctgctgagttggcctggccatttccaagaggctgtagaaaggggagaatgtcaaggaagacttttggtagagaaggagcagaaagatgtgtttttgggaagaagaagacctctaggaggagctagtaggaatgtacatgaagcaattagtctgaaactggcttccccactcccccgtttctccttttcctatccttataggcctgtcccttgcctctgccctggattggttggcaaactaaaggacttgatgtacataactcctgtcccttttcccttacaaggtggggattgcccctggctttgcctcttctttgtgcctttggcctggggtgcatctcctcccgcccttccatgtgcctttctttgcctctgcagtctcatttctcataattttgcaaattatattttgttgctttcttacctactattggccctaaatagcagaaagaagagaagtgaccgagagaacctcagattcttcattgaggattggtatagccatgatttcagtcatagcaagcttttgctcaacagcatatgggtgggattttgcaaaaatcctattctgatgaatctcaaagtaaggctggtaagagaagtgagtggtgtgactcttactccttaggtgcccagaatttaccatcatctctgaaggagttacagggaagtggtctccccaattctcccctccctccagtattgccccctctcactttagcatatattaattagcaggttgggctagagaaatcagctgctatgcgggttgattattattattatttctaatccttttccttatttgccttctactccccttaatctaatctaaaagctctgttccatgcaactggagttccttatccctctcttccccttcccttatatattgaggctatggggtaggagaaaagtgcacaacccaccaccccctttactcgtgcattaaaatttcttatttacccttttcccccttcccatttcttcccactttcatctaccttttctggcaaaaaggagccttttgctctctgtgaccctaagagcacactgcacagggaaaattgccccatccagacctggctccactcttgatctctcttgtcctcttctgctcttttcctggtgctcttttttctcggtggggtgtgggtaatagaacagccgtgggcttttggggacctttaacttttttttctctcttttgtttataaaaaacactaaacattcaattccagagaaccaaaaatcccaccttcccaccgaacactactaaggggcttgtgttctgctccataccttttctcttttctttctgtcttgttaatgcttttaaaaacaaatgagttttttatataaataaagtttttaaagtgtgtatgtggggggtctgtgtcatttcttcacttcaagctgttatttcttccctgctttgcatctttgttacttccttatgtatcagtgtcctttccagagcaaccagaaggaggttataccaggatttattttgagctcagccccaactctttatcaagcaacattcttgttaactatatgtgaaacattttttcttctgaagattcttaaaaattgaatgtggctgaagttgaacatgggagcttattgctaatttagagataggaaactgaagcataaagaattaatgacttactttaattactggaattcttctgcaacatttgacaaaactaaccttgaataaggcccactgtaatacgtagctctcttaaatataacacttaggactagaagattagaaactaccaatcccaactacgtaataggaaaatgtaggatcaaaaggcccatgtatataagtactgaccactgggccataatgttgcttctcaggctatatgcagtcctttagtcagaagtcaataggcctatttattaatattttacagaccatattacctggattaccagggactatctttgctgcagagatcaagggttaagatctatgggaagatacttatttttctgaggtccttatgtcctgtcatataattaaagactcaagagaatttatgtgaaatgctttctgtatgcccaaatctttagattaaaattatatagctgctcct

SEQ ID NO: 4827 - DNA, 5800 bp, Homo sapiens
  source 1..5800: mol_type = unassigned DNA
ctgccagatcagtttgtcaccacccaggctcccttgcctttggctgggtgcaacttccattttaggtgttggatctgagggggaaaaaaaagagagagggagagagagagaaagaagagcaggaaagatcccgaaaggaggaagaggtggcgaaaaatcaactgccctgctggatttgtctttctcagcaccttggcgaagccttgggtttctttcttaaaggactgatttttagaactccacatttgaggtgtgtggcttttgaagaaaatgtatgtactgacgggaaaaggaggataagcaagtcgaatttttgtcttacgaacggccggtttgtgggcgatgctgaccttgaaagacagaaattttcagatttgaaactcaacggaccccaggatcacagtcaccttctatatagcaccatccccaggatgcaggagccggggcagattgtggagacctacacggaggaggatcctgagggagccatgtctgtagtctctgtggagacctcagatgatgggaccactcggcgcacagagaccacggtcaagaaagtagtgaagactgtgacaacacggacagtacagccagtcgctatgggaccagacgggttgcctgtggatgcttcatcagtttctaacaactatatccagactttgggtcgtgatttccgcaagaatggcaatgggggacctggtccctatgtggggcaagctggcactgctacccttcctaggaacttccactaccctcctgatggttatagtcgccactatgaagatggttatccaggtggcagtgataactatggcagtctgtcccgggtgacccgcattgaggagcggtataggcccagcatggaaggctaccgggcacctagtagacaggatgtgtatgggccccaaccccaggttcgggtaggtgggagcagcgtggatctgcatcgctttcatccagagccttatgggctagaggatgaccagcgtagtatgggctatgatgacctggattatggtatgatgtctgattatggcactgcccgtcggactgggacaccctctgaccctcgtcggcgcctcaggagctatgaagacatgattggtgaggaggtgccatcggatcaatactactgggctcctttggcccagcatgagcgaggaagtttagcaagcttggatagcctgcgcaaaggagggcctccacctcctaattggagacagccagagctgccagaggtgatcgccatgcttggattccgcttggatgctgtcaagtccaatgcagctgcatacctgcaacacttatgctaccgcaatgacaaggtgaagactgacgtgcggaagctcaagggcatcccagtactggtgggattgttagaccatcccaaaaaggaagtgcaccttggagcctgtggagctctcaagaatatctcttttggacgtgaccaggataacaagattgccataaaaaactgtgatggtgtgcctgcccttgtgcgattgcttcgaaaggctcgtgatatggaccttactgaagttattaccggaaccctgtggaatctttcatcccatgactcaatcaaaatggagattgtggaccatgcactgcatgccttgacagatgaagtgatcattcctcattctggttgggagcgggaacctaatgaagactgtaagccacgccacattgagtgggaatcggtgctcaccaacacagctggctgccttaggaatgtaagctcagagaggagtgaagctcgccggaaacttcgggaatgtgatggtttagttgatgccctcattttcattgttcaggctgagattgggcagaaggattcagacagcaagcttgtagagaactgtgtttgccttcttcggaacttatcatatcaagttcaccgggagatcccacaggcagagcgttaccaagaggcagctcccaatgttgccaacaatactgggccacatgctgccagttgctttggggccaagaagggcaaagggaaaaaacctatagaggatccagcaaacgatacagtggatttccctaaaagaacgagtccagctcgaggctatgagctcttatttcagccagaggtggttcggatatacatctcacttcttaaggagagcaagactcctgccatcctagaagcctcagctggagctatccagaacttgtgtgctgggcgctggacgtatggtcgatacatccgctctgctctgcgtcaagagaaggctctttctgccatagctgacctcctgactaatgaacatgaacgggtggtgaaagctgcatctggagcactgagaaacctggctgtggatgctcgcaacaaagaattaattggtaaacatgctattcctaacttggtaaagaatctgccaggaggacagcagaactcctcttggaatttctctgaggacactgtcatctctattttgaacactatcaacgaggttatcgctgagaacttggaggctgccaaaaagcttcgagagacacagggtattgagaagctggtgttgatcaacaaatcagggaaccgctcagaaaaagaagttcgagcagcagcacttgtattacagacaatctggggatataaggaactgcggaagccactggaaaaagaaggatggaagaaatcagactttcaggtgaatctaaacaatgcttcccgaagccagagcagtcattcatatgatgatagtactctccctctcattgaccggaaccaaaaatcagataagaaacctgatcgggaagaaattcagatgagcaatatgggatcaaacacaaaatcactagataacaactattccacaccaaatgagagaggagaccacaatagaacactggatcgatcgggggatctaggcgacatggagccattgaagggaacaacacccttgatgcagaagatttagcaccactatctccgttccatctgggcttatatgtacttttattttttggtggtgaaattgactgatgattttcctttttcttcgctggactattgtgccaactgccaggctgcctcctgcccttacagccctaagtggctgccttctttccatcaactcccaacttcttcctgtgaagtttaattgtctcaacgcctccccctcccccattccctccatttttctcccaagaaacctgactcaattatttgcatattttgagaaactgctgcagattagttctttttgccagttttccctggaactcctggccttttgtggaggggagggatggagagaataggaatcttcactagaagccgtgggaagaattggaagttacatgctgtatatgcaatgtccagcagtctgataaactgacgattcttaatcaagatttttttcctgatggggaagggacttttattttcttttagagaggggaaagtgtgagctcttcccttattcctaatggctatttttgaagcaaagaaggccagcaacattggcacatgccacctggcaaaggacccttgagtaagtgaaggtctcctaaaactgggattaagaaaccttgctctcctcatctccaaggcagggaccatcaagaacctacagactccatctcttctgcaagcctcatgccaaccctgggctattgctgctgccccttaaacacaggctgtccttaacccacctctcctgccctgtgatatgtctgctgagttggcctggccatttccaagaggctgtagaaaggggagaatgtcaaggaagacttttggtagagaaggagcagaaagatgtgtttttgggaagaagaagacctctaggaggagctagtaggaatgtacatgaagcaattagtctgaaactggcttccccactcccccgtttctccttttcctatccttataggcctgtcccttgcctctgccctggattggttggcaaactaaaggacttgatgtacataactcctgtcccttttcccttacaaggtggggattgcccctggctttgcctcttctttgtgcctttggcctggggtgcatctcctcccgcccttccatgtgcctttctttgcctctgcagtctcatttctcataattttgcaaattatattttgttgctttcttacctactattggccctaaatagcagaaagaagagaagtgaccgagagaacctcagattcttcattgaggattggtatagccatgatttcagtcatagcaagcttttgctcaacagcatatgggtgggattttgcaaaaatcctattctgatgaatctcaaagtaaggctggtaagagaagtgagtggtgtgactcttactccttaggtgcccagaatttaccatcatctctgaaggagttacagggaagtggtctccccaattctcccctccctccagtattgccccctctcactttagcatatattaattagcaggttgggctagagaaatcagctgctatgcgggttgattattattattatttctaatccttttccttatttgccttctactccccttaatctaatctaaaagctctgttccatgcaactggagttccttatccctctcttccccttcccttatatattgaggctatggggtaggagaaaagtgcacaacccaccaccccctttactcgtgcattaaaatttcttatttacccttttcccccttcccatttcttcccactttcatctaccttttctggcaaaaaggagccttttgctctctgtgaccctaagagcacactgcacagggaaaattgccccatccagacctggctccactcttgatctctcttgtcctcttctgctcttttcctggtgctcttttttctcggtggggtgtgggtaatagaacagccgtgggcttttggggacctttaacttttttttctctcttttgtttataaaaaacactaaacattcaattccagagaaccaaaaatcccaccttcccaccgaacactactaaggggcttgtgttctgctccataccttttctcttttctttctgtcttgttaatgcttttaaaaacaaatgagttttttatataaataaagtttttaaagtgtgtatgtggggggtctgtgtcatttcttcacttcaagctgttatttcttccctgctttgcatctttgttacttccttatgtatcagtgtcctttccagagcaaccagaaggaggttataccaggatttattttgagctcagccccaactctttatcaagcaacattcttgttaactatatgtgaaacattttttcttctgaagattcttaaaaattgaatgtggctgaagttgaacatgggagcttattgctaatttagagataggaaactgaagcataaagaattaatgacttactttaattactggaattcttctgcaacatttgacaaaactaaccttgaataaggcccactgtaatacgtagctctcttaaatataacacttaggactagaagattagaaactaccaatcccaactacgtaataggaaaatgtaggatcaaaaggcccatgtatataagtactgaccactgggccataatgttgcttctcaggctatatgcagtcctttagtcagaagtcaataggcctatttattaatattttacagaccatattacctggattaccagggactatctttgctgcagagatcaagggttaagatctatgggaagatacttatttttctgaggtccttatgtcctgtcatataattaaagactcaagagaatttatgtgaaatgctttctgtatgcccaaatctttagattaaaattatatagctgctcct

SEQ ID NO: 4828 - DNA, 6016 bp, Homo sapiens
  source 1..6016: mol_type = unassigned DNA
ctgccagatcagtttgtcaccacccaggctcccttgcctttggctgggtgcaacttccattttaggtgttggatctgagggggaaaaaaaagagagagggagagagagagaaagaagagcaggaaagatcccgaaaggaggaagaggtggcgaaaaatcaactgccctgctggatttgtctttctcagcaccttggcgaagccttgggtttctttcttaaaggactgatttttagaactccacatttgagtgtgaagtgagggggtctctctccctccttctccttcctctgtgattcaccttcctttttaccctgccctgcggcggctccgccccttaccttcatggacgactcagaggtggagtcgaccgccagcatcttggcctctgtgaaggaacaagaggcccagtttgagaagctgacccgggcgctggaggaggaacggcgccacgtctcggcgcagctggaacgcgtccgggtctcaccacaagatgccaacccactcatggccaacggcacactcacccgccggcatcagaacggccggtttgtgggcgatgctgaccttgaaagacagaaattttcagatttgaaactcaacggaccccaggatcacagtcaccttctatatagcaccatccccaggatgcaggagccggggcagattgtggagacctacacggaggaggatcctgagggagccatgtctgtagtctctgtggagacctcagatgatgggaccactcggcgcacagagaccacggtcaagaaagtagtgaagactgtgacaacacggacagtacagccagtcgctatgggaccagacgggttgcctgtggatgcttcatcagtttctaacaactatatccagactttgggtcgtgatttccgcaagaatggcaatgggggacctggtccctatgtggggcaagctggcactgctacccttcctaggaacttccactaccctcctgatggttatagtcgccactatgaagatggttatccaggtggcagtgataactatggcagtctgtcccgggtgacccgcattgaggagcggtataggcccagcatggaaggctaccgggcacctagtagacaggatgtgtatgggccccaaccccaggttcgggtaggtgggagcagcgtggatctgcatcgctttcatccagagccttatgggctagaggatgaccagcgtagtatgggctatgatgacctggattatggtatgatgtctgattatggcactgcccgtcggactgggacaccctctgaccctcgtcggcgcctcaggagctatgaagacatgattggtgaggaggtgccatcggatcaatactactgggctcctttggcccagcatgagcgaggaagtttagcaagcttggatagcctgcgcaaaggagggcctccacctcctaattggagacagccagagctgccagaggtgatcgccatgcttggattccgcttggatgctgtcaagtccaatgcagctgcatacctgcaacacttatgctaccgcaatgacaaggtgaagactgacgtgcggaagctcaagggcatcccagtactggtgggattgttagaccatcccaaaaaggaagtgcaccttggagcctgtggagctctcaagaatatctcttttggacgtgaccaggataacaagattgccataaaaaactgtgatggtgtgcctgcccttgtgcgattgcttcgaaaggctcgtgatatggaccttactgaagttattaccggaaccctgtggaatctttcatcccatgactcaatcaaaatggagattgtggaccatgcactgcatgccttgacagatgaagtgatcattcctcattctggttgggagcgggaacctaatgaagactgtaagccacgccacattgagtgggaatcggtgctcaccaacacagctggctgccttaggaatgtaagctcagagaggagtgaagctcgccggaaacttcgggaatgtgatggtttagttgatgccctcattttcattgttcaggctgagattgggcagaaggattcagacagcaagcttgtagagaactgtgtttgccttcttcggaacttatcatatcaagttcaccgggagatcccacaggcagagcgttaccaagaggcagctcccaatgttgccaacaatactgggccacatgctgccagttgctttggggccaagaagggcaaagggaaaaaacctatagaggatccagcaaacgatacagtggatttccctaaaagaacgagtccagctcgaggctatgagctcttatttcagccagaggtggttcggatatacatctcacttcttaaggagagcaagactcctgccatcctagaagcctcagctggagctatccagaacttgtgtgctgggcgctggacgtatggtcgatacatccgctctgctctgcgtcaagagaaggctctttctgccatagctgacctcctgactaatgaacatgaacgggtggtgaaagctgcatctggagcactgagaaacctggctgtggatgctcgcaacaaagaattaattggtaaacatgctattcctaacttggtaaagaatctgccaggaggacagcagaactcctcttggaatttctctgaggacactgtcatctctattttgaacactatcaacgaggttatcgctgagaacttggaggctgccaaaaagcttcgagagacacagggtattgagaagctggtgttgatcaacaaatcagggaaccgctcagaaaaagaagttcgagcagcagcacttgtattacagacaatctggggatataaggaactgcggaagccactggaaaaagaaggatggaagaaatcagactttcaggtgaatctaaacaatgcttcccgaagccagagcagtcattcatatgatgatagtactctccctctcattgaccggaaccaaaaatcagataagaaacctgatcgggaagaaattcagatgagcaatatgggatcaaacacaaaatcactagataacaactattccacaccaaatgagagaggagaccacaatagaacactggatcgatcgggggatctaggcgacatggagccattgaagggaacaacacccttgatgcagaagatttagcaccactatctccgttccatctgggcttatatgtacttttattttttggtggtgaaattgactgatgattttcctttttcttcgctggactattgtgccaactgccaggctgcctcctgcccttacagccctaagtggctgccttctttccatcaactcccaacttcttcctgtgaagtttaattgtctcaacgcctccccctcccccattccctccatttttctcccaagaaacctgactcaattatttgcatattttgagaaactgctgcagattagttctttttgccagttttccctggaactcctggccttttgtggaggggagggatggagagaataggaatcttcactagaagccgtgggaagaattggaagttacatgctgtatatgcaatgtccagcagtctgataaactgacgattcttaatcaagatttttttcctgatggggaagggacttttattttcttttagagaggggaaagtgtgagctcttcccttattcctaatggctatttttgaagcaaagaaggccagcaacattggcacatgccacctggcaaaggacccttgagtaagtgaaggtctcctaaaactgggattaagaaaccttgctctcctcatctccaaggcagggaccatcaagaacctacagactccatctcttctgcaagcctcatgccaaccctgggctattgctgctgccccttaaacacaggctgtccttaacccacctctcctgccctgtgatatgtctgctgagttggcctggccatttccaagaggctgtagaaaggggagaatgtcaaggaagacttttggtagagaaggagcagaaagatgtgtttttgggaagaagaagacctctaggaggagctagtaggaatgtacatgaagcaattagtctgaaactggcttccccactcccccgtttctccttttcctatccttataggcctgtcccttgcctctgccctggattggttggcaaactaaaggacttgatgtacataactcctgtcccttttcccttacaaggtggggattgcccctggctttgcctcttctttgtgcctttggcctggggtgcatctcctcccgcccttccatgtgcctttctttgcctctgcagtctcatttctcataattttgcaaattatattttgttgctttcttacctactattggccctaaatagcagaaagaagagaagtgaccgagagaacctcagattcttcattgaggattggtatagccatgatttcagtcatagcaagcttttgctcaacagcatatgggtgggattttgcaaaaatcctattctgatgaatctcaaagtaaggctggtaagagaagtgagtggtgtgactcttactccttaggtgcccagaatttaccatcatctctgaaggagttacagggaagtggtctccccaattctcccctccctccagtattgccccctctcactttagcatatattaattagcaggttgggctagagaaatcagctgctatgcgggttgattattattattatttctaatccttttccttatttgccttctactccccttaatctaatctaaaagctctgttccatgcaactggagttccttatccctctcttccccttcccttatatattgaggctatggggtaggagaaaagtgcacaacccaccaccccctttactcgtgcattaaaatttcttatttacccttttcccccttcccatttcttcccactttcatctaccttttctggcaaaaaggagccttttgctctctgtgaccctaagagcacactgcacagggaaaattgccccatccagacctggctccactcttgatctctcttgtcctcttctgctcttttcctggtgctcttttttctcggtggggtgtgggtaatagaacagccgtgggcttttggggacctttaacttttttttctctcttttgtttataaaaaacactaaacattcaattccagagaaccaaaaatcccaccttcccaccgaacactactaaggggcttgtgttctgctccataccttttctcttttctttctgtcttgttaatgcttttaaaaacaaatgagttttttatataaataaagtttttaaagtgtgtatgtggggggtctgtgtcatttcttcacttcaagctgttatttcttccctgctttgcatctttgttacttccttatgtatcagtgtcctttccagagcaaccagaaggaggttataccaggatttattttgagctcagccccaactctttatcaagcaacattcttgttaactatatgtgaaacattttttcttctgaagattcttaaaaattgaatgtggctgaagttgaacatgggagcttattgctaatttagagataggaaactgaagcataaagaattaatgacttactttaattactggaattcttctgcaacatttgacaaaactaaccttgaataaggcccactgtaatacgtagctctcttaaatataacacttaggactagaagattagaaactaccaatcccaactacgtaataggaaaatgtaggatcaaaaggcccatgtatataagtactgaccactgggccataatgttgcttctcaggctatatgcagtcctttagtcagaagtcaataggcctatttattaatattttacagaccatattacctggattaccagggactatctttgctgcagagatcaagggttaagatctatgggaagatacttatttttctgaggtccttatgtcctgtcatataattaaagactcaagagaatttatgtgaaatgctttctgtatgcccaaatctttagattaaaattatatagctgctcct

SEQ ID NO: 4829 - DNA, 505 bp, Homo sapiens
  source 1..505: mol_type = unassigned DNA
agtggtggtgatttgggtctagctttaaatagtgggctttgtgtagctgaagtgagcatcctagttaacctagtgtccaggactatttccacgaactaagggttgttttgactggtgtgtagtacagagcctttggggtgataagatggaagatttgtcttttacctcacctccactggttctttcaggaattataagggatgcagataagtaaatcttttattttttaaattttttgttttgctcattgtcttggttttggggtaaaaaatgatgatagctctctccttcctgcttcctccttgctgtggtggctgggatgcttcttccatgattttttgaatctagactgggctgttctctgtgttaaaccaatcagttgcgaccttctcttaacagtgtgaagtgagggggtctctctccctccttctccttcctctgtgattcaccttcctttttaccctgccctgcggcggctccgccccttaccttcatggacgactca

SEQ ID NO: 4830 - DNA, 6553 bp, Homo sapiens
  source 1..6553: mol_type = unassigned DNA
agaacaggaggagcgctttgggcgggaggctaagtctcgagggacttgagggctgagggaagatggctgggctgcaagaggcagggggatgggcccgtcagggaggaattcttgtgaaagccgtcgtctgcctcagcacttgatgaaaacacaccgaaaaagagggtagggatgctgtagtagagcaggcgccaaggcggttaagggtcatgtccgtcttccctttgaagaggcagtagatgcccttggctctgcctggagcgctccatgtttcgtgatggaagtctctggatggctctgctctctccttcctgcttcctccttgctgtggtggctgggatgcttcttccatgattttttgaatctagactgggctgttctctgtgttaaaccaatcagttgcgaccttctcttaacagtgtgaagtgagggggtctctctccctccttctccttcctctgtgattcaccttcctttttaccctgccctgcggcggctccgccccttaccttcatggacgactcagaggtggagtcgaccgccagcatcttggcctctgtgaaggaacaagaggcccagtttgagaagctgacccgggcgctggaggaggaacggcgccacgtctcggcgcagctggaacgcgtccgggtctcaccacaagatgccaacccactcatggccaacggcacactcacccgccggcatcagaacggccggtttgtgggcgatgctgaccttgaaagacagaaattttcagatttgaaactcaacggaccccaggatcacagtcaccttctatatagcaccatccccaggatgcaggagccggggcagattgtggagacctacacggaggaggatcctgagggagccatgtctgtagtctctgtggagacctcagatgatgggaccactcggcgcacagagaccacggtcaagaaagtagtgaagactgtgacaacacggacagtacagccagtcgctatgggaccagacgggttgcctgtggatgcttcatcagtttctaacaactatatccagactttgggtcgtgatttccgcaagaatggcaatgggggacctggtccctatgtggggcaagctggcactgctacccttcctaggaacttccactaccctcctgatggttatagtcgccactatgaagatggttatccaggtggcagtgataactatggcagtctgtcccgggtgacccgcattgaggagcggtataggcccagcatggaaggctaccgggcacctagtagacaggatgtgtatgggccccaaccccaggttcgggtaggtgggagcagcgtggatctgcatcgctttcatccagagccttatgggctagaggatgaccagcgtagtatgggctatgatgacctggattatggtatgatgtctgattatggcactgcccgtcggactgggacaccctctgaccctcgtcggcgcctcaggagctatgaagacatgattggtgaggaggtgccatcggatcaatactactgggctcctttggcccagcatgagcgaggaagtttagcaagcttggatagcctgcgcaaaggagggcctccacctcctaattggagacagccagagctgccagaggtgatcgccatgcttggattccgcttggatgctgtcaagtccaatgcagctgcatacctgcaacacttatgctaccgcaatgacaaggtgaagactgacgtgcggaagctcaagggcatcccagtactggtgggattgttagaccatcccaaaaaggaagtgcaccttggagcctgtggagctctcaagaatatctcttttggacgtgaccaggataacaagattgccataaaaaactgtgatggtgtgcctgcccttgtgcgattgcttcgaaaggctcgtgatatggaccttactgaagttattaccggaaccctgtggaatctttcatcccatgactcaatcaaaatggagattgtggaccatgcactgcatgccttgacagatgaagtgatcattcctcattctggttgggagcgggaacctaatgaagactgtaagccacgccacattgagtgggaatcggtgctcaccaacacagctggctgccttaggaatgtaagctcagagaggagtgaagctcgccggaaacttcgggaatgtgatggtttagttgatgccctcattttcattgttcaggctgagattgggcagaaggattcagacagcaagcttgtagagaactgtgtttgccttcttcggaacttatcatatcaagttcaccgggagatcccacaggcagagcgttaccaagaggcagctcccaatgttgccaacaatactgggccacatgctgccagttgctttggggccaagaagggcaaagggaaaaaacctatagaggatccagcaaacgatacagtggatttccctaaaagaacgagtccagctcgaggctatgagctcttatttcagccagaggtggttcggatatacatctcacttcttaaggagagcaagactcctgccatcctagaagcctcagctggagctatccagaacttgtgtgctgggcgctggacgtatggtcgatacatccgctctgctctgcgtcaagagaaggctctttctgccatagctgacctcctgactaatgaacatgaacgggtggtgaaagctgcatctggagcactgagaaacctggctgtggatgctcgcaacaaagaattaattggtaaacatgctattcctaacttggtaaagaatctgccaggaggacagcagaactcctcttggaatttctctgaggacactgtcatctctattttgaacactatcaacgaggttatcgctgagaacttggaggctgccaaaaagcttcgagagacacagggtattgagaagctggtgttgatcaacaaatcagggaaccgctcagaaaaagaagttcgagcagcagcacttgtattacagacaatctggggatataaggaactgcggaagccactggaaaaagaaggatggaagaaatcagactttcaggtgaatctaaacaatgcttcccgaagccagagcagtcattcatatgatgatagtactctccctctcattgaccggaaccaaaaatcagataagaaacctgatcgggaagaaattcagatgagcaatatgggatcaaacacaaaatcactagataacaactattccacaccaaatgagagaggagaccacaatagaacactggatcgatcgggggatctaggcgacatggagccattgaagggaacaacacccttgatgcagaagatttagcaccactatctccgttccatctgggcttatatgtacttttattttttggtggtgaaattgactgatgattttcctttttcttcgctggactattgtgccaactgccaggctgcctcctgcccttacagccctaagtggctgccttctttccatcaactcccaacttcttcctgtgaagtttaattgtctcaacgcctccccctcccccattccctccatttttctcccaagaaacctgactcaattatttgcatattttgagaaactgctgcagattagttctttttgccagttttccctggaactcctggccttttgtggaggggagggatggagagaataggaatcttcactagaagccgtgggaagaattggaagttacatgctgtatatgcaatgtccagcagtctgataaactgacgattcttaatcaagatttttttcctgatggggaagggacttttattttcttttagagaggggaaagtgtgagctcttcccttattcctaatggctatttttgaagcaaagaaggccagcaacattggcacatgccacctggcaaaggacccttgagtaagtgaaggtctcctaaaactgggattaagaaaccttgctctcctcatctccaaggcagggaccatcaagaacctacagactccatctcttctgcaagcctcatgccaaccctgggctattgctgctgccccttaaacacaggctgtccttaacccacctctcctgccctgtgatatgtctgctgagttggcctggccatttccaagaggctgtagaaaggggagaatgtcaaggaagacttttggtagagaaggagcagaaagatgtgtttttgggaagaagaagacctctaggaggagctagtaggaatgtacatgaagcaattagtctgaaactggcttccccactcccccgtttctccttttcctatccttataggcctgtcccttgcctctgccctggattggttggcaaactaaaggacttgatgtacataactcctgtcccttttcccttacaaggtggggattgcccctggctttgcctcttctttgtgcctttggcctggggtgcatctcctcccgcccttccatgtgcctttctttgcctctgcagtctcatttctcataattttgcaaattatattttgttgctttcttacctactattggccctaaatagcagaaagaagagaagtgaccgagagaacctcagattcttcattgaggattggtatagccatgatttcagtcatagcaagcttttgctcaacagcatatgggtgggattttgcaaaaatcctattctgatgaatctcaaagtaaggctggtaagagaagtgagtggtgtgactcttactccttaggtgcccagaatttaccatcatctctgaaggagttacagggaagtggtctccccaattctcccctccctccagtattgccccctctcactttagcatatattaattagcaggttgggctagagaaatcagctgctatgcgggttgattattattattatttctaatccttttccttatttgccttctactccccttaatctaatctaaaagctctgttccatgcaactggagttccttatccctctcttccccttcccttatatattgaggctatggggtaggagaaaagtgcacaacccaccaccccctttactcgtgcattaaaatttcttatttacccttttcccccttcccatttcttcccactttcatctaccttttctggcaaaaaggagccttttgctctctgtgaccctaagagcacactgcacagggaaaattgccccatccagacctggctccactcttgatctctcttgtcctcttctgctcttttcctggtgctcttttttctcggtggggtgtgggtaatagaacagccgtgggcttttggggacctttaacttttttttctctcttttgtttataaaaaacactaaacattcaattccagagaaccaaaaatcccaccttcccaccgaacactactaaggggcttgtgttctgctccataccttttctcttttctttctgtcttgttaatgcttttaaaaacaaatgagttttttatataaataaagtttttaaagtgtgtatgtggggggtctgtgtcatttcttcacttcaagctgttatttcttccctgctttgcatctttgttacttccttatgtatcagtgtcctttccagagcaaccagaaggaggttataccaggatttattttgagctcagccccaactctttatcaagcaacattcttgttaactatatgtgaaacattttttcttctgaagattcttaaaaattgaatgtggctgaagttgaacatgggagcttattgctaatttagagataggaaactgaagcataaagaattaatgacttactttaattactggaattcttctgcaacatttgacaaaactaaccttgaataaggcccactgtaatacgtagctctcttaaatataacacttaggactagaagattagaaactaccaatcccaactacgtaataggaaaatgtaggatcaaaaggcccatgtatataagtactgaccactgggccataatgttgcttctcaggctatatgcagtcctttagtcagaagtcaataggcctatttattaatattttacagaccatattacctggattaccagggactatctttgctgcagagatcaagggttaagatctatgggaagatacttatttttctgaggtccttatgtcctgtcatataattaaagactcaagagaatttatgtgaaatgctttctgtatgcccaaatctttagattaaaattatatagctgctcctgatgatggtcctgtcttgttttattgaactaggacttgggtatgaaaactttcatgggctagtgagaccaggaaatcaactagcttttaaagcttgatttgtgtctaacaattgtagtgttagattagaggttgaagtacaaagccaaaaagctattaagagtttactttccaaagagttttgatagccctgcttgagatgatttttatctaaatagaaaagcctggctgcttgtcagcaacactttatttccctgttatgttcttatcctttggcattgagctagatacaaaccctactcttctctcttccttctggattggtccatttgtttatctcattcaataaatatttgccaagcacctcct

SEQ ID NO: 4831 - DNA, 4984 bp, Homo sapiens
  source 1..4984: mol_type = unassigned DNA
ctgccagatcagtttgtcaccacccaggctcccttgcctttggctgggtgcaacttccattttaggtgttggatctgagggggaaaaaaaagagagagggagagagagagaaagaagagcaggaaagatcccgaaaggaggaagaggtggcgaaaaatcaactgccctgctggatttgtctttctcagcaccttggcgaagccttgggtttctttcttaaaggactgatttttagaactccacatttgaggagctatgaagacatgattggtgaggaggtgccatcggatcaatactactgggctcctttggcccagcatgagcgaggaagtttagcaagcttggatagcctgcgcaaaggagggcctccacctcctaattggagacagccagagctgccagaggtgatcgccatgcttggattccgcttggatgctgtcaagtccaatgcagctgcatacctgcaacacttatgctaccgcaatgacaaggtgaagactgacgtgcggaagctcaagggcatcccagtactggtgggattgttagaccatcccaaaaaggaagtgcaccttggagcctgtggagctctcaagaatatctcttttggacgtgaccaggataacaagattgccataaaaaactgtgatggtgtgcctgcccttgtgcgattgcttcgaaaggctcgtgatatggaccttactgaagttattaccggaaccctgtggaatctttcatcccatgactcaatcaaaatggagattgtggaccatgcactgcatgccttgacagatgaagtgatcattcctcattctggttgggagcgggaacctaatgaagactgtaagccacgccacattgagtgggaatcggtgctcaccaacacagctggctgccttaggaatgtaagctcagagaggagtgaagctcgccggaaacttcgggaatgtgatggtttagttgatgccctcattttcattgttcaggctgagattgggcagaaggattcagacagcaagcttgtagagaactgtgtttgccttcttcggaacttatcatatcaagttcaccgggagatcccacaggcagagcgttaccaagaggcagctcccaatgttgccaacaatactgggccacatgctgccagttgctttggggccaagaagggcaaagatgagtggttctccagagggaaaaaacctatagaggatccagcaaacgatacagtggatttccctaaaagaacgagtccagctcgaggctatgagctcttatttcagccagaggtggttcggatatacatctcacttcttaaggagagcaagactcctgccatcctagaagcctcagctggagctatccagaacttgtgtgctgggcgctggacgtatggtcgatacatccgctctgctctgcgtcaagagaaggctctttctgccatagctgacctcctgactaatgaacatgaacgggtggtgaaagctgcatctggagcactgagaaacctggctgtggatgctcgcaacaaagaattaattggtaaacatgctattcctaacttggtaaagaatctgccaggaggacagcagaactcctcttggaatttctctgaggacactgtcatctctattttgaacactatcaacgaggttatcgctgagaacttggaggctgccaaaaagcttcgagagacacagggtattgagaagctggtgttgatcaacaaatcagggaaccgctcagaaaaagaagttcgagcagcagcacttgtattacagacaatctggggatataaggaactgcggaagccactggaaaaagaaggatggaagaaatcagactttcaggtgaatctaaacaatgcttcccgaagccagagcagtcattcatatgatgatagtactctccctctcattgaccggaaccaaaaatcagataagaaacctgatcgggaagaaattcagatgagcaatatgggatcaaacacaaaatcactagataacaactattccacaccaaatgagagaggagaccacaatagaacactggatcgatcgggggatctaggcgacatggagccattgaagggaacaacacccttgatgcagaagatttagcaccactatctccgttccatctgggcttatatgtacttttattttttggtggtgaaattgactgatgattttcctttttcttcgctggactattgtgccaactgccaggctgcctcctgcccttacagccctaagtggctgccttctttccatcaactcccaacttcttcctgtgaagtttaattgtctcaacgcctccccctcccccattccctccatttttctcccaagaaacctgactcaattatttgcatattttgagaaactgctgcagattagttctttttgccagttttccctggaactcctggccttttgtggaggggagggatggagagaataggaatcttcactagaagccgtgggaagaattggaagttacatgctgtatatgcaatgtccagcagtctgataaactgacgattcttaatcaagatttttttcctgatggggaagggacttttattttcttttagagaggggaaagtgtgagctcttcccttattcctaatggctatttttgaagcaaagaaggccagcaacattggcacatgccacctggcaaaggacccttgagtaagtgaaggtctcctaaaactgggattaagaaaccttgctctcctcatctccaaggcagggaccatcaagaacctacagactccatctcttctgcaagcctcatgccaaccctgggctattgctgctgccccttaaacacaggctgtccttaacccacctctcctgccctgtgatatgtctgctgagttggcctggccatttccaagaggctgtagaaaggggagaatgtcaaggaagacttttggtagagaaggagcagaaagatgtgtttttgggaagaagaagacctctaggaggagctagtaggaatgtacatgaagcaattagtctgaaactggcttccccactcccccgtttctccttttcctatccttataggcctgtcccttgcctctgccctggattggttggcaaactaaaggacttgatgtacataactcctgtcccttttcccttacaaggtggggattgcccctggctttgcctcttctttgtgcctttggcctggggtgcatctcctcccgcccttccatgtgcctttctttgcctctgcagtctcatttctcataattttgcaaattatattttgttgctttcttacctactattggccctaaatagcagaaagaagagaagtgaccgagagaacctcagattcttcattgaggattggtatagccatgatttcagtcatagcaagcttttgctcaacagcatatgggtgggattttgcaaaaatcctattctgatgaatctcaaagtaaggctggtaagagaagtgagtggtgtgactcttactccttaggtgcccagaatttaccatcatctctgaaggagttacagggaagtggtctccccaattctcccctccctccagtattgccccctctcactttagcatatattaattagcaggttgggctagagaaatcagctgctatgcgggttgattattattattatttctaatccttttccttatttgccttctactccccttaatctaatctaaaagctctgttccatgcaactggagttccttatccctctcttccccttcccttatatattgaggctatggggtaggagaaaagtgcacaacccaccaccccctttactcgtgcattaaaatttcttatttacccttttcccccttcccatttcttcccactttcatctaccttttctggcaaaaaggagccttttgctctctgtgaccctaagagcacactgcacagggaaaattgccccatccagacctggctccactcttgatctctcttgtcctcttctgctcttttcctggtgctcttttttctcggtggggtgtgggtaatagaacagccgtgggcttttggggacctttaacttttttttctctcttttgtttataaaaaacactaaacattcaattccagagaaccaaaaatcccaccttcccaccgaacactactaaggggcttgtgttctgctccataccttttctcttttctttctgtcttgttaatgcttttaaaaacaaatgagttttttatataaataaagtttttaaagtgtgtatgtggggggtctgtgtcatttcttcacttcaagctgttatttcttccctgctttgcatctttgttacttccttatgtatcagtgtcctttccagagcaaccagaaggaggttataccaggatttattttgagctcagccccaactctttatcaagcaacattcttgttaactatatgtgaaacattttttcttctgaagattcttaaaaattgaatgtggctgaagttgaacatgggagcttattgctaatttagagataggaaactgaagcataaagaattaatgacttactttaattactggaattcttctgcaacatttgacaaaactaaccttgaataaggcccactgtaatacgtagctctcttaaatataacacttaggactagaagattagaaactaccaatcccaactacgtaataggaaaatgtaggatcaaaaggcccatgtatataagtactgaccactgggccataatgttgcttctcaggctatatgcagtcctttagtcagaagtcaataggcctatttattaatattttacagaccatattacctggattaccagggactatctttgctgcagagatcaagggttaagatctatgggaagatacttatttttctgaggtccttatgtcctgtcatataattaaagactcaagagaatttatgtgaaatgctttctgtatgcccaaatctttagattaaaattatatagctgctcct

SEQ ID NO: 4832 - DNA, 5994 bp, Homo sapiens
  source 1..5994: mol_type = unassigned DNA
ctgccagatcagtttgtcaccacccaggctcccttgcctttggctgggtgcaacttccattttaggtgttggatctgagggggaaaaaaaagagagagggagagagagagaaagaagagcaggaaagatcccgaaaggaggaagaggtggcgaaaaatcaactgccctgctggatttgtctttctcagcaccttggcgaagccttgggtttctttcttaaaggactgatttttagaactccacatttgaggtggagtcgaccgccagcatcttggcctctgtgaaggaacaagaggcccagtttgagaagctgacccgggcgctggaggaggaacggcgccacgtctcggcgcagctggaacgcgtccgggtctcaccacaagatgccaacccactcatggccaacggcacactcacccgccggcatcagaacggccggtttgtgggcgatgctgaccttgaaagacagaaattttcagatttgaaactcaacggaccccaggatcacagtcaccttctatatagcaccatccccaggatgcaggagccggggcagattgtggagacctacacggaggaggatcctgagggagccatgtctgtagtctctgtggagacctcagatgatgggaccactcggcgcacagagaccacggtcaagaaagtagtgaagactgtgacaacacggacagtacagccagtcgctatgggaccagacgggttgcctgtggatgcttcatcagtttctaacaactatatccagactttgggtcgtgatttccgcaagaatggcaatgggggacctggtccctatgtggggcaagctggcactgctacccttcctaggaacttccactaccctcctgatggttatagtcgccactatgaagatggttatccaggtggcagtgataactatggcagtctgtcccgggtgacccgcattgaggagcggtataggcccagcatggaaggctaccgggcacctagtagacaggatgtgtatgggccccaaccccaggttcgggtaggtgggagcagcgtggatctgcatcgctttcatccagagccttatgggctagaggatgaccagcgtagtatgggctatgatgacctggattatggtatgatgtctgattatggcactgcccgtcggactgggacaccctctgaccctcgtcggcgcctcaggagctatgaagacatgattggtgaggaggtgccatcggatcaatactactgggctcctttggcccagcatgagcgaggaagtttagcaagcttggatagcctgcgcaaaggagggcctccacctcctaattggagacagccagagctgccagaggtgatcgccatgcttggattccgcttggatgctgtcaagtccaatgcagctgcatacctgcaacacttatgctaccgcaatgacaaggtgaagactgacgtgcggaagctcaagggcatcccagtactggtgggattgttagaccatcccaaaaaggaagtgcaccttggagcctgtggagctctcaagaatatctcttttggacgtgaccaggataacaagattgccataaaaaactgtgatggtgtgcctgcccttgtgcgattgcttcgaaaggctcgtgatatggaccttactgaagttattaccggaaccctgtggaatctttcatcccatgactcaatcaaaatggagattgtggaccatgcactgcatgccttgacagatgaagtgatcattcctcattctggttgggagcgggaacctaatgaagactgtaagccacgccacattgagtgggaatcggtgctcaccaacacagctggctgccttaggaatgtaagctcagagaggagtgaagctcgccggaaacttcgggaatgtgatggtttagttgatgccctcattttcattgttcaggctgagattgggcagaaggattcagacagcaagcttgtagagaactgtgtttgccttcttcggaacttatcatatcaagttcaccgggagatcccacaggcagagcgttaccaagaggcagctcccaatgttgccaacaatactgggccacatgctgccagttgctttggggccaagaagggcaaagggaaaaaacctatagaggatccagcaaacgatacagtggatttccctaaaagaacgagtccagctcgaggctatgagctcttatttcagccagaggtggttcggatatacatctcacttcttaaggagagcaagactcctgccatcctagaagcctcagctggagctatccagaacttgtgtgctgggcgctggacgtatggtcgatacatccgctctgctctgcgtcaagagaaggctctttctgccatagctgacctcctgactaatgaacatgaacgggtggtgaaagctgcatctggagcactgagaaacctggctgtggatgctcgcaacaaagaattaattggtaaacatgctattcctaacttggtaaagaatctgccaggaggacagcagaactcctcttggaatttctctgaggacactgtcatctctattttgaacactatcaacgaggttatcgctgagaacttggaggctgccaaaaagcttcgagagacacagggtattgagaagctggtgttgatcaacaaatcagggaaccgctcagaaaaagaagttcgagcagcagcacttgtattacagacaatctggggatataaggaactgcggaagccactggaaaaagaaggatggaagaaatcagactttcaggtgaatctaaacaatgcttcccgaagccagagcagtcattcatatgatgatagtactctccctctcattgaccggaaccaaaaatcagataagaaacctgatcgggaagaaattcagatgagcaatatgggatcaaacacaaaatcactagataacaactattccacaccaaatgagagaggagaccacaatagaacactggatcgatcgggggatctaggcgacatggagccattgaagggaacaacacccttgatgcaggacgaggggcaggaatctctggaggaagagttggatgtgttggttttggatgatgaggggggccaagtgtcttacccctccatgcagaagatttagcaccactatctccgttccatctgggcttatatgtacttttattttttggtggtgaaattgactgatgattttcctttttcttcgctggactattgtgccaactgccaggctgcctcctgcccttacagccctaagtggctgccttctttccatcaactcccaacttcttcctgtgaagtttaattgtctcaacgcctccccctcccccattccctccatttttctcccaagaaacctgactcaattatttgcatattttgagaaactgctgcagattagttctttttgccagttttccctggaactcctggccttttgtggaggggagggatggagagaataggaatcttcactagaagccgtgggaagaattggaagttacatgctgtatatgcaatgtccagcagtctgataaactgacgattcttaatcaagatttttttcctgatggggaagggacttttattttcttttagagaggggaaagtgtgagctcttcccttattcctaatggctatttttgaagcaaagaaggccagcaacattggcacatgccacctggcaaaggacccttgagtaagtgaaggtctcctaaaactgggattaagaaaccttgctctcctcatctccaaggcagggaccatcaagaacctacagactccatctcttctgcaagcctcatgccaaccctgggctattgctgctgccccttaaacacaggctgtccttaacccacctctcctgccctgtgatatgtctgctgagttggcctggccatttccaagaggctgtagaaaggggagaatgtcaaggaagacttttggtagagaaggagcagaaagatgtgtttttgggaagaagaagacctctaggaggagctagtaggaatgtacatgaagcaattagtctgaaactggcttccccactcccccgtttctccttttcctatccttataggcctgtcccttgcctctgccctggattggttggcaaactaaaggacttgatgtacataactcctgtcccttttcccttacaaggtggggattgcccctggctttgcctcttctttgtgcctttggcctggggtgcatctcctcccgcccttccatgtgcctttctttgcctctgcagtctcatttctcataattttgcaaattatattttgttgctttcttacctactattggccctaaatagcagaaagaagagaagtgaccgagagaacctcagattcttcattgaggattggtatagccatgatttcagtcatagcaagcttttgctcaacagcatatgggtgggattttgcaaaaatcctattctgatgaatctcaaagtaaggctggtaagagaagtgagtggtgtgactcttactccttaggtgcccagaatttaccatcatctctgaaggagttacagggaagtggtctccccaattctcccctccctccagtattgccccctctcactttagcatatattaattagcaggttgggctagagaaatcagctgctatgcgggttgattattattattatttctaatccttttccttatttgccttctactccccttaatctaatctaaaagctctgttccatgcaactggagttccttatccctctcttccccttcccttatatattgaggctatggggtaggagaaaagtgcacaacccaccaccccctttactcgtgcattaaaatttcttatttacccttttcccccttcccatttcttcccactttcatctaccttttctggcaaaaaggagccttttgctctctgtgaccctaagagcacactgcacagggaaaattgccccatccagacctggctccactcttgatctctcttgtcctcttctgctcttttcctggtgctcttttttctcggtggggtgtgggtaatagaacagccgtgggcttttggggacctttaacttttttttctctcttttgtttataaaaaacactaaacattcaattccagagaaccaaaaatcccaccttcccaccgaacactactaaggggcttgtgttctgctccataccttttctcttttctttctgtcttgttaatgcttttaaaaacaaatgagttttttatataaataaagtttttaaagtgtgtatgtggggggtctgtgtcatttcttcacttcaagctgttatttcttccctgctttgcatctttgttacttccttatgtatcagtgtcctttccagagcaaccagaaggaggttataccaggatttattttgagctcagccccaactctttatcaagcaacattcttgttaactatatgtgaaacattttttcttctgaagattcttaaaaattgaatgtggctgaagttgaacatgggagcttattgctaatttagagataggaaactgaagcataaagaattaatgacttactttaattactggaattcttctgcaacatttgacaaaactaaccttgaataaggcccactgtaatacgtagctctcttaaatataacacttaggactagaagattagaaactaccaatcccaactacgtaataggaaaatgtaggatcaaaaggcccatgtatataagtactgaccactgggccataatgttgcttctcaggctatatgcagtcctttagtcagaagtcaataggcctatttattaatattttacagaccatattacctggattaccagggactatctttgctgcagagatcaagggttaagatctatgggaagatacttatttttctgaggtccttatgtcctgtcatataattaaagactcaagagaatttatgtgaaatgctttctgtatgcccaaatctttagattaaaattatatagctgctcct

SEQ ID NO: 4833 - DNA, 4966 bp, Homo sapiens
  source 1..4966: mol_type = unassigned DNA
ctgccagatcagtttgtcaccacccaggctcccttgcctttggctgggtgcaacttccattttaggtgttggatctgagggggaaaaaaaagagagagggagagagagagaaagaagagcaggaaagatcccgaaaggaggaagaggtggcgaaaaatcaactgccctgctggatttgtctttctcagcaccttggcgaagccttgggtttctttcttaaaggactgatttttagaactccacatttgaggagctatgaagacatgattggtgaggaggtgccatcggatcaatactactgggctcctttggcccagcatgagcgaggaagtttagcaagcttggatagcctgcgcaaaggagggcctccacctcctaattggagacagccagagctgccagaggtgatcgccatgcttggattccgcttggatgctgtcaagtccaatgcagctgcatacctgcaacacttatgctaccgcaatgacaaggtgaagactgacgtgcggaagctcaagggcatcccagtactggtgggattgttagaccatcccaaaaaggaagtgcaccttggagcctgtggagctctcaagaatatctcttttggacgtgaccaggataacaagattgccataaaaaactgtgatggtgtgcctgcccttgtgcgattgcttcgaaaggctcgtgatatggaccttactgaagttattaccggaaccctgtggaatctttcatcccatgactcaatcaaaatggagattgtggaccatgcactgcatgccttgacagatgaagtgatcattcctcattctggttgggagcgggaacctaatgaagactgtaagccacgccacattgagtgggaatcggtgctcaccaacacagctggctgccttaggaatgtaagctcagagaggagtgaagctcgccggaaacttcgggaatgtgatggtttagttgatgccctcattttcattgttcaggctgagattgggcagaaggattcagacagcaagcttgtagagaactgtgtttgccttcttcggaacttatcatatcaagttcaccgggagatcccacaggcagagcgttaccaagaggcagctcccaatgttgccaacaatactgggccacatgctgccagttgctttggggccaagaagggcaaagggaaaaaacctatagaggatccagcaaacgatacagtggatttccctaaaagaacgagtccagctcgaggctatgagctcttatttcagccagaggtggttcggatatacatctcacttcttaaggagagcaagactcctgccatcctagaagcctcagctggagctatccagaacttgtgtgctgggcgctggacgtatggtcgatacatccgctctgctctgcgtcaagagaaggctctttctgccatagctgacctcctgactaatgaacatgaacgggtggtgaaagctgcatctggagcactgagaaacctggctgtggatgctcgcaacaaagaattaattggtaaacatgctattcctaacttggtaaagaatctgccaggaggacagcagaactcctcttggaatttctctgaggacactgtcatctctattttgaacactatcaacgaggttatcgctgagaacttggaggctgccaaaaagcttcgagagacacagggtattgagaagctggtgttgatcaacaaatcagggaaccgctcagaaaaagaagttcgagcagcagcacttgtattacagacaatctggggatataaggaactgcggaagccactggaaaaagaaggatggaagaaatcagactttcaggtgaatctaaacaatgcttcccgaagccagagcagtcattcatatgatgatagtactctccctctcattgaccggaaccaaaaatcagataagaaacctgatcgggaagaaattcagatgagcaatatgggatcaaacacaaaatcactagataacaactattccacaccaaatgagagaggagaccacaatagaacactggatcgatcgggggatctaggcgacatggagccattgaagggaacaacacccttgatgcagaagatttagcaccactatctccgttccatctgggcttatatgtacttttattttttggtggtgaaattgactgatgattttcctttttcttcgctggactattgtgccaactgccaggctgcctcctgcccttacagccctaagtggctgccttctttccatcaactcccaacttcttcctgtgaagtttaattgtctcaacgcctccccctcccccattccctccatttttctcccaagaaacctgactcaattatttgcatattttgagaaactgctgcagattagttctttttgccagttttccctggaactcctggccttttgtggaggggagggatggagagaataggaatcttcactagaagccgtgggaagaattggaagttacatgctgtatatgcaatgtccagcagtctgataaactgacgattcttaatcaagatttttttcctgatggggaagggacttttattttcttttagagaggggaaagtgtgagctcttcccttattcctaatggctatttttgaagcaaagaaggccagcaacattggcacatgccacctggcaaaggacccttgagtaagtgaaggtctcctaaaactgggattaagaaaccttgctctcctcatctccaaggcagggaccatcaagaacctacagactccatctcttctgcaagcctcatgccaaccctgggctattgctgctgccccttaaacacaggctgtccttaacccacctctcctgccctgtgatatgtctgctgagttggcctggccatttccaagaggctgtagaaaggggagaatgtcaaggaagacttttggtagagaaggagcagaaagatgtgtttttgggaagaagaagacctctaggaggagctagtaggaatgtacatgaagcaattagtctgaaactggcttccccactcccccgtttctccttttcctatccttataggcctgtcccttgcctctgccctggattggttggcaaactaaaggacttgatgtacataactcctgtcccttttcccttacaaggtggggattgcccctggctttgcctcttctttgtgcctttggcctggggtgcatctcctcccgcccttccatgtgcctttctttgcctctgcagtctcatttctcataattttgcaaattatattttgttgctttcttacctactattggccctaaatagcagaaagaagagaagtgaccgagagaacctcagattcttcattgaggattggtatagccatgatttcagtcatagcaagcttttgctcaacagcatatgggtgggattttgcaaaaatcctattctgatgaatctcaaagtaaggctggtaagagaagtgagtggtgtgactcttactccttaggtgcccagaatttaccatcatctctgaaggagttacagggaagtggtctccccaattctcccctccctccagtattgccccctctcactttagcatatattaattagcaggttgggctagagaaatcagctgctatgcgggttgattattattattatttctaatccttttccttatttgccttctactccccttaatctaatctaaaagctctgttccatgcaactggagttccttatccctctcttccccttcccttatatattgaggctatggggtaggagaaaagtgcacaacccaccaccccctttactcgtgcattaaaatttcttatttacccttttcccccttcccatttcttcccactttcatctaccttttctggcaaaaaggagccttttgctctctgtgaccctaagagcacactgcacagggaaaattgccccatccagacctggctccactcttgatctctcttgtcctcttctgctcttttcctggtgctcttttttctcggtggggtgtgggtaatagaacagccgtgggcttttggggacctttaacttttttttctctcttttgtttataaaaaacactaaacattcaattccagagaaccaaaaatcccaccttcccaccgaacactactaaggggcttgtgttctgctccataccttttctcttttctttctgtcttgttaatgcttttaaaaacaaatgagttttttatataaataaagtttttaaagtgtgtatgtggggggtctgtgtcatttcttcacttcaagctgttatttcttccctgctttgcatctttgttacttccttatgtatcagtgtcctttccagagcaaccagaaggaggttataccaggatttattttgagctcagccccaactctttatcaagcaacattcttgttaactatatgtgaaacattttttcttctgaagattcttaaaaattgaatgtggctgaagttgaacatgggagcttattgctaatttagagataggaaactgaagcataaagaattaatgacttactttaattactggaattcttctgcaacatttgacaaaactaaccttgaataaggcccactgtaatacgtagctctcttaaatataacacttaggactagaagattagaaactaccaatcccaactacgtaataggaaaatgtaggatcaaaaggcccatgtatataagtactgaccactgggccataatgttgcttctcaggctatatgcagtcctttagtcagaagtcaataggcctatttattaatattttacagaccatattacctggattaccagggactatctttgctgcagagatcaagggttaagatctatgggaagatacttatttttctgaggtccttatgtcctgtcatataattaaagactcaagagaatttatgtgaaatgctttctgtatgcccaaatctttagattaaaattatatagctgctcct

SEQ ID NO: 4834 - DNA, 5071 bp, Homo sapiens
  source 1..5071: mol_type = unassigned DNA
ctgccagatcagtttgtcaccacccaggctcccttgcctttggctgggtgcaacttccattttaggtgttggatctgagggggaaaaaaaagagagagggagagagagagaaagaagagcaggaaagatcccgaaaggaggaagaggtggcgaaaaatcaactgccctgctggatttgtctttctcagcaccttggcgaagccttgggtttctttcttaaaggactgatttttagaactccacatttgaggagctatgaagacatgattggtgaggaggtgccatcggatcaatactactgggctcctttggcccagcatgagcgaggaagtttagcaagcttggatagcctgcgcaaaggagggcctccacctcctaattggagacagccagagctgccagaggtgatcgccatgcttggattccgcttggatgctgtcaagtccaatgcagctgcatacctgcaacacttatgctaccgcaatgacaaggtgaagactgacgtgcggaagctcaagggcatcccagtactggtgggattgttagaccatcccaaaaaggaagtgcaccttggagcctgtggagctctcaagaatatctcttttggacgtgaccaggataacaagattgccataaaaaactgtgatggtgtgcctgcccttgtgcgattgcttcgaaaggctcgtgatatggaccttactgaagttattaccggaaccctgtggaatctttcatcccatgactcaatcaaaatggagattgtggaccatgcactgcatgccttgacagatgaagtgatcattcctcattctggttgggagcgggaacctaatgaagactgtaagccacgccacattgagtgggaatcggtgctcaccaacacagctggctgccttaggaatgtaagctcagagaggagtgaagctcgccggaaacttcgggaatgtgatggtttagttgatgccctcattttcattgttcaggctgagattgggcagaaggattcagacagcaagcttgtagagaactgtgtttgccttcttcggaacttatcatatcaagttcaccgggagatcccacaggcagagcgttaccaagaggcagctcccaatgttgccaacaatactgggccacatgctgccagttgctttggggccaagaagggcaaagatgagtggttctccagagggaaaaaacctatagaggatccagcaaacgatacagtggatttccctaaaagaacgagtccagctcgaggctatgagctcttatttcagccagaggtggttcggatatacatctcacttcttaaggagagcaagactcctgccatcctagaagcctcagctggagctatccagaacttgtgtgctgggcgctggacgtatggtcgatacatccgctctgctctgcgtcaagagaaggctctttctgccatagctgacctcctgactaatgaacatgaacgggtggtgaaagctgcatctggagcactgagaaacctggctgtggatgctcgcaacaaagaattaattggtaaacatgctattcctaacttggtaaagaatctgccaggaggacagcagaactcctcttggaatttctctgaggacactgtcatctctattttgaacactatcaacgaggttatcgctgagaacttggaggctgccaaaaagcttcgagagacacagggtattgagaagctggtgttgatcaacaaatcagggaaccgctcagaaaaagaagttcgagcagcagcacttgtattacagacaatctggggatataaggaactgcggaagccactggaaaaagaaggatggaagaaatcagactttcaggtgaatctaaacaatgcttcccgaagccagagcagtcattcatatgatgatagtactctccctctcattgaccggaaccaaaaatcagataagaaacctgatcgggaagaaattcagatgagcaatatgggatcaaacacaaaatcactagataacaactattccacaccaaatgagagaggagaccacaatagaacactggatcgatcgggggatctaggcgacatggagccattgaagggaacaacacccttgatgcaggacgaggggcaggaatctctggaggaagagttggatgtgttggttttggatgatgaggggggccaagtgtcttacccctccatgcagaagatttagcaccactatctccgttccatctgggcttatatgtacttttattttttggtggtgaaattgactgatgattttcctttttcttcgctggactattgtgccaactgccaggctgcctcctgcccttacagccctaagtggctgccttctttccatcaactcccaacttcttcctgtgaagtttaattgtctcaacgcctccccctcccccattccctccatttttctcccaagaaacctgactcaattatttgcatattttgagaaactgctgcagattagttctttttgccagttttccctggaactcctggccttttgtggaggggagggatggagagaataggaatcttcactagaagccgtgggaagaattggaagttacatgctgtatatgcaatgtccagcagtctgataaactgacgattcttaatcaagatttttttcctgatggggaagggacttttattttcttttagagaggggaaagtgtgagctcttcccttattcctaatggctatttttgaagcaaagaaggccagcaacattggcacatgccacctggcaaaggacccttgagtaagtgaaggtctcctaaaactgggattaagaaaccttgctctcctcatctccaaggcagggaccatcaagaacctacagactccatctcttctgcaagcctcatgccaaccctgggctattgctgctgccccttaaacacaggctgtccttaacccacctctcctgccctgtgatatgtctgctgagttggcctggccatttccaagaggctgtagaaaggggagaatgtcaaggaagacttttggtagagaaggagcagaaagatgtgtttttgggaagaagaagacctctaggaggagctagtaggaatgtacatgaagcaattagtctgaaactggcttccccactcccccgtttctccttttcctatccttataggcctgtcccttgcctctgccctggattggttggcaaactaaaggacttgatgtacataactcctgtcccttttcccttacaaggtggggattgcccctggctttgcctcttctttgtgcctttggcctggggtgcatctcctcccgcccttccatgtgcctttctttgcctctgcagtctcatttctcataattttgcaaattatattttgttgctttcttacctactattggccctaaatagcagaaagaagagaagtgaccgagagaacctcagattcttcattgaggattggtatagccatgatttcagtcatagcaagcttttgctcaacagcatatgggtgggattttgcaaaaatcctattctgatgaatctcaaagtaaggctggtaagagaagtgagtggtgtgactcttactccttaggtgcccagaatttaccatcatctctgaaggagttacagggaagtggtctccccaattctcccctccctccagtattgccccctctcactttagcatatattaattagcaggttgggctagagaaatcagctgctatgcgggttgattattattattatttctaatccttttccttatttgccttctactccccttaatctaatctaaaagctctgttccatgcaactggagttccttatccctctcttccccttcccttatatattgaggctatggggtaggagaaaagtgcacaacccaccaccccctttactcgtgcattaaaatttcttatttacccttttcccccttcccatttcttcccactttcatctaccttttctggcaaaaaggagccttttgctctctgtgaccctaagagcacactgcacagggaaaattgccccatccagacctggctccactcttgatctctcttgtcctcttctgctcttttcctggtgctcttttttctcggtggggtgtgggtaatagaacagccgtgggcttttggggacctttaacttttttttctctcttttgtttataaaaaacactaaacattcaattccagagaaccaaaaatcccaccttcccaccgaacactactaaggggcttgtgttctgctccataccttttctcttttctttctgtcttgttaatgcttttaaaaacaaatgagttttttatataaataaagtttttaaagtgtgtatgtggggggtctgtgtcatttcttcacttcaagctgttatttcttccctgctttgcatctttgttacttccttatgtatcagtgtcctttccagagcaaccagaaggaggttataccaggatttattttgagctcagccccaactctttatcaagcaacattcttgttaactatatgtgaaacattttttcttctgaagattcttaaaaattgaatgtggctgaagttgaacatgggagcttattgctaatttagagataggaaactgaagcataaagaattaatgacttactttaattactggaattcttctgcaacatttgacaaaactaaccttgaataaggcccactgtaatacgtagctctcttaaatataacacttaggactagaagattagaaactaccaatcccaactacgtaataggaaaatgtaggatcaaaaggcccatgtatataagtactgaccactgggccataatgttgcttctcaggctatatgcagtcctttagtcagaagtcaataggcctatttattaatattttacagaccatattacctggattaccagggactatctttgctgcagagatcaagggttaagatctatgggaagatacttatttttctgaggtccttatgtcctgtcatataattaaagactcaagagaatttatgtgaaatgctttctgtatgcccaaatctttagattaaaattatatagctgctcct

SEQ ID NO: 4835 - DNA, 5745 bp, Homo sapiens
  source 1..5745: mol_type = unassigned DNA
ctgccagatcagtttgtcaccacccaggctcccttgcctttggctgggtgcaacttccattttaggtgttggatctgagggggaaaaaaaagagagagggagagagagagaaagaagagcaggaaagatcccgaaaggaggaagaggtggcgaaaaatcaactgccctgctggatttgtctttctcagcaccttggcgaagccttgggtttctttcttaaaggactgatttttagaactccacatttgagaacggccggtttgtgggcgatgctgaccttgaaagacagaaattttcagatttgaaactcaacggaccccaggatcacagtcaccttctatatagcaccatccccaggatgcaggagccggggcagattgtggagacctacacggaggaggatcctgagggagccatgtctgtagtctctgtggagacctcagatgatgggaccactcggcgcacagagaccacggtcaagaaagtagtgaagactgtgacaacacggacagtacagccagtcgctatgggaccagacgggttgcctgtggatgcttcatcagtttctaacaactatatccagactttgggtcgtgatttccgcaagaatggcaatgggggacctggtccctatgtggggcaagctggcactgctacccttcctaggaacttccactaccctcctgatggttatagtcgccactatgaagatggttatccaggtggcagtgataactatggcagtctgtcccgggtgacccgcattgaggagcggtataggcccagcatggaaggctaccgggcacctagtagacaggatgtgtatgggccccaaccccaggttcgggtaggtgggagcagcgtggatctgcatcgctttcatccagagccttatgggctagaggatgaccagcgtagtatgggctatgatgacctggattatggtatgatgtctgattatggcactgcccgtcggactgggacaccctctgaccctcgtcggcgcctcaggagctatgaagacatgattggtgaggaggtgccatcggatcaatactactgggctcctttggcccagcatgagcgaggaagtttagcaagcttggatagcctgcgcaaaggagggcctccacctcctaattggagacagccagagctgccagaggtgatcgccatgcttggattccgcttggatgctgtcaagtccaatgcagctgcatacctgcaacacttatgctaccgcaatgacaaggtgaagactgacgtgcggaagctcaagggcatcccagtactggtgggattgttagaccatcccaaaaaggaagtgcaccttggagcctgtggagctctcaagaatatctcttttggacgtgaccaggataacaagattgccataaaaaactgtgatggtgtgcctgcccttgtgcgattgcttcgaaaggctcgtgatatggaccttactgaagttattaccggaaccctgtggaatctttcatcccatgactcaatcaaaatggagattgtggaccatgcactgcatgccttgacagatgaagtgatcattcctcattctggttgggagcgggaacctaatgaagactgtaagccacgccacattgagtgggaatcggtgctcaccaacacagctggctgccttaggaatgtaagctcagagaggagtgaagctcgccggaaacttcgggaatgtgatggtttagttgatgccctcattttcattgttcaggctgagattgggcagaaggattcagacagcaagcttgtagagaactgtgtttgccttcttcggaacttatcatatcaagttcaccgggagatcccacaggcagagcgttaccaagaggcagctcccaatgttgccaacaatactgggccacatgctgccagttgctttggggccaagaagggcaaagatgagtggttctccagagggaaaaaacctatagaggatccagcaaacgatacagtggatttccctaaaagaacgagtccagctcgaggctatgagctcttatttcagccagaggtggttcggatatacatctcacttcttaaggagagcaagactcctgccatcctagaagcctcagctggagctatccagaacttgtgtgctgggcgctggacgtatggtcgatacatccgctctgctctgcgtcaagagaaggctctttctgccatagctgacctcctgactaatgaacatgaacgggtggtgaaagctgcatctggagcactgagaaacctggctgtggatgctcgcaacaaagaattaattggtaaacatgctattcctaacttggtaaagaatctgccaggaggacagcagaactcctcttggaatttctctgaggacactgtcatctctattttgaacactatcaacgaggttatcgctgagaacttggaggctgccaaaaagcttcgagagacacagggtattgagaagctggtgttgatcaacaaatcagggaaccgctcagaaaaagaagttcgagcagcagcacttgtattacagacaatctggggatataaggaactgcggaagccactggaaaaagaaggatggaagaaatcagactttcaggtgaatctaaacaatgcttcccgaagccagagcagtcattcatatgatgatagtactctccctctcattgaccggaaccaaaaatcagataagaaacctgatcgggaagaaattcagatgagcaatatgggatcaaacacaaaatcactagataacaactattccacaccaaatgagagaggagaccacaatagaacactggatcgatcgggggatctaggcgacatggagccattgaagggaacaacacccttgatgcagaagatttagcaccactatctccgttccatctgggcttatatgtacttttattttttggtggtgaaattgactgatgattttcctttttcttcgctggactattgtgccaactgccaggctgcctcctgcccttacagccctaagtggctgccttctttccatcaactcccaacttcttcctgtgaagtttaattgtctcaacgcctccccctcccccattccctccatttttctcccaagaaacctgactcaattatttgcatattttgagaaactgctgcagattagttctttttgccagttttccctggaactcctggccttttgtggaggggagggatggagagaataggaatcttcactagaagccgtgggaagaattggaagttacatgctgtatatgcaatgtccagcagtctgataaactgacgattcttaatcaagatttttttcctgatggggaagggacttttattttcttttagagaggggaaagtgtgagctcttcccttattcctaatggctatttttgaagcaaagaaggccagcaacattggcacatgccacctggcaaaggacccttgagtaagtgaaggtctcctaaaactgggattaagaaaccttgctctcctcatctccaaggcagggaccatcaagaacctacagactccatctcttctgcaagcctcatgccaaccctgggctattgctgctgccccttaaacacaggctgtccttaacccacctctcctgccctgtgatatgtctgctgagttggcctggccatttccaagaggctgtagaaaggggagaatgtcaaggaagacttttggtagagaaggagcagaaagatgtgtttttgggaagaagaagacctctaggaggagctagtaggaatgtacatgaagcaattagtctgaaactggcttccccactcccccgtttctccttttcctatccttataggcctgtcccttgcctctgccctggattggttggcaaactaaaggacttgatgtacataactcctgtcccttttcccttacaaggtggggattgcccctggctttgcctcttctttgtgcctttggcctggggtgcatctcctcccgcccttccatgtgcctttctttgcctctgcagtctcatttctcataattttgcaaattatattttgttgctttcttacctactattggccctaaatagcagaaagaagagaagtgaccgagagaacctcagattcttcattgaggattggtatagccatgatttcagtcatagcaagcttttgctcaacagcatatgggtgggattttgcaaaaatcctattctgatgaatctcaaagtaaggctggtaagagaagtgagtggtgtgactcttactccttaggtgcccagaatttaccatcatctctgaaggagttacagggaagtggtctccccaattctcccctccctccagtattgccccctctcactttagcatatattaattagcaggttgggctagagaaatcagctgctatgcgggttgattattattattatttctaatccttttccttatttgccttctactccccttaatctaatctaaaagctctgttccatgcaactggagttccttatccctctcttccccttcccttatatattgaggctatggggtaggagaaaagtgcacaacccaccaccccctttactcgtgcattaaaatttcttatttacccttttcccccttcccatttcttcccactttcatctaccttttctggcaaaaaggagccttttgctctctgtgaccctaagagcacactgcacagggaaaattgccccatccagacctggctccactcttgatctctcttgtcctcttctgctcttttcctggtgctcttttttctcggtggggtgtgggtaatagaacagccgtgggcttttggggacctttaacttttttttctctcttttgtttataaaaaacactaaacattcaattccagagaaccaaaaatcccaccttcccaccgaacactactaaggggcttgtgttctgctccataccttttctcttttctttctgtcttgttaatgcttttaaaaacaaatgagttttttatataaataaagtttttaaagtgtgtatgtggggggtctgtgtcatttcttcacttcaagctgttatttcttccctgctttgcatctttgttacttccttatgtatcagtgtcctttccagagcaaccagaaggaggttataccaggatttattttgagctcagccccaactctttatcaagcaacattcttgttaactatatgtgaaacattttttcttctgaagattcttaaaaattgaatgtggctgaagttgaacatgggagcttattgctaatttagagataggaaactgaagcataaagaattaatgacttactttaattactggaattcttctgcaacatttgacaaaactaaccttgaataaggcccactgtaatacgtagctctcttaaatataacacttaggactagaagattagaaactaccaatcccaactacgtaataggaaaatgtaggatcaaaaggcccatgtatataagtactgaccactgggccataatgttgcttctcaggctatatgcagtcctttagtcagaagtcaataggcctatttattaatattttacagaccatattacctggattaccagggactatctttgctgcagagatcaagggttaagatctatgggaagatacttatttttctgaggtccttatgtcctgtcatataattaaagactcaagagaatttatgtgaaatgctttctgtatgcccaaatctttagattaaaattatatagctgctcct

SEQ ID NO: 4836 - DNA, 5907 bp, Homo sapiens
  source 1..5907: mol_type = unassigned DNA
ctgccagatcagtttgtcaccacccaggctcccttgcctttggctgggtgcaacttccattttaggtgttggatctgagggggaaaaaaaagagagagggagagagagagaaagaagagcaggaaagatcccgaaaggaggaagaggtggcgaaaaatcaactgccctgctggatttgtctttctcagcaccttggcgaagccttgggtttctttcttaaaggactgatttttagaactccacatttgaggtggagtcgaccgccagcatcttggcctctgtgaaggaacaagaggcccagtttgagaagctgacccgggcgctggaggaggaacggcgccacgtctcggcgcagctggaacgcgtccgggtctcaccacaagatgccaacccactcatggccaacggcacactcacccgccggcatcagaacggccggtttgtgggcgatgctgaccttgaaagacagaaattttcagatttgaaactcaacggaccccaggatcacagtcaccttctatatagcaccatccccaggatgcaggagccggggcagattgtggagacctacacggaggaggatcctgagggagccatgtctgtagtctctgtggagacctcagatgatgggaccactcggcgcacagagaccacggtcaagaaagtagtgaagactgtgacaacacggacagtacagccagtcgctatgggaccagacgggttgcctgtggatgcttcatcagtttctaacaactatatccagactttgggtcgtgatttccgcaagaatggcaatgggggacctggtccctatgtggggcaagctggcactgctacccttcctaggaacttccactaccctcctgatggttatagtcgccactatgaagatggttatccaggtggcagtgataactatggcagtctgtcccgggtgacccgcattgaggagcggtataggcccagcatggaaggctaccgggcacctagtagacaggatgtgtatgggccccaaccccaggttcgggtaggtgggagcagcgtggatctgcatcgctttcatccagagccttatgggctagaggatgaccagcgtagtatgggctatgatgacctggattatggtatgatgtctgattatggcactgcccgtcggactgggacaccctctgaccctcgtcggcgcctcaggagctatgaagacatgattggtgaggaggtgccatcggatcaatactactgggctcctttggcccagcatgagcgaggaagtttagcaagcttggatagcctgcgcaaaggagggcctccacctcctaattggagacagccagagctgccagaggtgatcgccatgcttggattccgcttggatgctgtcaagtccaatgcagctgcatacctgcaacacttatgctaccgcaatgacaaggtgaagactgacgtgcggaagctcaagggcatcccagtactggtgggattgttagaccatcccaaaaaggaagtgcaccttggagcctgtggagctctcaagaatatctcttttggacgtgaccaggataacaagattgccataaaaaactgtgatggtgtgcctgcccttgtgcgattgcttcgaaaggctcgtgatatggaccttactgaagttattaccggaaccctgtggaatctttcatcccatgactcaatcaaaatggagattgtggaccatgcactgcatgccttgacagatgaagtgatcattcctcattctggttgggagcgggaacctaatgaagactgtaagccacgccacattgagtgggaatcggtgctcaccaacacagctggctgccttaggaatgtaagctcagagaggagtgaagctcgccggaaacttcgggaatgtgatggtttagttgatgccctcattttcattgttcaggctgagattgggcagaaggattcagacagcaagcttgtagagaactgtgtttgccttcttcggaacttatcatatcaagttcaccgggagatcccacaggcagagcgttaccaagaggcagctcccaatgttgccaacaatactgggccacatgctgccagttgctttggggccaagaagggcaaagggaaaaaacctatagaggatccagcaaacgatacagtggatttccctaaaagaacgagtccagctcgaggctatgagctcttatttcagccagaggtggttcggatatacatctcacttcttaaggagagcaagactcctgccatcctagaagcctcagctggagctatccagaacttgtgtgctgggcgctggacgtatggtcgatacatccgctctgctctgcgtcaagagaaggctctttctgccatagctgacctcctgactaatgaacatgaacgggtggtgaaagctgcatctggagcactgagaaacctggctgtggatgctcgcaacaaagaattaattggtaaacatgctattcctaacttggtaaagaatctgccaggaggacagcagaactcctcttggaatttctctgaggacactgtcatctctattttgaacactatcaacgaggttatcgctgagaacttggaggctgccaaaaagcttcgagagacacagggtattgagaagctggtgttgatcaacaaatcagggaaccgctcagaaaaagaagttcgagcagcagcacttgtattacagacaatctggggatataaggaactgcggaagccactggaaaaagaaggatggaagaaatcagactttcaggtgaatctaaacaatgcttcccgaagccagagcagtcattcatatgatgatagtactctccctctcattgaccggaaccaaaaatcagataagaaacctgatcgggaagaaattcagatgagcaatatgggatcaaacacaaaatcactagataacaactattccacaccaaatgagagaggagaccacaatagaacactggatcgatcgggggatctaggcgacatggagccattgaagggaacaacacccttgatgcagaagatttagcaccactatctccgttccatctgggcttatatgtacttttattttttggtggtgaaattgactgatgattttcctttttcttcgctggactattgtgccaactgccaggctgcctcctgcccttacagccctaagtggctgccttctttccatcaactcccaacttcttcctgtgaagtttaattgtctcaacgcctccccctcccccattccctccatttttctcccaagaaacctgactcaattatttgcatattttgagaaactgctgcagattagttctttttgccagttttccctggaactcctggccttttgtggaggggagggatggagagaataggaatcttcactagaagccgtgggaagaattggaagttacatgctgtatatgcaatgtccagcagtctgataaactgacgattcttaatcaagatttttttcctgatggggaagggacttttattttcttttagagaggggaaagtgtgagctcttcccttattcctaatggctatttttgaagcaaagaaggccagcaacattggcacatgccacctggcaaaggacccttgagtaagtgaaggtctcctaaaactgggattaagaaaccttgctctcctcatctccaaggcagggaccatcaagaacctacagactccatctcttctgcaagcctcatgccaaccctgggctattgctgctgccccttaaacacaggctgtccttaacccacctctcctgccctgtgatatgtctgctgagttggcctggccatttccaagaggctgtagaaaggggagaatgtcaaggaagacttttggtagagaaggagcagaaagatgtgtttttgggaagaagaagacctctaggaggagctagtaggaatgtacatgaagcaattagtctgaaactggcttccccactcccccgtttctccttttcctatccttataggcctgtcccttgcctctgccctggattggttggcaaactaaaggacttgatgtacataactcctgtcccttttcccttacaaggtggggattgcccctggctttgcctcttctttgtgcctttggcctggggtgcatctcctcccgcccttccatgtgcctttctttgcctctgcagtctcatttctcataattttgcaaattatattttgttgctttcttacctactattggccctaaatagcagaaagaagagaagtgaccgagagaacctcagattcttcattgaggattggtatagccatgatttcagtcatagcaagcttttgctcaacagcatatgggtgggattttgcaaaaatcctattctgatgaatctcaaagtaaggctggtaagagaagtgagtggtgtgactcttactccttaggtgcccagaatttaccatcatctctgaaggagttacagggaagtggtctccccaattctcccctccctccagtattgccccctctcactttagcatatattaattagcaggttgggctagagaaatcagctgctatgcgggttgattattattattatttctaatccttttccttatttgccttctactccccttaatctaatctaaaagctctgttccatgcaactggagttccttatccctctcttccccttcccttatatattgaggctatggggtaggagaaaagtgcacaacccaccaccccctttactcgtgcattaaaatttcttatttacccttttcccccttcccatttcttcccactttcatctaccttttctggcaaaaaggagccttttgctctctgtgaccctaagagcacactgcacagggaaaattgccccatccagacctggctccactcttgatctctcttgtcctcttctgctcttttcctggtgctcttttttctcggtggggtgtgggtaatagaacagccgtgggcttttggggacctttaacttttttttctctcttttgtttataaaaaacactaaacattcaattccagagaaccaaaaatcccaccttcccaccgaacactactaaggggcttgtgttctgctccataccttttctcttttctttctgtcttgttaatgcttttaaaaacaaatgagttttttatataaataaagtttttaaagtgtgtatgtggggggtctgtgtcatttcttcacttcaagctgttatttcttccctgctttgcatctttgttacttccttatgtatcagtgtcctttccagagcaaccagaaggaggttataccaggatttattttgagctcagccccaactctttatcaagcaacattcttgttaactatatgtgaaacattttttcttctgaagattcttaaaaattgaatgtggctgaagttgaacatgggagcttattgctaatttagagataggaaactgaagcataaagaattaatgacttactttaattactggaattcttctgcaacatttgacaaaactaaccttgaataaggcccactgtaatacgtagctctcttaaatataacacttaggactagaagattagaaactaccaatcccaactacgtaataggaaaatgtaggatcaaaaggcccatgtatataagtactgaccactgggccataatgttgcttctcaggctatatgcagtcctttagtcagaagtcaataggcctatttattaatattttacagaccatattacctggattaccagggactatctttgctgcagagatcaagggttaagatctatgggaagatacttatttttctgaggtccttatgtcctgtcatataattaaagactcaagagaatttatgtgaaatgctttctgtatgcccaaatctttagattaaaattatatagctgctcct

SEQ ID NO: 4837 - DNA, 6099 bp, Homo sapiens
  source 1..6099: mol_type = unassigned DNA
ctgccagatcagtttgtcaccacccaggctcccttgcctttggctgggtgcaacttccattttaggtgttggatctgagggggaaaaaaaagagagagggagagagagagaaagaagagcaggaaagatcccgaaaggaggaagaggtggcgaaaaatcaactgccctgctggatttgtctttctcagcaccttggcgaagccttgggtttctttcttaaaggactgatttttagaactccacatttgaggtgtgtggcttttgaagaaaatgtatgtactgacgggaaaaggaggataagcaagtcgaatttttgtcttacgctctctccttcctgcttcctccttgctgtggtggctgggatgcttcttccatgattttttgaatctagactgggctgttctctgtgttaaaccaatcagttgcgaccttctcttaacaggtggagtcgaccgccagcatcttggcctctgtgaaggaacaagaggcccagtttgagaagctgacccgggcgctggaggaggaacggcgccacgtctcggcgcagctggaacgcgtccgggtctcaccacaagatgccaacccactcatggccaacggcacactcacccgccggcatcagaacggccggtttgtgggcgatgctgaccttgaaagacagaaattttcagatttgaaactcaacggaccccaggatcacagtcaccttctatatagcaccatccccaggatgcaggagccggggcagattgtggagacctacacggaggaggatcctgagggagccatgtctgtagtctctgtggagacctcagatgatgggaccactcggcgcacagagaccacggtcaagaaagtagtgaagactgtgacaacacggacagtacagccagtcgctatgggaccagacgggttgcctgtggatgcttcatcagtttctaacaactatatccagactttgggtcgtgatttccgcaagaatggcaatgggggacctggtccctatgtggggcaagctggcactgctacccttcctaggaacttccactaccctcctgatggttatagtcgccactatgaagatggttatccaggtggcagtgataactatggcagtctgtcccgggtgacccgcattgaggagcggtataggcccagcatggaaggctaccgggcacctagtagacaggatgtgtatgggccccaaccccaggttcgggtaggtgggagcagcgtggatctgcatcgctttcatccagagccttatgggctagaggatgaccagcgtagtatgggctatgatgacctggattatggtatgatgtctgattatggcactgcccgtcggactgggacaccctctgaccctcgtcggcgcctcaggagctatgaagacatgattggtgaggaggtgccatcggatcaatactactgggctcctttggcccagcatgagcgaggaagtttagcaagcttggatagcctgcgcaaaggagggcctccacctcctaattggagacagccagagctgccagaggtgatcgccatgcttggattccgcttggatgctgtcaagtccaatgcagctgcatacctgcaacacttatgctaccgcaatgacaaggtgaagactgacgtgcggaagctcaagggcatcccagtactggtgggattgttagaccatcccaaaaaggaagtgcaccttggagcctgtggagctctcaagaatatctcttttggacgtgaccaggataacaagattgccataaaaaactgtgatggtgtgcctgcccttgtgcgattgcttcgaaaggctcgtgatatggaccttactgaagttattaccggaaccctgtggaatctttcatcccatgactcaatcaaaatggagattgtggaccatgcactgcatgccttgacagatgaagtgatcattcctcattctggttgggagcgggaacctaatgaagactgtaagccacgccacattgagtgggaatcggtgctcaccaacacagctggctgccttaggaatgtaagctcagagaggagtgaagctcgccggaaacttcgggaatgtgatggtttagttgatgccctcattttcattgttcaggctgagattgggcagaaggattcagacagcaagcttgtagagaactgtgtttgccttcttcggaacttatcatatcaagttcaccgggagatcccacaggcagagcgttaccaagaggcagctcccaatgttgccaacaatactgggccacatgctgccagttgctttggggccaagaagggcaaagggaaaaaacctatagaggatccagcaaacgatacagtggatttccctaaaagaacgagtccagctcgaggctatgagctcttatttcagccagaggtggttcggatatacatctcacttcttaaggagagcaagactcctgccatcctagaagcctcagctggagctatccagaacttgtgtgctgggcgctggacgtatggtcgatacatccgctctgctctgcgtcaagagaaggctctttctgccatagctgacctcctgactaatgaacatgaacgggtggtgaaagctgcatctggagcactgagaaacctggctgtggatgctcgcaacaaagaattaattggtaaacatgctattcctaacttggtaaagaatctgccaggaggacagcagaactcctcttggaatttctctgaggacactgtcatctctattttgaacactatcaacgaggttatcgctgagaacttggaggctgccaaaaagcttcgagagacacagggtattgagaagctggtgttgatcaacaaatcagggaaccgctcagaaaaagaagttcgagcagcagcacttgtattacagacaatctggggatataaggaactgcggaagccactggaaaaagaaggatggaagaaatcagactttcaggtgaatctaaacaatgcttcccgaagccagagcagtcattcatatgatgatagtactctccctctcattgaccggaaccaaaaatcagataagaaacctgatcgggaagaaattcagatgagcaatatgggatcaaacacaaaatcactagataacaactattccacaccaaatgagagaggagaccacaatagaacactggatcgatcgggggatctaggcgacatggagccattgaagggaacaacacccttgatgcagaagatttagcaccactatctccgttccatctgggcttatatgtacttttattttttggtggtgaaattgactgatgattttcctttttcttcgctggactattgtgccaactgccaggctgcctcctgcccttacagccctaagtggctgccttctttccatcaactcccaacttcttcctgtgaagtttaattgtctcaacgcctccccctcccccattccctccatttttctcccaagaaacctgactcaattatttgcatattttgagaaactgctgcagattagttctttttgccagttttccctggaactcctggccttttgtggaggggagggatggagagaataggaatcttcactagaagccgtgggaagaattggaagttacatgctgtatatgcaatgtccagcagtctgataaactgacgattcttaatcaagatttttttcctgatggggaagggacttttattttcttttagagaggggaaagtgtgagctcttcccttattcctaatggctatttttgaagcaaagaaggccagcaacattggcacatgccacctggcaaaggacccttgagtaagtgaaggtctcctaaaactgggattaagaaaccttgctctcctcatctccaaggcagggaccatcaagaacctacagactccatctcttctgcaagcctcatgccaaccctgggctattgctgctgccccttaaacacaggctgtccttaacccacctctcctgccctgtgatatgtctgctgagttggcctggccatttccaagaggctgtagaaaggggagaatgtcaaggaagacttttggtagagaaggagcagaaagatgtgtttttgggaagaagaagacctctaggaggagctagtaggaatgtacatgaagcaattagtctgaaactggcttccccactcccccgtttctccttttcctatccttataggcctgtcccttgcctctgccctggattggttggcaaactaaaggacttgatgtacataactcctgtcccttttcccttacaaggtggggattgcccctggctttgcctcttctttgtgcctttggcctggggtgcatctcctcccgcccttccatgtgcctttctttgcctctgcagtctcatttctcataattttgcaaattatattttgttgctttcttacctactattggccctaaatagcagaaagaagagaagtgaccgagagaacctcagattcttcattgaggattggtatagccatgatttcagtcatagcaagcttttgctcaacagcatatgggtgggattttgcaaaaatcctattctgatgaatctcaaagtaaggctggtaagagaagtgagtggtgtgactcttactccttaggtgcccagaatttaccatcatctctgaaggagttacagggaagtggtctccccaattctcccctccctccagtattgccccctctcactttagcatatattaattagcaggttgggctagagaaatcagctgctatgcgggttgattattattattatttctaatccttttccttatttgccttctactccccttaatctaatctaaaagctctgttccatgcaactggagttccttatccctctcttccccttcccttatatattgaggctatggggtaggagaaaagtgcacaacccaccaccccctttactcgtgcattaaaatttcttatttacccttttcccccttcccatttcttcccactttcatctaccttttctggcaaaaaggagccttttgctctctgtgaccctaagagcacactgcacagggaaaattgccccatccagacctggctccactcttgatctctcttgtcctcttctgctcttttcctggtgctcttttttctcggtggggtgtgggtaatagaacagccgtgggcttttggggacctttaacttttttttctctcttttgtttataaaaaacactaaacattcaattccagagaaccaaaaatcccaccttcccaccgaacactactaaggggcttgtgttctgctccataccttttctcttttctttctgtcttgttaatgcttttaaaaacaaatgagttttttatataaataaagtttttaaagtgtgtatgtggggggtctgtgtcatttcttcacttcaagctgttatttcttccctgctttgcatctttgttacttccttatgtatcagtgtcctttccagagcaaccagaaggaggttataccaggatttattttgagctcagccccaactctttatcaagcaacattcttgttaactatatgtgaaacattttttcttctgaagattcttaaaaattgaatgtggctgaagttgaacatgggagcttattgctaatttagagataggaaactgaagcataaagaattaatgacttactttaattactggaattcttctgcaacatttgacaaaactaaccttgaataaggcccactgtaatacgtagctctcttaaatataacacttaggactagaagattagaaactaccaatcccaactacgtaataggaaaatgtaggatcaaaaggcccatgtatataagtactgaccactgggccataatgttgcttctcaggctatatgcagtcctttagtcagaagtcaataggcctatttattaatattttacagaccatattacctggattaccagggactatctttgctgcagagatcaagggttaagatctatgggaagatacttatttttctgaggtccttatgtcctgtcatataattaaagactcaagagaatttatgtgaaatgctttctgtatgcccaaatctttagattaaaattatatagctgctcct

SEQ ID NO: 4838 - DNA, 5727 bp, Homo sapiens
  source 1..5727: mol_type = unassigned DNA
ctgccagatcagtttgtcaccacccaggctcccttgcctttggctgggtgcaacttccattttaggtgttggatctgagggggaaaaaaaagagagagggagagagagagaaagaagagcaggaaagatcccgaaaggaggaagaggtggcgaaaaatcaactgccctgctggatttgtctttctcagcaccttggcgaagccttgggtttctttcttaaaggactgatttttagaactccacatttgagaacggccggtttgtgggcgatgctgaccttgaaagacagaaattttcagatttgaaactcaacggaccccaggatcacagtcaccttctatatagcaccatccccaggatgcaggagccggggcagattgtggagacctacacggaggaggatcctgagggagccatgtctgtagtctctgtggagacctcagatgatgggaccactcggcgcacagagaccacggtcaagaaagtagtgaagactgtgacaacacggacagtacagccagtcgctatgggaccagacgggttgcctgtggatgcttcatcagtttctaacaactatatccagactttgggtcgtgatttccgcaagaatggcaatgggggacctggtccctatgtggggcaagctggcactgctacccttcctaggaacttccactaccctcctgatggttatagtcgccactatgaagatggttatccaggtggcagtgataactatggcagtctgtcccgggtgacccgcattgaggagcggtataggcccagcatggaaggctaccgggcacctagtagacaggatgtgtatgggccccaaccccaggttcgggtaggtgggagcagcgtggatctgcatcgctttcatccagagccttatgggctagaggatgaccagcgtagtatgggctatgatgacctggattatggtatgatgtctgattatggcactgcccgtcggactgggacaccctctgaccctcgtcggcgcctcaggagctatgaagacatgattggtgaggaggtgccatcggatcaatactactgggctcctttggcccagcatgagcgaggaagtttagcaagcttggatagcctgcgcaaaggagggcctccacctcctaattggagacagccagagctgccagaggtgatcgccatgcttggattccgcttggatgctgtcaagtccaatgcagctgcatacctgcaacacttatgctaccgcaatgacaaggtgaagactgacgtgcggaagctcaagggcatcccagtactggtgggattgttagaccatcccaaaaaggaagtgcaccttggagcctgtggagctctcaagaatatctcttttggacgtgaccaggataacaagattgccataaaaaactgtgatggtgtgcctgcccttgtgcgattgcttcgaaaggctcgtgatatggaccttactgaagttattaccggaaccctgtggaatctttcatcccatgactcaatcaaaatggagattgtggaccatgcactgcatgccttgacagatgaagtgatcattcctcattctggttgggagcgggaacctaatgaagactgtaagccacgccacattgagtgggaatcggtgctcaccaacacagctggctgccttaggaatgtaagctcagagaggagtgaagctcgccggaaacttcgggaatgtgatggtttagttgatgccctcattttcattgttcaggctgagattgggcagaaggattcagacagcaagcttgtagagaactgtgtttgccttcttcggaacttatcatatcaagttcaccgggagatcccacaggcagagcgttaccaagaggcagctcccaatgttgccaacaatactgggccacatgctgccagttgctttggggccaagaagggcaaagggaaaaaacctatagaggatccagcaaacgatacagtggatttccctaaaagaacgagtccagctcgaggctatgagctcttatttcagccagaggtggttcggatatacatctcacttcttaaggagagcaagactcctgccatcctagaagcctcagctggagctatccagaacttgtgtgctgggcgctggacgtatggtcgatacatccgctctgctctgcgtcaagagaaggctctttctgccatagctgacctcctgactaatgaacatgaacgggtggtgaaagctgcatctggagcactgagaaacctggctgtggatgctcgcaacaaagaattaattggtaaacatgctattcctaacttggtaaagaatctgccaggaggacagcagaactcctcttggaatttctctgaggacactgtcatctctattttgaacactatcaacgaggttatcgctgagaacttggaggctgccaaaaagcttcgagagacacagggtattgagaagctggtgttgatcaacaaatcagggaaccgctcagaaaaagaagttcgagcagcagcacttgtattacagacaatctggggatataaggaactgcggaagccactggaaaaagaaggatggaagaaatcagactttcaggtgaatctaaacaatgcttcccgaagccagagcagtcattcatatgatgatagtactctccctctcattgaccggaaccaaaaatcagataagaaacctgatcgggaagaaattcagatgagcaatatgggatcaaacacaaaatcactagataacaactattccacaccaaatgagagaggagaccacaatagaacactggatcgatcgggggatctaggcgacatggagccattgaagggaacaacacccttgatgcagaagatttagcaccactatctccgttccatctgggcttatatgtacttttattttttggtggtgaaattgactgatgattttcctttttcttcgctggactattgtgccaactgccaggctgcctcctgcccttacagccctaagtggctgccttctttccatcaactcccaacttcttcctgtgaagtttaattgtctcaacgcctccccctcccccattccctccatttttctcccaagaaacctgactcaattatttgcatattttgagaaactgctgcagattagttctttttgccagttttccctggaactcctggccttttgtggaggggagggatggagagaataggaatcttcactagaagccgtgggaagaattggaagttacatgctgtatatgcaatgtccagcagtctgataaactgacgattcttaatcaagatttttttcctgatggggaagggacttttattttcttttagagaggggaaagtgtgagctcttcccttattcctaatggctatttttgaagcaaagaaggccagcaacattggcacatgccacctggcaaaggacccttgagtaagtgaaggtctcctaaaactgggattaagaaaccttgctctcctcatctccaaggcagggaccatcaagaacctacagactccatctcttctgcaagcctcatgccaaccctgggctattgctgctgccccttaaacacaggctgtccttaacccacctctcctgccctgtgatatgtctgctgagttggcctggccatttccaagaggctgtagaaaggggagaatgtcaaggaagacttttggtagagaaggagcagaaagatgtgtttttgggaagaagaagacctctaggaggagctagtaggaatgtacatgaagcaattagtctgaaactggcttccccactcccccgtttctccttttcctatccttataggcctgtcccttgcctctgccctggattggttggcaaactaaaggacttgatgtacataactcctgtcccttttcccttacaaggtggggattgcccctggctttgcctcttctttgtgcctttggcctggggtgcatctcctcccgcccttccatgtgcctttctttgcctctgcagtctcatttctcataattttgcaaattatattttgttgctttcttacctactattggccctaaatagcagaaagaagagaagtgaccgagagaacctcagattcttcattgaggattggtatagccatgatttcagtcatagcaagcttttgctcaacagcatatgggtgggattttgcaaaaatcctattctgatgaatctcaaagtaaggctggtaagagaagtgagtggtgtgactcttactccttaggtgcccagaatttaccatcatctctgaaggagttacagggaagtggtctccccaattctcccctccctccagtattgccccctctcactttagcatatattaattagcaggttgggctagagaaatcagctgctatgcgggttgattattattattatttctaatccttttccttatttgccttctactccccttaatctaatctaaaagctctgttccatgcaactggagttccttatccctctcttccccttcccttatatattgaggctatggggtaggagaaaagtgcacaacccaccaccccctttactcgtgcattaaaatttcttatttacccttttcccccttcccatttcttcccactttcatctaccttttctggcaaaaaggagccttttgctctctgtgaccctaagagcacactgcacagggaaaattgccccatccagacctggctccactcttgatctctcttgtcctcttctgctcttttcctggtgctcttttttctcggtggggtgtgggtaatagaacagccgtgggcttttggggacctttaacttttttttctctcttttgtttataaaaaacactaaacattcaattccagagaaccaaaaatcccaccttcccaccgaacactactaaggggcttgtgttctgctccataccttttctcttttctttctgtcttgttaatgcttttaaaaacaaatgagttttttatataaataaagtttttaaagtgtgtatgtggggggtctgtgtcatttcttcacttcaagctgttatttcttccctgctttgcatctttgttacttccttatgtatcagtgtcctttccagagcaaccagaaggaggttataccaggatttattttgagctcagccccaactctttatcaagcaacattcttgttaactatatgtgaaacattttttcttctgaagattcttaaaaattgaatgtggctgaagttgaacatgggagcttattgctaatttagagataggaaactgaagcataaagaattaatgacttactttaattactggaattcttctgcaacatttgacaaaactaaccttgaataaggcccactgtaatacgtagctctcttaaatataacacttaggactagaagattagaaactaccaatcccaactacgtaataggaaaatgtaggatcaaaaggcccatgtatataagtactgaccactgggccataatgttgcttctcaggctatatgcagtcctttagtcagaagtcaataggcctatttattaatattttacagaccatattacctggattaccagggactatctttgctgcagagatcaagggttaagatctatgggaagatacttatttttctgaggtccttatgtcctgtcatataattaaagactcaagagaatttatgtgaaatgctttctgtatgcccaaatctttagattaaaattatatagctgctcct

SEQ ID NO: 4839 - DNA, 579 bp, Homo sapiens
  source 1..579: mol_type = unassigned DNA
aaggctaggtgaggtgtctttggcaaggttgcacagggatccagaggtggagtcgaccgccagcatcttggcctctgtgaaggaacaagaggcccagtttgagaagctgacccgggcgctggaggaggaacggcgccacgtctcggcgcagctggaacgcgtccgggtctcaccacaagatgccaacccactcatggccaacggcacactcacccgccggcatcagaacggccggtttgtgggcgatgctgaccttgaaagacagaaattttcagatttgaaactcaacggaccccaggatcacagtcaccttctatatagcaccatccccaggatgcaggagccggggcagattgtggagacctacacggaggaggatcctgagggagccatgtctgtagtctctgtggagacctcagatgatgggaccactcggcgcacagagaccacggtcaagaaagtagtgaagactgtgacaacacggacagtacagccagtcgctatgggaccagacgggttgcctgtggatgcttcatcagtttctaacaactatatccagactttgggtcgtgatttccg

SEQ ID NO: 4840 - DNA, 5814 bp, Homo sapiens
  source 1..5814: mol_type = unassigned DNA
ctgccagatcagtttgtcaccacccaggctcccttgcctttggctgggtgcaacttccattttaggtgttggatctgagggggaaaaaaaagagagagggagagagagagaaagaagagcaggaaagatcccgaaaggaggaagaggtggcgaaaaatcaactgccctgctggatttgtctttctcagcaccttggcgaagccttgggtttctttcttaaaggactgatttttagaactccacatttgagaacggccggtttgtgggcgatgctgaccttgaaagacagaaattttcagatttgaaactcaacggaccccaggatcacagtcaccttctatatagcaccatccccaggatgcaggagccggggcagattgtggagacctacacggaggaggatcctgagggagccatgtctgtagtctctgtggagacctcagatgatgggaccactcggcgcacagagaccacggtcaagaaagtagtgaagactgtgacaacacggacagtacagccagtcgctatgggaccagacgggttgcctgtggatgcttcatcagtttctaacaactatatccagactttgggtcgtgatttccgcaagaatggcaatgggggacctggtccctatgtggggcaagctggcactgctacccttcctaggaacttccactaccctcctgatggttatagtcgccactatgaagatggttatccaggtggcagtgataactatggcagtctgtcccgggtgacccgcattgaggagcggtataggcccagcatggaaggctaccgggcacctagtagacaggatgtgtatgggccccaaccccaggttcgggtaggtgggagcagcgtggatctgcatcgctttcatccagagccttatgggctagaggatgaccagcgtagtatgggctatgatgacctggattatggtatgatgtctgattatggcactgcccgtcggactgggacaccctctgaccctcgtcggcgcctcaggagctatgaagacatgattggtgaggaggtgccatcggatcaatactactgggctcctttggcccagcatgagcgaggaagtttagcaagcttggatagcctgcgcaaaggagggcctccacctcctaattggagacagccagagctgccagaggtgatcgccatgcttggattccgcttggatgctgtcaagtccaatgcagctgcatacctgcaacacttatgctaccgcaatgacaaggtgaagactgacgtgcggaagctcaagggcatcccagtactggtgggattgttagaccatcccaaaaaggaagtgcaccttggagcctgtggagctctcaagaatatctcttttggacgtgaccaggataacaagattgccataaaaaactgtgatggtgtgcctgcccttgtgcgattgcttcgaaaggctcgtgatatggaccttactgaagttattaccggaaccctgtggaatctttcatcccatgactcaatcaaaatggagattgtggaccatgcactgcatgccttgacagatgaagtgatcattcctcattctggttgggagcgggaacctaatgaagactgtaagccacgccacattgagtgggaatcggtgctcaccaacacagctggctgccttaggaatgtaagctcagagaggagtgaagctcgccggaaacttcgggaatgtgatggtttagttgatgccctcattttcattgttcaggctgagattgggcagaaggattcagacagcaagcttgtagagaactgtgtttgccttcttcggaacttatcatatcaagttcaccgggagatcccacaggcagagcgttaccaagaggcagctcccaatgttgccaacaatactgggccacatgctgccagttgctttggggccaagaagggcaaagggaaaaaacctatagaggatccagcaaacgatacagtggatttccctaaaagaacgagtccagctcgaggctatgagctcttatttcagccagaggtggttcggatatacatctcacttcttaaggagagcaagactcctgccatcctagaagcctcagctggagctatccagaacttgtgtgctgggcgctggacgtatggtcgatacatccgctctgctctgcgtcaagagaaggctctttctgccatagctgacctcctgactaatgaacatgaacgggtggtgaaagctgcatctggagcactgagaaacctggctgtggatgctcgcaacaaagaattaattggtaaacatgctattcctaacttggtaaagaatctgccaggaggacagcagaactcctcttggaatttctctgaggacactgtcatctctattttgaacactatcaacgaggttatcgctgagaacttggaggctgccaaaaagcttcgagagacacagggtattgagaagctggtgttgatcaacaaatcagggaaccgctcagaaaaagaagttcgagcagcagcacttgtattacagacaatctggggatataaggaactgcggaagccactggaaaaagaaggatggaagaaatcagactttcaggtgaatctaaacaatgcttcccgaagccagagcagtcattcatatgatgatagtactctccctctcattgaccggaaccaaaaatcagataagaaacctgatcgggaagaaattcagatgagcaatatgggatcaaacacaaaatcactagataacaactattccacaccaaatgagagaggagaccacaatagaacactggatcgatcgggggatctaggcgacatggagccattgaagggaacaacacccttgatgcaggacgaggggcaggaatctctggaggaagagttggatgtgttggttttggatgatgaggggggccaagtgtcttacccctccatgcagaagatttagcaccactatctccgttccatctgggcttatatgtacttttattttttggtggtgaaattgactgatgattttcctttttcttcgctggactattgtgccaactgccaggctgcctcctgcccttacagccctaagtggctgccttctttccatcaactcccaacttcttcctgtgaagtttaattgtctcaacgcctccccctcccccattccctccatttttctcccaagaaacctgactcaattatttgcatattttgagaaactgctgcagattagttctttttgccagttttccctggaactcctggccttttgtggaggggagggatggagagaataggaatcttcactagaagccgtgggaagaattggaagttacatgctgtatatgcaatgtccagcagtctgataaactgacgattcttaatcaagatttttttcctgatggggaagggacttttattttcttttagagaggggaaagtgtgagctcttcccttattcctaatggctatttttgaagcaaagaaggccagcaacattggcacatgccacctggcaaaggacccttgagtaagtgaaggtctcctaaaactgggattaagaaaccttgctctcctcatctccaaggcagggaccatcaagaacctacagactccatctcttctgcaagcctcatgccaaccctgggctattgctgctgccccttaaacacaggctgtccttaacccacctctcctgccctgtgatatgtctgctgagttggcctggccatttccaagaggctgtagaaaggggagaatgtcaaggaagacttttggtagagaaggagcagaaagatgtgtttttgggaagaagaagacctctaggaggagctagtaggaatgtacatgaagcaattagtctgaaactggcttccccactcccccgtttctccttttcctatccttataggcctgtcccttgcctctgccctggattggttggcaaactaaaggacttgatgtacataactcctgtcccttttcccttacaaggtggggattgcccctggctttgcctcttctttgtgcctttggcctggggtgcatctcctcccgcccttccatgtgcctttctttgcctctgcagtctcatttctcataattttgcaaattatattttgttgctttcttacctactattggccctaaatagcagaaagaagagaagtgaccgagagaacctcagattcttcattgaggattggtatagccatgatttcagtcatagcaagcttttgctcaacagcatatgggtgggattttgcaaaaatcctattctgatgaatctcaaagtaaggctggtaagagaagtgagtggtgtgactcttactccttaggtgcccagaatttaccatcatctctgaaggagttacagggaagtggtctccccaattctcccctccctccagtattgccccctctcactttagcatatattaattagcaggttgggctagagaaatcagctgctatgcgggttgattattattattatttctaatccttttccttatttgccttctactccccttaatctaatctaaaagctctgttccatgcaactggagttccttatccctctcttccccttcccttatatattgaggctatggggtaggagaaaagtgcacaacccaccaccccctttactcgtgcattaaaatttcttatttacccttttcccccttcccatttcttcccactttcatctaccttttctggcaaaaaggagccttttgctctctgtgaccctaagagcacactgcacagggaaaattgccccatccagacctggctccactcttgatctctcttgtcctcttctgctcttttcctggtgctcttttttctcggtggggtgtgggtaatagaacagccgtgggcttttggggacctttaacttttttttctctcttttgtttataaaaaacactaaacattcaattccagagaaccaaaaatcccaccttcccaccgaacactactaaggggcttgtgttctgctccataccttttctcttttctttctgtcttgttaatgcttttaaaaacaaatgagttttttatataaataaagtttttaaagtgtgtatgtggggggtctgtgtcatttcttcacttcaagctgttatttcttccctgctttgcatctttgttacttccttatgtatcagtgtcctttccagagcaaccagaaggaggttataccaggatttattttgagctcagccccaactctttatcaagcaacattcttgttaactatatgtgaaacattttttcttctgaagattcttaaaaattgaatgtggctgaagttgaacatgggagcttattgctaatttagagataggaaactgaagcataaagaattaatgacttactttaattactggaattcttctgcaacatttgacaaaactaaccttgaataaggcccactgtaatacgtagctctcttaaatataacacttaggactagaagattagaaactaccaatcccaactacgtaataggaaaatgtaggatcaaaaggcccatgtatataagtactgaccactgggccataatgttgcttctcaggctatatgcagtcctttagtcagaagtcaataggcctatttattaatattttacagaccatattacctggattaccagggactatctttgctgcagagatcaagggttaagatctatgggaagatacttatttttctgaggtccttatgtcctgtcatataattaaagactcaagagaatttatgtgaaatgctttctgtatgcccaaatctttagattaaaattatatagctgctcct

SEQ ID NO: 4841 - DNA, 5925 bp, Homo sapiens
  source 1..5925: mol_type = unassigned DNA
ctgccagatcagtttgtcaccacccaggctcccttgcctttggctgggtgcaacttccattttaggtgttggatctgagggggaaaaaaaagagagagggagagagagagaaagaagagcaggaaagatcccgaaaggaggaagaggtggcgaaaaatcaactgccctgctggatttgtctttctcagcaccttggcgaagccttgggtttctttcttaaaggactgatttttagaactccacatttgaggtggagtcgaccgccagcatcttggcctctgtgaaggaacaagaggcccagtttgagaagctgacccgggcgctggaggaggaacggcgccacgtctcggcgcagctggaacgcgtccgggtctcaccacaagatgccaacccactcatggccaacggcacactcacccgccggcatcagaacggccggtttgtgggcgatgctgaccttgaaagacagaaattttcagatttgaaactcaacggaccccaggatcacagtcaccttctatatagcaccatccccaggatgcaggagccggggcagattgtggagacctacacggaggaggatcctgagggagccatgtctgtagtctctgtggagacctcagatgatgggaccactcggcgcacagagaccacggtcaagaaagtagtgaagactgtgacaacacggacagtacagccagtcgctatgggaccagacgggttgcctgtggatgcttcatcagtttctaacaactatatccagactttgggtcgtgatttccgcaagaatggcaatgggggacctggtccctatgtggggcaagctggcactgctacccttcctaggaacttccactaccctcctgatggttatagtcgccactatgaagatggttatccaggtggcagtgataactatggcagtctgtcccgggtgacccgcattgaggagcggtataggcccagcatggaaggctaccgggcacctagtagacaggatgtgtatgggccccaaccccaggttcgggtaggtgggagcagcgtggatctgcatcgctttcatccagagccttatgggctagaggatgaccagcgtagtatgggctatgatgacctggattatggtatgatgtctgattatggcactgcccgtcggactgggacaccctctgaccctcgtcggcgcctcaggagctatgaagacatgattggtgaggaggtgccatcggatcaatactactgggctcctttggcccagcatgagcgaggaagtttagcaagcttggatagcctgcgcaaaggagggcctccacctcctaattggagacagccagagctgccagaggtgatcgccatgcttggattccgcttggatgctgtcaagtccaatgcagctgcatacctgcaacacttatgctaccgcaatgacaaggtgaagactgacgtgcggaagctcaagggcatcccagtactggtgggattgttagaccatcccaaaaaggaagtgcaccttggagcctgtggagctctcaagaatatctcttttggacgtgaccaggataacaagattgccataaaaaactgtgatggtgtgcctgcccttgtgcgattgcttcgaaaggctcgtgatatggaccttactgaagttattaccggaaccctgtggaatctttcatcccatgactcaatcaaaatggagattgtggaccatgcactgcatgccttgacagatgaagtgatcattcctcattctggttgggagcgggaacctaatgaagactgtaagccacgccacattgagtgggaatcggtgctcaccaacacagctggctgccttaggaatgtaagctcagagaggagtgaagctcgccggaaacttcgggaatgtgatggtttagttgatgccctcattttcattgttcaggctgagattgggcagaaggattcagacagcaagcttgtagagaactgtgtttgccttcttcggaacttatcatatcaagttcaccgggagatcccacaggcagagcgttaccaagaggcagctcccaatgttgccaacaatactgggccacatgctgccagttgctttggggccaagaagggcaaagatgagtggttctccagagggaaaaaacctatagaggatccagcaaacgatacagtggatttccctaaaagaacgagtccagctcgaggctatgagctcttatttcagccagaggtggttcggatatacatctcacttcttaaggagagcaagactcctgccatcctagaagcctcagctggagctatccagaacttgtgtgctgggcgctggacgtatggtcgatacatccgctctgctctgcgtcaagagaaggctctttctgccatagctgacctcctgactaatgaacatgaacgggtggtgaaagctgcatctggagcactgagaaacctggctgtggatgctcgcaacaaagaattaattggtaaacatgctattcctaacttggtaaagaatctgccaggaggacagcagaactcctcttggaatttctctgaggacactgtcatctctattttgaacactatcaacgaggttatcgctgagaacttggaggctgccaaaaagcttcgagagacacagggtattgagaagctggtgttgatcaacaaatcagggaaccgctcagaaaaagaagttcgagcagcagcacttgtattacagacaatctggggatataaggaactgcggaagccactggaaaaagaaggatggaagaaatcagactttcaggtgaatctaaacaatgcttcccgaagccagagcagtcattcatatgatgatagtactctccctctcattgaccggaaccaaaaatcagataagaaacctgatcgggaagaaattcagatgagcaatatgggatcaaacacaaaatcactagataacaactattccacaccaaatgagagaggagaccacaatagaacactggatcgatcgggggatctaggcgacatggagccattgaagggaacaacacccttgatgcagaagatttagcaccactatctccgttccatctgggcttatatgtacttttattttttggtggtgaaattgactgatgattttcctttttcttcgctggactattgtgccaactgccaggctgcctcctgcccttacagccctaagtggctgccttctttccatcaactcccaacttcttcctgtgaagtttaattgtctcaacgcctccccctcccccattccctccatttttctcccaagaaacctgactcaattatttgcatattttgagaaactgctgcagattagttctttttgccagttttccctggaactcctggccttttgtggaggggagggatggagagaataggaatcttcactagaagccgtgggaagaattggaagttacatgctgtatatgcaatgtccagcagtctgataaactgacgattcttaatcaagatttttttcctgatggggaagggacttttattttcttttagagaggggaaagtgtgagctcttcccttattcctaatggctatttttgaagcaaagaaggccagcaacattggcacatgccacctggcaaaggacccttgagtaagtgaaggtctcctaaaactgggattaagaaaccttgctctcctcatctccaaggcagggaccatcaagaacctacagactccatctcttctgcaagcctcatgccaaccctgggctattgctgctgccccttaaacacaggctgtccttaacccacctctcctgccctgtgatatgtctgctgagttggcctggccatttccaagaggctgtagaaaggggagaatgtcaaggaagacttttggtagagaaggagcagaaagatgtgtttttgggaagaagaagacctctaggaggagctagtaggaatgtacatgaagcaattagtctgaaactggcttccccactcccccgtttctccttttcctatccttataggcctgtcccttgcctctgccctggattggttggcaaactaaaggacttgatgtacataactcctgtcccttttcccttacaaggtggggattgcccctggctttgcctcttctttgtgcctttggcctggggtgcatctcctcccgcccttccatgtgcctttctttgcctctgcagtctcatttctcataattttgcaaattatattttgttgctttcttacctactattggccctaaatagcagaaagaagagaagtgaccgagagaacctcagattcttcattgaggattggtatagccatgatttcagtcatagcaagcttttgctcaacagcatatgggtgggattttgcaaaaatcctattctgatgaatctcaaagtaaggctggtaagagaagtgagtggtgtgactcttactccttaggtgcccagaatttaccatcatctctgaaggagttacagggaagtggtctccccaattctcccctccctccagtattgccccctctcactttagcatatattaattagcaggttgggctagagaaatcagctgctatgcgggttgattattattattatttctaatccttttccttatttgccttctactccccttaatctaatctaaaagctctgttccatgcaactggagttccttatccctctcttccccttcccttatatattgaggctatggggtaggagaaaagtgcacaacccaccaccccctttactcgtgcattaaaatttcttatttacccttttcccccttcccatttcttcccactttcatctaccttttctggcaaaaaggagccttttgctctctgtgaccctaagagcacactgcacagggaaaattgccccatccagacctggctccactcttgatctctcttgtcctcttctgctcttttcctggtgctcttttttctcggtggggtgtgggtaatagaacagccgtgggcttttggggacctttaacttttttttctctcttttgtttataaaaaacactaaacattcaattccagagaaccaaaaatcccaccttcccaccgaacactactaaggggcttgtgttctgctccataccttttctcttttctttctgtcttgttaatgcttttaaaaacaaatgagttttttatataaataaagtttttaaagtgtgtatgtggggggtctgtgtcatttcttcacttcaagctgttatttcttccctgctttgcatctttgttacttccttatgtatcagtgtcctttccagagcaaccagaaggaggttataccaggatttattttgagctcagccccaactctttatcaagcaacattcttgttaactatatgtgaaacattttttcttctgaagattcttaaaaattgaatgtggctgaagttgaacatgggagcttattgctaatttagagataggaaactgaagcataaagaattaatgacttactttaattactggaattcttctgcaacatttgacaaaactaaccttgaataaggcccactgtaatacgtagctctcttaaatataacacttaggactagaagattagaaactaccaatcccaactacgtaataggaaaatgtaggatcaaaaggcccatgtatataagtactgaccactgggccataatgttgcttctcaggctatatgcagtcctttagtcagaagtcaataggcctatttattaatattttacagaccatattacctggattaccagggactatctttgctgcagagatcaagggttaagatctatgggaagatacttatttttctgaggtccttatgtcctgtcatataattaaagactcaagagaatttatgtgaaatgctttctgtatgcccaaatctttagattaaaattatatagctgctcct

SEQ ID NO: 4842 - DNA, 5053 bp, Homo sapiens
  source 1..5053: mol_type = unassigned DNA
ctgccagatcagtttgtcaccacccaggctcccttgcctttggctgggtgcaacttccattttaggtgttggatctgagggggaaaaaaaagagagagggagagagagagaaagaagagcaggaaagatcccgaaaggaggaagaggtggcgaaaaatcaactgccctgctggatttgtctttctcagcaccttggcgaagccttgggtttctttcttaaaggactgatttttagaactccacatttgaggagctatgaagacatgattggtgaggaggtgccatcggatcaatactactgggctcctttggcccagcatgagcgaggaagtttagcaagcttggatagcctgcgcaaaggagggcctccacctcctaattggagacagccagagctgccagaggtgatcgccatgcttggattccgcttggatgctgtcaagtccaatgcagctgcatacctgcaacacttatgctaccgcaatgacaaggtgaagactgacgtgcggaagctcaagggcatcccagtactggtgggattgttagaccatcccaaaaaggaagtgcaccttggagcctgtggagctctcaagaatatctcttttggacgtgaccaggataacaagattgccataaaaaactgtgatggtgtgcctgcccttgtgcgattgcttcgaaaggctcgtgatatggaccttactgaagttattaccggaaccctgtggaatctttcatcccatgactcaatcaaaatggagattgtggaccatgcactgcatgccttgacagatgaagtgatcattcctcattctggttgggagcgggaacctaatgaagactgtaagccacgccacattgagtgggaatcggtgctcaccaacacagctggctgccttaggaatgtaagctcagagaggagtgaagctcgccggaaacttcgggaatgtgatggtttagttgatgccctcattttcattgttcaggctgagattgggcagaaggattcagacagcaagcttgtagagaactgtgtttgccttcttcggaacttatcatatcaagttcaccgggagatcccacaggcagagcgttaccaagaggcagctcccaatgttgccaacaatactgggccacatgctgccagttgctttggggccaagaagggcaaagggaaaaaacctatagaggatccagcaaacgatacagtggatttccctaaaagaacgagtccagctcgaggctatgagctcttatttcagccagaggtggttcggatatacatctcacttcttaaggagagcaagactcctgccatcctagaagcctcagctggagctatccagaacttgtgtgctgggcgctggacgtatggtcgatacatccgctctgctctgcgtcaagagaaggctctttctgccatagctgacctcctgactaatgaacatgaacgggtggtgaaagctgcatctggagcactgagaaacctggctgtggatgctcgcaacaaagaattaattggtaaacatgctattcctaacttggtaaagaatctgccaggaggacagcagaactcctcttggaatttctctgaggacactgtcatctctattttgaacactatcaacgaggttatcgctgagaacttggaggctgccaaaaagcttcgagagacacagggtattgagaagctggtgttgatcaacaaatcagggaaccgctcagaaaaagaagttcgagcagcagcacttgtattacagacaatctggggatataaggaactgcggaagccactggaaaaagaaggatggaagaaatcagactttcaggtgaatctaaacaatgcttcccgaagccagagcagtcattcatatgatgatagtactctccctctcattgaccggaaccaaaaatcagataagaaacctgatcgggaagaaattcagatgagcaatatgggatcaaacacaaaatcactagataacaactattccacaccaaatgagagaggagaccacaatagaacactggatcgatcgggggatctaggcgacatggagccattgaagggaacaacacccttgatgcaggacgaggggcaggaatctctggaggaagagttggatgtgttggttttggatgatgaggggggccaagtgtcttacccctccatgcagaagatttagcaccactatctccgttccatctgggcttatatgtacttttattttttggtggtgaaattgactgatgattttcctttttcttcgctggactattgtgccaactgccaggctgcctcctgcccttacagccctaagtggctgccttctttccatcaactcccaacttcttcctgtgaagtttaattgtctcaacgcctccccctcccccattccctccatttttctcccaagaaacctgactcaattatttgcatattttgagaaactgctgcagattagttctttttgccagttttccctggaactcctggccttttgtggaggggagggatggagagaataggaatcttcactagaagccgtgggaagaattggaagttacatgctgtatatgcaatgtccagcagtctgataaactgacgattcttaatcaagatttttttcctgatggggaagggacttttattttcttttagagaggggaaagtgtgagctcttcccttattcctaatggctatttttgaagcaaagaaggccagcaacattggcacatgccacctggcaaaggacccttgagtaagtgaaggtctcctaaaactgggattaagaaaccttgctctcctcatctccaaggcagggaccatcaagaacctacagactccatctcttctgcaagcctcatgccaaccctgggctattgctgctgccccttaaacacaggctgtccttaacccacctctcctgccctgtgatatgtctgctgagttggcctggccatttccaagaggctgtagaaaggggagaatgtcaaggaagacttttggtagagaaggagcagaaagatgtgtttttgggaagaagaagacctctaggaggagctagtaggaatgtacatgaagcaattagtctgaaactggcttccccactcccccgtttctccttttcctatccttataggcctgtcccttgcctctgccctggattggttggcaaactaaaggacttgatgtacataactcctgtcccttttcccttacaaggtggggattgcccctggctttgcctcttctttgtgcctttggcctggggtgcatctcctcccgcccttccatgtgcctttctttgcctctgcagtctcatttctcataattttgcaaattatattttgttgctttcttacctactattggccctaaatagcagaaagaagagaagtgaccgagagaacctcagattcttcattgaggattggtatagccatgatttcagtcatagcaagcttttgctcaacagcatatgggtgggattttgcaaaaatcctattctgatgaatctcaaagtaaggctggtaagagaagtgagtggtgtgactcttactccttaggtgcccagaatttaccatcatctctgaaggagttacagggaagtggtctccccaattctcccctccctccagtattgccccctctcactttagcatatattaattagcaggttgggctagagaaatcagctgctatgcgggttgattattattattatttctaatccttttccttatttgccttctactccccttaatctaatctaaaagctctgttccatgcaactggagttccttatccctctcttccccttcccttatatattgaggctatggggtaggagaaaagtgcacaacccaccaccccctttactcgtgcattaaaatttcttatttacccttttcccccttcccatttcttcccactttcatctaccttttctggcaaaaaggagccttttgctctctgtgaccctaagagcacactgcacagggaaaattgccccatccagacctggctccactcttgatctctcttgtcctcttctgctcttttcctggtgctcttttttctcggtggggtgtgggtaatagaacagccgtgggcttttggggacctttaacttttttttctctcttttgtttataaaaaacactaaacattcaattccagagaaccaaaaatcccaccttcccaccgaacactactaaggggcttgtgttctgctccataccttttctcttttctttctgtcttgttaatgcttttaaaaacaaatgagttttttatataaataaagtttttaaagtgtgtatgtggggggtctgtgtcatttcttcacttcaagctgttatttcttccctgctttgcatctttgttacttccttatgtatcagtgtcctttccagagcaaccagaaggaggttataccaggatttattttgagctcagccccaactctttatcaagcaacattcttgttaactatatgtgaaacattttttcttctgaagattcttaaaaattgaatgtggctgaagttgaacatgggagcttattgctaatttagagataggaaactgaagcataaagaattaatgacttactttaattactggaattcttctgcaacatttgacaaaactaaccttgaataaggcccactgtaatacgtagctctcttaaatataacacttaggactagaagattagaaactaccaatcccaactacgtaataggaaaatgtaggatcaaaaggcccatgtatataagtactgaccactgggccataatgttgcttctcaggctatatgcagtcctttagtcagaagtcaataggcctatttattaatattttacagaccatattacctggattaccagggactatctttgctgcagagatcaagggttaagatctatgggaagatacttatttttctgaggtccttatgtcctgtcatataattaaagactcaagagaatttatgtgaaatgctttctgtatgcccaaatctttagattaaaattatatagctgctcct

SEQ ID NO: 4843 - DNA, 5655 bp, Homo sapiens
  source 1..5655: mol_type = unassigned DNA
ctgccagatcagtttgtcaccacccaggctcccttgcctttggctgggtgcaacttccattttaggtgttggatctgagggggaaaaaaaagagagagggagagagagagaaagaagagcaggaaagatcccgaaaggaggaagaggtggcgaaaaatcaactgccctgctggatttgtctttctcagcaccttggcgaagccttgggtttctttcttaaaggactgatttttagaactccacatttgaggatcacagtcaccttctatatagcaccatccccaggatgcaggagccggggcagattgtggagacctacacggaggaggatcctgagggagccatgtctgtagtctctgtggagacctcagatgatgggaccactcggcgcacagagaccacggtcaagaaagtagtgaagactgtgacaacacggacagtacagccagtcgctatgggaccagacgggttgcctgtggatgcttcatcagtttctaacaactatatccagactttgggtcgtgatttccgcaagaatggcaatgggggacctggtccctatgtggggcaagctggcactgctacccttcctaggaacttccactaccctcctgatggttatagtcgccactatgaagatggttatccaggtggcagtgataactatggcagtctgtcccgggtgacccgcattgaggagcggtataggcccagcatggaaggctaccgggcacctagtagacaggatgtgtatgggccccaaccccaggttcgggtaggtgggagcagcgtggatctgcatcgctttcatccagagccttatgggctagaggatgaccagcgtagtatgggctatgatgacctggattatggtatgatgtctgattatggcactgcccgtcggactgggacaccctctgaccctcgtcggcgcctcaggagctatgaagacatgattggtgaggaggtgccatcggatcaatactactgggctcctttggcccagcatgagcgaggaagtttagcaagcttggatagcctgcgcaaaggagggcctccacctcctaattggagacagccagagctgccagaggtgatcgccatgcttggattccgcttggatgctgtcaagtccaatgcagctgcatacctgcaacacttatgctaccgcaatgacaaggtgaagactgacgtgcggaagctcaagggcatcccagtactggtgggattgttagaccatcccaaaaaggaagtgcaccttggagcctgtggagctctcaagaatatctcttttggacgtgaccaggataacaagattgccataaaaaactgtgatggtgtgcctgcccttgtgcgattgcttcgaaaggctcgtgatatggaccttactgaagttattaccggaaccctgtggaatctttcatcccatgactcaatcaaaatggagattgtggaccatgcactgcatgccttgacagatgaagtgatcattcctcattctggttgggagcgggaacctaatgaagactgtaagccacgccacattgagtgggaatcggtgctcaccaacacagctggctgccttaggaatgtaagctcagagaggagtgaagctcgccggaaacttcgggaatgtgatggtttagttgatgccctcattttcattgttcaggctgagattgggcagaaggattcagacagcaagcttgtagagaactgtgtttgccttcttcggaacttatcatatcaagttcaccgggagatcccacaggcagagcgttaccaagaggcagctcccaatgttgccaacaatactgggccacatgctgccagttgctttggggccaagaagggcaaagggaaaaaacctatagaggatccagcaaacgatacagtggatttccctaaaagaacgagtccagctcgaggctatgagctcttatttcagccagaggtggttcggatatacatctcacttcttaaggagagcaagactcctgccatcctagaagcctcagctggagctatccagaacttgtgtgctgggcgctggacgtatggtcgatacatccgctctgctctgcgtcaagagaaggctctttctgccatagctgacctcctgactaatgaacatgaacgggtggtgaaagctgcatctggagcactgagaaacctggctgtggatgctcgcaacaaagaattaattggtaaacatgctattcctaacttggtaaagaatctgccaggaggacagcagaactcctcttggaatttctctgaggacactgtcatctctattttgaacactatcaacgaggttatcgctgagaacttggaggctgccaaaaagcttcgagagacacagggtattgagaagctggtgttgatcaacaaatcagggaaccgctcagaaaaagaagttcgagcagcagcacttgtattacagacaatctggggatataaggaactgcggaagccactggaaaaagaaggatggaagaaatcagactttcaggtgaatctaaacaatgcttcccgaagccagagcagtcattcatatgatgatagtactctccctctcattgaccggaaccaaaaatcagataagaaacctgatcgggaagaaattcagatgagcaatatgggatcaaacacaaaatcactagataacaactattccacaccaaatgagagaggagaccacaatagaacactggatcgatcgggggatctaggcgacatggagccattgaagggaacaacacccttgatgcagaagatttagcaccactatctccgttccatctgggcttatatgtacttttattttttggtggtgaaattgactgatgattttcctttttcttcgctggactattgtgccaactgccaggctgcctcctgcccttacagccctaagtggctgccttctttccatcaactcccaacttcttcctgtgaagtttaattgtctcaacgcctccccctcccccattccctccatttttctcccaagaaacctgactcaattatttgcatattttgagaaactgctgcagattagttctttttgccagttttccctggaactcctggccttttgtggaggggagggatggagagaataggaatcttcactagaagccgtgggaagaattggaagttacatgctgtatatgcaatgtccagcagtctgataaactgacgattcttaatcaagatttttttcctgatggggaagggacttttattttcttttagagaggggaaagtgtgagctcttcccttattcctaatggctatttttgaagcaaagaaggccagcaacattggcacatgccacctggcaaaggacccttgagtaagtgaaggtctcctaaaactgggattaagaaaccttgctctcctcatctccaaggcagggaccatcaagaacctacagactccatctcttctgcaagcctcatgccaaccctgggctattgctgctgccccttaaacacaggctgtccttaacccacctctcctgccctgtgatatgtctgctgagttggcctggccatttccaagaggctgtagaaaggggagaatgtcaaggaagacttttggtagagaaggagcagaaagatgtgtttttgggaagaagaagacctctaggaggagctagtaggaatgtacatgaagcaattagtctgaaactggcttccccactcccccgtttctccttttcctatccttataggcctgtcccttgcctctgccctggattggttggcaaactaaaggacttgatgtacataactcctgtcccttttcccttacaaggtggggattgcccctggctttgcctcttctttgtgcctttggcctggggtgcatctcctcccgcccttccatgtgcctttctttgcctctgcagtctcatttctcataattttgcaaattatattttgttgctttcttacctactattggccctaaatagcagaaagaagagaagtgaccgagagaacctcagattcttcattgaggattggtatagccatgatttcagtcatagcaagcttttgctcaacagcatatgggtgggattttgcaaaaatcctattctgatgaatctcaaagtaaggctggtaagagaagtgagtggtgtgactcttactccttaggtgcccagaatttaccatcatctctgaaggagttacagggaagtggtctccccaattctcccctccctccagtattgccccctctcactttagcatatattaattagcaggttgggctagagaaatcagctgctatgcgggttgattattattattatttctaatccttttccttatttgccttctactccccttaatctaatctaaaagctctgttccatgcaactggagttccttatccctctcttccccttcccttatatattgaggctatggggtaggagaaaagtgcacaacccaccaccccctttactcgtgcattaaaatttcttatttacccttttcccccttcccatttcttcccactttcatctaccttttctggcaaaaaggagccttttgctctctgtgaccctaagagcacactgcacagggaaaattgccccatccagacctggctccactcttgatctctcttgtcctcttctgctcttttcctggtgctcttttttctcggtggggtgtgggtaatagaacagccgtgggcttttggggacctttaacttttttttctctcttttgtttataaaaaacactaaacattcaattccagagaaccaaaaatcccaccttcccaccgaacactactaaggggcttgtgttctgctccataccttttctcttttctttctgtcttgttaatgcttttaaaaacaaatgagttttttatataaataaagtttttaaagtgtgtatgtggggggtctgtgtcatttcttcacttcaagctgttatttcttccctgctttgcatctttgttacttccttatgtatcagtgtcctttccagagcaaccagaaggaggttataccaggatttattttgagctcagccccaactctttatcaagcaacattcttgttaactatatgtgaaacattttttcttctgaagattcttaaaaattgaatgtggctgaagttgaacatgggagcttattgctaatttagagataggaaactgaagcataaagaattaatgacttactttaattactggaattcttctgcaacatttgacaaaactaaccttgaataaggcccactgtaatacgtagctctcttaaatataacacttaggactagaagattagaaactaccaatcccaactacgtaataggaaaatgtaggatcaaaaggcccatgtatataagtactgaccactgggccataatgttgcttctcaggctatatgcagtcctttagtcagaagtcaataggcctatttattaatattttacagaccatattacctggattaccagggactatctttgctgcagagatcaagggttaagatctatgggaagatacttatttttctgaggtccttatgtcctgtcatataattaaagactcaagagaatttatgtgaaatgctttctgtatgcccaaatctttagattaaaattatatagctgctcct

SEQ ID NO: 4844 - DNA, 5749 bp, Homo sapiens
  source 1..5749: mol_type = unassigned DNA
ctgccagatcagtttgtcaccacccaggctcccttgcctttggctgggtgcaacttccattttaggtgttggatctgagggggaaaaaaaagagagagggagagagagagaaagaagagcaggaaagatcccgaaaggaggaagaggtggcgaaaaatcaactgccctgctggatttgtctttctcagcaccttggcgaagccttgggtttctttcttaaaggactgatttttagaactccacatttgaggtgtgtggcttttgaagaaaataacggccggtttgtgggcgatgctgaccttgaaagacagaaattttcagatttgaaactcaacggaccccaggatcacagtcaccttctatatagcaccatccccaggatgcaggagccggggcagattgtggagacctacacggaggaggatcctgagggagccatgtctgtagtctctgtggagacctcagatgatgggaccactcggcgcacagagaccacggtcaagaaagtagtgaagactgtgacaacacggacagtacagccagtcgctatgggaccagacgggttgcctgtggatgcttcatcagtttctaacaactatatccagactttgggtcgtgatttccgcaagaatggcaatgggggacctggtccctatgtggggcaagctggcactgctacccttcctaggaacttccactaccctcctgatggttatagtcgccactatgaagatggttatccaggtggcagtgataactatggcagtctgtcccgggtgacccgcattgaggagcggtataggcccagcatggaaggctaccgggcacctagtagacaggatgtgtatgggccccaaccccaggttcgggtaggtgggagcagcgtggatctgcatcgctttcatccagagccttatgggctagaggatgaccagcgtagtatgggctatgatgacctggattatggtatgatgtctgattatggcactgcccgtcggactgggacaccctctgaccctcgtcggcgcctcaggagctatgaagacatgattggtgaggaggtgccatcggatcaatactactgggctcctttggcccagcatgagcgaggaagtttagcaagcttggatagcctgcgcaaaggagggcctccacctcctaattggagacagccagagctgccagaggtgatcgccatgcttggattccgcttggatgctgtcaagtccaatgcagctgcatacctgcaacacttatgctaccgcaatgacaaggtgaagactgacgtgcggaagctcaagggcatcccagtactggtgggattgttagaccatcccaaaaaggaagtgcaccttggagcctgtggagctctcaagaatatctcttttggacgtgaccaggataacaagattgccataaaaaactgtgatggtgtgcctgcccttgtgcgattgcttcgaaaggctcgtgatatggaccttactgaagttattaccggaaccctgtggaatctttcatcccatgactcaatcaaaatggagattgtggaccatgcactgcatgccttgacagatgaagtgatcattcctcattctggttgggagcgggaacctaatgaagactgtaagccacgccacattgagtgggaatcggtgctcaccaacacagctggctgccttaggaatgtaagctcagagaggagtgaagctcgccggaaacttcgggaatgtgatggtttagttgatgccctcattttcattgttcaggctgagattgggcagaaggattcagacagcaagcttgtagagaactgtgtttgccttcttcggaacttatcatatcaagttcaccgggagatcccacaggcagagcgttaccaagaggcagctcccaatgttgccaacaatactgggccacatgctgccagttgctttggggccaagaagggcaaagggaaaaaacctatagaggatccagcaaacgatacagtggatttccctaaaagaacgagtccagctcgaggctatgagctcttatttcagccagaggtggttcggatatacatctcacttcttaaggagagcaagactcctgccatcctagaagcctcagctggagctatccagaacttgtgtgctgggcgctggacgtatggtcgatacatccgctctgctctgcgtcaagagaaggctctttctgccatagctgacctcctgactaatgaacatgaacgggtggtgaaagctgcatctggagcactgagaaacctggctgtggatgctcgcaacaaagaattaattggtaaacatgctattcctaacttggtaaagaatctgccaggaggacagcagaactcctcttggaatttctctgaggacactgtcatctctattttgaacactatcaacgaggttatcgctgagaacttggaggctgccaaaaagcttcgagagacacagggtattgagaagctggtgttgatcaacaaatcagggaaccgctcagaaaaagaagttcgagcagcagcacttgtattacagacaatctggggatataaggaactgcggaagccactggaaaaagaaggatggaagaaatcagactttcaggtgaatctaaacaatgcttcccgaagccagagcagtcattcatatgatgatagtactctccctctcattgaccggaaccaaaaatcagataagaaacctgatcgggaagaaattcagatgagcaatatgggatcaaacacaaaatcactagataacaactattccacaccaaatgagagaggagaccacaatagaacactggatcgatcgggggatctaggcgacatggagccattgaagggaacaacacccttgatgcagaagatttagcaccactatctccgttccatctgggcttatatgtacttttattttttggtggtgaaattgactgatgattttcctttttcttcgctggactattgtgccaactgccaggctgcctcctgcccttacagccctaagtggctgccttctttccatcaactcccaacttcttcctgtgaagtttaattgtctcaacgcctccccctcccccattccctccatttttctcccaagaaacctgactcaattatttgcatattttgagaaactgctgcagattagttctttttgccagttttccctggaactcctggccttttgtggaggggagggatggagagaataggaatcttcactagaagccgtgggaagaattggaagttacatgctgtatatgcaatgtccagcagtctgataaactgacgattcttaatcaagatttttttcctgatggggaagggacttttattttcttttagagaggggaaagtgtgagctcttcccttattcctaatggctatttttgaagcaaagaaggccagcaacattggcacatgccacctggcaaaggacccttgagtaagtgaaggtctcctaaaactgggattaagaaaccttgctctcctcatctccaaggcagggaccatcaagaacctacagactccatctcttctgcaagcctcatgccaaccctgggctattgctgctgccccttaaacacaggctgtccttaacccacctctcctgccctgtgatatgtctgctgagttggcctggccatttccaagaggctgtagaaaggggagaatgtcaaggaagacttttggtagagaaggagcagaaagatgtgtttttgggaagaagaagacctctaggaggagctagtaggaatgtacatgaagcaattagtctgaaactggcttccccactcccccgtttctccttttcctatccttataggcctgtcccttgcctctgccctggattggttggcaaactaaaggacttgatgtacataactcctgtcccttttcccttacaaggtggggattgcccctggctttgcctcttctttgtgcctttggcctggggtgcatctcctcccgcccttccatgtgcctttctttgcctctgcagtctcatttctcataattttgcaaattatattttgttgctttcttacctactattggccctaaatagcagaaagaagagaagtgaccgagagaacctcagattcttcattgaggattggtatagccatgatttcagtcatagcaagcttttgctcaacagcatatgggtgggattttgcaaaaatcctattctgatgaatctcaaagtaaggctggtaagagaagtgagtggtgtgactcttactccttaggtgcccagaatttaccatcatctctgaaggagttacagggaagtggtctccccaattctcccctccctccagtattgccccctctcactttagcatatattaattagcaggttgggctagagaaatcagctgctatgcgggttgattattattattatttctaatccttttccttatttgccttctactccccttaatctaatctaaaagctctgttccatgcaactggagttccttatccctctcttccccttcccttatatattgaggctatggggtaggagaaaagtgcacaacccaccaccccctttactcgtgcattaaaatttcttatttacccttttcccccttcccatttcttcccactttcatctaccttttctggcaaaaaggagccttttgctctctgtgaccctaagagcacactgcacagggaaaattgccccatccagacctggctccactcttgatctctcttgtcctcttctgctcttttcctggtgctcttttttctcggtggggtgtgggtaatagaacagccgtgggcttttggggacctttaacttttttttctctcttttgtttataaaaaacactaaacattcaattccagagaaccaaaaatcccaccttcccaccgaacactactaaggggcttgtgttctgctccataccttttctcttttctttctgtcttgttaatgcttttaaaaacaaatgagttttttatataaataaagtttttaaagtgtgtatgtggggggtctgtgtcatttcttcacttcaagctgttatttcttccctgctttgcatctttgttacttccttatgtatcagtgtcctttccagagcaaccagaaggaggttataccaggatttattttgagctcagccccaactctttatcaagcaacattcttgttaactatatgtgaaacattttttcttctgaagattcttaaaaattgaatgtggctgaagttgaacatgggagcttattgctaatttagagataggaaactgaagcataaagaattaatgacttactttaattactggaattcttctgcaacatttgacaaaactaaccttgaataaggcccactgtaatacgtagctctcttaaatataacacttaggactagaagattagaaactaccaatcccaactacgtaataggaaaatgtaggatcaaaaggcccatgtatataagtactgaccactgggccataatgttgcttctcaggctatatgcagtcctttagtcagaagtcaataggcctatttattaatattttacagaccatattacctggattaccagggactatctttgctgcagagatcaagggttaagatctatgggaagatacttatttttctgaggtccttatgtcctgtcatataattaaagactcaagagaatttatgtgaaatgctttctgtatgcccaaatctttagattaaaattatatagctgctcct

SEQ ID NO: 4845 - DNA, 6026 bp, Homo sapiens
  source 1..6026: mol_type = unassigned DNA
ctgccagatcagtttgtcaccacccaggctcccttgcctttggctgggtgcaacttccattttaggtgttggatctgagggggaaaaaaaagagagagggagagagagagaaagaagagcaggaaagatcccgaaaggaggaagaggtggcgaaaaatcaactgccctgctggatttgtctttctcagcaccttggcgaagccttgggtttctttcttaaaggactgatttttagaactccacatttgagctctctccttcctgcttcctccttgctgtggtggctgggatgcttcttccatgattttttgaatctagactgggctgttctctgtgttaaaccaatcagttgcgaccttctcttaacaggtggagtcgaccgccagcatcttggcctctgtgaaggaacaagaggcccagtttgagaagctgacccgggcgctggaggaggaacggcgccacgtctcggcgcagctggaacgcgtccgggtctcaccacaagatgccaacccactcatggccaacggcacactcacccgccggcatcagaacggccggtttgtgggcgatgctgaccttgaaagacagaaattttcagatttgaaactcaacggaccccaggatcacagtcaccttctatatagcaccatccccaggatgcaggagccggggcagattgtggagacctacacggaggaggatcctgagggagccatgtctgtagtctctgtggagacctcagatgatgggaccactcggcgcacagagaccacggtcaagaaagtagtgaagactgtgacaacacggacagtacagccagtcgctatgggaccagacgggttgcctgtggatgcttcatcagtttctaacaactatatccagactttgggtcgtgatttccgcaagaatggcaatgggggacctggtccctatgtggggcaagctggcactgctacccttcctaggaacttccactaccctcctgatggttatagtcgccactatgaagatggttatccaggtggcagtgataactatggcagtctgtcccgggtgacccgcattgaggagcggtataggcccagcatggaaggctaccgggcacctagtagacaggatgtgtatgggccccaaccccaggttcgggtaggtgggagcagcgtggatctgcatcgctttcatccagagccttatgggctagaggatgaccagcgtagtatgggctatgatgacctggattatggtatgatgtctgattatggcactgcccgtcggactgggacaccctctgaccctcgtcggcgcctcaggagctatgaagacatgattggtgaggaggtgccatcggatcaatactactgggctcctttggcccagcatgagcgaggaagtttagcaagcttggatagcctgcgcaaaggagggcctccacctcctaattggagacagccagagctgccagaggtgatcgccatgcttggattccgcttggatgctgtcaagtccaatgcagctgcatacctgcaacacttatgctaccgcaatgacaaggtgaagactgacgtgcggaagctcaagggcatcccagtactggtgggattgttagaccatcccaaaaaggaagtgcaccttggagcctgtggagctctcaagaatatctcttttggacgtgaccaggataacaagattgccataaaaaactgtgatggtgtgcctgcccttgtgcgattgcttcgaaaggctcgtgatatggaccttactgaagttattaccggaaccctgtggaatctttcatcccatgactcaatcaaaatggagattgtggaccatgcactgcatgccttgacagatgaagtgatcattcctcattctggttgggagcgggaacctaatgaagactgtaagccacgccacattgagtgggaatcggtgctcaccaacacagctggctgccttaggaatgtaagctcagagaggagtgaagctcgccggaaacttcgggaatgtgatggtttagttgatgccctcattttcattgttcaggctgagattgggcagaaggattcagacagcaagcttgtagagaactgtgtttgccttcttcggaacttatcatatcaagttcaccgggagatcccacaggcagagcgttaccaagaggcagctcccaatgttgccaacaatactgggccacatgctgccagttgctttggggccaagaagggcaaagggaaaaaacctatagaggatccagcaaacgatacagtggatttccctaaaagaacgagtccagctcgaggctatgagctcttatttcagccagaggtggttcggatatacatctcacttcttaaggagagcaagactcctgccatcctagaagcctcagctggagctatccagaacttgtgtgctgggcgctggacgtatggtcgatacatccgctctgctctgcgtcaagagaaggctctttctgccatagctgacctcctgactaatgaacatgaacgggtggtgaaagctgcatctggagcactgagaaacctggctgtggatgctcgcaacaaagaattaattggtaaacatgctattcctaacttggtaaagaatctgccaggaggacagcagaactcctcttggaatttctctgaggacactgtcatctctattttgaacactatcaacgaggttatcgctgagaacttggaggctgccaaaaagcttcgagagacacagggtattgagaagctggtgttgatcaacaaatcagggaaccgctcagaaaaagaagttcgagcagcagcacttgtattacagacaatctggggatataaggaactgcggaagccactggaaaaagaaggatggaagaaatcagactttcaggtgaatctaaacaatgcttcccgaagccagagcagtcattcatatgatgatagtactctccctctcattgaccggaaccaaaaatcagataagaaacctgatcgggaagaaattcagatgagcaatatgggatcaaacacaaaatcactagataacaactattccacaccaaatgagagaggagaccacaatagaacactggatcgatcgggggatctaggcgacatggagccattgaagggaacaacacccttgatgcagaagatttagcaccactatctccgttccatctgggcttatatgtacttttattttttggtggtgaaattgactgatgattttcctttttcttcgctggactattgtgccaactgccaggctgcctcctgcccttacagccctaagtggctgccttctttccatcaactcccaacttcttcctgtgaagtttaattgtctcaacgcctccccctcccccattccctccatttttctcccaagaaacctgactcaattatttgcatattttgagaaactgctgcagattagttctttttgccagttttccctggaactcctggccttttgtggaggggagggatggagagaataggaatcttcactagaagccgtgggaagaattggaagttacatgctgtatatgcaatgtccagcagtctgataaactgacgattcttaatcaagatttttttcctgatggggaagggacttttattttcttttagagaggggaaagtgtgagctcttcccttattcctaatggctatttttgaagcaaagaaggccagcaacattggcacatgccacctggcaaaggacccttgagtaagtgaaggtctcctaaaactgggattaagaaaccttgctctcctcatctccaaggcagggaccatcaagaacctacagactccatctcttctgcaagcctcatgccaaccctgggctattgctgctgccccttaaacacaggctgtccttaacccacctctcctgccctgtgatatgtctgctgagttggcctggccatttccaagaggctgtagaaaggggagaatgtcaaggaagacttttggtagagaaggagcagaaagatgtgtttttgggaagaagaagacctctaggaggagctagtaggaatgtacatgaagcaattagtctgaaactggcttccccactcccccgtttctccttttcctatccttataggcctgtcccttgcctctgccctggattggttggcaaactaaaggacttgatgtacataactcctgtcccttttcccttacaaggtggggattgcccctggctttgcctcttctttgtgcctttggcctggggtgcatctcctcccgcccttccatgtgcctttctttgcctctgcagtctcatttctcataattttgcaaattatattttgttgctttcttacctactattggccctaaatagcagaaagaagagaagtgaccgagagaacctcagattcttcattgaggattggtatagccatgatttcagtcatagcaagcttttgctcaacagcatatgggtgggattttgcaaaaatcctattctgatgaatctcaaagtaaggctggtaagagaagtgagtggtgtgactcttactccttaggtgcccagaatttaccatcatctctgaaggagttacagggaagtggtctccccaattctcccctccctccagtattgccccctctcactttagcatatattaattagcaggttgggctagagaaatcagctgctatgcgggttgattattattattatttctaatccttttccttatttgccttctactccccttaatctaatctaaaagctctgttccatgcaactggagttccttatccctctcttccccttcccttatatattgaggctatggggtaggagaaaagtgcacaacccaccaccccctttactcgtgcattaaaatttcttatttacccttttcccccttcccatttcttcccactttcatctaccttttctggcaaaaaggagccttttgctctctgtgaccctaagagcacactgcacagggaaaattgccccatccagacctggctccactcttgatctctcttgtcctcttctgctcttttcctggtgctcttttttctcggtggggtgtgggtaatagaacagccgtgggcttttggggacctttaacttttttttctctcttttgtttataaaaaacactaaacattcaattccagagaaccaaaaatcccaccttcccaccgaacactactaaggggcttgtgttctgctccataccttttctcttttctttctgtcttgttaatgcttttaaaaacaaatgagttttttatataaataaagtttttaaagtgtgtatgtggggggtctgtgtcatttcttcacttcaagctgttatttcttccctgctttgcatctttgttacttccttatgtatcagtgtcctttccagagcaaccagaaggaggttataccaggatttattttgagctcagccccaactctttatcaagcaacattcttgttaactatatgtgaaacattttttcttctgaagattcttaaaaattgaatgtggctgaagttgaacatgggagcttattgctaatttagagataggaaactgaagcataaagaattaatgacttactttaattactggaattcttctgcaacatttgacaaaactaaccttgaataaggcccactgtaatacgtagctctcttaaatataacacttaggactagaagattagaaactaccaatcccaactacgtaataggaaaatgtaggatcaaaaggcccatgtatataagtactgaccactgggccataatgttgcttctcaggctatatgcagtcctttagtcagaagtcaataggcctatttattaatattttacagaccatattacctggattaccagggactatctttgctgcagagatcaagggttaagatctatgggaagatacttatttttctgaggtccttatgtcctgtcatataattaaagactcaagagaatttatgtgaaatgctttctgtatgcccaaatctttagattaaaattatatagctgctcct

SEQ ID NO: 4846 - DNA, 5751 bp, Homo sapiens
  source 1..5751: mol_type = unassigned DNA
ctgccagatcagtttgtcaccacccaggctcccttgcctttggctgggtgcaacttccattttaggtgttggatctgagggggaaaaaaaagagagagggagagagagagaaagaagagcaggaaagatcccgaaaggaggaagaggtggcgaaaaatcaactgccctgctggatttgtctttctcagcaccttggcgaagccttgggtttctttcttaaaggactgatttttagaactccacatttgagaacggccggtttgtgggcgatgctgaccttgaaagacagaaattttcagatttgaaactcaacggaccccaggatcacagtcaccttctatatagcaccatccccaggatgcaggagccggggcagattgtggagacctacacggaggaggatcctgagggagccatgtctgtagtctctgtggagacctcagatgatgggaccactcggcgcacagagaccacggtcaagaaagtagtgaagactgtgacaacacggacagtacagccagtcgctatgggaccagacgggttgcctgtggatgcttcatcagtttctaacaactatatccagactttgggtcgtgatttccgcaagaatggcaatgggggacctggtccctatgtggggcaagctggcactgctacccttcctaggaacttccactaccctcctgatggttatagtcgccactatgaagatggttatccaggtggcagtgataactatggcagtctgtcccgggtgacccgcattgaggagcggtataggcccagcatggaaggctaccgggcacctagtagacaggatgtgtatgggccccaaccccaggttcgggtaggtgggagcagcgtggatctgcatcgctttcatccagagccttatgggctagaggatgaccagcgtagtatgggctatgatgacctggattatggtatgatgtctgattatggcactgcccgtcggactgggacaccctctgaccctcgtcggcgcctcaggagctatgaagacatgattggtgaggaggtgccatcggatcaatactactgggctcctttggcccagcatgagcgaggaagtttagcaagcttggatagcctgcgcaaaggagggcctccacctcctaattggagacagccagagctgccagaggtgatcgccatgcttggattccgcttggatgctgtcaagtccaatgcagctgcatacctgcaacacttatgctaccgcaatgacaaggtgaagactgacgtgcggaagctcaagggcatcccagtactggtgggattgttagaccatcccaaaaaggaagtgcaccttggagcctgtggagctctcaagaatatctcttttggacgtgaccaggataacaagattgccataaaaaactgtgatggtgtgcctgcccttgtgcgattgcttcgaaaggctcgtgatatggaccttactgaagttattaccggaaccctgtggaatctttcatcccatgactcaatcaaaatggagattgtggaccatgcactgcatgccttgacagatgaagtgatcattcctcattctggttgggagcgggaacctaatgaagactgtaagccacgccacattgagtgggaatcggtgctcaccaacacagctggctgccttaggaatgtaagctcagagaggagtgaagctcgccggaaacttcgggaatgtgatggtttagttgatgccctcattttcattgttcaggctgagattgggcagaaggattcagacagcaagcttgtagagaactgtgtttgccttcttcggaacttatcatatcaagttcaccgggagatcccacaggcagagcgttaccaagaggcagctcccaatgttgccaacaatactgggccacatgctgccagttgctttggggccaagaagggcaaagggaaaaaacctatagaggatccagcaaacgatacagtggatttccctaaaagaacgagtccagctcgaggctatgagctcttatttcagccagaggtggttcggatatacatctcacttcttaaggagagcaagactcctgccatcctagaagcctcagctggagctatccagaacttgtgtgctgggcgctggacgtatggtcgatacatccgctctgctctgcgtcaagagaaggctctttctgccatagctgacctcctgactaatgaacatgaacgggtggtgaaagctgcatctggagcactgagaaacctggctgtggatgctcgcaacaaagaattaattggtaaacatgctattcctaacttggtaaagaatctgccaggaggacagcagaactcctcttggaatttctctgaggacactgtcatctctattttgaacactatcaacgaggttatcgctgagaacttggaggctgccaaaaagcttcgagagacacagggtattgagaagctggtgttgatcaacaaatcagggaaccgctcagaaaaagaagttcgagcagcagcacttgtattacagacaatctggggatataaggaactgcggaagccactggaaaaagaaggatggaagaaatcagactttcaggtgaatctaaacaatgcttcccgaagccagagcagtcattcatatgatgatagtactctccctctcattgaccggaaccaaaaatcagataacaactattccacaccaaatgagagaggagaccacaatagaacactggatcgatcgggggatctaggcgacatggagccattgaagggaacaacacccttgatgcaggacgaggggcaggaatctctggaggaagagttggatgtgttggttttggatgatgaggggggccaagtgtcttacccctccatgcagaagatttagcaccactatctccgttccatctgggcttatatgtacttttattttttggtggtgaaattgactgatgattttcctttttcttcgctggactattgtgccaactgccaggctgcctcctgcccttacagccctaagtggctgccttctttccatcaactcccaacttcttcctgtgaagtttaattgtctcaacgcctccccctcccccattccctccatttttctcccaagaaacctgactcaattatttgcatattttgagaaactgctgcagattagttctttttgccagttttccctggaactcctggccttttgtggaggggagggatggagagaataggaatcttcactagaagccgtgggaagaattggaagttacatgctgtatatgcaatgtccagcagtctgataaactgacgattcttaatcaagatttttttcctgatggggaagggacttttattttcttttagagaggggaaagtgtgagctcttcccttattcctaatggctatttttgaagcaaagaaggccagcaacattggcacatgccacctggcaaaggacccttgagtaagtgaaggtctcctaaaactgggattaagaaaccttgctctcctcatctccaaggcagggaccatcaagaacctacagactccatctcttctgcaagcctcatgccaaccctgggctattgctgctgccccttaaacacaggctgtccttaacccacctctcctgccctgtgatatgtctgctgagttggcctggccatttccaagaggctgtagaaaggggagaatgtcaaggaagacttttggtagagaaggagcagaaagatgtgtttttgggaagaagaagacctctaggaggagctagtaggaatgtacatgaagcaattagtctgaaactggcttccccactcccccgtttctccttttcctatccttataggcctgtcccttgcctctgccctggattggttggcaaactaaaggacttgatgtacataactcctgtcccttttcccttacaaggtggggattgcccctggctttgcctcttctttgtgcctttggcctggggtgcatctcctcccgcccttccatgtgcctttctttgcctctgcagtctcatttctcataattttgcaaattatattttgttgctttcttacctactattggccctaaatagcagaaagaagagaagtgaccgagagaacctcagattcttcattgaggattggtatagccatgatttcagtcatagcaagcttttgctcaacagcatatgggtgggattttgcaaaaatcctattctgatgaatctcaaagtaaggctggtaagagaagtgagtggtgtgactcttactccttaggtgcccagaatttaccatcatctctgaaggagttacagggaagtggtctccccaattctcccctccctccagtattgccccctctcactttagcatatattaattagcaggttgggctagagaaatcagctgctatgcgggttgattattattattatttctaatccttttccttatttgccttctactccccttaatctaatctaaaagctctgttccatgcaactggagttccttatccctctcttccccttcccttatatattgaggctatggggtaggagaaaagtgcacaacccaccaccccctttactcgtgcattaaaatttcttatttacccttttcccccttcccatttcttcccactttcatctaccttttctggcaaaaaggagccttttgctctctgtgaccctaagagcacactgcacagggaaaattgccccatccagacctggctccactcttgatctctcttgtcctcttctgctcttttcctggtgctcttttttctcggtggggtgtgggtaatagaacagccgtgggcttttggggacctttaacttttttttctctcttttgtttataaaaaacactaaacattcaattccagagaaccaaaaatcccaccttcccaccgaacactactaaggggcttgtgttctgctccataccttttctcttttctttctgtcttgttaatgcttttaaaaacaaatgagttttttatataaataaagtttttaaagtgtgtatgtggggggtctgtgtcatttcttcacttcaagctgttatttcttccctgctttgcatctttgttacttccttatgtatcagtgtcctttccagagcaaccagaaggaggttataccaggatttattttgagctcagccccaactctttatcaagcaacattcttgttaactatatgtgaaacattttttcttctgaagattcttaaaaattgaatgtggctgaagttgaacatgggagcttattgctaatttagagataggaaactgaagcataaagaattaatgacttactttaattactggaattcttctgcaacatttgacaaaactaaccttgaataaggcccactgtaatacgtagctctcttaaatataacacttaggactagaagattagaaactaccaatcccaactacgtaataggaaaatgtaggatcaaaaggcccatgtatataagtactgaccactgggccataatgttgcttctcaggctatatgcagtcctttagtcagaagtcaataggcctatttattaatattttacagaccatattacctggattaccagggactatctttgctgcagagatcaagggttaagatctatgggaagatacttatttttctgaggtccttatgtcctgtcatataattaaagactcaagagaatttatgtgaaatgctttctgtatgcccaaatctttagattaaaattatatagctgctcct

SEQ ID NO: 4847 - DNA, 6012 bp, Homo sapiens
  source 1..6012: mol_type = unassigned DNA
ctgccagatcagtttgtcaccacccaggctcccttgcctttggctgggtgcaacttccattttaggtgttggatctgagggggaaaaaaaagagagagggagagagagagaaagaagagcaggaaagatcccgaaaggaggaagaggtggcgaaaaatcaactgccctgctggatttgtctttctcagcaccttggcgaagccttgggtttctttcttaaaggactgatttttagaactccacatttgaggtggagtcgaccgccagcatcttggcctctgtgaaggaacaagaggcccagtttgagaagctgacccgggcgctggaggaggaacggcgccacgtctcggcgcagctggaacgcgtccgggtctcaccacaagatgccaacccactcatggccaacggcacactcacccgccggcatcagaacggccggtttgtgggcgatgctgaccttgaaagacagaaattttcagatttgaaactcaacggaccccaggatcacagtcaccttctatatagcaccatccccaggatgcaggagccggggcagattgtggagacctacacggaggaggatcctgagggagccatgtctgtagtctctgtggagacctcagatgatgggaccactcggcgcacagagaccacggtcaagaaagtagtgaagactgtgacaacacggacagtacagccagtcgctatgggaccagacgggttgcctgtggatgcttcatcagtttctaacaactatatccagactttgggtcgtgatttccgcaagaatggcaatgggggacctggtccctatgtggggcaagctggcactgctacccttcctaggaacttccactaccctcctgatggttatagtcgccactatgaagatggttatccaggtggcagtgataactatggcagtctgtcccgggtgacccgcattgaggagcggtataggcccagcatggaaggctaccgggcacctagtagacaggatgtgtatgggccccaaccccaggttcgggtaggtgggagcagcgtggatctgcatcgctttcatccagagccttatgggctagaggatgaccagcgtagtatgggctatgatgacctggattatggtatgatgtctgattatggcactgcccgtcggactgggacaccctctgaccctcgtcggcgcctcaggagctatgaagacatgattggtgaggaggtgccatcggatcaatactactgggctcctttggcccagcatgagcgaggaagtttagcaagcttggatagcctgcgcaaaggagggcctccacctcctaattggagacagccagagctgccagaggtgatcgccatgcttggattccgcttggatgctgtcaagtccaatgcagctgcatacctgcaacacttatgctaccgcaatgacaaggtgaagactgacgtgcggaagctcaagggcatcccagtactggtgggattgttagaccatcccaaaaaggaagtgcaccttggagcctgtggagctctcaagaatatctcttttggacgtgaccaggataacaagattgccataaaaaactgtgatggtgtgcctgcccttgtgcgattgcttcgaaaggctcgtgatatggaccttactgaagttattaccggaaccctgtggaatctttcatcccatgactcaatcaaaatggagattgtggaccatgcactgcatgccttgacagatgaagtgatcattcctcattctggttgggagcgggaacctaatgaagactgtaagccacgccacattgagtgggaatcggtgctcaccaacacagctggctgccttaggaatgtaagctcagagaggagtgaagctcgccggaaacttcgggaatgtgatggtttagttgatgccctcattttcattgttcaggctgagattgggcagaaggattcagacagcaagcttgtagagaactgtgtttgccttcttcggaacttatcatatcaagttcaccgggagatcccacaggcagagcgttaccaagaggcagctcccaatgttgccaacaatactgggccacatgctgccagttgctttggggccaagaagggcaaagatgagtggttctccagagggaaaaaacctatagaggatccagcaaacgatacagtggatttccctaaaagaacgagtccagctcgaggctatgagctcttatttcagccagaggtggttcggatatacatctcacttcttaaggagagcaagactcctgccatcctagaagcctcagctggagctatccagaacttgtgtgctgggcgctggacgtatggtcgatacatccgctctgctctgcgtcaagagaaggctctttctgccatagctgacctcctgactaatgaacatgaacgggtggtgaaagctgcatctggagcactgagaaacctggctgtggatgctcgcaacaaagaattaattggtaaacatgctattcctaacttggtaaagaatctgccaggaggacagcagaactcctcttggaatttctctgaggacactgtcatctctattttgaacactatcaacgaggttatcgctgagaacttggaggctgccaaaaagcttcgagagacacagggtattgagaagctggtgttgatcaacaaatcagggaaccgctcagaaaaagaagttcgagcagcagcacttgtattacagacaatctggggatataaggaactgcggaagccactggaaaaagaaggatggaagaaatcagactttcaggtgaatctaaacaatgcttcccgaagccagagcagtcattcatatgatgatagtactctccctctcattgaccggaaccaaaaatcagataagaaacctgatcgggaagaaattcagatgagcaatatgggatcaaacacaaaatcactagataacaactattccacaccaaatgagagaggagaccacaatagaacactggatcgatcgggggatctaggcgacatggagccattgaagggaacaacacccttgatgcaggacgaggggcaggaatctctggaggaagagttggatgtgttggttttggatgatgaggggggccaagtgtcttacccctccatgcagaagatttagcaccactatctccgttccatctgggcttatatgtacttttattttttggtggtgaaattgactgatgattttcctttttcttcgctggactattgtgccaactgccaggctgcctcctgcccttacagccctaagtggctgccttctttccatcaactcccaacttcttcctgtgaagtttaattgtctcaacgcctccccctcccccattccctccatttttctcccaagaaacctgactcaattatttgcatattttgagaaactgctgcagattagttctttttgccagttttccctggaactcctggccttttgtggaggggagggatggagagaataggaatcttcactagaagccgtgggaagaattggaagttacatgctgtatatgcaatgtccagcagtctgataaactgacgattcttaatcaagatttttttcctgatggggaagggacttttattttcttttagagaggggaaagtgtgagctcttcccttattcctaatggctatttttgaagcaaagaaggccagcaacattggcacatgccacctggcaaaggacccttgagtaagtgaaggtctcctaaaactgggattaagaaaccttgctctcctcatctccaaggcagggaccatcaagaacctacagactccatctcttctgcaagcctcatgccaaccctgggctattgctgctgccccttaaacacaggctgtccttaacccacctctcctgccctgtgatatgtctgctgagttggcctggccatttccaagaggctgtagaaaggggagaatgtcaaggaagacttttggtagagaaggagcagaaagatgtgtttttgggaagaagaagacctctaggaggagctagtaggaatgtacatgaagcaattagtctgaaactggcttccccactcccccgtttctccttttcctatccttataggcctgtcccttgcctctgccctggattggttggcaaactaaaggacttgatgtacataactcctgtcccttttcccttacaaggtggggattgcccctggctttgcctcttctttgtgcctttggcctggggtgcatctcctcccgcccttccatgtgcctttctttgcctctgcagtctcatttctcataattttgcaaattatattttgttgctttcttacctactattggccctaaatagcagaaagaagagaagtgaccgagagaacctcagattcttcattgaggattggtatagccatgatttcagtcatagcaagcttttgctcaacagcatatgggtgggattttgcaaaaatcctattctgatgaatctcaaagtaaggctggtaagagaagtgagtggtgtgactcttactccttaggtgcccagaatttaccatcatctctgaaggagttacagggaagtggtctccccaattctcccctccctccagtattgccccctctcactttagcatatattaattagcaggttgggctagagaaatcagctgctatgcgggttgattattattattatttctaatccttttccttatttgccttctactccccttaatctaatctaaaagctctgttccatgcaactggagttccttatccctctcttccccttcccttatatattgaggctatggggtaggagaaaagtgcacaacccaccaccccctttactcgtgcattaaaatttcttatttacccttttcccccttcccatttcttcccactttcatctaccttttctggcaaaaaggagccttttgctctctgtgaccctaagagcacactgcacagggaaaattgccccatccagacctggctccactcttgatctctcttgtcctcttctgctcttttcctggtgctcttttttctcggtggggtgtgggtaatagaacagccgtgggcttttggggacctttaacttttttttctctcttttgtttataaaaaacactaaacattcaattccagagaaccaaaaatcccaccttcccaccgaacactactaaggggcttgtgttctgctccataccttttctcttttctttctgtcttgttaatgcttttaaaaacaaatgagttttttatataaataaagtttttaaagtgtgtatgtggggggtctgtgtcatttcttcacttcaagctgttatttcttccctgctttgcatctttgttacttccttatgtatcagtgtcctttccagagcaaccagaaggaggttataccaggatttattttgagctcagccccaactctttatcaagcaacattcttgttaactatatgtgaaacattttttcttctgaagattcttaaaaattgaatgtggctgaagttgaacatgggagcttattgctaatttagagataggaaactgaagcataaagaattaatgacttactttaattactggaattcttctgcaacatttgacaaaactaaccttgaataaggcccactgtaatacgtagctctcttaaatataacacttaggactagaagattagaaactaccaatcccaactacgtaataggaaaatgtaggatcaaaaggcccatgtatataagtactgaccactgggccataatgttgcttctcaggctatatgcagtcctttagtcagaagtcaataggcctatttattaatattttacagaccatattacctggattaccagggactatctttgctgcagagatcaagggttaagatctatgggaagatacttatttttctgaggtccttatgtcctgtcatataattaaagactcaagagaatttatgtgaaatgctttctgtatgcccaaatctttagattaaaattatatagctgctcct

SEQ ID NO: 4848 - DNA, 498 bp, Homo sapiens
  source 1..498: mol_type = unassigned DNA
aagatggctgggctgcaagaggcagggggatgggcccgtcagggaggaattcttgtgaaagccgtcgtctgcctcagcacttgatgaaaacacaccgaaaaagagggagctatgaagacatgattggtgaggaggtgccatcggatcaatactactgggctcctttggcccagcatgagcgaggaagtttagcaagcttggatagcctgcgcaaaggagggcctccacctcctaattggagacagccagagctgccagaggtgatcgccatgcttggattccgcttggatgctgtcaagtccaatgcagctgcatacctgcaacacttatgctaccgcaatgacaaggtgaagactgacgtgcggaagctcaagggcatcccagtactggtgggattgttagaccatcccaaaaaggaagtgcaccttggagcctgtggagctctcaagaatatctcttttggacgtgaccaggataacaagattgccataaaaaact

SEQ ID NO: 4849 - DNA, 6024 bp, Homo sapiens
  source 1..6024: mol_type = unassigned DNA
cagatcagtttgtcaccacccaggctcccttgcctttggctgggtgcaacttccattttaggtgttggatctgagggggaaaaaaaagagagagggagagagagagaaagaagagcaggaaagatcccgaaaggaggaagaggtggcgaaaaatcaactgccctgctggatttgtctttctcagcaccttggcgaagccttgggtttctttcttaaaggactgatttttagaactccacatttgagctctctccttcctgcttcctccttgctgtggtggctgggatgcttcttccatgattttttgaatctagactgggctgttctctgtgttaaaccaatcagttgcgaccttctcttaacagaggtggagtcgaccgccagcatcttggcctctgtgaaggaacaagaggcccagtttgagaagctgacccgggcgctggaggaggaacggcgccacgtctcggcgcagctggaacgcgtccgggtctcaccacaagatgccaacccactcatggccaacggcacactcacccgccggcatcagaacggccggtttgtgggcgatgctgaccttgaaagacagaaattttcagatttgaaactcaacggaccccaggatcacagtcaccttctatatagcaccatccccaggatgcaggagccggggcagattgtggagacctacacggaggaggatcctgagggagccatgtctgtagtctctgtggagacctcagatgatgggaccactcggcgcacagagaccacggtcaagaaagtagtgaagactgtgacaacacggacagtacagccagtcgctatgggaccagacgggttgcctgtggatgcttcatcagtttctaacaactatatccagactttgggtcgtgatttccgcaagaatggcaatgggggacctggtccctatgtggggcaagctggcactgctacccttcctaggaacttccactaccctcctgatggttatagtcgccactatgaagatggttatccaggtggcagtgataactatggcagtctgtcccgggtgacccgcattgaggagcggtataggcccagcatggaaggctaccgggcacctagtagacaggatgtgtatgggccccaaccccaggttcgggtaggtgggagcagcgtggatctgcatcgctttcatccagagccttatgggctagaggatgaccagcgtagtatgggctatgatgacctggattatggtatgatgtctgattatggcactgcccgtcggactgggacaccctctgaccctcgtcggcgcctcaggagctatgaagacatgattggtgaggaggtgccatcggatcaatactactgggctcctttggcccagcatgagcgaggaagtttagcaagcttggatagcctgcgcaaaggagggcctccacctcctaattggagacagccagagctgccagaggtgatcgccatgcttggattccgcttggatgctgtcaagtccaatgcagctgcatacctgcaacacttatgctaccgcaatgacaaggtgaagactgacgtgcggaagctcaagggcatcccagtactggtgggattgttagaccatcccaaaaaggaagtgcaccttggagcctgtggagctctcaagaatatctcttttggacgtgaccaggataacaagattgccataaaaaactgtgatggtgtgcctgcccttgtgcgattgcttcgaaaggctcgtgatatggaccttactgaagttattaccggaaccctgtggaatctttcatcccatgactcaatcaaaatggagattgtggaccatgcactgcatgccttgacagatgaagtgatcattcctcattctggttgggagcgggaacctaatgaagactgtaagccacgccacattgagtgggaatcggtgctcaccaacacagctggctgccttaggaatgtaagctcagagaggagtgaagctcgccggaaacttcgggaatgtgatggtttagttgatgccctcattttcattgttcaggctgagattgggcagaaggattcagacagcaagcttgtagagaactgtgtttgccttcttcggaacttatcatatcaagttcaccgggagatcccacaggcagagcgttaccaagaggcagctcccaatgttgccaacaatactgggccacatgctgccagttgctttggggccaagaagggcaaagggaaaaaacctatagaggatccagcaaacgatacagtggatttccctaaaagaacgagtccagctcgaggctatgagctcttatttcagccagaggtggttcggatatacatctcacttcttaaggagagcaagactcctgccatcctagaagcctcagctggagctatccagaacttgtgtgctgggcgctggacgtatggtcgatacatccgctctgctctgcgtcaagagaaggctctttctgccatagctgacctcctgactaatgaacatgaacgggtggtgaaagctgcatctggagcactgagaaacctggctgtggatgctcgcaacaaagaattaattggtaaacatgctattcctaacttggtaaagaatctgccaggaggacagcagaactcctcttggaatttctctgaggacactgtcatctctattttgaacactatcaacgaggttatcgctgagaacttggaggctgccaaaaagcttcgagagacacagggtattgagaagctggtgttgatcaacaaatcagggaaccgctcagaaaaagaagttcgagcagcagcacttgtattacagacaatctggggatataaggaactgcggaagccactggaaaaagaaggatggaagaaatcagactttcaggtgaatctaaacaatgcttcccgaagccagagcagtcattcatatgatgatagtactctccctctcattgaccggaaccaaaaatcagataagaaacctgatcgggaagaaattcagatgagcaatatgggatcaaacacaaaatcactagataacaactattccacaccaaatgagagaggagaccacaatagaacactggatcgatcgggggatctaggcgacatggagccattgaagggaacaacacccttgatgcagaagatttagcaccactatctccgttccatctgggcttatatgtacttttattttttggtggtgaaattgactgatgattttcctttttcttcgctggactattgtgccaactgccaggctgcctcctgcccttacagccctaagtggctgccttctttccatcaactcccaacttcttcctgtgaagtttaattgtctcaacgcctccccctcccccattccctccatttttctcccaagaaacctgactcaattatttgcatattttgagaaactgctgcagattagttctttttgccagttttccctggaactcctggccttttgtggaggggagggatggagagaataggaatcttcactagaagccgtgggaagaattggaagttacatgctgtatatgcaatgtccagcagtctgataaactgacgattcttaatcaagatttttttcctgatggggaagggacttttattttcttttagagaggggaaagtgtgagctcttcccttattcctaatggctatttttgaagcaaagaaggccagcaacattggcacatgccacctggcaaaggacccttgagtaagtgaaggtctcctaaaactgggattaagaaaccttgctctcctcatctccaaggcagggaccatcaagaacctacagactccatctcttctgcaagcctcatgccaaccctgggctattgctgctgccccttaaacacaggctgtccttaacccacctctcctgccctgtgatatgtctgctgagttggcctggccatttccaagaggctgtagaaaggggagaatgtcaaggaagacttttggtagagaaggagcagaaagatgtgtttttgggaagaagaagacctctaggaggagctagtaggaatgtacatgaagcaattagtctgaaactggcttccccactcccccgtttctccttttcctatccttataggcctgtcccttgcctctgccctggattggttggcaaactaaaggacttgatgtacataactcctgtcccttttcccttacaaggtggggattgcccctggctttgcctcttctttgtgcctttggcctggggtgcatctcctcccgcccttccatgtgcctttctttgcctctgcagtctcatttctcataattttgcaaattatattttgttgctttcttacctactattggccctaaatagcagaaagaagagaagtgaccgagagaacctcagattcttcattgaggattggtatagccatgatttcagtcatagcaagcttttgctcaacagcatatgggtgggattttgcaaaaatcctattctgatgaatctcaaagtaaggctggtaagagaagtgagtggtgtgactcttactccttaggtgcccagaatttaccatcatctctgaaggagttacagggaagtggtctccccaattctcccctccctccagtattgccccctctcactttagcatatattaattagcaggttgggctagagaaatcagctgctatgcgggttgattattattattatttctaatccttttccttatttgccttctactccccttaatctaatctaaaagctctgttccatgcaactggagttccttatccctctcttccccttcccttatatattgaggctatggggtaggagaaaagtgcacaacccaccaccccctttactcgtgcattaaaatttcttatttacccttttcccccttcccatttcttcccactttcatctaccttttctggcaaaaaggagccttttgctctctgtgaccctaagagcacactgcacagggaaaattgccccatccagacctggctccactcttgatctctcttgtcctcttctgctcttttcctggtgctcttttttctcggtggggtgtgggtaatagaacagccgtgggcttttggggacctttaacttttttttctctcttttgtttataaaaaacactaaacattcaattccagagaaccaaaaatcccaccttcccaccgaacactactaaggggcttgtgttctgctccataccttttctcttttctttctgtcttgttaatgcttttaaaaacaaatgagttttttatataaataaagtttttaaagtgtgtatgtggggggtctgtgtcatttcttcacttcaagctgttatttcttccctgctttgcatctttgttacttccttatgtatcagtgtcctttccagagcaaccagaaggaggttataccaggatttattttgagctcagccccaactctttatcaagcaacattcttgttaactatatgtgaaacattttttcttctgaagattcttaaaaattgaatgtggctgaagttgaacatgggagcttattgctaatttagagataggaaactgaagcataaagaattaatgacttactttaattactggaattcttctgcaacatttgacaaaactaaccttgaataaggcccactgtaatacgtagctctcttaaatataacacttaggactagaagattagaaactaccaatcccaactacgtaataggaaaatgtaggatcaaaaggcccatgtatataagtactgaccactgggccataatgttgcttctcaggctatatgcagtcctttagtcagaagtcaataggcctatttattaatattttacagaccatattacctggattaccagggactatctttgctgcagagatcaagggttaagatctatgggaagatacttatttttctgaggtccttatgtcctgtcatataattaaagactcaagagaatttatgtgaaatgctttctgtatgcccaaatctttagattaaaattatatagctgctcct

SEQ ID NO: 4850 - DNA, 5481 bp, Homo sapiens
  source 1..5481: mol_type = unassigned DNA
gcgtcgggagccgcctctcgcccgcggcgctcgcccctgccgcccgccagcatcccttgtcccgcggccgcgctcagacaacaaaagcggaagatgctgcagttgggcaaggtcaggaccttgccctgaagccgggcggcgccgcgcacgcctcttcccggactgaggagctgtcgccggcggagggtgcatgtttgcgaggaagccgccgggcgccgcgcctttgggagctatgcctgttccagaccagccttcatcagcctcagagaagacgagttccctgagccccggcttaaacacctccaacggggatggctctgaaacagaaaccacctctgccatcctcgcctcagtcaaagaacaggaattacagtttgaaaggctgacccgagagctggaggctgaacggcagatcgtagccagccagctggagcgatgcaagctcggatccgagactggcagcatgagcagcatgagttcagcagaagagcagtttcagtggcagtcacaagatggtcaaaaagatatcgaagatgagcttacaacaggtctcgagctggtggactcctgtattaggtcactacaggaatcaggaatacttgacccacaggattattctacaggtgaaaggcccagcctgctctcccagagtgcacttcagctcaattccaaacctgaagggtctttccagtatccggccagctaccatagcaaccagaccctggccctgggggaaaccaccccttcacagctcccggcccgaggcacacaagcccgagctacgggccagagcttcagccagggcacgaccagccgcgccggccacctggcggggcccgagcccgcgccgccgccgccgccgccgccgcgggagccgttcgcgcccagcctgggcagcgccttccacctgcccgacgcgccgcccgccgccgccgccgccgcgctctactactccagctccacgctgcccgcgccgccgcgcgggggctccccgctggccgcgccccagggcggttcgcccaccaagctgcagcgcggcggctcggcccccgagggcgccacctacgccgcgccgcgcggctcctcgcccaagcagtcgcccagccgcctggccaagtcctacagcaccagctcgcccatcaacatcgtcgtgtcctcggccggcctgtccccgatccgcgtgacctcgccccccaccgtgcagtccaccatctcctcctcgcccatccaccagctgagctccaccatcggcacgtacgccaccctgtcgcccaccaagcgcctggtccacgcgtccgagcagtacagcaagcactcgcaggagctgtatgccacggccaccctccagaggccgggcagcctggcagctggttcccgagcctcatacagcagccagcatgggcacctgggcccagagttgcgggccctgcagtccccagaacaccacatagatcccatctatgaagaccgcgtctatcagaagccccctatgaggagtctcagccagagccagggggaccctctgccgccagcacacaccggcacctaccgcacgagcacagccccatcttcccctggtgtcgactccgtccccttgcagcgcacaggcagccagcacggcccacagaatgccgccgcggccaccttccagagggccagctatgccgccggcccagcctccaattacgcggacccctaccgacagctgcagtattgtccctctgttgagtctccatacagcaaatccggccctgctctcccgcctgaaggcaccttggccaggtccccgtccattgatagcattcagaaagatcccagagaatttggatggagagacccggaactgccggaagtgattcagatgttgcagcaccagtttccctcggtccagtctaacgcggcagcctacttgcaacacctctgttttggagacaacaaaattaaagccgagataaggagacaaggaggcatccagctcctggtggacctgttggatcatcggatgaccgaagtccaccgtagtgcctgtggagctctgagaaacctggtgtatgggaaggccaacgatgataacaaaattgccctgaaaaactgtggtggcatcccagcactggtgaggttactccgcaagacgactgacctggagatccgggagctggtcacaggagtcctttggaacctctcctcatgcgatgcactcaaaatgccaatcatccaggatgccctagcagtactgaccaacgcggtgattatcccccactcaggctgggaaaattcgcctcttcaggatgatcggaaaatacagctgcattcatcacaggtgctgcgtaacgccaccgggtgcctaaggaatgttagttcggccggagaggaggcccgcagaaggatgagagagtgtgatgggcttacggatgccttgctgtacgtgatccagtctgcgctggggagcagtgagatcgatagcaagaccgttgaaaactgtgtgtgcattttaaggaacctctcgtaccggctggcggcagaaacgtctcagggacagcacatgggcacggacgagctggacgggctactctgtggcgaggccaatggcaaggatgctgagagctctgggtgctggggcaagaagaagaagaaaaagaaatcccaagatcagtgggatggagtaggacctcttccagactgtgctgaaccaccaaaagggatccagatgctgtggcacccatcaatagtcaaaccctacctcacactgctctctgagtgctcaaatccagacacgctggaaggggcggcaggcgccctgcagaacttggctgcagggagctggaagtggtcagtatatatccgagccgctgtccgaaaagagaaaggcctgcccatcctcgtggagctgctccgaatagacaatgaccgtgtggtgtgcgcggtggccactgcgctgcggaacatggccttggacgtcagaaataaggagctcatcggcaaatacgccatgcgagacctagtccacaggcttccaggagggaacaacagcaacaacactgcaagcaaggccatgtcggatgacacagtgacagctgtctgctgcacactgcacgaagtgattaccaagaacatggagaacgccaaggccttacgggatgccggtggcatcgagaagttggtcggcatctccaaaagcaaaggagataaacactctccaaaagtggtcaaggctgcatctcaggtcctcaacagcatgtggcagtaccgagatctgaggagtctctacaaaaaggatggatggtcacaataccactttgtagcctcgtcttcaaccatcgagagggaccggcaaaggccctactcctcctcccgcacgccctccatctcccctgtgcgcgtgtctcccaacaaccgctcagcaagtgccccagcttcacctcgggaaatgatcagcctcaaagaaaggaaaacagactacgagtgcaccggcagcaacgccacctaccacggagctaaaggcgaacacacttccaggaaagatgccatgacagctcaaaacactggaatttcaactttgtataggaattcttatggtgcgcccgctgaagacatcaaacacaaccaggtttcagcacagccagtcccacaggagcccagcagaaaagattacgagacctaccagccatttcagaattccacaagaaattacgatgagtccttcttcgaggaccaggtccaccatcgccctcccgccagcgagtacaccatgcacctgggtctcaagtccaccggcaactacgttgacttctactcagctgcccgtccctacagtgaactgaactatgaaacgagccactacccggcctcccccgactcctgggtgtgaggagcagggcacaggcgctccgggaacagtgcatgtgcatgcataccacaagacatttctttctgttttgtttttttctcctgcaaatttagtttgttaaagcctgttccataggaaggctgtgataaccagtaaggaaatattaagagctattttagaaagctaaatgaatcgcaagttaacttggaaatcagtagaaagctaaagtgatcctaaatatgacagtgggcagcacctttctagcgtgagctgtagagtaacgagaagtgctttatactgaacgtggttgatgggaggagagacgaggcattcgggccggtggggcgtaagggttatcgttaagcacaagacacagaatagtttacacactgtgtgggggacggcttctcacgctttgtttactctcttcatccgttgtgactctaggcttcaggttgcattggggttcctctgtacagcaagatgtttcttgccttttgttaatgcattgttgtaaagtatttgatgtacattacagattaaagaagaaaagcgcgttgtgtatattacaccaatgccgccgtgtttcctcatctatggttctaaatattgcttcaatttcaaacttttgaaagatgtatggatttccagtttttctttactttctcccagtatgttttaacaaaaaaaaaaaaaagcaggaaaaaaggaatatttagcagtattgttcgttctgatatgtgaatttgtttgtgacaactaaacaaggcattcagcagtttctgacaattaacatacatcattccacactccttgtcaacaaagtgctttttcactgcctaaaattttagatgtagatatttgaaatagattttttcatttataccagttttctttatgatgatacagtgttaaaagaaaataaattacaattgatctgtcatccatatttgctaagaatgtctatttccaagaacctatatcttacaaaatacacattcttgcttgtgtgtctgtgtgtgtgggtgtatgtatgtccacgtactagaaaaattacctgtgtgagattttattttgacagaagctatttcatttgctgttcatcttgtacaaactttgtttttggttttttagtataaatgtacatcagtttgttccttttgtactgtatctattcttctgaccatctagtgactcaggatattaggccagttgaagtggagttataggattttcacacattcacgcatacttggatatcaaccctctctacaggtccgtttccttacacattttatcccctcagaacacgataaaccatggccaattcagtttcactttggggccaattacttgaagtatccacagaaaatgtaaactgctcgccttattcccccaaactttttgttcatgtggcagggagcagtacacaactatggaatagattattaaaactgaacttgaagctaacgttagaatagtggttaacagagctaagaaataaggctaaccatcgaaaagaacatgggccgcgggtaaactagctttgctctttagatgcaagtggctgaggccaataggtgcctagtaaatgttaactgttcttggaaaaaataaaaacatcagtaacaaaa

SEQ ID NO: 4851 - DNA, 5236 bp, Homo sapiens
  source 1..5236: mol_type = unassigned DNA
gccagcatcccttgtcccgcggccgcgctcagacaacaaaagcggaagatgctgcagttgggcaaggtcaggaccttgccctgaagccgggcggcgccgcgcacgcctcttcccggactgaggagctgtcgccggcggagggtgcatgtttgcgaggaagccgccgggcgccgcgcctttgggagctatgcctgttccagaccagccttcatcagcctcagagaagacgagttccctgagccccggcttaaacacctccaacggggatggctctgaaacagaaaccacctctgccatcctcgcctcagtcaaagaacaggaattacagtttgaaaggctgacccgagagctggaggctgaacggcagatcgtagccagccagctggagcgatgcaagctcggatccgagactggcagcatgagcagcatgagttcagcagaagagcagtttcagtggcagtcacaagatggtcaaaaagatatcgaagatgagcttacaacaggtctcgagctggtggactcctgtattaggtcactacaggaatcaggaatacttgacccacaggattattctacaggtgaaaggcccagcctgctctcccagagtgcacttcagctcaattccaaacctgaagggtctttccagtatccggccagctaccatagcaaccagaccctggccctgggggaaaccaccccttcacagctcccggcccgaggcacacaagcccgagctacgggccagagcttcagccagggcacgaccagccgcgccggccacctggcggggcccgagcccgcgccgccgccgccgccgccgccgcgggagccgttcgcgcccagcctgggcagcgccttccacctgcccgacgcgccgcccgccgccgccgccgccgcgctctactactccagctccacgctgcccgcgccgccgcgcgggggctccccgctggccgcgccccagggcggttcgcccaccaagctgcagcgcggcggctcggcccccgagggcgccacctacgccgcgccgcgcggctcctcgcccaagcagtcgcccagccgcctggccaagtcctacagcaccagctcgcccatcaacatcgtcgtgtcctcggccggcctgtccccgatccgcgtgacctcgccccccaccgtgcagtccaccatctcctcctcgcccatccaccagctgagctccaccatcggcacgtacgccaccctgtcgcccaccaagcgcctggtccacgcgtccgagcagtacagcaagcactcgcaggagctgtatgccacggccaccctccagaggccgggcagcctggcagctggttcccgagcctcatacagcagccagcatgggcacctgggcccagagttgcgggccctgcagtccccagaacaccacatagatcccatctatgaagaccgcgtctatcagaagccccctatgaggagtctcagccagagccagggggaccctctgccgccagcacacaccggcacctaccgcacgagcacagccccatcttcccctggtgtcgactccgtccccttgcagcgcacaggcagccagcacggcccacagaatgccgccgcggccaccttccagagggccagctatgccgccggcccagcctccaattacgcggacccctaccgacagctgcagtattgtccctctgttgagtctccatacagcaaatccggccctgctctcccgcctgaaggcaccttggccaggtccccgtccattgatagcattcagaaagatcccagagaatttggatggagagacccggaactgccggaagtgattcagatgttgcagcaccagtttccctcggtccagtctaacgcggcagcctacttgcaacacctctgttttggagacaacaaaattaaagccgagataaggagacaaggaggcatccagctcctggtggacctgttggatcatcggatgaccgaagtccaccgtagtgcctgtggagctctgagaaacctggtgtatgggaaggccaacgatgataacaaaattgccctgaaaaactgtggtggcatcccagcactggtgaggttactccgcaagacgactgacctggagatccgggagctggtcacaggagtcctttggaacctctcctcatgcgatgcactcaaaatgccaatcatccaggatgccctagcagtactgaccaacgcggtgattatcccccactcaggctgggaaaattcgcctcttcaggatgatcggaaaatacagctgcattcatcacaggtgctgcgtaacgccaccgggtgcctaaggaatgttagttcggccggagaggaggcccgcagaaggatgagagagtgtgatgggcttacggatgccttgctgtacgtgatccagtctgcgctggggagcagtgagatcgatagcaagaccgttgaaaactgtgtgtgcattttaaggaacctctcgtaccggctggcggcagaaacgtctcagggacagcacatgggcacggacgagctggacgggctactctgtggcgaggccaatggcaaggatgctgagagctctgggtgctggggcaagaagaagaagaaaaagaaatcccaagatcagtggtcagtatatatccgagccgctgtccgaaaagagaaaggcctgcccatcctcgtggagctgctccgaatagacaatgaccgtgtggtgtgcgcggtggccactgcgctgcggaacatggccttggacgtcagaaataaggagctcatcggcaaatacgccatgcgagacctagtccacaggcttccaggagggaacaacagcaacaacactgcaagcaaggccatgtcggatgacacagtgacagctgtctgctgcacactgcacgaagtgattaccaagaacatggagaacgccaaggccttacgggatgccggtggcatcgagaagttggtcggcatctccaaaagcaaaggagataaacactctccaaaagtggtcaaggctgcatctcaggtcctcaacagcatgtggcagtaccgagatctgaggagtctctacaaaaaggatggatggtcacaataccactttgtagcctcgtcttcaaccatcgagagggaccggcaaaggccctactcctcctcccgcacgccctccatctcccctgtgcgcgtgtctcccaacaaccgctcagcaagtgccccagcttcacctcgggaaatgatcagcctcaaagaaaggaaaacagactacgagtgcaccggcagcaacgccacctaccacggagctaaaggcgaacacacttccaggaaagatgccatgacagctcaaaacactggaatttcaactttgtataggaattcttatggtgcgcccgctgaagacatcaaacacaaccaggtttcagcacagccagtcccacaggagcccagcagaaaagattacgagacctaccagccatttcagaattccacaagaaattacgatgagtccttcttcgaggaccaggtccaccatcgccctcccgccagcgagtacaccatgcacctgggtctcaagtccaccggcaactacgttgacttctactcagctgcccgtccctacagtgaactgaactatgaaacgagccactacccggcctcccccgactcctgggtgtgaggagcagggcacaggcgctccgggaacagtgcatgtgcatgcataccacaagacatttctttctgttttgtttttttctcctgcaaatttagtttgttaaagcctgttccataggaaggctgtgataaccagtaaggaaatattaagagctattttagaaagctaaatgaatcgcaagttaacttggaaatcagtagaaagctaaagtgatcctaaatatgacagtgggcagcacctttctagcgtgagctgtagagtaacgagaagtgctttatactgaacgtggttgatgggaggagagacgaggcattcgggccggtggggcgtaagggttatcgttaagcacaagacacagaatagtttacacactgtgtgggggacggcttctcacgctttgtttactctcttcatccgttgtgactctaggcttcaggttgcattggggttcctctgtacagcaagatgtttcttgccttttgttaatgcattgttgtaaagtatttgatgtacattacagattaaagaagaaaagcgcgttgtgtatattacaccaatgccgccgtgtttcctcatctatggttctaaatattgcttcaatttcaaacttttgaaagatgtatggatttccagtttttctttactttctcccagtatgttttaacaaaaaaaaaaaaaagcaggaaaaaaggaatatttagcagtattgttcgttctgatatgtgaatttgtttgtgacaactaaacaaggcattcagcagtttctgacaattaacatacatcattccacactccttgtcaacaaagtgctttttcactgcctaaaattttagatgtagatatttgaaatagattttttcatttataccagttttctttatgatgatacagtgttaaaagaaaataaattacaattgatctgtcatccatatttgctaagaatgtctatttccaagaacctatatcttacaaaatacacattcttgcttgtgtgtctgtgtgtgtgggtgtatgtatgtccacgtactagaaaaattacctgtgtgagattttattttgacagaagctatttcatttgctgttcatcttgtacaaactttgtttttggttttttagtataaatgtacatcagtttgttccttttgtactgtatctattcttctgaccatctagtgactcaggatattaggccagttgaagtggagttataggattttcacacattcacgcatacttggatatcaaccctctctacaggtccgtttccttacacattttatcccctcagaacacgataaaccatggccaattcagtttcactttggggccaattacttgaagtatccacagaaaatgtaaactgctcgccttattcccccaaactttttgttcatgtggcagggagcagtacacaactatggaatagattattaaaactgaacttgaagctaacgttagaatagtggttaacagagctaagaaataaggctaaccatcgaaaagaacatgggccgcgggtaaactagctttgctctttagatgcaagtggctgaggccaataggtgcctagtaaatgttaactgttcttgg

SEQ ID NO: 4852 - DNA, 3567 bp, Homo sapiens
  source 1..3567: mol_type = unassigned DNA
gcgtcgggagccgcctctcgcccgcggcgctcgcccctgccgcccgccagcatcccttgtcccgcggccgcgctcagacaacaaaagcggaagatgctgcagttgggcaaggtcaggaccttgccctgaagccgggcggcgccgcgcacgcctcttcccggactgaggagctgtcgccggcggagggtgcatgtttgcgaggaagccgccgggcgccgcgcctttgggagctatgcctgttccagaccagccttcatcagcctcagagaagacgagttccctgagccccggcttaaacacctccaacggggatggctctgaaacagaaaccacctctgccatcctcgcctcagtcaaagaacaggaattacagtttgaaaggctgacccgagagctggaggctgaacggcagatcgtagccagccagctggagcgatgcaagctcggatccgagactggcagcatgagcagcatgagttcagcagaagagcagtttcagtggcagtcacaagatggtcaaaaagatatcgaagatgagcttacaacaggtctcgagctggtggactcctgtattaggtcactacaggaatcaggaatacttgacccacaggattattctacaggtgaaaggcccagcctgctctcccagagtgcacttcagctcaattccaaacctgaagggtctttccagtatccggccagctaccatagcaaccagaccctggccctgggggaaaccaccccttcacagctcccggcccgaggcacacaagcccgagctacgggccagagcttcagccagctggttcccgagcctcatacagcagccagcatgggcacctgggcccagagttgcgggccctgcagtccccagaacaccacatagatcccatctatgaagaccgcgtctatcagaagccccctatgaggagtctcagccagagccagggggaccctctgccgccagcacacaccggcacctaccgcacgagcacagccccatcttcccctggtgtcgactccgtccccttgcagcgcacaggcagccagcacggcccacagaatgccgccgcggccaccttccagagggccagctatgccgccggcccagcctccaattacgcggacccctaccgacagctgcagtattgtccctctgttgagtctccatacagcaaatccggccctgctctcccgcctgaaggcaccttggccaggtccccgtccattgatagcattcagaaagatcccagagaatttggatggagagacccggaactgccggaagtgattcagatgttgcagcaccagtttccctcggtccagtctaacgcggcagcctacttgcaacacctctgttttggagacaacaaaattaaagccgagataaggagacaaggaggcatccagctcctggtggacctgttggatcatcggatgaccgaagtccaccgtagtgcctgtggagctctgagaaacctggtgtatgggaaggccaacgatgataacaaaattgccctgaaaaactgtggtggcatcccagcactggtgaggttactccgcaagacgactgacctggagatccgggagctggtcacaggagtcctttggaacctctcctcatgcgatgcactcaaaatgccaatcatccaggatgccctagcagtactgaccaacgcggtgattatcccccactcaggctgggaaaattcgcctcttcaggatgatcggaaaatacagctgcattcatcacaggtgctgcgtaacgccaccgggtgcctaaggaatgttagttcggccggagaggaggcccgcagaaggatgagagagtgtgatgggcttacggatgccttgctgtacgtgatccagtctgcgctggggagcagtgagatcgatagcaagaccgttgaaaactgtgtgtgcattttaaggaacctctcgtaccggctggcggcagaaacgtctcagggacagcacatgggcacggacgagctggacgggctactctgtggcgaggccaatggcaaggatgctgagagctctgggtgctggggcaagaagaagaagaaaaagaaatcccaagatcagtgggatggagtaggacctcttccagactgtgctgaaccaccaaaagggatccagatgctgtggcacccatcaatagtcaaaccctacctcacactgctctctgagtgctcaaatccagacacgctggaaggggcggcaggcgccctgcagaacttggctgcagggagctggaagtggtcagtatatatccgagccgctgtccgaaaagagaaaggcctgcccatcctcgtggagctgctccgaatagacaatgaccgtgtggtgtgcgcggtggccactgcgctgcggaacatggccttggacgtcagaaataaggagctcatcggcaaatacgccatgcgagacctagtccacaggcttccaggagggaacaacagcaacaacactgcaagcaaggccatgtcggatgacacagtgacagctgtctgctgcacactgcacgaagtgattaccaagaacatggagaacgccaaggccttacgggatgccggtggcatcgagaagttggtcggcatctccaaaagcaaaggagataaacactctccaaaagtggtcaaggctgcatctcaggtcctcaacagcatgtggcagtaccgagatctgaggagtctctacaaaaaggatggatggtcacaataccactttgtagcctcgtcttcaaccatcgagagggaccggcaaaggccctactcctcctcccgcacgccctccatctcccctgtgcgcgtgtctcccaacaaccgctcagcaagtgccccagcttcacctcgggaaatgatcagcctcaaagaaaggaaaacagactacgagtgcaccggcagcaacgccacctaccacggagctaaaggcgaacacacttccaggaaagatgccatgacagctcaaaacactggaatttcaactttgtataggaattcttatggtgcgcccgctgaagacatcaaacacaaccaggtttcagcacagccagtcccacaggagcccagcagaaaagattacgagacctaccagccatttcagaattccacaagaaattacgatgagtccttcttcgaggaccaggtccaccatcgccctcccgccagcgagtacaccatgcacctgggtctcaagtccaccggcaactacgttgacttctactcagctgcccgtccctacagtgaactgaactatgaaacgagccactacccggcctcccccgactcctgggtgtgaggagcagggcacaggcgctccgggaacagtgcatgtgcatgcataccacaagacatttctttctgttttgtttttttctcctgcaaatttagtttgttaaagcctgttccataggaaggctgtgataaccagtaaggaaatattaagagctattttagaaagctaaatgaatcgcaagttaacttggaaatcagtagaaagctaaagtgatcctaaatatgacagtgggcagcacctttctagcgtgagctgtagagtaacgag

SEQ ID NO: 4853 - DNA, 2982 bp, Homo sapiens
  source 1..2982: mol_type = unassigned DNA
agcctggggaaggagggaagagtaacccttcatctttgggactagtcgtcttgtttgcctagactacagttttcaagtatttaaggaccatttatttcaaaaggaattacagtttgaaaggctgacccgagagctggaggctgaacggcagatcgtagccagccagctggagcgatgcaagctcggatccgagactggcagcatgagcagcatgagttcagcagaagagcagtttcagtggcagtcacaagatggtcaaaaagatatcgaagatgagcttacaacaggtctcgagctggtggactcctgtattaggtcactacaggaatcaggaatacttgacccacaggattattctacaggtgaaactggttcccgagcctcatacagcagccagcatgggcacctgggcccagagttgcgggccctgcagtccccagaacaccacatagatcccatctatgaagaccgcgtctatcagaagccccctatgaggagtctcagccagagccagggggaccctctgccgccagcacacaccggcacctaccgcacgagcacagccccatcttcccctggtgtcgactccgtccccttgcagcgcacaggcagccagcacggcccacagaatgccgccgcggccaccttccagagggccagctatgccgccggcccagcctccaattacgcggacccctaccgacagctgcagtattgtccctctgttgagtctccatacagcaaatccggccctgctctcccgcctgaaggcaccttggccaggtccccgtccattgatagcattcagaaagatcccagagaatttggatggagagacccggaactgccggaagtgattcagatgttgcagcaccagtttccctcggtccagtctaacgcggcagcctacttgcaacacctctgttttggagacaacaaaattaaagccgagataaggagacaaggaggcatccagctcctggtggacctgttggatcatcggatgaccgaagtccaccgtagtgcctgtggagctctgagaaacctggtgtatgggaaggccaacgatgataacaaaattgccctgaaaaactgtggtggcatcccagcactggtgaggttactccgcaagacgactgacctggagatccgggagctggtcacaggagtcctttggaacctctcctcatgcgatgcactcaaaatgccaatcatccaggatgccctagcagtactgaccaacgcggtgattatcccccactcaggctgggaaaattcgcctcttcaggatgatcggaaaatacagctgcattcatcacaggtgctgcgtaacgccaccgggtgcctaaggaatgttagttcggccggagaggaggcccgcagaaggatgagagagtgtgatgggcttacggatgccttgctgtacgtgatccagtctgcgctggggagcagtgagatcgatagcaagaccgttgaaaactgtgtgtgcattttaaggaacctctcgtaccggctggcggcagaaacgtctcagggacagcacatgggcacggacgagctggacgggctactctgtggcgaggccaatggcaaggatgctgagagctctgggtgctggggcaagaagaagaagaaaaagaaatcccaagatcagtgggatggagtaggacctcttccagactgtgctgaaccaccaaaagggatccagatgctgtggcacccatcaatagtcaaaccctacctcacactgctctctgagtgctcaaatccagacacgctggaaggggcggcaggcgccctgcagaacttggctgcagggagctggaagtggtcagtatatatccgagccgctgtccgaaaagagaaaggcctgcccatcctcgtggagctgctccgaatagacaatgaccgtgtggtgtgcgcggtggccactgcgctgcggaacatggccttggacgtcagaaataaggagctcatcggcaaatacgccatgcgagacctagtccacaggcttccaggagggaacaacagcaacaacactgcaagcaaggccatgtcggatgacacagtgacagctgtctgctgcacactgcacgaagtgattaccaagaacatggagaacgccaaggccttacgggatgccggtggcatcgagaagttggtcggcatctccaaaagcaaaggagataaacactctccaaaagtggtcaaggctgcatctcaggtcctcaacagcatgtggcagtaccgagatctgaggagtctctacaaaaaggatggatggtcacaataccactttgtagcctcgtcttcaaccatcgagagggaccggcaaaggccctactcctcctcccgcacgccctccatctcccctgtgcgcgtgtctcccaacaaccgctcagcaagtgccccagcttcacctcgggaaatgatcagcctcaaagaaaggaaaacagactacgagtgcaccggcagcaacgccacctaccacggagctaaaggcgaacacacttccaggaaagatgccatgacagctcaaaacactggaatttcaactttgtataggaattcttatggtgcgcccgctgaagacatcaaacacaaccaggtttcagcacagccagtcccacaggagcccagcagaaaagattacgagacctaccagccatttcagaattccacaagaaattacgatgagtccttcttcgaggaccaggtccaccatcgccctcccgccagcgagtacaccatgcacctgggtctcaagtccaccggcaactacgttgacttctactcagctgcccgtccctacagtgaactgaactatgaaacgagccactacccggcctcccccgactcctgggtgtgaggagcagggcacaggcgctccgggaacagtgcatgtgcatgcataccacaagacatttctttctgttttgtttttttctcctgcaaatttagtttgttaaagcctgttccata

SEQ ID NO: 4854 - DNA, 720 bp, Homo sapiens
  source 1..720: mol_type = unassigned DNA
gggactagtcgtcttgtttgcctagactacagttttcaagtatttaaggaccatttatttcaaaaggtacagtaaaggaattacagtttgaaaggctgacccgagagctggaggctgaacggcagatcgtagccagccagctggagcgatgcaagctcggatccgagactggcagcatgagcagcatgagttcagcagaagagcagtttcagtggcagtcacaagatggtcaaaaagatatcgaagatgagcttacaacaggtctcgagctggtggactcctgtattaggtcactacaggaatcaggaatacttgacccacaggattattctacaggtgaaaggcccagcctgctctcccagagtgcacttcagctcaattccaaacctgaagggtctttccagtatccggccagctaccatagcaaccagaccctggccctgggggaaaccaccccttcacagctcccggcccgaggcacacaagcccgagctacgggccagagcttcagccagggcacgaccagccgcgccggccacctggcggggcccgagcccgcgccgccgccgccgccgccgccgcgggagccgttcgcgcccagcctgggcagcgccttccacctgcccgacgcgccgcccgccgccgccgccgccgcgctctactactccagctccacgctgcccgcgccgccgcgcgggggctccccgctggccgcgcccc

SEQ ID NO: 4855 - DNA, 1962 bp, Homo sapiens
  source 1..1962: mol_type = unassigned DNA
cgtgatccagtctgcgctggggagcagtgagatcgatagcaagaccgttgaaaactgtgtgtgcattttaaggaacctctcgtaccggctggcggcagaaacgtctcagggacagcacatgggcacggacgagctggacgggctactctgtggcgaggccaatggcaaggatgctgagagctctgggtgctggggcaagaagaagaagaaaaagaaatcccaagatcagtgggatggagtaggacctcttccagactgtgctgaaccaccaaaagggatccagatgctgtggcacccatcaatagtcaaaccctacctcacactgctctctgagtgctcaaatccagacacgctggaaggggcggcaggcgccctgcagaacttggctgcagggagctggaagtggtcagtatatatccgagccgctgtccgaaaagagaaaggcctgcccatcctcgtggagctgctccgaatagacaatgaccgtgtggtgtgcggtggccactgcgctgcggaacatggccttggacgtcagaaataaggagctcatcggcaaatacgccatgcgagacctagtccacaggcttccaggagggaacaacagcaacaacactgcaagcaaggccatgtcggatgacacagtgacagctgtctgctgcacactgcacgaagtgattaccaagaacatggagaacgccaaggccttacgggatgccggtggcatcgagaagttggtcggcatctccaaaagcaaaggagataaacactctccaaaagtggtcaaggctgcatctcaggtcctcaacagcatgtggcagtaccgagatctgaggagtctctacaaaaaggatggatggtcacaataccactttgtagcctcgtcttcaaccatcgagagggaccggcaaaggccctactcctcctcccgcacgccctccatctcccctgtgcgcgtgtctcccaacaaccgctcagcaagtgccccagcttcacctcgggaaatgatcagcctcaaagaaaggaaaacagactacgagtgcaccggcagcaacgccacctaccacggagctaaaggcgaacacacttccaggaaagatgccatgacagctcaaaacactggaatttcaactttgtataggaattcttatggtgcgcccgctgaagacatcaaacacaaccaggtttcagcacagccagtcccacaggagcccagcagaaaagattacgagacctaccagccatttcagaattccacaagaaattacgatgagtccttcttcgaggaccaggtccaccatcgccctcccgccagcgagtacaccatgcacctgggtctcaagtccaccggcaactacgttgacttctactcagctgcccgtccctacagtgaactgaactatgaaacgagccactacccggcctcccccgactcctgggtgtgaggagcagggcacaggcgctccgggaacagtgcatgtgcatgcataccacaagacatttctttctgttttgtttttttctcctgcaaatttagtttgttaaagcctgttccataggaaggctgtgataaccagtaaggaaatattaagagctattttagaaagctaaatgaatcgcaagttaacttggaaatcagtagaaagctaaagtgatcctaaatatgacagtgggcagcacctttctagcgtgagctgtagagtaacgagaagtgctttatactgaacgtggttgatgggaggagagacgaggcattcgggccggtggggcgtaagggttatcgttaagcacaagacacagaatagtttacacactgtgtgggggacggcttctcacgctttgtttactctcttcatccgttgtgactctaggcttcaggttgcattggggttcctctgtacagcaagatgtttcttgccttttgttaatgcattgttgtaaagtatttgatgtacattacagatt

SEQ ID NO: 4856 - DNA, 451 bp, Homo sapiens
  source 1..451: mol_type = unassigned DNA
tgtgggtgcaggtttcctgggcttgccagacacacagggcggcaccttcctacttctgcccagccacagccctcccctcacagttgagcacctgtttgcctgaagttaatttccagaagcaggagtccccagagccaggcagggggatgaaccgcgagggagctcccgggaagagtccggaggagatgtacattcagcagaaggtccgagtgctgctcatgctgcggaagatgggatcaaacctgacagccagcgaggaggagttcctgcgcacctatgcaggggtggtcaacagccagctcagccagctgcctccgcactccatcgaccagggtgcagaggacgtggtgatggcgttttccaggtcggagacggaagaccggaggcagtagctgcaaagcccttggaacaccctggatgctgttgagggccaagagatctgtgtggctcc

SEQ ID NO: 4857 - DNA, 852 bp, Homo sapiens
  source 1..852: mol_type = unassigned DNA
gtggctactctcctgagcttgtctgtggtggctttaaccttgaacaaaccctccagggtttgtgggtggattcctattgtatcaggtgctgtattttcccctcttctggagcaagtgcgtcttttctgatcttccttcccttcagctccagctgccactgtccttgccttcagactggacaaggccttgtgacccatcaggagtttttgtcccgataccgtttcccacaggcggcaccttcctacttctgcccagccacagccctcccctcacagttgagcacctgtttgcctgaagttaatttccagaagcaggagtccccagagccaggcagggggatgaaccgcgagggagctcccgggaagagtccggaggagatgtacattcagcagaaggtccgagtgctgctcatgctgcggaagatgggatcaaacctgacagccagcgaggaggagttcctgcgcacctatgcaggggtggtcaacagccagctcagccagctgcctccgcactccatcgaccagggtgcagaggacgtggtgatggcgttttccaggtcggagacggaagaccggaggcagtagctgcaaagcccttggaacaccctggatgctgttgagggccaagagatctgtgtggctcctgggccggctgagtggcagcagccccccttgccccacctcccccttcccctacccaaccctgccctgccccaccccacctcacagctactcagtggggctggcatcaagggagacaccagtggtgcgtttataattggcttaaagggatggacttgtgattggctgcaggaagaaacttttttattttttaaatcttgaccaacagaaa

SEQ ID NO: 4858 - DNA, 3000 bp, Homo sapiens
  source 1..3000: mol_type = unassigned DNA
accgcggtgactctcggagcgggaggcggaggctgaggcggccgctcctgctgctgctactgccgccgccgcagcggctgctcgggctgagcacgccccggaacaggccgccgcgcgctgcgcgccggacccgctgcccctgccggcccggccgggtcgggcggcccagggaccgacagacttgacaacggtgacagcactggggcggcaccttcctacttctgcccagccacagccctcccctcacagttgagcacctgtttgcctgaagttaatttccagaagcaggagtccccagagccaggcagggggatgaaccgcgagggagctcccgggaagagtccggaggagatgtacattcagcagaaggtccgagtgctgctcatgctgcggaagatgggatcaaacctgacagccagcgaggaggagttcctgcgcacctatgcaggggtggtcaacagccagctcagccagctgcctccgcactccatcgaccagggtgcagaggacgtggtgatggcgttttccaggtcggagacggaagaccggaggcagtagctgcaaagcccttggaacaccctggatgctgttgagggccaagagatctgtgtggctcctgggccggctgagtggcagcagccccccttgccccacctcccccttcccctacccaaccctgccctgccccaccccacctcacagctactcagtggggctggcatcaagggagacaccagtggtgcgtttataattggcttaaagggatggacttgtgattggctgcaggaagaaacttttttattttttaaatcttgaccaacagaaaccttttatttttatttctgactcttattttttaaaaaatttgcgcctcggtatctggcttccctggaagctctccgagctctggtgctttagttaggtcatttttttagaaatgtgaagaggtctgattggctgcttaaactggaaaggatctgtgattggctggttaatgggaaacggtttttttctttggctgcaggtgttctgctgatatcaacagcttccctattttgaatgcagaaaacagggtctgggacattagtcgttatatttgacttgaaaagaaagaaaccaagtgcgctttgcaatatttattacacaaagaacttgctgctgccttcacatttggggtttgtgtttgattggctttcgatgcgtgtgtttggtttcccattggttcacctgtgactcctgttgccatggattcacccccctctgctgccggctctgggcctgagggtccacctggagagtacatttgctttaatgagtgcacctgcctccaccagcaaggggaccccgagaaccctgagcagggtccacagctggaaagttgggcccctgaggagctttgtgtcgtcttgaacgagcagcccagggcctagaggtaaccgttaggcgggatttatgtgcactgcctgcatgagctggcaaccagccagcgtcccttggtgagaaagggattgctgaggcaccgtccaggccccaccggccaggccgcgcccagcagaggcgtactacccagctctgtcctcttggccatccttctgtgtaccacttcctgaggcctcattttgggggtcatcttggaaaggggaggagcttctcccagtgtgagaccccaaagactctggaggtcatctggcggaggtctctgggagcccagaacccacataaaagccccagcttggctcacaaggcccaggagacctccagctaaacaccaacccctgacctaccccagccaggctcctacctgtctgctgccagcacagtaggtcccggccagctctggagttctctcatcggaggcccatgccctccactccactgcctttggaagggtctctctccaggtcagcctggaagggacagtatcgtttgtttatgaaatgccactgggacagctggctgggccttcaccaagcaagtcccttcagactggcccttaagccaaactcaggcccagaattgcagttcagaatggcagtcctggaggcagggggtgaggggcaggtctagtgttcctgcaccaaacctaagtccttccacctgccacccccttccctgggagggaggtggtcctcctatctccctggctcactggcaggtgtgggatctggggagagcggctggagaaagatgcagtcctcaggaagggggccgccaccctcccctatgctggtagatgctgaggcccctaggtgcccagggccagtgggaccctctcagaaccaaatctttcccctttctcggggcttggggctcgggccgtaggggctcctgagtgtcatgaagtgcacaggagccaaatgaccgagccctggagagccccatggtgggtaggtggttcgtgctgtgctctggcaccatcagcctgttccagaaggaggattcgagcatcaggctaagaccctgtgtcctccaccatgcactcacccctagccctggttagctgacagtcagctgtggggaacacagctacaaccctaccctggcagggacctgagagcatctcaggaggggcagcgcatgtgtgcatgtgctgtgtgagtgagcacacccgtgtgcacactcatacacatgtgcacacacacgcactctccccgctcaggggcctggaggtctggctgagcccctggggaaaggtgagttctttcatctccctcctccaggtcggagtgcctggagtcaggtgtcgaggccacattgctggctgccccctctttgtagctcctataaagggcccacacctggtggatacctggttgagtgtgtggtctctgccccagcctgtccttgtcacgatcacaggccttgcttttgtaacaatgatgaccccggcctgtctcatcttctgaagaggaaaagtcaaagtgttgctgtggctccatatttcaactaaaaatatatctgttggagaaagaaattaacaataaagaattttcataggtt

SEQ ID NO: 4859 - DNA, 1206 bp, Homo sapiens
  source 1..1206: mol_type = unassigned DNA
agcccgcgcggagccagatgccgccccctccgccggtccctcccccggcggcctggcgcctccctccctccccaccgcggtgactctcggagcgggaggcggaggctgaggcggccgctcctgctgctgctactgccgccgccgcagcggctgctcgggctgagcacgccccggaacaggccgccgcgcgctgcgcgccggacccgctgcccctgccggcccggccgggtcgggcggcccagggcggcaccttcctacttctgcccagccacagccctcccctcacagttgagcacctgtttgcctgaagttaatttccagaagcaggagtccccagagccaggcagggggatgaaccgcgagggagctcccgggaagagtccggaggagatgtacattcagcagaaggtccgagtgctgctcatgctgcggaagatgggatcaaacctgacagccagcgaggaggagttcctgcgcacctatgcaggggtggtcaacagccagctcagccagctgcctccgcactccatcgaccagggtgcagaggacgtggtgatggcgttttccaggtcggagacggaagaccggaggcagtagctgcaaagcccttggaacaccctggatgctgttgagggccaagagatctgtgtggctcctgggccggctgagtggcagcagccccccttgccccacctcccccttcccctacccaaccctgccctgccccaccccacctcacagctactcagtggggctggcatcaagggagacaccagtggtgcgtttataattggcttaaagggatggacttgtgattggctgcaggaagaaacttttttattttttaaatcttgaccaacagaaaccttttatttttatttctgactcttattttttaaaaaatttgcgcctcggtatctggcttccctggaagctctccgagctctggtgctttagttaggtcatttttttagaaatgtgaagaggtctgattggctgcttaaactggaaaggatctgtgattggctggttaatgggaaacggtttttttctttggctgcaggtgttctgctgatatcaacagcttccctattttgaatgcagaaaacagggtctgggacattagtcgttatatttgacttgaaaagaaagaaaccaagtgcgctttgcaatatttattacacaaagaacttgctgctgccttca

SEQ ID NO: 4860 - DNA, 1412 bp, Homo sapiens
  source 1..1412: mol_type = unassigned DNA
gcaggagtccccagagccaggcagggggatgaaccgcgagggagctcccgggaagagtccggaggagatgtacattcagcagaaggtccgagtgctgctcatgctgcggaagatgggatcaaacctgacagccagcgaggaggagttcctgcgcacctatgcaggggtggtcaacagccagctcagccagctgcctccgcactccatcgaccagggtgcagaggacgtggtgatggcgttttccaggtcggagacggaagaccggaggcagtagctgcaaagcccttggaacaccctggatgctgttgagggccaagagatctgtgtggctcctgggccggctgagtggcagcagccccccttgccccacctcacagctactcagtggggctggcatcaagggagacaccagtggtgcgtttataattggcttaaagggatggacttgtgattggctgcaggaagaaacttttttattttttaaatcttgaccaacagaaaccttttatttttatttctgactcttattttttaaaaaatttgcgcctcggtatctggcttccctggaagctctccgagctctggtgctttagttaggtcatttttttagaaatgtgaagaggtctgattggctgcttaaactggaaaggatctgtgattggctggttaatgggaaacggtttttttctttggctgcaggtgttctgctgatatcaacagcttccctattttgaatgcagaaaacagggtctgggacattagtcgttatatttgacttgaaaagaaagaaaccaagtgcgctttgcaatatttattacacaaagaacttgctgctgccttcacatttggggtttgtgtttgattggctttcgatgcgtgtgtttggtttcccattggttcacctgtgactcctgttgccatggattcacccccctctgctgccggctctgggcctgagggtccacctggagagtacatttgctttaatgagtgcacctgcctccaccagcaaggggaccccgagaaccctgagcagggtccacagctggaaagttgggcccctgaggagctttgtgtcgtcttgaacgagcagcccagggcctagaggtaaccgttaggcgggatttatgtgcactgcctgcatgagctggcaaccagccagcgtcccttggtgagaaagggattgctgaggcaccgtccaggccccaccggccaggccgcgcccagcagaggcgtactacccagctctgtcctcttggccatccttctgtgtaccacttcctgaggcctcattttgggggtcatcttggaaaggggaggagcttctcccagtgtgagaccccaaagactctggaggtcatctggcggaggtctctgggagcccagaacccacataaaagccccagcttggc

SEQ ID NO: 4861 - DNA, 1925 bp, Homo sapiens
  source 1..1925: mol_type = unassigned DNA
attggctctgcggctccgctcgccgcactttacggcagtgtggctggagccgcggctgacgggcccgcggtctgggcgtgagtgcagggaagtggagtatttgctgggccgggtaccatggacgtgggcgaacttctgagctaccagcccaataggggcacaaaacgtccccgggatgatgaagaggaggagcagaagatgcgtcggaaacaaactggtactcgagaacgcggccgctatcgggaagaagaaatgactgtggtggaggaagcggatgatgacaaaaaaaggctgctgcagattattgacagagatggggaagaggaagaggaagaggaggagccattggatgaaagctcagtgaagaaaatgatcctcacatttgaaaagagatcatataaaaaccaagaattgcggattaagtttccagacaatccagagaagttcatggaatccgagctggacctaaatgacatcattcaggagatgcacgtggtggccaccatgccagacctgtaccaccttctggtggagctgaatgctgtacagtcgcttctcggcttgctcggacacgataatacagatgtgtccatagctgtggtcgatttgcttcaggaattaacagatatagacaccctccatgagagtgaagagggagcagaagtgctcatcgatgctctggtggatgggcaggtggtagcactgctggtacagaatctggagcgcctggatgagtctgtgaaagaggaggcagatggcgtccacaacactctggctattgtggaaaacatggctgagttccggcctgagatgtgtacagagggtgcccagcagggtcttctacagtggctgttgaagaggctgaaggcaaagatgccttttgatgccaacaaactgtattgcagtgaagtgctggccatattgctccaggacaatgatgaaaacagggaattgcttggggagctggatggaatcgatgtgcttcttcagcagttatccgtgtttaaaagacacaatcccagcacggctgaggagcaggagatgatggagaatctgtttgattccctctgctcctgtctaatgcttagttccaatcgtgagcgcttcctgaagggcgagggtcttcagctgatgaatctcatgctcagggaaaagaagatctcccggagcagtgccctgaaagtgctggaccatgccatgattggccccgaaggcacagacaactgccataagtttgttgacattcttggcttacgaaccatctttcccctctttatgaaatctcccaggaagatcaagaaagtgggaaccactgagaaggaacatgaagagcatgtctgttcgatcctggcttccctcctgcggaacctgagagggcagcagcggacccggcttctgaataaattcactgaaaatgacagtgagaaggttgacagactaatggagttgcattttaaatatctgggtgcaatgcaggtggcggacaagaagattgaaggggaaaaacacgacatggtccggcgaggagagatcatcgacaatgacaccgaggaggagttctacctccggcgcctggatgcggggctctttgttctccagcacatctgctacatcatggccgagatctgcaatgccaatgtcccccagattcgccagagggttcaccagatcctaaacatgcgaggaagctccatcaaaattgtcaggcatatcatcaaggagtatgcagagaacatcggggacggccggagcccggagttccgggagaacgagcaaaagcgcatcctgggcttgctggagaacttctagaggcaccttggccctgcgcatcatggactctctcagcttccctcccaggatcagtttctacacaactctgtgtggcttttggacaaattaaagctagttttggtatccccgggcca

SEQ ID NO: 4862 - DNA, 1958 bp, Homo sapiens
  source 1..1958: mol_type = unassigned DNA
tgacgggcccgcggtctgggcgtgagtgcagggaagtggagtatttgctgggccgggtaccatggacgtgggcgaacttctgagctaccaggggcatggatggagacacgcacacacacaggcaataggcctcaagattattggcgagtaaaggcatctatctattatcgtgaagcctactctgagctttgacccaataggggcacaaaacgtccccgggatgatgaagaggaggagcagaagatgcgtcggaaacaaactggtactcgagaacgcggccgctatcgggaagaagaaatgactgtggtggaggaagcggatgatgacaaaaaaaggctgctgcagattattgacagagatggggaagaggaagaggaagaggaggagccattggatgaaagctcagtgaagaaaatgatcctcacatttgaaaagagatcatataaaaaccaagaattgcggattaagtttccagacaatccagagaagttcatggaatccgagctggacctaaatgacatcattcaggagatgcacgtggtggccaccatgccagacctgtaccaccttctggtggagctgaatgctgtacagtcgcttctcggcttgctcggacacgataatacagatgtgtccatagctgtggtcgatttgcttcaggaattaacagatatagacaccctccatgagagtgaagagggagcagaagtgctcatcgatgctctggtggatgggcaggtggtagcactgctggtacagaatctggagcgcctggatgagtctgtgaaagaggaggcagatggcgtccacaacactctggctattgtggaaaacatggctgagttccggcctgagatgtgtacagagggtgcccagcagggtcttctacagtggctgttgaagaggctgaaggcaaagatgccttttgatgccaacaaactgtattgcagtgaagtgctggccatattgctccaggacaatgatgaaaacagggaattgcttggggagctggatggaatcgatgtgcttcttcagcagttatccgtgtttaaaagacacaatcccagcacggctgaggagcaggagatgatggagaatctgtttgattccctctgctcctgtctaatgcttagttccaatcgtgagcgcttcctgaagggcgagggtcttcagctgatgaatctcatgctcagggaaaagaagatctcccggagcagtgccctgaaagtgctggaccatgccatgattggccccgaaggcacagacaactgccataagtttgttgacattcttggcttacgaaccatctttcccctctttatgaaatctcccaggaagatcaagaaagtgggaaccactgagaaggaacatgaagagcatgtctgttcgatcctggcttccctcctgcggaacctgagagggcagcagcggacccggcttctgaataaattcactgaaaatgacagtgagaaggttgacagactaatggagttgcattttaaatatctgggtgcaatgcaggtggcggacaagaagattgaaggggaaaaacacgacatggtccggcgaggagagatcatcgacaatgacaccgaggaggagttctacctccggcgcctggatgcggggctctttgttctccagcacatctgctacatcatggccgagatctgcaatgccaatgtcccccagattcgccagagggttcaccagatcctaaacatgcgaggaagctccatcaaaattgtcaggcatatcatcaaggagtatgcagagaacatcggggacggccggagcccggagttccgggagaacgagcaaaagcgcatcctgggcttgctggagaacttctagaggcaccttggccctgcgcatcatggactctctcagcttccctcccaggatcagtttctacacaactctgtgtggcttttggacaaattaaagctagttttggt

SEQ ID NO: 4863 - DNA, 778 bp, Homo sapiens
  source 1..778: mol_type = unassigned DNA
actttacggcagtgtggctggagccgcggctgacgggcccgcggtctgggcgtgagtgcagggaagtggagtatttgctgggccgggtaccatggacgtgggcgaacttctgagctaccaggagggtcattgcgaggagcagtagagctgcactgccgaatgtcgtagccactagccacataggctgttgattgcttgaaatgtgactagtctgaattgagaaatactcccaataggggcacaaaacgtccccgggatgatgaagaggaggagcagaagatgcgtcggaaacaaactggtactcgagaacgcggccgctatcgggaagaagaaatgactgtggtggaggaagcggatgatgacaaaaaaaggctgctgcagattattgacagagatggggaagaggaagaggaagaggaggagccattggatgaaagctcagtgaagaaaatgatcctcacatttgaaaagagatcatataaaaaccaagaattgcggattaagtttccagacaatccagagaagttcatggaatccgagctggacctaaatgacatcattcaggagatgcacgtggtggccaccatgccagacctgtaccaccttctggtggagctgaatgctgtacagtcgcttctcggcttgctcggacacgataatacagatgtgtccatagctgtggtcgatttgcttcaggaattaacagatatagacaccctccatgagagtgaagagggagcagaagtgctcatcgatgctctggtggatgggcaggtgg

SEQ ID NO: 4864 - DNA, 1898 bp, Homo sapiens
  source 1..1898: mol_type = unassigned DNA
cgggcgcctcctggagagcaaggacgcgggggagcagaggtgagctggcaccggaggctggaggggatccccgagcccgggatcgatgatccgagccgcgccgccgccgctgttcctgctgctgctgctgctgctgctgctagtgtcctgggcgtcccgaggcgaggcagcccccgaccaggacgagatccagcgcctccccgggctggccaagcagccgtctttccgccagtactccggctacctcaaaggctccggctccaagcacctccactactggtttgtggagtcccagaaggatcccgagaacagccctgtggtgctttggctcaatgggggtcccggctgcagctcactagatgggctcctcacagagcatggccccttcctggtccagccagatggtgtcaccctggagtacaacccctattcttggaatctgattgccaatgtgttatacctggagtccccagctggggtgggcttctcctactccgatgacaagttttatgcaactaatgacactgaggtcgcccagagcaattttgaggcccttcaagatttcttccgcctctttccggagtacaagaacaacaaacttttcctgaccggggagagctatgctggcatctacatccccaccctggccgtgctggtcatgcaggatcccagcatgaaccttcaggggctggctgtgggcaatggactctcctcctatgagcagaatgacaactccctggtctactttgcctactaccatggccttctggggaacaggctttggtcttctctccagacccactgctgctctcaaaacaagtgtaacttctatgacaacaaagacctggaatgcgtgaccaatcttcaggaagtggcccgcatcgtgggcaactctggcctcaacatctacaatctctatgccccgtgtgctggaggggtgcccagccattttaggtatgagaaggacactgttgtggtccaggatttgggcaacatcttcactcgcctgccactcaagcggatgtggcatcaggcactgctgcgctcaggggataaagtgcgcatggaccccccctgcaccaacacaacagctgcttccacctacctcaacaacccgtacgtgcggaaggccctcaacatcccggagcagctgccacaatgggacatgtgcaactttctggtaaacttacagtaccgccgtctctaccgaagcatgaactcccagtatctgaagctgcttagctcacagaaataccagatcctattatataatggagatgtagacatggcctgcaatttcatgggggatgagtggtttgtggattccctcaaccagaagatggaggtgcagcgccggccctggttagtgaagtacggggacagcggggagcagattgccggcttcgtgaaggagttctcccacatcgcctttctcacgatcaagggcgccggccacatggttcccaccgacaagcccctcgctgccttcaccatgttctcccgcttcctgaacaagcagccatactgatgaccacagcaaccagctccacggcctgatgcagcccctcccagcctctcccgctaggagagtcctcttctaagcaaagtgcccctgcaggccgggttctgccgccaggactgcccccttcccagagccctgtacatcccagactgggcccagggtctcccatagacagcctgggggcaagttagcactttattcccgcagcagttcctgaatggggtggcctggccccttctctgcttaaagaatgccctttatgatgcactgattccatcccaggaacccaacagagctcaggacagcccacagggaggtggtggacggactgtaattgatagattgattatggaattaaattgggtacagcttcaaa

SEQ ID NO: 4865 - DNA, 2187 bp, Homo sapiens
  source 1..2187: mol_type = unassigned DNA
agagtgcacccgaatccacgggctcggaggcagcagccatctctcggccatagggcaggccagctggcgccgggggctattttgggcggcgggcaatgatggtgaccgcaaggcgaccttgtaaggcatttcccccctgactcccttccccgagcctctgcccgggggtcctagcgccgctttctcagccatcccgcctacaacttagccgtccacaacaggatcatctgatcgcgtgcgcccgggctacgatctgcgaggcccgcggaccttgacccggcattgaccgccaccgccccccaggtccgtagggaccaaagaaggggcgggaggaagactgtcacgtggcgccggagttcacgtgactcgtacacatgacttccagtccccgggcgcctcctggagagcaaggacgcgggggagcagagatgatccgagccgcgccgccgccgctgttcctgctgctgctgctgctgctgctgctagtgtcctgggcgtcccgaggcgaggcagcccccgaccaggacgagatccagcgcctccccgggctggccaagcagccgtctttccgccagtactccggctacctcaaaggctccggctccaagcacctccactactggtttgtggagtcccagaaggatcccgagaacagccctgtggtgctttggctcaatgggggtcccggctgcagctcactagatgggctcctcacagagcatggccccttcctgattgccaatgtgttatacctggagtccccagctggggtgggcttctcctactccgatgacaagttttatgcaactaatgacactgaggtcgcccagagcaattttgaggcccttcaagatttcttccgcctctttccggagtacaagaacaacaaacttttcctgaccggggagagctatgctggcatctacatccccaccctggccgtgctggtcatgcaggatcccagcatgaaccttcaggggctggctgtgggcaatggactctcctcctatgagcagaatgacaactccctggtctactttgcctactaccatggccttctggggaacaggctttggtcttctctccagacccactgctgctctcaaaacaagtgtaacttctatgacaacaaagacctggaatgcgtgaccaatcttcaggaagtggcccgcatcgtgggcaactctggcctcaacatctacaatctctatgccccgtgtgctggaggggtgcccagccattttaggtatgagaaggacactgttgtggtccaggatttgggcaacatcttcactcgcctgccactcaagcggatgtggcatcaggcactgctgcgctcaggggataaagtgcgcatggaccccccctgcaccaacacaacagctgcttccacctacctcaacaacccgtacgtgcggaaggccctcaacatcccggagcagctgccacaatgggacatgtgcaactttctggtaaacttacagtaccgccgtctctaccgaagcatgaactcccagtatctgaagctgcttagctcacagaaataccagatcctattatataatggagatgtagacatggcctgcaatttcatgggggatgagtggtttgtggattccctcaaccagaagatggaggtgcagcgccggccctggttagtgaagtacggggacagcggggagcagattgccggcttcgtgaaggagttctcccacatcgcctttctcacgatcaagggcgccggccacatggttcccaccgacaagcccctcgctgccttcaccatgttctcccgcttcctgaacaagcagccatactgatgaccacagcaaccagctccacggcctgatgcagcccctcccagcctctcccgctaggagagtcctcttctaagcaaagtgcccctgcaggccgggttctgccgccaggactgcccccttcccagagccctgtacatcccagactgggcccagggtctcccatagacagcctgggggcaagttagcactttattcccgcagcagttcctgaatggggtggcctggccccttctctgcttaaagaatgccctttatgatgcactgattccatcccaggaacccaacagagctcaggacagcccacagggaggtggtggacggactgtaattgatagattgattatggaattaaattgggtacagcttc

SEQ ID NO: 4866 - DNA, 1024 bp, Homo sapiens
  source 1..1024: mol_type = unassigned DNA
agcccgggatcggtgcgcggcagaggaggctcgcgggtgggagctggcgctggggccggggcttccctcgcggaggcgccgccagcaactccccgggggctgctgcacggaagcgctgaggagcgagtcaacagcccctctgctgcctcccgtagatgatccgagccgcgccgccgccgctgttcctgctgctgctgctgctgctgctgctagtgtcctgggcgtcccgaggcgaggcagcccccgaccaggacgagatccagcgcctccccgggctggccaagcagccgtctttccgccagtactccggctacctcaaaggctccggctccaagcacctccactactggtttgtggagtcccagaaggatcccgagaacagccctgtggtgctttggctcaatgggggtcccggctgcagctcactagatgggctcctcacagagcatggccccttcctggtccagccagatggtgtcaccctggagtacaacccctattcttggaatctgattgccaatgtgttatacctggagtccccagctggggtgggcttctcctactccgatgacaagttttatgcaactaatgacactgaggtcgcccagagcaattttgaggcccttcaagatttcttccgcctctttccggagtacaagaacaacaaacttttcctgaccggggagagctatgctggcatctacatccccaccctggccgtgctggtcatgcaggatcccagcatgaaccttcaggggctggctgtgggcaatggactctcctcctatgagcagaatgacaactccctggtctactttgcctactaccatggccttctggggaacaggctttggtcttctctccagacccactgctgctctcaaaacaagtgtaacttctatgacaacaaagacctggaatgcgtgaccaatcttcaggaagtggcccgcatcgtgggcaactctggcctcaacatctacaatctctatgccccgtgtgctggaggggtgcccagccattttag

SEQ ID NO: 4867 - DNA, 2149 bp, Homo sapiens
  source 1..2149: mol_type = unassigned DNA
gcaatgatggtgaccgcaaggcgaccttgtaaggcatttcccccctgactcccttccccgagcctctgcccgggggtcctagcgccgctttctcagccatcccgcctacaacttagccgtccacaacaggatcatctgatcgcgtgcgcccgggctacgatctgcgaggcccgcggaccttgacccggcattgaccgccaccgccccccaggtccgtagggaccaaagaaggggcgggaggaagactgtcacgtggcgccggagttcacgtgactcgtacacatgacttccagtccccgggcgcctcctggagagcaaggacgcgggggagcagagatgatccgagccgcgccgccgccgctgttcctgctgctgctgctgctgctgctgctagtgtcctgggcgtcccgaggcgaggcagcccccgaccaggacgagatccagcgcctccccgggctggccaagcagccgtctttccgccagtactccggctacctcaaaggctccggctccaagcacctccactactggtttgtggagtcccagaaggatcccgagaacagccctgtggtgctttggctcaatgggggtcccggctgcagctcactagatgggctcctcacagagcatggccccttcctggtccagccagatggtgtcaccctggagtacaacccctattcttggaatctgattgccaatgtgttatacctggagtccccagctggggtgggcttctcctactccgatgacaagttttatgcaactaatgacactgaggtcgcccagagcaattttgaggcccttcaagatttcttccgcctctttccggagtacaagaacaacaaacttttcctgaccggggagagctatgctggcatctacatccccaccctggccgtgctggtcatgcaggatcccagcatgaaccttcaggggctggctgtgggcaatggactctcctcctatgagcagaatgacaactccctggtctactttgcctactaccatggccttctggggaacaggctttggtcttctctccagacccactgctgctctcaaaacaagtgtaacttctatgacaacaaagacctggaatgcgtgaccaatcttcaggaagtggcccgcatcgtgggcaactctggcctcaacatctacaatctctatgccccgtgtgctggaggggtgcccagccattttaggtatgagaaggacactgttgtggtccaggatttgggcaacatcttcactcgcctgccactcaagcggatgtggcatcaggcactgctgcgctcaggggataaagtgcgcatggaccccccctgcaccaacacaacagctgcttccacctacctcaacaacccgtacgtgcggaaggccctcaacatcccggagcagctgccacaatgggacatgtgcaactttctggtaaacttacagtaccgccgtctctaccgaagcatgaactcccagtatctgaagctgcttagctcacagaaataccagatcctattatataatggagatgtagacatggcctgcaatttcatgggggatgagtggtttgtggattccctcaaccagaagatggaggtgcagcgccggccctggttagtgaagtacggggacagcggggagcagattgccggcttcgtgaaggagttctcccacatcgcctttctcacgatcaagggcgccggccacatggttcccaccgacaagcccctcgctgccttcaccatgttctcccgcttcctgaacaagcagccatactgatgaccacagcaaccagctccacggcctgatgcagcccctcccagcctctcccgctaggagagtcctcttctaagcaaagtgcccctgcaggccgggttctgccgccaggactgcccccttcccagagccctgtacatcccagactgggcccagggtctcccatagacagcctgggggcaagttagcactttattcccgcagcagttcctgaatggggtggcctggccccttctctgcttaaagaatgccctttatgatgcactgattccatcccaggaacccaacagagctcaggacagcccacagggaggtggtggacggactgtaattgatagattgattatggaattaaattgggtacagcttcaaa

SEQ ID NO: 4868 - DNA, 1075 bp, Homo sapiens
  source 1..1075: mol_type = unassigned DNA
gggcgcctcctggagagcaaggacgcgggggagcagagatgatccgagccgcgccgccgccgctgttcctgctgctgctgctgctgctgctgctagtgtcctgggcgtcccgaggcgaggcagcccccgaccaggacgagatccagcgcctccccgggctggccaagcagccgtctttccgccagtactccggctacctcaaaggctccggctccaagcacctccactactggtttgtggagtcccagaaggatcccgagaacagccctgtggtgctttggctcaatgggggtcccggctgcagctcactagatgggctcctcacagagcatggccccttcctgattgccaatgtgttatacctggagtccccagctggggtgggcttctcctactccgatgacaagttttatgcaactaatgacactgaggtcgcccagagcaattttgaggcccttcaagatttcttccgcctctttccggagtacaagaacaacaaacttttcctgaccggggagagctatgctggcatctacatccccaccctggccgtgctggtcatgcaggatcccagcatgaaccttcaggggctggctgtgggcaatggactctcctcctatgagcagaatgacaactccctggtctactttgcctactaccatggccttctggggaacaggctttggtcttctctccagacccactgctgctctcaaaacaagtgtaacttctatgacaacaaagacctggaatgcgtgaccaatcttcaggaagtggcccgcatcgtgggcaactctggcctcaacatctacaatctctatgccccgtgtgctggaggggtgcccagccattttaggtatgagaaggacactgttgtggtccaggatttgggcaacatcttcactcgcctgccactcaagcggatgtggcatcaggcactgctgcgctcaggggataaagtgcgcatggaccccccctgcaccaacacaacagctgcttccacctacctcaacaacccgtacgtgcggaaggccctcaacatcccggagcagctgccacaatgggacatgtgcaa

SEQ ID NO: 4869 - DNA, 1903 bp, Homo sapiens
  source 1..1903: mol_type = unassigned DNA
ggtttccgggccggcgtagctatttcaaggcgcgcgcctcgtggtggactcaccgctagcccgcagcgctcggcttcctggtaattcttcacctcttttctcagctccctgcagcatgggtgctgggccctccttgctgctcgccgccctcctgctgcttctctccggcgacggcgccgtgcgctgcgacacacctgccaactgcacctatcttgacctgctgggcacctgggtcttccaggtgggctccagcggttcccagcgcgatgtcaactgctcggttatgggaccacaagaaaaaaaagtagtggtgtaccttcagaagctggatacagcatatgatgaccttggcaattctggccatttcaccatcatttacaaccaaggctttgagattgtgttgaatgactacaagtggtttgccttttttaagtataaagaagagggcagcaaggtgaccacttactgcaacgagacaatgactgggtgggtgcatgatgtgttgggccggaactgggcttgtttcaccggaaagaaggtgggaactgcctctgagaatgtgtatgtcaacatagcacaccttaagaattctcaggaaaagtattctaataggctctacaagtatgatcacaactttgtgaaagctatcaatgccattcagaagtcttggactgcaactacatacatggaatatgagactcttaccctgggagatatgattaggagaagtggtggccacagtcgaaaaatcccaaggcccaaacctgcaccactgactgctgaaatacagcaaaagattttgcatttgccaacatcttgggactggagaaatgttcatggtatcaattttgtcagtcctgttcgaaaccaagcatcctgtggcagctgctactcatttgcttctatgggtatgctagaagcgagaatccgtatactaaccaacaattctcagaccccaatcctaagccctcaggaggttgtgtcttgtagccagtatgctcaaggctgtgaaggcggcttcccataccttattgcaggaaagtacgcccaagattttgggctggtggaagaagcttgcttcccctacacaggcactgattctccatgcaaaatgaaggaagactgctttcgttattactcctctgagtaccactatgtaggaggtttctatggaggctgcaatgaagccctgatgaagcttgagttggtccatcatgggcccatggcagttgcttttgaagtatatgatgacttcctccactacaaaaaggggatctaccaccacactggtctaagagaccctttcaacccctttgagctgactaatcatgctgttctgcttgtgggctatggcactgactcagcctctgggatggattactggattgttaaaaacagctggggcaccggctggggtgagaatggctacttccggatccgcagaggaactgatgagtgtgcaattgagagcatagcagtggcagccacaccaattcctaaattgtagggtatgccttccagtatttcataatgatctgcatcagttgtaaaggggaattggtatattcacagactgtagactttcagcagcaatctcagaagcttacaaatagatttccatgaagatatttgtcttcagaattaaaactgcccttaattttaatatacctttcaatcggccactggccatttttttctaagtattcaattaagtgggaattttctggaagatggtcagctatgaagtaatagagtttgcttaatcatttgtaattcaaacatgctatattttttaaaatcaatgtgaaaacatagacttatttttaaattgtaccaatcacaagaaaataatggcaataattatcaaaacttttaaaatagatgctcatatttttaaaataaa

SEQ ID NO: 4870 - DNA, 1742 bp, Homo sapiens
  source 1..1742: mol_type = unassigned DNA
atgggtgctgggccctcctgcgacacacctgccaactgcacctatcttgacctgctgggcacctgggtcttccaggtgggctccagcggttcccagcgcgatgtcaactgctcggttatgggaccacaagaaaaaaaagtagtggtgtaccttcagaagctggatacagcatatgatgaccttggcaattctggccatttcaccatcatttacaaccaaggctttgagattgtgttgaatgactacaagtggtttgccttttttaagtataaagaagagggcagcaaggtgaccacttactgcaacgagacaatgactgggtgggtgcatgatgtgttgggccggaactgggcttgtttcaccggaaagaaggtgggaactgcctctgagaatgtgtatgtcaacatagcacaccttaagaattctcaggaaaagtattctaataggctctacaagtatgatcacaactttgtgaaagctatcaatgccattcagaagtcttggactgcaactacatacatggaatatgagactcttaccctgggagatatgattaggagaagtggtggccacagtcgaaaaatcccaaggcccaaacctgcaccactgactgctgaaatacagcaaaagattttgcatttgccaacatcttgggactggagaaatgttcatggtatcaattttgtcagtcctgttcgaaaccaagcatcctgtggcagctgctactcatttgcttctatgggtatgctagaagcgagaatccgtatactaaccaacaattctcagaccccaatcctaagccctcaggaggttgtgtcttgtagccagtatgctcaaggctgtgaaggcggcttcccataccttattgcaggaaagtacgcccaagattttgggctggtggaagaagcttgcttcccctacacaggcactgattctccatgcaaaatgaaggaagactgctttcgttattactcctctgagtaccactatgtaggaggtttctatggaggctgcaatgaagccctgatgaagcttgagttggtccatcatgggcccatggcagttgcttttgaagtatatgatgacttcctccactacaaaaaggggatctaccaccacactggtctaagagaccctttcaacccctttgagctgactaatcatgctgttctgcttgtgggctatggcactgactcagcctctgggatggattactggattgttaaaaacagctggggcaccggctggggtgagaatggctacttccggatccgcagaggaactgatgagtgtgcaattgagagcatagcagtggcagccacaccaattcctaaattgtagggtatgccttccagtatttcataatgatctgcatcagttgtaaaggggaattggtatattcacagactgtagactttcagcagcaatctcagaagcttacaaatagatttccatgaagatatttgtcttcagaattaaaactgcccttaattttaatatacctttcaatcggccactggccatttttttctaagtattcaattaagtgggaattttctggaagatggtcagctatgaagtaatagagtttgcttaatcatttgtaattcaaacatgctatattttttaaaatcaatgtgaaaacatagacttatttttaaattgtaccaatcacaagaaaataatggcaataattatcaaaacttttaaaatagatgctcatatttttaaaataaagtttt

SEQ ID NO: 4871 - DNA, 6125 bp, Homo sapiens
  source 1..6125: mol_type = unassigned DNA
aaggcgcgcgcctcgtggtggactcaccgctagcccgcagcgctcggcttcctggtaattcttcacctcttttctcagctccctgcagcatgggtgctgggccctccttgctgctcgccgccctcctgctgcttctctccggcgacggcgccgtgcgctgcgacacacctgccaactgcacctatcttgacctgctgggcacctgggtcttccaggtgggctccagcggttcccagcgcgatgtcaactgctcggttatgggaccacaagaaaaaaaagtagtggtgtaccttcagaagctggatacagcatatgatgaccttggcaattctggccatttcaccatcatttacaaccaaggctttgagattgtgttgaatgactacaagtggtttgccttttttaaggatgtcactgattttatcagtcatttgttcatgcagctgggaactgtggggatatatgatttgccacatctgaggaacaaactggttattaaatagagcatctgttgagggactcttttaaaaccacagccatgaacagacgttggggctaagagacagagcagcctgcgacagtgtggacctacctgtagcagctagcaaaggcctctagcagctacagtcccttctggagtctttatttgcatgcaaaatgcaaaggagtcctggtgacctacctccaaggcagctgccctcctgaacactcccttggaaaacagtaaacatcattttggaatgtgaacaaccagagactacacaggagaaaggaaaaaaaaattctgaagatgcaaaatcttgggtggcttcaccgttcagttttttaataaaaggaacaatatacaacacgttgttctttttctcttttgaaatcccttctattacagtgatttttttctaagattgtcaggatttgaagtgtatgttttgttttattcacagcgtaaattttattcacagtttaactgtctgcctgagtgtctttcctttctctaattaccttgaggaacccaagagcctgttgtaaggagaaaataaggcccttggatctcttgagattcacagatataagttattgaagggaagatggtcctatggaggacatatttaaagaagggaaaaaagaggctttctcagatatgtcagactgctatagtatacttctacagattatagacctccagtacctctggccagaaagatggtatcgtaaacaccctattttttttcttttcttttttcattaggtacaagctttgtgctaagaagttgacatactataagctacaaaagttctgtaaagtagatataactagtttcattttatagatagagaaaattaatctcttacagtgctaagctcacagagtttctaactgtaaaatgctagaacttgtctttcaagcctaaagacttccttggggctaaatagtgaaaaaagccatttcacaaataagtaaatggtatttagaggcatatttggatttcctggtaaattccagtctgtgagcatcatgaatattagtttaatgttgcatgggctcatgttgaagttttaagagaagaactgccttgaagcttaggtttccttagctattaggctactgactttcttgcctaaaccagggttttttcattgaagaccaaaacttaccttctccttcagtttgtagtttggaaattggtagaagagctttgtaaacttcaaattaagtacaaactaagtgtcatagtcaaatttactaatcttaattacagtattgttcaactgattgctatcttctagctctttcctgccgaataatggtcttgtttcctgctctgttggtttagagctgacttctttcagctttggtaagcctgaaattatggggttatgtttaattcatattgtctgggtggactttcctctcttgcatttctgcttgaatagaagaatttttctctagagagtagtttgtcatccttactctgttgattcagatgactctttgtatgatctgagaggtatactgttctgctattctgagaagaagtatttcagaaagatgaattaagagtacagtggactgctcccacctggaaacttttatctatctcacctctggacctgataaattctttatcactcaggaccttgatgacgctgctctctgaaaccctccccagctctctctattaccgtgagaaacatcagaactttggttcccattgcatatcgcaggtacctctgctttcatgccatgctgtaatggagtgattgggtagcatgttttcatctctttccagattgaaaatctgtatttctccctgtatatcttcaacacctaatgcacatagaactttgtaggtacctggaaaatgcaccacagttttcttttctttttgcagacttttcacaagtattaccaacttacaaagaattaattttgtaggattctagaaagacaaatcaggaatggtgccatatacatcttttttgattccctgctctaaagaatattatcaggttaccttcctgcagagttttaaaagaattgcatatttcaagctgactttcaggatgtaaatataaccaaagcaactgatatgtaaaaaatatattcaatggcattcctagattttcttctagggtgttttattgttttgggttttacatttaagtctttaatccatcttgagttaatttttgtataggtataagaaaggggtccagttttaattttctgcgtatggctagccagttctcccagcaccatttattaaatagggaatcctttccctattgtttgtttttgtacggtttgtcaaagattagatggttgtagatgtgtggtcttatttctgagatcttcattctcttccactggtctatgtgtctgtttttgtaccatgcttttttggttactgtagccttgtagtatagtatgaaagatagcatgatgcctccaggtttgttctttttgcttaggattgtcttggctatacgagcttttttttggttctatatgaattttaaaatagtttcttctaattgtgtgaagaatgttaatggtagtttaatgggaatagcattgaatctgtgaattgctttgggcagtatggccattttcatgatattgattcttcctatccatgagcatgtaacgtttttcccttcgtttgtgtcctctctcatttccttgagtagtggtttgtagttctccttgaagagatccttcacttcttctgtattcctagatattttattctctctgtagctattgggaatgggagttcattcatgattttgctctctgcttgccttttgttggtgtatagggatcctggtgacttctgcacattgattttgtatcctgagactttaccgaagttgcttatcagcttaagaagcttttgggctgagatgatggggttttctagatataggatcatgttatcttcaaacaaagacaatttgacttcctctcttcctatttgagtacgctttatttctttctcttgcctgattgccctggccagaactcccaatactatattgaataagaatggtgagagagggcatccttgtcttgtgccagttttcacggggaatgcttccagcttttgcccattcagtatgatattatctgtgggtttctcataaaaagctcttattatttgagatacgttccttcaatacctagtttattgagagtttttaacatgaagcgatgttgaattgtatcgaaggccttttctgtgtctattgagataatcatgtggtttttgtctttagttctgtttatgtgatgaatgacgtttattgatttgcatatgttgaaccggccttgcatcctggggatgaagccaacttgactgtggtagataagcttttggatgtgctgctggatttggtttatcagtatttcattgagattttttgcgtcgaagttcatcagggatattggactgaagttttctttttgttgtcgtatctctgccaggttttggtatcaggatgatgctggcctcataaaatgagttagggaggagtccctccttttcaattgtttggaatagtttcagaagaaagggtatcagctcctctttgtacctctggtagaattcaactgtaaatccatctggtcctggactttttttcattagtaggctatttattactgcctcactttcataacttgttattgatctattcagggatccaacttcttcctgattcagtcttgggagtgtgtatgcatccaggaatttatccatttcttctagattttctagtttctttgcatagaggtgtttgtagtatttgctgttggttgtttgtacttctgtgagatcagtggtggtatcctgtttatcattttttattgtgtctgtttgattcttctcttatttttgacaaagctgacaaaaagaagcaatagggaaaggactctctattcaattaatcctactgtatatctggctagccatatgcagaaaattgaaactgttcctgtttcttaatccatatacgaaaatcaacttacgatggattaaagacttaaatgtaaaacccaaaattataaaaccctggaatagaatataggcaatatcattctggacataggaatgggcaaagattttatgagaaagacaccaaaagcaattacaacaaaagcaaaaattggcaaatgagatctaattaaactaaagagctctgcacagcaaaagaaactactgtcagagtgaacaggcaaccaacagaatgggagaaaattttttcaatctatccatatgacaaaggtctaacatccagaatctacaaggaacttaacaaatttacaagaaaaaaggagccccattaaaaagttggcaaagaacatgaacagacacttcccagaagatattcatgtggccaataaacatgaagaaaagctcaacatcactgaccattagagacgtgcatatcaaaatcacaatgagataccatctcatgtcacaatggtgattattaaaaagtcaaacaacatgctagtgaggttgtagagaaataagaacgcttttacactgttggtgggaatgtcaactaattcaaccactgtggaagacagtgtggtgattcctcaaggatttagaaccagaaatatcattactgcatatagacccaaaggaatagaaatcattctattacaaagatacatgcacatgtatgtttattacagcactattcacaatagcaaagacatggaatcaacccaaatgctcatcagtgatagactggaaaaagagaatgtggaacataaacaccatggaatactatgcagcaataaaaaggaatgagatcctgtccttttcagggacatggatggagttggaagctgttatcctcagcaaactaatgcaggaacagaaaaccaaccaccacatgttctcacttataagtgggagctgaacaatagaacacatgggcacagggaggggaataacacacactggggccagtcagggggtggggggtcaagctgagggagagcattagaaaaaatagctaatgcattctgggcttaacccatttatgcctagtgttccatttctggaatgctaagcatgtggaagttctttatatcctgctcaaggtcattgccaaggtctgatttttcacattcaacaaattgcaacctctggcataaatgggttaatacctaggtgatgagttgataggtgcaggaaaccaccatggcacatgtttatctatgtaagaaacctgcacatcctacacatgtaccctggaacttaaaaaatttaaaatatatatgtatatatatttaatatggaattttaaaaattactaatgagttcttttatctgagtaattttgcatcaacatgcttttattatggaagagaagattcagtgagtacaaaattgcagatacatgtgtcagaagatccctgaatataataaggcttagtattctgtgtcataattgcctgtttgtattcctctctggtctttaaacttcattagggcaaggatcaactccatcttactaaccatttgattccctatgtattacacgatatatgaccaataataagccttcaataaatacttgtaaaataaagaatgttatgtaatata

SEQ ID NO: 4872 - DNA, 747 bp, Homo sapiens
  source 1..747: mol_type = unassigned DNA
gctagcccgcagcgctcggcttcctggtaattcttcacctcttttctcagctccctgcagcatgggtgctgggccctccttgctgctcgccgccctcctgctgcttctctccggcgacggcgccgtgcgctgcgacacacctgccaactgcacctatcttgacctgctgggcacctgggtcttccaggtgggctccagcggttcccagcgcgatgtcaactgctcggttatgggaccacaagaaaaaaaagtagtggtgtaccttcagaagctggatacagcatatgatgaccttggcaattctggccatttcaccatcatttacaaccaaggctttgagattgtgttgaatgactacaagtggtttgccttttttaaggatgtcactgattttatcagtcatttgttcatgcagctgggaactgtggggatatatgatttgccacatctgaggaacaaactggccatgaacagacgttggggctaagagacagagcagcctgcgacagtgtggacctacctgtagcagctagcaaaggcctctagcagctacagtcccttctggagtctttatttgcatgcaaaatgcaaaggagtcctggtgacctacctccaaggcagctgccctcctgaacactcccttggaaaacagtaaacatcattttggaatgtgaacaaccagagactacacaggagaaaggaaaaaaaaattctgaagatgcaaaatcttgggtggcttcaccgttc

SEQ ID NO: 4873 - DNA, 2228 bp, Homo sapiens
  source 1..2228: mol_type = unassigned DNA
atcattcggccctcagactgggctgggcaggtctgagagttagggaaagtccgttcccactgccctcggggagagaagaaaggagggggcaagggagaagctgctggtcggactcacaatgaaaacgctccttcttttgctgctggtgctcctggagctgggagaggcccaaggatcccttcacagggtgcccctcaggaggcatccgtccctcaagaagaagctgcgggcacggagccagctctctgagttctggaaatcccataatttggacatgatccagttcaccgagtcctgctcaatggaccagagtgccaaggaacccctcatcaactacttggatatggaatacttcggcactatctccattggctccccaccacagaacttcactgtcatcttcgacactggctcctccaacctctgggtcccctctgtgtactgcactagcccagcctgcaagacgcacagcaggttccagccttcccagtccagcacatacagccagccaggtcaatctttctccattcagtatggaaccgggagcttgtccgggatcattggagccgaccaagtctctgtggaaggactaaccgtggttggccagcagtttggagaaagtgtcacagagccaggccagacctttgtggatgcagagtttgatggaattctgggcctgggatacccctccttggctgtgggaggagtgactccagtatttgacaacatgatggctcagaacctggtggacttgccgatgttttctgtctacatgagcagtaacccagaaggtggtgcggggagcgagctgatttttggaggctacgaccactcccatttctctgggagcctgaattgggtcccagtcaccaagcaagcttactggcagattgcactggataacatccaggtgggaggcactgttatgttctgctccgagggctgccaggccattgtggacacagggacttccctcatcactggcccttccgacaagattaagcagctgcaaaacgccattggggcagcccccgtggatggagaatatgctgtggagtgtgccaaccttaacgtcatgccggatgtcaccttcaccattaacggagtcccctataccctcagcccaactgcctacaccctactggacttcgtggatggaatgcagttctgcagcagtggctttcaaggacttgacatccaccctccagctgggcccctctggatcctgggggatgtcttcattcgacagttttactcagtctttgaccgtgggaataaccgtgtgggactggccccagcagtcccctaaggaggggccttgtgtctgtgcctgcctgtctgacagaccttgaatatgttaggctggggcattctttacacctacaaaaagttattttccagagaatgtagctgtttccagggttgcaacttgaattaagaccaaacagaacatgagaatacacacacacacacacatatacacacacacacacttcacacatacacaccactcccaccaccgtcatgatggaggaattacgttatacattcatattttgtattgatttttgattatgaaaatcaaaaattttcacatttgattatgaaaatctccaaacatatgcacaagcagagatcatggtataataaatccctttgcaactccactcagccctgacaacccatccacacacggccaggcctgtttatctacactgctgcccactcctctctccagctccacatgctgtacctggatcattctgaagcaaattccgagcattacatcattttgtccataaatatttctaacatccttaaatatacaatcggaattcaagcatctcccattgtcccacaaatgtttggctgtttttgtagttggattgtttgtattaggattcaagcaaggcccatatattgcatttatttgaaatgtctgtaagtctctttccatctacagagtttagcacatttgaacgttgctggttgaaatcccgaggtgtcatttgacatggttctctgaacttatctttcctataaaatggtagttagatctggaggtctgattttgtggcaaaaatacttcctaggtggtgctgggtacttcttgttgcatcctgtcaggaggcagataatgctggtgcctctctattggtaatgttaagactgctgggtgggtttggagttcttggctttaatcattcattacaaagttcagcatttta

SEQ ID NO: 4874 - DNA, 2071 bp, Homo sapiens
  source 1..2071: mol_type = unassigned DNA
agactgggctgggcaggtctgagagttagggaaagtccgttcccactgccctcggggagagaagaaaggagggggcaagggagaagctgctggtcggactcacaatgaaaacgctccttcttttgctgctggtgctcctggagctgggagaggcccaaggatcccttcacagggtgcccctcaggaggcatccgtccctcaagaagaagctgcgggcacggagccagctctctgagttctggaaatcccataatttggacatgatccagttcaccgagtcctgctcaatggaccagagtgccaaggaacccctcatcaactacttggatatggaatacttcggcactatctccattggctccccaccacagaacttcactgtcatcttcgacactggctcctccaacctctgggtcccctctgtgtactgcactagcccagcctgcaagacgcacagcaggttccagccttcccagtccagcacatacagccagccaggtcaatctttctccattcagtatggaaccgggagcttgtccgggatcattggagccgaccaagtctctgtggaaggactaaccgtggttggccagcagtttggagaaagtgtcacagagccaggccagacctttgtggatgcagagtttgatggaattctgggcctgggatacccctccttggctgtgggaggagtgactccagtatttgacaacatgatggctcagaacctggtggacttgccgatgttttctgtctacatgagcagtaacccagaaggtggtgcggggagcgagctgatttttggaggctacgaccactcccatttctctgggagcctgaattgggtcccagtcaccaagcaagcttactggcagattgcactggataatatgctgtggagtgtgccaaccttaacgtcatgccggatgtcaccttcaccattaacggagtcccctataccctcagcccaactgcctacaccctactggacttcgtggatggaatgcagttctgcagcagtggctttcaaggacttgacatccaccctccagctgggcccctctggatcctgggggatgtcttcattcgacagttttactcagtctttgaccgtgggaataaccgtgtgggactggccccagcagtcccctaaggaggggccttgtgtctgtgcctgcctgtctgacagaccttgaatatgttaggctggggcattctttacacctacaaaaagttattttccagagaatgtagctgtttccagggttgcaacttgaattaagaccaaacagaacatgagaatacacacacacacacacatatacacacacacacacttcacacatacacaccactcccaccaccgtcatgatggaggaattacgttatacattcatattttgtattgatttttgattatgaaaatcaaaaattttcacatttgattatgaaaatctccaaacatatgcacaagcagagatcatggtataataaatccctttgcaactccactcagccctgacaacccatccacacacggccaggcctgtttatctacactgctgcccactcctctctccagctccacatgctgtacctggatcattctgaagcaaattccgagcattacatcattttgtccataaatatttctaacatccttaaatatacaatcggaattcaagcatctcccattgtcccacaaatgtttggctgtttttgtagttggattgtttgtattaggattcaagcaaggcccatatattgcatttatttgaaatgtctgtaagtctctttccatctacagagtttagcacatttgaacgttgctggttgaaatcccgaggtgtcatttgacatggttctctgaacttatctttcctataaaatggtagttagatctggaggtctgattttgtggcaaaaatacttcctaggtggtgctgggtacttcttgttgcatcctgtcaggaggcagataatgctggtgcctctctattggtaatgttaagactgctgggtgggtttggagttcttggctttaatcattcattacaaagttcagcatttt

SEQ ID NO: 4875 - DNA, 2243 bp, Homo sapiens
  source 1..2243: mol_type = unassigned DNA
atcattcggccctcagactgggctgggcaggtctgagagttagggaaagtccgttcccactgccctcggggagagaagaaaggagggggcaagggagaagctgctggtcggactcacaatgaaaacgctccttcttttgctgctggtgctcctggagctgggagaggcccaaggatcccttcacagggtgcccctcaggaggcatccgtccctcaagaagaagctgcgggcacggagccagctctctgagttctggaaatcccataatttggacatgatccagttcaccgagtcctgctcaatggaccagagtgccaaggaacccctcatcaactacttggatatggaatacttcggcactatctccattggctccccaccacagaacttcactgtcatcttcgacactggctcctccaacctctgggtcccctctgtgtactgcactagcccagcctgcaagacgcacagcaggttccagccttcccagtccagcacatacagccagccaggtcaatctttctccattcagtatggaaccgggagcttgtccgggatcattggagccgaccaagtctctgctttctcctaccaggtggaaggactaaccgtggttggccagcagtttggagaaagtgtcacagagccaggccagacctttgtggatgcagagtttgatggaattctgggcctgggatacccctccttggctgtgggaggagtgactccagtatttgacaacatgatggctcagaacctggtggacttgccgatgttttctgtctacatgagcagtaacccagaaggtggtgcggggagcgagctgatttttggaggctacgaccactcccatttctctgggagcctgaattgggtcccagtcaccaagcaagcttactggcagattgcactggataacatccaggtgggaggcactgttatgttctgctccgagggctgccaggccattgtggacacagggacttccctcatcactggcccttccgacaagattaagcagctgcaaaacgccattggggcagcccccgtggatggagaatatgctgtggagtgtgccaaccttaacgtcatgccggatgtcaccttcaccattaacggagtcccctataccctcagcccaactgcctacaccctactggacttcgtggatggaatgcagttctgcagcagtggctttcaaggacttgacatccaccctccagctgggcccctctggatcctgggggatgtcttcattcgacagttttactcagtctttgaccgtgggaataaccgtgtgggactggccccagcagtcccctaaggaggggccttgtgtctgtgcctgcctgtctgacagaccttgaatatgttaggctggggcattctttacacctacaaaaagttattttccagagaatgtagctgtttccagggttgcaacttgaattaagaccaaacagaacatgagaatacacacacacacacacatatacacacacacacacttcacacatacacaccactcccaccaccgtcatgatggaggaattacgttatacattcatattttgtattgatttttgattatgaaaatcaaaaattttcacatttgattatgaaaatctccaaacatatgcacaagcagagatcatggtataataaatccctttgcaactccactcagccctgacaacccatccacacacggccaggcctgtttatctacactgctgcccactcctctctccagctccacatgctgtacctggatcattctgaagcaaattccgagcattacatcattttgtccataaatatttctaacatccttaaatatacaatcggaattcaagcatctcccattgtcccacaaatgtttggctgtttttgtagttggattgtttgtattaggattcaagcaaggcccatatattgcatttatttgaaatgtctgtaagtctctttccatctacagagtttagcacatttgaacgttgctggttgaaatcccgaggtgtcatttgacatggttctctgaacttatctttcctataaaatggtagttagatctggaggtctgattttgtggcaaaaatacttcctaggtggtgctgggtacttcttgttgcatcctgtcaggaggcagataatgctggtgcctctctattggtaatgttaagactgctgggtgggtttggagttcttggctttaatcattcattacaaagttcagcatttta

SEQ ID NO: 4876 - DNA, 1238 bp, Homo sapiens
  source 1..1238: mol_type = unassigned DNA
gctcctggagctgggagaggcccaaggatcccttcacagatggaatacttcggcactatctccattggctccccaccacagaacttcactgtcatcttcgacactggctcctccaacctctgggtcccctctgtgtactgcactagcccagcctgcaagacgcacagcaggttccagccttcccagtccagcacatacagccagccaggtcaatctttctccattcagtatggaaccgggagcttgtccgggatcattggagccgaccaagtctctgtggaaggactaaccgtggttggccagcagtttggagaaagtgtcacagagccaggccagacctttgtggatgcagagtttgatggaattctgggcctgggatacccctccttggctgtgggaggagtgactccagtatttgacaacatgatggctcagaacctggtggacttgccgatgttttctgtctacatgagcagtaacccagaaggtggtgcggggagcgagctgatttttggaggctacgaccactcccatttctctgggagcctgaattgggtcccagtcaccaagcaagcttactggcagattgcactggataatatgctgtggagtgtgccaaccttaacgtcatgccggatgtcaccttcaccattaacggagtcccctataccctcagcccaactgcctacaccctactggacttcgtggatggaatgcagttctgcagcagtggctttcaaggacttgacatccaccctccagctgggcccctctggatcctgggggatgtcttcattcgacagttttactcagtctttgaccgtgggaataaccgtgtgggactggccccagcagtcccctaaggaggggccttgtgtctgtgcctgcctgtctgacagaccttgaatatgttaggctggggcattctttacacctacaaaaagttattttccagagaatgtagctgtttccagggttgcaacttgaattaagaccaaacagaacatgagaatacacacacacacacacatatacacacacacacacttcacacatacacaccactcccaccaccgtcatgatggaggaattacgttatacattcatattttgtattgatttttgattatgaaaatcaaaaattttcacatttgattatgaaaatctccaaacatatgcacaagcagagatcatggtataataaatccctttgcaactccactcagccctgacaaccc

SEQ ID NO: 4877 - DNA, 2035 bp, Homo sapiens
  source 1..2035: mol_type = unassigned DNA
gtgccgtcgccccgctggagggaggactcaggccccgctggccgcgggctcggtacccggtgggtcggtggagcgtctgttgggtccgggccgccggcttcgccctcgccatggcgccctggctgcagctcctgtcgctgctggggctgctcccgggcgcagtggccgcccccgcccagccccgagccgccagctttcaggcctgggggccgccgtccccggagctgctggcgcccacccgcttcgcgctggagatgttcaaccgcggccgggctgcggggacgcgggccgtgctgggccttgtgcgcggccgcgtccgccgggcgggtcaggggtcgctgtactccctggaggccaccctggaggagccaccctgcaacgaccccatggtgtgccggctccccgtgtccaagaaaaccctgctctgcagcttccaagtcctggatgagctcggaagacacgtgctgctgcggaaggactgtggcccagtggacaccaaggttccaggtgctggggagcccaagtcagccttcactcagggctcagccatgatttcttctctgtcccaaaaccatccagacaacagaaacgagactttcagctcagtcatttccctgttgaatgaggatcccctgtcccaggacttgcctgtgaagatggcttcaatcttcaagaactttgtcattacctataaccggacatatgagtcaaaggaagaagcccggtggcgcctgtccgtctttgtcaataacatggtgcgagcacagaagatccaggccctggaccgtggcacagctcagtatggagtcaccaagttcagtgatctcacagaggaggagttccgcactatctacctgaatactctcctgaggaaagagcctggcaacaagatgaagcaagccaagtctgtgggtgacctcgccccacctgaatgggactggaggagtaagggggctgtcacaaaagtcaaagaccagggcatgtgtggctcctgctgggccttctcagtcacaggcaatgtggagggccagtggtttctcaaccaggggaccctgctctccctctctgaacaggagctcttggactgtgacaagatggacaaggcctgcatgggcggcttgccctccaatgcctactcggccataaagaatttgggagggctggagacagaggatgactacagctaccagggtcacatgcagtcctgcaacttctcagcagagaaggccaaggtctacatcaatgactccgtggagctgagccagaacgagcagaagctggcagcctggctggccaagagaggcccaatctccgtggccatcaatgcctttggcatgcagttttaccgccacgggatctcccgccctctccggcccctctgcagcccttggctcattgaccatgcggtgttgcttgtgggctacggcaaccgctctgacgttcccttttgggccatcaagaacagctggggcactgactggggtgagaagggttactactacttgcatcgtgggtccggggcctgtggcgtgaacaccatggccagctcggcggtggtggactgaagaggggcccccagctcgggacctggtgctgatcagagtggctgctgccccagcctgacatgtgtccaggcccctccccgggaggtacagctggcagagggaaaggcactgggtacctcagggtgagcagagggcactgggctggggcacagcccctgcttccctgcaccccattcccaccctgaagttctgcacctgcacctttgttgaattgtggtagcttaggaggatgtcggggtgaagggtggtatcttggcagttgaagctggggcaagaactctgggcttgggtaatgagcaggaagaaaattttctgatcttaagcccagctctgttctgcccccgctttcctctgtttgatactataaattttctggttcccttggatttagggatagtgtccctctccatgtccaggaaacttgtaaccacccttttctaacagcaataaagaggtgtccttgtcccgag

SEQ ID NO: 4878 - DNA, 886 bp, Homo sapiens
  source 1..886: mol_type = unassigned DNA
gcacagcagcaactgactgggcagcctttcaggaaagatgcagccactcctgcttctgctggcctttctcctacccactggggctgaggcaggggagatcatcggaggccgggagagcaggccccactcccgcccctacatggcgtatcttcagatccagagtccagcaggtcagagcagatgtggagggttcctggtgcgagaagactttgtgctgacagcagctcattgctggggaagcaatataaatgtcaccctgggcgcccacaatatccagagacgggaaaacacccagcaacacatcactgcgcgcagagccatccgccaccctcaatataatcagcggaccatccagaatgacatcatgttattgcagctgagcagaagagtcagacggaatcgaaacgtgaacccagtggctctgcctagagcccaggagggactgagacccgggacgctgtgcactgtggccggctggggcagggtcagcatgaggaggggaacagatacactccgagaggtgcagctgagagtgcagagggataggcagtgcctccgcatcttcggttcctacgacccccgaaggcagatttgtgtgggggaccggcgggaacggaaggctgccttcaagggggattccggaggccccctgctgtgtaacaatgtggcccacggcatcgtctcctatggaaagtcgtcaggggttcctccagaagtcttcaccagggtctcaagtttcctgccctggataaggacaacaatgagaagcttcaaactgctggatcagatggagacccccctgtgactgactcttcttctcggggacacaggccagctccacagtgttgccagagccttaataaacgtccacagagtataaataacc

SEQ ID NO: 4879 - DNA, 2190 bp, Homo sapiens
  source 1..2190: mol_type = unassigned DNA
tcccgccgctcctccacgctcgtgccgctccccccccgcgctcccagttgacgctctgggccgccacctccgcggaccctgagcgcaagagccaagccgccagcgctgcgatgtgggccacgctgccgctgctctgcgccggggcctggctcctgggagtccccgtctgcggtgccgccgaactgtgcgtgaactccttagagaagtttcacttcaagtcatggatgtctaagcaccgtaagacctacagtacggaggagtaccaccacaggctgcagacgtttgccagcaactggaggaagataaacgcccacaacaatgggaaccacacatttaaaatggcactgaaccaattttcagacatgagctttgctgaaataaaacacaagtatctctggtcagagcctcagaattgctcagccaccaaaagtaactaccttcgaggtactggtccctacccaccttccgtggactggcggaaaaaaggaaattttgtctcacctgtgaaaaatcagggtgcctgcggcagttgctggactttctccaccactggggccctggagtctgcgatcgccatcgcaaccggaaagatgctgtccttggcggaacagcagctggtggactgcgcccaggacttcaataatcacggctgccaagggggtctccccagccaggctttcgagtatatcctgtacaacaaggggatcatgggtgaagacacctacccctaccagggcaaggatggttattgcaagttccaacctggaaaggccatcggctttgtcaaggatgtagccaacatcacaatctatgacgaggaagcgatggtggaggctgtggccctctacaaccctgtgagctttgcctttgaggtgactcaggacttcatgatgtatagaaccggcatctactccagtacttcctgccataaaactccagataaagtaaaccatgcagtactggctgttgggtatggagaaaaaaatgggatcccttactggatcgtgaaaaactcttggggtccccagtggggaatgaacgggtacttcctcatcgagcgcggaaagaacatgtgtggcctggctgcctgcgcctcctaccccatccctctggtgtgagccgtggcagccgcagcgcagactggcggagaaggagaggaacgggcagcctgggcctgggtggaaatcctgccctggaggaagttgtggggagatccactgggacccccaacattctgccctcacctctgtgcccagcctggaaacctacagacaaggaggagttccaccatgagctcacccgtgtctatgacgcaaagatcaccagccatgtgccttagtgtccttcttaacagactcaaaccacatggaccacgaatattctttctgtccagaagggctactttccacatatagagctccagggactgtcttttctgtattcgctgttcaataaacattgagtgagcacctccccagatggagcatgctggtcctgggccatgactcaaaccaggtctgtcctcgccactcagtctcccaggagggaggcatcagggggtgtccaggctctggctgggaggatggtgggggtgctggcggtattatccaccagatggggtatccaggatgaagagcaggcttaatttgagatcttgactatttgtcccaaacctgagtggagaggtggggaggaaggagaaaaacgggccaagctgcggcagaggcaggattcaaacccacaatgtcagcccagaagcctgtacttctctgtgtggcctccccagtctcagctgcctactcctactcagactctgccccccacctccacatgagactgcccaccccttcctcaccaaccccttatttatttcaaacgtgcccagatgctcctgtcgtttccacaccatcccttcccttatcttgccttttgagaaatcttgatctctgtttagagggcggccatgaagttgctgctgcttcctgaagcctccgggctctgggatgtctgtagaacaagctggagtccaccagctctttgtcctatggctcacagactttcttaatgataaaagctgtcatcttatttgggcttcctgaaaagctaaaggcttgagaatatttgaaaaatatatatgttcatgataaggcttatttagataatgcaaatatagtttaatttattagaaaa

SEQ ID NO: 4880 - DNA, 972 bp, Homo sapiens
  source 1..972: mol_type = unassigned DNA
atgtgggccacgctgccgctgctctgcgccgccgaactgtgcgtgaactccttagagaagtttcacttcaagtcatggatgtctaagcaccgtaagacctacagtacggaggagtaccaccacaggctgcagacgtttgccagcaactggaggaagataaacgcccacaacaatgggaaccacacatttaaaatggcactgaaccaattttcagacatgagctttgctgaaataaaacacaagtatctctggtcagagcctcagaattgctcagccaccaaaagtaactaccttcgaggtactggtccctacccaccttccgtggactggcggaaaaaaggaaattttgtctcacctgtgaaaaatcagggtgcctgcggcagttgctggactttctccaccactggggccctggagtctgcgatcgccatcgcaaccggaaagatgctgtccttggcggaacagcagctggtggactgcgcccaggacttcaataatcacggctgccaagggggtctccccagccaggctttcgagtatatcctgtacaacaaggggatcatgggtgaagacacctacccctaccagggcaaggatggttattgcaagttccaacctggaaaggccatcggctttgtcaaggatgtagccaacatcacaatctatgacgaggaagcgatggtggaggctgtggccctctacaaccctgtgagctttgcctttgaggtgactcaggacttcatgatgtatagaaccggcatctactccagtacttcctgccataaaactccagataaagtaaaccatgcagtactggctgttgggtatggagaaaaaaatgggatcccttactggatcgtgaaaaactcttggggtccccagtggggaatgaacgggtacttcctcatcgagcgcggaaagaacatgtgtggcctggctgcctgcgcctcctaccccatccctctggtgtga

SEQ ID NO: 4881 - DNA, 718 bp, Homo sapiens
  source 1..718: mol_type = unassigned DNA
ccacgctcgtgccgctccccccccgcgctcccagttgacgctctgggccgccacctccgcggaccctgagcgcaagagccaagccgccagcgctgcgatgtgggccacgctgccgctgctctgcgccggggcctggctcctgggagtccccgtctgcggtgccgccgaactgtgcgtgaactccttagagaagtttcacttcaagtcatggatgtctaagcaccgtaagacctacagtacggaggagtaccaccacaggctgcagacgtttgccagcaactggaggaagataaacgcccacaacaatgggaaccacacatttaaaatggcactgaaccaattttcagacatgagctttgctgaaataaaacacaagtatctctggtcagagcctcagaattgctcagccaccaaaagtaactaccttcgaggtactggtccctacccaccttccgtggactggcggaaaaaaggaaattttgtctcacctgtgaaaaatcaggtatgcctggcaatctccatcctctccctgcaaaacggccacactcccagacaatacaccaggaagaacaactcaaaaggtccacaaaaccaccacaagcacatccctgcctctgtttcctctcggcatctctcaccaggccgtccctccctcccccagctgagagagatatgtgaagggaagagattgggtgaggccagtgtcaacctagggtga

SEQ ID NO: 4882 - DNA, 1692 bp, Homo sapiens
  source 1..1692: mol_type = unassigned DNA
gatcactggagctgacttccgcaatcccgatggaataaatctagcacccctgatggtgtgcccacactttgctgccgaaacgaagccagacaacagatttccatcagcaggatgtgggggctcaaggttctgctgctacctgtggtgagctttgctctgtaccctgaggagatactggacacccactgggagctatggaagaagacccacaggaagcaatataacaacaaggtggatgaaatctctcggcgtttaatttgggaaaaaaacctgaagtatatttccatccataaccttgaggcttctcttggtgtccatacatatgaactggctatgaaccacctgggggacatgaccagtgaagaggtggttcagaagatgactggactcaaagtacccctgtctcattcccgcagtaatgacaccctttatatcccagaatgggaaggtagagccccagactctgtcgactatcgaaagaaaggatatgttactcctgtcaaaaatcagggtcagtgtggttcctgttgggcttttagctctgtgggtgccctggagggccaactcaagaagaaaactggcaaactcttaaatctgagtccccagaacctagtggattgtgtgtctgagaatgatggctgtggagggggctacatgaccaatgccttccaatatgtgcagaagaaccggggtattgactctgaagatgcctacccatatgtgggacaggaagagagttgtatgtacaacccaacaggcaaggcagctaaatgcagagggtacagagagatccccgaggggaatgagaaagccctgaagagggcagtggcccgagtgggacctgtctctgtggccattgatgcaagcctgacctccttccagttttacagcaaaggtgtgtattatgatgaaagctgcaatagcgataatctgaaccatgcagttttggcagtgggatatggaatccagaagggaaacaagcactggataattaaaaacagctggggagaaaactggggaaacaaaggatatatcctcatggctcgaaataagaacaacgcctgtggcattgccaacctggccagcttccccaagatgtgactccagccagccaaatccatcctgctcttccatttcttccacgatggtgcagtgtaacgatgcactttggaagggagttggtgtgctatttttgaagcagatgtggtgatactgagattgtctgttcagtttccccatttgtttgtgcttcaaatgatccttcctactttgcttctctccacccatgacctttttcactgtggccatcaggactttccctgacagctgtgtactcttaggctaagagatgtgactacagcctgcccctgactgtgttgtcccagggctgatgctgtacaggtacaggctggagattttcacataggttagattctcattcacgggactagttagctttaagcaccctagaggactagggtaatctgacttctcacttcctaagttcccttctatatcctcaaggtagaaatgtctatgttttctactccaattcataaatctattcataagtctttggtacaagtttacatgataaaaagaaatgtgatttgtcttcccttctttgcacttttgaaataaagtatttatctcctgtctacagtttaataaatagcatctagtacacattca

SEQ ID NO: 4883 - DNA, 785 bp, Homo sapiens
  source 1..785: mol_type = unassigned DNA
ggaagaagaaatgcataaggagaatgaggagatatacaatgtctcagaaaacaggaaacattgtcctattttcccttgtcctcttctgacaagatctgggaaagtaccagaatttaggcacgaaagagaagaacgcctcgaagaaatgatcaggaggcaaaacttagacggaaatctctcctttgtgatgtgggggctcaaggttctgctgctacctgtggtgagctttgctctgtaccctgaggagatactggacacccactgggagctatggaagaagacccacaggaagcaatataacaacaaggtggatgaaatctctcggcgtttaatttgggaaaaaaacctgaagtatatttccatccataaccttgaggcttctcttggtgtccatacatatgaactggctatgaaccacctgggggacatgaccagtgaagaggtggttcagaagatgactggactcaaagtacccctgtctcattcccgcagtaatgacaccctttatatcccagaatgggaaggtagagccccagactctgtcgactatcgaaagaaaggatatgttactcctgtcaaaaatcagggtcagtgtggttcctgttgggcttttagctctgtgggtgccctggagggccaactcaagaagaaaactggcaaactcttaaatctgagtccccagaacctagtggattgtgtgtctgagaatgatggctgtggagggggctacatgaccaatgccttccaatatgtgcagaagaaccggggtattgactctgaagatg

SEQ ID NO: 4884 - DNA, 1546 bp, Homo sapiens
  source 1..1546: mol_type = unassigned DNA
ggtaggcgcgcccagacctgagacgggttgggactgggctgcgtcacgcgcgggctctaagcgcccggggccccgcccagtggccggcacagccaatcgcagcgcgggaaggcggtgggggcggggaaggccgcctggaaacttaaatcccgaggcgggcgaacctgcaccagaccgcggacgtctgtaatctcagaggcttgtttgctgagggtgcctgcgcagctgcgacggctgctggttttgaaacatgaatctttcgctcgtcctggctgccttttgcttgggaatagcctccgctgttccaaaatttgaccaaaatttggatacaaagtggtaccagtggaaggcaacacacagaagattatatggcgcgaatgaagaaggatggaggagagcagtgtgggaaaagaatatgaaaatgattgaactgcacaatggggaatacagccaagggaaacatggcttcacaatggccatgaatgcttttggtgacatgaccaatgaagaattcaggcagatgatgggttgctttcgaaaccagaaattcaggaaggggaaagtgttccgtgagcctctgtttcttgatcttcccaaatctgtggattggagaaagaaaggctacgtgacgccagtgaagaatcagaaacagtgtggttcttgttgggcttttagtgcgactggtgctcttgaaggacagatgttccggaaaactgggaaacttgtctcactgagcgagcagaatctggtggactgttcgcgtcctcaaggcaatcagggctgcaatggtggcttcatggctagggccttccagtatgtcaaggagaacggaggcctggactctgaggaatcctatccatatgtagcagtggatgaaatctgtaagtacagacctgagaattctgttgctaatgacactggcttcacagtggtcgcacctggaaaggagaaggccctgatgaaagcagtcgcaactgtggggcccatctccgttgctatggatgcaggccattcgtccttccagttctacaaatcaggcatttattttgaaccagactgcagcagcaaaaacctggatcatggtgttctggtggttggctacggctttgaaggagcaaattcgaataacagcaagtattggctcgtcaaaaacagctggggtccagaatggggctcgaatggctatgtaaaaatagccaaagacaagaacaaccactgtggaatcgccacagcagccagctaccccaatgtgtgagctgatggatggtgaggaggaaggacttaaggacagcatgtctggggaaattttatcttgaaactgaccaaacgcttattgtgtaagataaaccagttgaatcattgaggatccaagttgagattttaattctgtgacatttttacaagggtaaaatgttaccactactttaattattgttatacacagctttatgatatcaaagactcattgcttaattctaagacttttgaattttcattttttaaaaagatgtacaaaacagtttgaaataaattttaattcgtatat

SEQ ID NO: 4885 - DNA, 1052 bp, Homo sapiens
  source 1..1052: mol_type = unassigned DNA
cttctaaagccctgatgcacccacccttaagtggaaggttttgaaacatgaatctttcgctcgtcctggctgccttttgcttgggaatagcctccgctgttccaaaatttgaccaaaatttggatacaaagtggtaccagtggaaggcaacacacagaagattatatggcgcgaatgaagaaggatggaggagagcagtgtgggaaaagaatatgaaaatgattgaactgcacaatggggaatacagccaagggaaacatggcttcacaatggccatgaatgcttttggtgacatgaccaatgaagaattcaggcagatgatgggttgctttcgaaaccagaaattcaggaaggggaaagtgttccgtgagcctctgtttcttgatcttcccaaatctgtggattggagaaagaaaggctacgtgacgccagtgaagaatcagaaacagtgtggttcttgttgggcttttagtgcgactggtgctcttgaaggacagatgttccggaaaactgggaaacttgtctcactgagcgagcagaatctggtggactgttcgcgtcctcaaggcaatcagggctgcaatggtggcttcatggctagggccttccagtatgtcaaggagaacggaggcctggactctgaggaatcctatccatatgtagcagtggatgaaatctgtaagtacagacctgagaattctgttgctaatgacactggcttcacagtggtcgcacctggaaaggagaaggccctgatgaaagcagtcgcaactgtggggcccatctccgttgctatggatgcaggccattcgtccttccagttctacaaatcaggcatttattttgaaccagactgcagcagcaaaaacctggatcatggtgttctggtggttggctacggctttgaaggagcaaattcgaataacagcaagtattggctcgtcaaaaacagctggggtccagaatggggctcgaatggctatgtaaaaatagccaaagacaagaacaaccactgtggaatcgccacagcagccagctaccccaatgtgtga

SEQ ID NO: 4886 - DNA, 4107 bp, Homo sapiens
  source 1..4107: mol_type = unassigned DNA
gacaagggctcttcttgatggcttactgtatccactttgtccccaagaccatagggaaatgactagaggtgactgtactagctagattttaaatgaaactgaaatgaaagttcacttcctcattttgagtacctcatgtgacaagttccaatttcttttcaagtcaattgaactgaaatctccttgttgctttgaaatcttagaagagagcccactaattcaaggactcttactgtgggagcaactgctggttctatcacaatgaaacggctggtttgtgtgctcttggtgtgctcctctgcagtggcacagttgcataaagatcctaccctggatcaccactggcatctctggaagaaaacctatggcaaacaatacaaggaaaagaatgaagaagcagtacgacgtctcatctgggaaaagaatctaaagtttgtgatgcttcacaacctggagcattcaatgggaatgcactcatacgatctgggcatgaaccacctgggagacatgaccagtgaagaagtgatgtctttgatgagttccctgagagttcccagccagtggcagagaaatatcacatataagtcaaaccctaatcggatattgcctgattctgtggactggagagagaaagggtgtgttactgaagtgaaatatcaaggttcttgtggtgcttgctgggctttcagtgctgtgggggccctggaagcacagctgaagctgaaaacaggaaagctggtgtctctcagtgcccagaacctggtggattgctcaactgaaaaatatggaaacaaaggctgcaatggtggcttcatgacaacggctttccagtacatcattgataacaagggcatcgactcagacgcttcctatccctacaaagccatggatcagaaatgtcaatatgactcaaaatatcgtgctgccacatgttcaaagtacactgaacttccttatggcagagaagatgtcctgaaagaagctgtggccaataaaggcccagtgtctgttggtgtagatgcgcgtcatccttctttcttcctctacagaagtggtgtctactatgaaccatcctgtactcagaatgtgaatcatggtgtacttgtggttggctatggtgatcttaatgggaaagaatactggcttgtgaaaaacagctggggccacaactttggtgaagaaggatatattcggatggcaagaaataaaggaaatcattgtgggattgctagctttccctcttacccagaaatctagaggatctctcctttttataacaaatcaagaaatatgaagcactttctcttaacttaatttttcctgctgtatccagaagaaataattgtgtcatgattaatgtgtatttactgtactaattagaaaatatagtttgaggccgggcacggtggctcacgcctgtaatcccagtacttgggaggccaaggcaggcatatcaacttgaggccaggagttaaagagcagcctggctaacatggtgaaaccccatctctactaaaaatacaaaaaattagccgagcacggtggtgcatgcctgtaatcccagctacttgggaggctgaggcacgagattccttgaacccaagaggttgaggctatgttgagctgagatcacaccactgtactccagcctggatgacagagtggagactctgtttcaaaaaaacagaaaagaaaatatagtttgattcttcatttttttaaatttgcaaatctcaggataaagtttgctaagtaaattagtaatgtactatagatataactgtacaaaaattgttcaacctaaaacaatctgtaattgcttattgttttattgtatactctttgtctttttaagacccctaatagccttttgtaacttgatggcttaaaaatacttaataaatctgccatttcaaatttctatcattgccacataccattcttattcctaggcaactattaataatctatcctgagaatattaattgtggtattctggtgatggggtttagcaactttgatggaagaaaatattaggctataaatgtcctaaggactcagattgtatctttgtacagaagaggattcaaaacgccacgtgtagtggctcatgcctgtaatcccaacactttgggaggctgaagtaggaggatcgtcttgagcccaggagttcaagaccagcctggacaacatagtgagaccttgtctccacaaaaataaaaaagaaactatccaggagtggtggtgtgtgcctgtggtccctgctatgcagatgtctaagacaggaggatcacaagagcccaggaggttgagaatgcagtgagcttgtaattgcaccactgcactccagcctgggtgacagagcaagaccctgtcttaaaaaaagaggattcaacacatatttttatattatgttaaagtaaagaaatgcataaaagacaagcactttggaagaattattttaatgatcaacaatttaatgtattagtccaaattatttttacgtagtcatcaacaatttgaccagggcctttatttggcaaataactgagccaaccagaataaaataaccaatactccactgctcatatttttatctaattcagatggatcttccttacaactgctctagattagtagatgcatctaagcaggcagcaggaactttaaattttttaagttcatgtctatgacatgaacaatgtgtgggataatgtcattaatatatcctaaattaacctaaacgtatttcactaactctggctccttctccataaagcacattttaaggaacaagaattgctaaatataaaaacataaataataccataatacatggctatcatcaaaagtgtatagaatattatagtttaaaagtatttagttgattacttttcagttttgttttgttttttgagacggagtctcactctgttgcccaggctggagtgcagtggcaccatctcagttcactgcaacttctgcctcccgagttcaagcgattctcctgcctcagcctcccgagtagctggaattataggcgtgcaccaccacgcccagctaatttttgtatttttagtaaagacagggttttgccacattagccaggctggtctcaaactcctgacctcaggtgatccacccaccccagcctcccaaagtgctaagattacaggcgtgagccactgagcccagcctacttttcagtttttaacataatttttgttttatccacaacttttcaagtattgaaagtagaataaaaacatgggttcttagtctttagctatctgttaaagcctatgaatgccttcttaaaatcatgtttttaaatgcataaaatatataggattacaaaggaatctaattatatcgaaatacagttattaaaatgttaaaagataagtttgttatatattaatatgcatgcttctttataaatgcattaaataagagttaatagctatcctaaatttgaaatagtgataagcataatgaaaatagatgcaaaaaactaatgtgatatgaaaatatctgggtttttcttttgatgatgaagtattgctaatattaccgtggtttatgaactatgttcagaattgaagaaaatcctaactttcagttagaggttagtgacggggttcaggacaccctacacaaaatacagcactttgacatattgaatattttaagctgaaggcatttgaggaaattgcagaagcaggaaggtgactctgaccttctgcctgctgttctccccagaagcagccataaaacctgggaaggattttctgaccttcccctgaagtagatcataagactgtcatgtaagaggtgctctcctggcacccagagaaaaggagcatccttacctccaaaagcacagggacacaaagaggaatctaaacaaacaggcctctcagtttcccccagtttattacatttagcttgttcacactttgccctatgacatttctacatcactggctgctcttcatcaaacctactataaaaaacattcaagttcaactgtttctttgggcctttatttccttatggagcccctcgtgtcgtgtaaaacttatattaaataaatgtgcatgcttt

SEQ ID NO: 4887 - DNA, 3950 bp, Homo sapiens
  source 1..3950: mol_type = unassigned DNA
gtacctcatgtgacaagttccaatttcttttcaagtcaattgaactgaaatctccttgttgctttgaaatcttagaagagagcccactaattcaaggactcttactgtgggagcaactgctggttctatcacaatgaaacggctggtttgtgtgctcttggtgtgctcctctgcagtggcacagttgcataaagatcctaccctggatcaccactggcatctctggaagaaaacctatggcaaacaatacaaggaaaagaatgaagaagcagtacgacgtctcatctgggaaaagaatctaaagtttgtgatgcttcacaacctggagcattcaatgggaatgcactcatacgatctgggcatgaaccacctgggagacatgggttcttgtggtgcttgctgggctttcagtgctgtgggggccctggaagcacagctgaagctgaaaacaggaaagctggtgtctctcagtgcccagaacctggtggattgctcaactgaaaaatatggaaacaaaggctgcaatggtggcttcatgacaacggctttccagtacatcattgataacaagggcatcgactcagacgcttcctatccctacaaagccatggatcagaaatgtcaatatgactcaaaatatcgtgctgccacatgttcaaagtacactgaacttccttatggcagagaagatgtcctgaaagaagctgtggccaataaaggcccagtgtctgttggtgtagatgcgcgtcatccttctttcttcctctacagaagtggtgtctactatgaaccatcctgtactcagaatgtgaatcatggtgtacttgtggttggctatggtgatcttaatgggaaagaatactggcttgtgaaaaacagctggggccacaactttggtgaagaaggatatattcggatggcaagaaataaaggaaatcattgtgggattgctagctttccctcttacccagaaatctagaggatctctcctttttataacaaatcaagaaatatgaagcactttctcttaacttaatttttcctgctgtatccagaagaaataattgtgtcatgattaatgtgtatttactgtactaattagaaaatatagtttgaggccgggcacggtggctcacgcctgtaatcccagtacttgggaggccaaggcaggcatatcaacttgaggccaggagttaaagagcagcctggctaacatggtgaaaccccatctctactaaaaatacaaaaaattagccgagcacggtggtgcatgcctgtaatcccagctacttgggaggctgaggcacgagattccttgaacccaagaggttgaggctatgttgagctgagatcacaccactgtactccagcctggatgacagagtggagactctgtttcaaaaaaacagaaaagaaaatatagtttgattcttcatttttttaaatttgcaaatctcaggataaagtttgctaagtaaattagtaatgtactatagatataactgtacaaaaattgttcaacctaaaacaatctgtaattgcttattgttttattgtatactctttgtctttttaagacccctaatagccttttgtaacttgatggcttaaaaatacttaataaatctgccatttcaaatttctatcattgccacataccattcttattcctaggcaactattaataatctatcctgagaatattaattgtggtattctggtgatggggtttagcaactttgatggaagaaaatattaggctataaatgtcctaaggactcagattgtatctttgtacagaagaggattcaaaacgccacgtgtagtggctcatgcctgtaatcccaacactttgggaggctgaagtaggaggatcgtcttgagcccaggagttcaagaccagcctggacaacatagtgagaccttgtctccacaaaaataaaaaagaaactatccaggagtggtggtgtgtgcctgtggtccctgctatgcagatgtctaagacaggaggatcacaagagcccaggaggttgagaatgcagtgagcttgtaattgcaccactgcactccagcctgggtgacagagcaagaccctgtcttaaaaaaagaggattcaacacatatttttatattatgttaaagtaaagaaatgcataaaagacaagcactttggaagaattattttaatgatcaacaatttaatgtattagtccaaattatttttacgtagtcatcaacaatttgaccagggcctttatttggcaaataactgagccaaccagaataaaataaccaatactccactgctcatatttttatctaattcagatggatcttccttacaactgctctagattagtagatgcatctaagcaggcagcaggaactttaaattttttaagttcatgtctatgacatgaacaatgtgtgggataatgtcattaatatatcctaaattaacctaaacgtatttcactaactctggctccttctccataaagcacattttaaggaacaagaattgctaaatataaaaacataaataataccataatacatggctatcatcaaaagtgtatagaatattatagtttaaaagtatttagttgattacttttcagttttgttttgttttttgagacggagtctcactctgttgcccaggctggagtgcagtggcaccatctcagttcactgcaacttctgcctcccgagttcaagcgattctcctgcctcagcctcccgagtagctggaattataggcgtgcaccaccacgcccagctaatttttgtatttttagtaaagacagggttttgccacattagccaggctggtctcaaactcctgacctcaggtgatccacccaccccagcctcccaaagtgctaagattacaggcgtgagccactgagcccagcctacttttcagtttttaacataatttttgttttatccacaacttttcaagtattgaaagtagaataaaaacatgggttcttagtctttagctatctgttaaagcctatgaatgccttcttaaaatcatgtttttaaatgcataaaatatataggattacaaaggaatctaattatatcgaaatacagttattaaaatgttaaaagataagtttgttatatattaatatgcatgcttctttataaatgcattaaataagagttaatagctatcctaaatttgaaatagtgataagcataatgaaaatagatgcaaaaaactaatgtgatatgaaaatatctgggtttttcttttgatgatgaagtattgctaatattaccgtggtttatgaactatgttcagaattgaagaaaatcctaactttcagttagaggttagtgacggggttcaggacaccctacacaaaatacagcactttgacatattgaatattttaagctgaaggcatttgaggaaattgcagaagcaggaaggtgactctgaccttctgcctgctgttctccccagaagcagccataaaacctgggaaggattttctgaccttcccctgaagtagatcataagactgtcatgtaagaggtgctctcctggcacccagagaaaaggagcatccttacctccaaaagcacagggacacaaagaggaatctaaacaaacaggcctctcagtttcccccagtttattacatttagcttgttcacactttgccctatgacatttctacatcactggctgctcttcatcaaacctactataaaaaacattcaagttcaactgtttctttgggcctttatttccttatggagcccctcgtgtcgtgtaaaacttatattaaataaatgtgcatgcttttctcttgctaatctctcttttgttatagagatctcagccctaaacctaggatggatagaaggaaacatatgttctcccctacattagtaaaaataaaaatggaattttttacccatacaaa

SEQ ID NO: 4888 - DNA, 1300 bp, Homo sapiens
  source 1..1300: mol_type = unassigned DNA
gatctgcgcggcttcctgcctccatgccactccagactgcaccggcatggcactgactgcccacccctcctgcctcctggccctgttggtggcaggcctagcccaaggcatcagaggcccccttagggcccaggacctaggtccccagccgctagagctgaaagaggccttcaagttgttccagatccagttcaaccggagttacctgagcccagaagagcatgctcaccgcctggacatctttgcccacaacctggcccaggctcagaggctgcaggaggaggacttgggcacagctgagtttggggtgactccattcagtgacctcacagaggaggagtttggccagctctatggctatcggagggcagctggaggggtccccagcatgggcagagaaataaggtctgaagagccagaggagtcagtacctttcagctgtgactggcggaaggtggccagcgccatctcacccatcaaggaccagaaaaactgcaactgctgctgggccatggcagcggcaggcaacatagagaccctgtggcgcatcagtttctgggattttgtggatgtctccgtgcaggaactgctggactgtggccgctgtggggatggctgccacggtggcttcgtctgggacgcgttcataactgtcctcaacaacagcggcctggccagtgaaaaggactacccgttccagggcaaagtcagagcccacaggtgccaccccaagaagtaccagaaggtggcctggatccaggacttcatcatgctgcagaacaacgagcacagaattgcgcagtacctggccacttatggccccatcaccgtgaccatcaacatgaagccccttcagctataccggaaaggtgtgatcaaggccacacccaccacctgtgacccccagcttgtggaccactctgtcctgctggtgggttttggcagcgtcaagtcagaggaggggatatgggcagagacagtctcatcgcagtctcagcctcagcctccacaccccaccccatactggatcctgaagaactcctggggggcccaatggggagagaagggctatttccggctgcaccgagggagcaatacctgtggcatcaccaagttcccgctcactgcccgtgtgcagaaaccggatatgaagccccgagtctcctgccctccctgaacccacctggccccctcagctctgtcctgttaggccaactgcctccttgccagccccacccccaggtttttgcccatcctcccaatctcaatacagcctgaataaaccaagacaagacctctg

SEQ ID NO: 4889 - DNA, 1495 bp, Homo sapiens
  source 1..1495: mol_type = unassigned DNA
ggggtcggccgggtgctgggccgaggccgaggccggggcgggatccagagcgggagccggcgcgggatctgggactcggagcgggatccggagcgggacccaggagccggcgcggggccatggcgaggcgcgggccagggtggcggccgcttctgctgctcgtgctgctggcgggcgcggcgcagggcggcctctacttccgccggggacagacctgctaccggcctctgcggggggacgggctggctccgctggggcgcagcacatacccccggcctcatgagtacctgtccccagcggatctgcccaagagctgggactggcgcaatgtggatggtgtcaactatgccagcatcacccggaaccagcacatcccccaatactgcggctcctgctgggcccacgccagcaccagcgctatggcggatcggatcaacatcaagaggaagggagcgtggccctccaccctcctgtccgtgcagaacgtcatcgactgcggtaacgctggctcctgtgaagggggtaatgacctgtccgtgtgggactacgcccaccagcacggcatccctgacgagacctgcaacaactaccaggccaaggaccaggagtgtgacaagtttaaccaatgtgggacatgcaatgaattcaaagagtgccacgccatccggaactacaccctctggagggtgggagactacggctccctctctgggagggagaagatgatggcagaaatctatgcaaatggtcccatcagctgtggaataatggcaacagaaagactggctaactacaccggaggcatctatgccgaataccaggacaccacatatataaaccatgtcgtttctgtggctgggtggggcatcagtgatgggactgagtactggattgtccggaattcatggggtgaaccatggggcgagagaggctggctgaggatcgtgaccagcacctataaggatgggaagggcgccagatacaaccttgccatcgaggagcactgtacatttggggaccccatcgtttaaggccatgtcactagaagcgcagtttaagaaaaggcatggtgacccatgaccagaggggatcctatggttatgtgtgccaggctggctggcaggaactggggtggctatcaatattggatggcgaggacagcgtggcactggctgcgagtgttcctgagagttgaaagtgggatgacttatgacacttgcacagcatggctctgcctcacaatgatgcagtcagccacctggtgaagaagtgacctgcgacacaggaaacgatgggacctcagtcttcttcagcagaggacttgatattttgtatttggcaactgtgggcaataatatggcatttaagaggtgaaagagttcagacttatcaccattcttatgtcactttagaatcaagggtgggggagggagggagggagttggcagtttcaaatcgcccaagtgatgaataaagtatctggctctgcacgaga

SEQ ID NO: 4890 - DNA, 2619 bp, Homo sapiens
  source 1..2619: mol_type = unassigned DNA
acgagaatagtcaggcctttctggaagcccagtgccacagtctgcattgagcttggctcaggaaagaagggaaatccaggcggggcctgttgggcccaggtcttgagctcttttggctccagagttcccagcacagtcatggatcaaaactcagtgcctgaaaaggctcagaatgaggcagacaccaataacgcagataggttctttcgctctcactcatcacccccacaccacaggccaggccacagcagagctctccaccattacgagttgcaccatcacggcgtgccccaccaacgtggtgaatctcaccaccctccggagttccaagacttccacgaccaagccttgtcctcccatgtccaccaatctcaccaccacagcgaggcacggaatcacggcagagcccatggccccacaggctttggtctggctccctctcaaggcgccgtcccctcccaccgttcctacggtgaggactaccatgatgagctccaacgtgatggcaggaggcatcatgatgggtcccaatacggtgggttccatcagcagagtgactcccattaccatagggggtctcaccatggcagaccccaatatctcggtgagaatttatcccactattcctctggcgtgccccaccacggtgaggcttcccaccatggtgggtcctacctcccccatggacccaatccctacagtgagtccttccaccacagcgaggcttcccaccttagcgggctccaacacgatgagtcccagcatcaccaagtcccccaccgtggctggccccaccatcaccaagtccaccaccatggcaggtcccgtcatcatgaagcccaccagcatggaaagtctcctcatcacggagagaccatttcccctcattcctctgtggggtcctaccagcgtgggatatctgactatcacagcgagtaccaccaaggtgatcaccaccccagtgagtaccaccatggcgaccatccccaccacacacagcaccactaccaccagacccaccggcaccgagactaccatcagcaccaagaccaccacggcgcgtatcattccagttacctccatggcgactacgtccagagcacttcccaactctctatcccacacacatcccggagcctgattcacgatgcccccggccctgctgcttctcgtacaggagtcttcccctatcacgtagcacacccacggggctcggctcacagcatgactcggtcctccagcacaatccgctcacgtgtcacccagatgtccaaaaaagtccatacccaggatatctccaccaaacattcagaagactggggcaaagaagaagggcaatttcagaaacgcaaaaccggccggctccagcggacccgcaagaagggacactctaccaatctcttccagtggctgtgggaaaagctaaccttcctcattcagggcttccgggaaatgatccggaacctgacccaatccttggcctttgaaactttcatcttcttcgttgtctgcctcaacaccgtcatgctggtggcccagaccttcgctgaagtcgagatccggggcgagtggtacttcatggccttggactccatattcttctgcatctacgtggtggaagccctgctcaagatcatcgccctgggcctctcgtacttctttgacttctggaacaatttggacttcttcattatggccatggccgtgctggacttcttgctgatgcagacccactccttcgccatctaccaccaaagcctcttccggatcctcaaggtcttcaagagcctgcgggccctgagggcaatccgggtcctgcggaggctcagcttcctgaccagcgtccaggaagtgacagggaccctgggccagtccttgccgtccatcgcagccatcctcatcctcatgtttacctgcctcttcctcttctccgcggtcctccgggcactgttccgcaaatctgaccccaagcgcttccagaacatcttcaccaccatcttcaccctcttcaccttgctcacgctggatgactggtccctcatctacatggacagccgtgcccagggcgcctggtacatcattcccatcctcgtaatttacatcatcatccagtacttcatcttcctcaacctggtgattactgtcctggtggatagcttccagacggcgctgttcaaaggccttgagaaagcgaagcaggagagggccgcccggatccaagagaagctgctggaagactcactgacggagctcagagctgcagagcccaaagaggtggcgagtgaaggcaccatgctgaagcggctcatcgagaaaaagtttgggaccatgactgagaagcagcaggagctcctgttccattacctgcagctggtggcaagcgtggagcaggagcagcagaagttccgctcccaggcagccgtcatcgatgagattgtggacaccacatttgaggctggagaagaggacttcaggaattgaccccaggaggacaccagatacagacttcagcccctggcagtctgcccacctgggtgcactgggacgggtccccagatctgctggaatgattgtccgggccctgcagagcaggggccccaacagagtttttaaacccca

SEQ ID NO: 4891 - DNA, 1362 bp, Homo sapiens
  source 1..1362: mol_type = unassigned DNA
cagaatccagacgctaaggaaaatccctaagcagagattttctgttggatgctaaaagcaaggaataaaagttgaaaatttggaaaatgtctcaacaccgtcaccagcgccactcgagagtcatttctagttcaccagttgacactacatcggtgggattttgcccaacattcaagaaatttaagaggaacgatgatgaatgtcgggcatttgtgaagagagtcataatgagccgtttctttaagataattatgattagcactgtcacatcgaatgcgttttttatggccttgtggaccagttatgacataaggtaccgcttgttcagacttcttgagttctcggagatcttctttgtgtccatctgcacatctgagttgtccatgaaggtctatgtggaccccatcaactactggaagaacggctacaacctgctggatgtgatcattatcatcgttatgtttttaccctatgccctccgccagctcatgggcaaacagttcacttacctgtatatcgctgatggcatgcagtccctgcgcatcctcaagcttatcggctatagccagggcatccggacgctgatcaccgccgtggggcagacagtctacaccgtggcctctgtgctcctcctgctcttcctcctcatgtacatcttcgctatcttgggcttctgcctgtttggatctccagacaatggtgaccatgataactgggggaacctggctgcagcttttttcaccctcttcagcttggccacggttgatggctggacagacctgcagaagcagttggacaatcgggaatttgctttgagccgggcattcaccatcatcttcatcttgctcgcctctttcatcttcctcaacatgttcgtgggtgtgatgatcatgcacacagaggactccatcagaaagtttgagcgagagctgatgttggagcagcaggagatgctcatgggagagaagcaggtgattctgcagcggcagcaggaggagatcagcaggctgatgcacatacagaaaaatgctgactgcacaagtttcagtgagctggtggagaactttaagaagaccttgagccacactgacccaatggtcttggatgattttggcactagcttacccttcatcgatatctacttttccactctggactaccaggacacaactgtccacaagcttcaagagctgtactatgagatcgtgcatgtgctgagcctaatgctggaagacttgccccaggagaagccccagtccttggaaaaggtggatgagaagtagctgggcatggggcacccatgtgccgagagccttgcagaccatgacaggtccctattaaacacaggctttctgagttgtc

SEQ ID NO: 4892 - DNA, 1912 bp, Homo sapiens
  source 1..1912: mol_type = unassigned DNA
accacgagggggagtgagaccacttggagtgaagattctttgaggagaaggaagagactgagcaaacatgagggataatgaaaaggcctggtggcagcaatggacctcccatacaggcctcgaggggtggggcgggactcaggaggaccgtatggggtttggaggggcagtagctgcactgaggggccgcccctctcccctgcagagtaccattcacgagtcctacggtcggccagaggagcaagtgctcatcaaccgccaggaaatcacgaacaaagcggacgcctgggacatgcaggagttcatcactcacatgtacatcaagcagctgctccgacaccccgccttccaactgctgctggccctgctgctggtgatcaatgccatcaccatcgctctccgtaccaactcctacctggaccagaaacactatgagttgttctctaccatagatgacattgtgctgaccatccttctttgtgaggttctccttggctggctcaatggcttctggattttctggaaggacggctggaacatcctcaacttcattatcgtctttatcttgctcttgcggttcttcattaatgaaatcaatattccctccatcaactacactctcagggcgcttcgtctggtgcatgtgtgcatggcggtggagcccctcgcccggatcatccgcgtcatcctgcagtcggtgcctgacatggccaatatcatggtcctcatcctcttcttcatgctggttttttccgtgtttggagtaacactctttggtgcattcgtgcccaagcatttccagaacatacaggttgcgctgtacaccctcttcatctgcatcacccaggacggctgggtggacatctacagtgacttccagacagagaagagggaatatgcaatggagattgggggtgccatctactttaccatcttcatcaccatcggtgccttcattggcatcaacctgttcgtcatcgtggtgaccaccaacctggagcaaatgatgaaggcaggagagcagggacaacagcaacgaataacctttagtgagacaggcgcagaggaagaggaggagaatgaccagctgccactggtgcattgtgtggtcgcccgctcggagaaatctggtctcctccaggaaccccttgcgggaggccccctgtcgaacctctcagaaaacacgtgtgacaacttttgcttggtgcttgaggcaatacaggagaacctgaggcagtacaaggagatccgagatgaactcaacatgattgtggaggaggtgcgcgcaatccgcttcaaccaggagcaggagtcagaggtgttgaacaggcgctcgtcgacgagcgggtcgttggagactacgtcatccaaggacatccgccagatgtctcaacagcaagacttgctcagtgcgctcgttagcatggaaaaggttcatgactctagctcacaaatactccttaaaaaacacaagagcagccactgagaggccaggatgggagccaaggggcctgcacacacacacccagccgctgcgtcttcctgtgtccttagtgtggcttggcagagcctggccagagcccatcctctcccttatacctgggcagaggccaggggctgtgaaggtggcagcacctgcaggtctggtgcctgtgagccccaggtccggtggagcaaggagagaggaggatgctggatgatgagagtgggaaccctagcagcaaggatgagcacagaagggggtgctggccaacgcagccaggatttgacctaaggatggggatccctggccccctgctcttgcccagagctggtggggggcctcagtgggccccagaaccaagaagagaaaggcaaggccagtggggccagacatctgtgtgttgacaataaagttttgtgttggaatcaa

SEQ ID NO: 4893 - DNA, 3623 bp, Homo sapiens
  source 1..3623: mol_type = unassigned DNA
gctgattggctgttaccaaaggtgactagagtgctaagccagtcaacagggaaaacttggctcctgactttgggtctttcttctcagtctatatggaagaaaactgagaaaaaatataaaaaagaagaacacaactagttgcgcatctcctaaagagatggaatcgccacttatatatgtttcagttttgcttttgaacatatttgaattttcatcaggaatagtatataataaagatgatacagagaaacgctttgcatgttctaacaaagggttccctcaagagaatgaaataatcaagttgtatcttttcttagaaaacttgaaaatccagtgtttcttccaaactgaaaatgaaattgcatcaaaagcaatgctaagtgtgttcacatcaggaggacttgctcccagcttgggaatcatgaatagtacatataatggcatcttccactttaatttaacgttgttcagtgatcggattttgtggttggttgatattcctagagaaaacatcacacaaagcacagatattgcagctgtagaagaatggttagtaagaatcactttacatcatggactaaatatttatgctactgaaggaactctattggatgttattcgagaaccgattcttcagtggactcctggggatgtgattccagaaagtgaaatcagtaaattatatccacatgtggtagatctcaaagtgacaaaatgcccctgtgccaatgatgtggcattactaggcttcattgtggatacaatagttgatggtgtttacataggcataacctttggtggattctggcatgattatgataccacatggtttaacatgacacagactatctattcccaacttcaagaagaatatgaagacctttcattggtggatatggttttaacgaatcattttttagttatcctcacctctttgggcctttttgtaagtgaagatcttcgttatccatcacgccacagcttatcgttttccagggcagacttttgtggttttgaaagggttgactatgtgaaaggaaaactgtggtataatgaaagatgttttgctaacagagagcactttgaagttgattatgttacagttacctttgagagaaacagaaccctaagtgagtcaagctcttgtttttatagtcaggaaccatttcttgaatgggtaccctgcttacctcacatttttaaaggaataaaaatttttccaactgtgctaacatttcttgttgaccaagagcgtggtactggagtttacctcttctataacaaggtcaggaaaactgccattgcctctgtgagcaccctgagaaataatgaaccaaattcacaatcaaaatttccaatttttcggtttccttcatcattctcttctcccgttggaatggtatttcatccccgaagccactttttgtatgcttatggcaatcagatatggctttcagttgatggcggcaacacctttcaattaatagctaactttcatgatgatatcataaagaagacttttcatagtttttatacatcagctattacttttgtttctcaacgtggaaaggtttactcgacaaaggcaggaatgggaagatacagtgcagtcggaagtgttactgagagaattttcacattatactatgatcacttgggattcctacataagctgactctgggtcgctttgaagctagtggaccacccacagcctttggaaattctagaaatctttttggacagcctccagatatgggctttgagactgcgcttgccccacagcacacctccttagatgaaattatcttttttgcatatgtacctgagaacgaaccccaggaaacgatctacagcaagaagttcggcaatatacactatggaaaagtgatacactctgggaaaactggaagagcttacataagaaaggtattgcaacatacgactcctaaaggatttttgtcctcagttattgcagaaatgaaagagccctttggattagaagaagtgaatgagagctcttgtttgtctagttcccttttgattaataaagctggaaatgtctataaactcactcttgattcacaagttgttcaggccttgtttgaagatacagatatagagaagactgtagtgcttcccgggtacagcagcttcctcatcacaagcattttagataataagaatgcattagccattgctaccatgcctgaaagtgcacccaacaatatgacctttctaaagagcacatggttcttatacaactttgggcaaaggaatggacgaacatggaaaatatattcaaaaccatgtaattattggtttcaacatgatgattcaccatccctcaacatcgtgaaatacattgatctgggaaactcttatgttttaaaagctaaggtcatacggaatgcaaaaggttttcgaatgcttgaaataccactactgactgtgtttgttggaaaccctaatttgttggaagttacagctgaagtgacttttgatgatactgacagttatgtaataacaatttctgcagctagcaaagttttacatcagggttcaacttcactggcatttattatgtggtcagcctctactgagtgctttgttacgacaatggtgccaacactgaaaagcagctgtagttatctcagatctatgcatcacattcctagcaaatttatcccatttgaagactggattagtggagttcataaagacagtcagggttttaacctcatcaaaactttgccgataaactacaggcctccatctaatatgggaattgctattccactcacagataatttttatcatgcagatcctagcaaacccataccaagaaacatgtttcacatgtcaaagaaaaccggtaaattcaaacagtgtgctaatgtttccactcgggaggagtgtaactgcacaaaggatcagaagttttcacatgctgttgctttctcggattgcagggaaaaagttcctcgctttaagtttccaattacacaatatccagtttctttggaaattatcaacgaggatggacgtgtcccattgcaatctccatatctggttactgtgactgaagtgaacatgaggcacaactggaaactgaaacacactgtgccagaaaatattaaaagaatgaaacaattagtagaaccaattcttggtgctgcagtgtataatccttcaggtctcaacttaagcataaagggctctgaacttttccactttagagtgaccgtcatttcaggagtaactttttgtaacttaattgaagaatttcagatttatgttgatgaggcaccattgccattcccaggacacacgcttattgccgtggcaacagcggtagtgctagggggattaatttttatagcatttatgtttcaactgcaaggcatccatccgtggaggacattccaaagatggattagaagaaaccaagagaagttttcaagtatctctctcagtgagctgattcatagatcaaagtctgaagagtgaacacatggtgatcataatttctctttattttctagttttatcagccaattcctagaacaatatatttaaatgttaaatatgcaagctacataaaatcctaaagaattgtcattat

SEQ ID NO: 4894 - DNA, 430 bp, Homo sapiens
  source 1..430: mol_type = unassigned DNA
acgcaaggagaaggaaatcataatgatgtcatgtgatcaaaggaaaccatggaagggttcacgctgatagctgatagcttttacagtgctcattcctaacagtggatttactttagagacaggattttgccatgtttgccaggttggccttgaactcctgacctcaggtgatccacctgcctcgacctcccaaagtgcttggattacagatggaatcgccacttatatatgtttcagttttgcttttgaacatatttgaattttcatcaggaatagtatataataaagatgatacagagaaacgctttgcatgttctaacaaagggttccctcaagagaatgaaataatcaagttgtatcttttcttagaaaacttgaaaatccagtgtttcttccaaactgaaaatgaaattgcatcaaaagcaatgct

SEQ ID NO: 4895 - DNA, 432 bp, Homo sapiens
  source 1..432: mol_type = unassigned DNA
tcttgacctttacccacttacgcaaggagaaggaaatcataatgatgtcatgtgatcaaaggaaaccatggaagggttcacgctgatagctgatagcttttacagtgctcattcctaacagtggatttacttatggaatcgccacttatatatgtttcagttttgcttttgaacatatttgaattttcatcaggaatagtatataataaagatgatacagagaaacgctttgcatgttctaacaaagggttccctcaagagaatgaaataatcaagttgtatcttttcttagaaaacttgaaaatccagtgtttcttccaaactgaaaatgaaattgcatcaaaagcaatgctaagtgtgttcacatcaggaggacttgctcccagcttgggaatcatgaatagtacatataatggcatcttccactttaat

SEQ ID NO: 4896 - DNA, 491 bp, Homo sapiens
  source 1..491: mol_type = unassigned DNA
acgcaaggagaaggaaatcataatgatgtcatgtgatcaaaggaaaccatggaagggttcacgctgatagctgatagcttttacagtgctcattcctaacagtggatttacttgcagaactccgttagagaagatttaatccggattccaccgctgctccactgctgctgtcctctgttcttttccacacaacctctacctgacttcactttggtgtggactctggagttgatccctctggtttcatatgcttcttttcctacttatatatggaatcgccacttatatatgtttcagttttgcttttgaacatatttgaattttcatcaggaatagtatataataaagatgatacagagaaacgctttgcatgttctaacaaagggttccctcaagagaatgaaataatcaagttgtatcttttcttagaaaacttgaaaatccagtgtttcttccaaactgaaaatgaaattgcatcaaaagcaatgcta

SEQ ID NO: 4897 - DNA, 3504 bp, Homo sapiens
  source 1..3504: mol_type = unassigned DNA
atgggaaggaagagtaagaagtggggcaagaaggtgtcgcggtacgaggggaaggtgagactcaagaaggtgccggctaagaagctggtgccggcgtggaaggagaaggtgctgtgggccctgctggcagtgctcctggcgtcgtggaggctgtgggcgatcaaggatttccaggaatgcacctggcaggttgtcctgaacgagtttaagagggtaggcgagagtggtgtgagcgacagcttctttgagcaagagcccgtggacacagtgagcagcttgtttcacatgctggtggactcacccatcgacccgagcgagaaatacctgggcttcccttactacctgaagatcaactactcctgcgaggaaaagccctctgaggacctggtgcgcatgggccacctgacggggctaaagcccctggtgctggtcaccttccagtccccagtcaacttctaccgctggaagatagagcagctgcagatccagatggaggctgcccccttccgcagcaaaggtgggcctgggggaggcgggagggatcgcaacctggcagggatgaatatcaacggcttcctgaagagagaccgggacaataacatccaattcactgtgggagaggagctcttcaacctgatgccccagtactttgtgggtgtctcatcgaggcccttgtggcacactgtggaccagtcacctgtgcttatcctgggaggcattcccaatgagaagtacgtcctgatgactgacaccagcttcaaggacttctctctcgtggaggtgaacggtgtggggcagatgctgagcattgacagttgctgggtgggctccttctactgcccccattctggcttcacagccaccatctatgacactattgccaccgagagcaccctcttcattcggcagaaccagctggtctactattttacaggcacctataccacactctatgagagaaaccgcggcagtggtgagtgtgctgtggctggacccacgcctggggagggcaccctggtgaacccctccactgaaggcagttggattcgtgtcctggccagcgagtgcatcaagaagctgtgccctgtgtatttccatagcaatggctctgagtacataatggccctcaccacgggcaagcatgagggttatgtacacttcgggaccatcagagttaccacctgctccataatttggtctgaatacatcgcgggtgagtatactctactgctgctggtggagagtggatatggtaatgcaagtaaacgtttccaggtggtcagctacaacacagctagtgatgacctggaacttctctaccacatcccagaattcatccctgaagctcgaggattggagttcctgatgatcctagggacagagtcctacaccagcactgcaatggcccccaagggcatcttctgtaacccgtacaacaatctgatcttcatctggggcaacttcctcctgcagagatctggtacctcctggagggcagctaccgggtctaccagctgttcccttccaagggctggcaggtgcacatcagcttaaagctgatgcaacagtcctctctctacgcatccaatgagaccatgctgaccctcttctacgaagacagcaaactgtaccagctggtgtaccttatgaacaaccagaagggccagctggtcaagaggctcgtgcccgtggagcagcttctgatgtatcaacagcacaccagccactatgacttggagcggaaagggggctacttgatgctctccttcatcgacttctgccccttctcggtgatgcgcctgcggagcctgcccagtccgcagagatacacgcgccaggagcgctaccgggcgcggccgccgcgcgtcctggagcgctcgggcttccacaacgagaactcgctcgccatctaccagggcctggtctactacctgctgtggctgcactccgtgtacgacaagccgtacgcggacccggtgcacgaccccacctggcgctggtgggcgaacaacaaacaagaccaggattactacttcttcttggcgagcaattggcgaagcgcgggcggcgtgtccatagaaatggacagctacgaaaagatctacaacctcgagtccgcgtacgagctgccggagcgcattttcctggacaagggcactgagtacagcttcgccatcttcctgtcggcgcagggccactcgttccggacgcagtcagaactcggcaccgccttccagctgcatagccaggtggacgtgggcgtggtgctggccgaccccggctgcatcgaggcctcggtgaagcaggaggtcctgattaatcgcaactcggtgctattttcgattacgctcaaggataaaaagctttgctatgaccaaggcattagtggacatcaccttatggagacttccatgacggtcaatgtggtgggttcatccgggctctgcttccaggaaacacacctggggccccatatgcaaggcaacctgatggtgccagtgttcattggctgccccccaggcaagcgcctggccttcgacatcacctacacgctggaatacagccgcctgaagaacaaacactactttgactgcgttaacgtgaacccggagatgccctgctttctcttccgggacattttctaccccttcttcttgattcaagatttggtgacaggagactccggcagtttccagggcagctatgttctgctggtggtgggtggcgggcccacactggacagcctcaaggactacagtgaggacgaaatctaccgcttcaacagccccctggacaagaccaacagccttatctggaccacgaggaccacaaggaccaccaaagactcagcctttcacatcatgtcccacgagagcccaggcatcgagtggctctgtctggagaatgccccatgctatgacaatgttccccaaggcatctttgcccctgaattcttcttcaaggtgttggtgagcaatagaggagtggacacgagcacctactgcaactaccagctcaccttcctgctgcacatccacgggctgccactcagtcccaagcgggcccttttcatcatcatggtgtcagctagcgtgtttgtgggcctggtgatcttctacatcgccttctgcctcctgtggcccctcgtggtgaagggctgcacgatgatccggtggaagataaacaacctcattgcctcagaatcctactacacctacgcctccatttccggaatctcgagcatgccgtctctgagacattccaggatgggctccatgttcagctccaggatgacagaggacagggctgaacccaaggaagccgtggagagacagttgatgacctgagtgtcccacctgccccagcccccagttactgtcacgcctctcttatgaggcccatcttgaagatgcaacctgtcacccagcccaggcctctctttctgttttgcttgatgtttacttctcgttcagactcaaataaagccttttttcaggaccagca

SEQ ID NO: 4898 - DNA, 3746 bp, Homo sapiens
  source 1..3746: mol_type = unassigned DNA
gaagtcggctgtggaagtgtgggcggccattttgagaccgggcaagaggggcgggactggtgcggccgagtgacagttgaccggttttaaccaagtgactggttctagccacgttatgtgcggcccagccatgttccctgccggtcctccgtggcccagagtccgagtcgtgcaggtgctgtgggccctgctggcagtgctcctggcgtcgtggaggctgtgggcgatcaaggatttccaggaatgcacctggcaggttgtcctgaacgagtttaagagggtaggcgagagtggtgtgagcgacagcttctttgagcaagagcccgtggacacagtgagcagcttgtttcacatgctggtggactcacccatcgacccgagcgagaaatacctgggcttcccttactacctgaagatcaactactcctgcgaggaaaagccctctgaggacctggtgcgcatgggccacctgacggggctaaagcccctggtgctggtcaccttccagtccccagtcaacttctaccgctggaagatagagcagctgcagatccagatggaggctgcccccttccgcagcaaagagccatgcatggcagaagaagtgtgtagcatgagctggtacacgcccatgcccatcaagaaaggcagtgtggtcatgcgtgtggacatcagcagcaatggcctggggaccttcattccagataaaaggttccagatgaatatcaacggcttcctgaagagagaccgggacaataacatccaattcactgtgggagaggagctcttcaacctgatgccccagtactttgtgggtgtctcatcgaggcccttgtggcacactgtggaccagtcacctgtgcttatcctgggaggcattcccaatgagaagtacgtcctgatgactgacaccagcttcaaggacttctctctcgtggagctgagcattgacagttgctgggtgggctccttctactgcccccattctggcttcacagccaccatctatgacactattgccaccgagagcaccctcttcattcggcagaaccagctggtctactattttacaggcacctataccacactctatgagagaaaccgcggcagtggcagttggattcgtgtcctggccagcgagtgcatcaagaagctgtgccctgtgtatttccatagcaatggctctgagtacataatggccctcaccacgggcaagcatgagggttatgtacacttcgggaccatcagagatggccaggtgtcctttgagatgctgcccaggcagtggtctgtgtgcgagcagataggagttaccacctgctccataatttggtctgaatacatcgcgggtgagtatactctactgctgctggtggagagtggatatggtaatgcaagtaaacgtttccaggtggtcagctacaacacagctagtgatgacctggaacttctctaccacatcccagaattcatccctgaagctcgaggattggagttcctgatgatcctagggacagagtcctacaccagcactgcaatggcccccaagggcatcttctgtaacccgtacaacaatctgatcttcatctggggcaacttcctcctgcagagctctaacaaggaaaacttcatctacctggcagacttccccaaggaactgtccatcaaatacatggccagatcgttccgtggggctgtggctattgtcacagagacggaggagatctggtacctcctggagggcagctaccgggtctaccagctgttcccttccaagggctggcaggtgcacatcagcttaaagctgatgcaacagtcctctctctacgcatccaatgagaccatgctgaccctcttctacgaagacagcaaactgtaccagctggtgtaccttatgaacaaccagaagggccagctggtcaagaggctcgtgcccgtggagcagcttctgatgtatcaacagcacaccagccactatgacttggagcggaaagggggctacttgatgctctccttcatcgacttctgccccttctcggtgatgcgcctgcggagcctgcccagtccgcagagatacacgcgccaggagcgctaccgggcgcggccgccgcgcgtcctggagcgctcgggcttccacaacgagaactcgctcgccatctaccagggcctggtctactacctgctgtggctgcactccgtgtacgacaagccgtacgcggacccggtgcacgaccccacctggcgctggtgggcgaacaacaaacaagaccaggattactacttcttcttggcgagcaattggcgaagcgcgggcggcgtgtccatagaaatggacagctacgaaaagatctacaacctcgagtccgcgtacgagctgccggagcgcattttcctggacaagggcactgagtacagcttcgccatcttcctgtcggcgcagggccactcgttccggacgcagtcagaactcggcaccgccttccagctgcatagccaggtggacgtgggcgtggtgctggccgaccccggctgcatcgaggcctcggtgaagcaggaggtcctgattaatcgcaactcggtgctattttcgattacgctcaaggataaaaagctttgctatgaccaaggcattagtggacatcaccttatggagacttccatgacggtcaatgtggtgggttcatccgggctctgcttccaggaaacacacctggggccccatatgcaaggcaacctgatggtgccagtgttcattggctgccccccaggcaagcgcctggccttcgacatcacctacacgctggaatacagccgcctgaagaacaaacactactttgactgcgttaacgtgaacccggagatgccctgctttctcttccgggacattttctaccccttcttcttgattcaagatttggtgacaggagactccggcagtttccagggcagctatgttctgctggtggtgggtggcgggcccacactggacagcctcaaggactacagtgaggacgaaatctaccgcttcaacagccccctggacaagaccaacagccttatctggaccacgaggaccacaaggaccaccaaagactcagcctttcacatcatgtcccacgagagcccaggcatcgagtggctctgtctggagaatgccccatgctatgacaatgttccccaaggcatctttgcccctgaattcttcttcaaggtgttggtgagcaatagaggagtggacacgagcacctactgcaactaccagctcaccttcctgctgcacatccacgggctgccactcagtcccaagcgggcccttttcatcatcatggtgtcagctagcgtgtttgtgggcctggtgatcttctacatcgccttctgcctcctgtggcccctcgtggtgaagggctgcacgatgatccggtggaagataaacaacctcattgcctcagaatcctactacacctacgcctccatttccggaatctcgagcatgccgtctctgagacattccaggatgggctccatgttcagctccaggatgacagaggacagggctgaacccaaggaagccgtggagagacagttgatgacctgagtgtcccacctgccccagcccccagttactgtcacgcctctcttatgaggcccatcttgaagatgcaacctgtcacccagcccaggcctctctttctgttttgcttgatgtttacttctcgttcagactcaaataaagccttttttcagga

SEQ ID NO: 4899 - DNA, 4333 bp, Homo sapiens
  source 1..4333: mol_type = unassigned DNA
ggaaggggaggggaaggggaaggcgagaaggggagaggcaggggaaagaggggaagagtcgtgggagctgggagaggagggaaagaggggaagagtcgtgggagctggcagaggagggaaagggggagccgaacgtgaagggcgaagggcggggcggggcaggagagtcggggtatagagcaggcaggtgttaatggcatgggaaggaagagtaagaagtggggcaagaaggtgtcgcggtacgaggggaaggtgagactcaagaaggtgccggctaagaagctggtgccggcgtggaaggagaaggtgtggggcgaggaaacaacgaagggcgaggaaagatcccgaggcgaagagacagttttcatcgagaaggggcagggcgaggaggaggggcgttaccagagggcgggacggggcgacgggcccgcgcgggaagaaccaatcgccgagaacccggggaaggaacgggtccataaagaccaagtggaggagtaggggcgcggtcaggagcggaagcagagtgaggagcaagccccgggcgagaaacgggggcccggccgggagcaagagcaggggcggggccgggagcaagagcaggggcggggcccggagacgggcgagaccaggtacagtacccagcccctgggcagaccccgagcgaggagaaagcggcgataccaagagaagttctagccacgttatgtgcggcccagccatgttccctgccggtcctccgtggcccagagtccgagtcgtgcaggtgctgtgggccctgctggcagtgctcctggcgtcgtggaggctgtgggcgatcaaggatttccaggaatgcacctggcaggttgtcctgaacgagtttaagagggtaggcgagagtggtgtgagcgacagcttctttgagcaagagcccgtggacacagtgagcagcttgtttcacatgctggtggactcacccatcgacccgagcgagaaatacctgggcttcccttactacctgaagatcaactactcctgcgaggaaaagccctctgaggacctggtgcgcatgggccacctgacggggctaaagcccctggtgctggtcaccttccagtccccagtcaacttctaccgctggaagatagagcagctgcagatccagatggaggctgcccccttccgcagcaaagagccatgcatggcagaagaagtgtgtagcatgagctggtacacgcccatgcccatcaagaaaggcagtgtggtcatgcgtgtggacatcagcagcaatggcctggggaccttcattccagataaaaggttccagatgaatatcaacggcttcctgaagagagaccgggacaataacatccaattcactgtgggagaggagctcttcaacctgatgccccagtactttgtgggtgtctcatcgaggcccttgtggcacactgtggaccagtcacctgtgcttatcctgggaggcattcccaatgagaagtacgtcctgatgactgacaccagcttcaaggacttctctctcgtggagctgagcattgacagttgctgggtgggctccttctactgcccccattctggcttcacagccaccatctatgacactattgccaccgagagcaccctcttcattcggcagaaccagctggtctactattttacaggcacctataccacactctatgagagaaaccgcggcagtggcagttggattcgtgtcctggccagcgagtgcatcaagaagctgtgccctgtgtatttccatagcaatggctctgagtacataatggccctcaccacgggcaagcatgagggttatgtacacttcgggaccatcagagatggccaggtgtcctttgagatgctgcccaggcagtggtctgtgtgcgagcagataggagttaccacctgctccataatttggtctgaatacatcgcgggtgagtatactctactgctgctggtggagagtggatatggtaatgcaagtaaacgtttccaggtggtcagctacaacacagctagtgatgacctggaacttctctaccacatcccagaattcatccctgaagctcgaggattggagttcctgatgatcctagggacagagtcctacaccagcactgcaatggcccccaagggcatcttctgtaacccgtacaacaatctgatcttcatctggggcaacttcctcctgcagagctctaacaaggaaaacttcatctacctggcagacttccccaaggaactgtccatcaaatacatggccagatcgttccgtggggctgtggctattgtcacagagacggaggagatctggtacctcctggagggcagctaccgggtctaccagctgttcccttccaagggctggcaggtgcacatcagcttaaagctgatgcaacagtcctctctctacgcatccaatgagaccatgctgaccctcttctacgaagacagcaaactgtaccagctggtgtaccttatgaacaaccagaagggccagctggtcaagaggctcgtgcccgtggagcagcttctgatgtatcaacagcacaccagccactatgacttggagcggaaagggggctacttgatgctctccttcatcgacttctgccccttctcggtgatgcgcctgcggagcctgcccagtccgcagagatacacgcgccaggagcgctaccgggcgcggccgccgcgcgtcctggagcgctcgggcttccacaacgagaactcgctcgccatctaccagggcctggtctactacctgctgtggctgcactccgtgtacgacaagccgtacgcggacccggtgcacgaccccacctggcgctggtgggcgaacaacaaacaagaccaggattactacttcttcttggcgagcaattggcgaagcgcgggcggcgtgtccatagaaatggacagctacgaaaagatctacaacctcgagtccgcgtacgagctgccggagcgcattttcctggacaagggcactgagtacagcttcgccatcttcctgtcggcgcagggccactcgttccggacgcagtcagaactcggcaccgccttccagctgcatagccaggtggacgtgggcgtggtgctggccgaccccggctgcatcgaggcctcggtgaagcaggaggtcctgattaatcgcaactcggtgctattttcgattacgctcaaggataaaaagctttgctatgaccaaggcattagtggacatcaccttatggagacttccatgacggtcaatgtggtgggttcatccgggctctgcttccaggaaacacacctggggccccatatgcaaggcaacctgatggtgccagtgttcattggctgccccccaggcaagcgcctggccttcgacatcacctacacgctggaatacagccgcctgaagaacaaacactactttgactgcgttaacgtgaacccggagatgccctgctttctcttccgggacattttctaccccttcttcttgattcaagatttggtgacaggagactccggcagtttccagggcagctatgttctgctggtggtgggtggcgggcccacactggacagcctcaaggactacagtgaggacgaaatctaccgcttcaacagccccctggacaagaccaacagccttatctggaccacgaggaccacaaggaccaccaaagactcagcctttcacatcatgtcccacgagagcccaggcatcgagtggctctgtctggagaatgccccatgctatgacaatgttccccaaggcatctttgcccctgaattcttcttcaaggtgttggtgagcaatagaggagtggacacgagcacctactgcaactaccagctcaccttcctgctgcacatccacgggctgccactcagtcccaagcgggcccttttcatcatcatggtgtcagctagcgtgtttgtgggcctggtgatcttctacatcgccttctgcctcctgtggcccctcgtggtgaagggctgcacgatgatccggtggaagataaacaacctcattgcctcagaatcctactacacctacgcctccatttccggaatctcgagcatgccgtctctgagacattccaggatgggctccatgttcagctccaggatgacagaggacagggctgaacccaaggaagccgtggagagacagttgatgacctgagtgtcccacctgccccagcccccagttactgtcacgcctctcttatgaggcccatcttgaagatgcaacctgtcacccagcccaggcctctctttctgttttgcttgatgtttacttctcgttcagactcaaataaagccttttttcagg

SEQ ID NO: 4900 - DNA, 2743 bp, Homo sapiens
  source 1..2743: mol_type = unassigned DNA
aggtgagcggttgctcgtcgtcggggcggccggcagcggcggctccagggcccagcatgcgcgggggaccccgcggccaccatgtatgtgggctatgtgctggacaaggattcgcccgtgtaccccggcccagccaggccagccagcctcggcctgggcccgcaagcctacggccccccggccccgcccccggcgcccccgcagtaccccgacttctccagctactctcacgtggagccggcccccgcgcccccgacggcctggggggcgcccttccctgcgcccaaggacgactgggccgccgcctacggcccgggccccgcggcccctgccgccagcccagcttcgctggcattcgggccccctccagactttagcccggtgccggcgccccctgggcccggcccgggcctcctggcgcagcccctcgggggcccgggcacaccgtcctcgcccggagcgcagaggccgacgccctacgagtggatgcggcgcagcgtggcggccggaggcggcggtggcagcggtaagactcggaccaaggacaagtaccgcgtggtctacaccgaccaccaacgcctggagctggagaaggagtttcattacagccgttacatcacaatccggcggaaatcagagctggctgccaatctggggctcactgaacggcaggtgaagatctggttccaaaaccggcgggcaaaggagcgcaaagtgaacaagaagaaacagcagcagcaacagcccccacagccgccgatggcccacgacatcacggccaccccagccgggccatccctggggggcctgtgtcccagcaacaccagcctcctggccacctcctctccaatgcctgtgaaagaggagtttctgccatagccccatgcccagcctgtgcgccgggggacctggggactcgggtgctgggagtgtggctcctgtgggcccaggaggtctggtccgagtctcagccctgaccttctgggacatggtggacagtcacctatccaccctctgcatccccttggcccatctgtgcagtaagcctgttggataaagaccttccagctcctgtgttctagacctctgggggataagggagtccagggtggatgatctcaatctcccgtgggcatctcaagccccaaatggttgggggaggggcctagacaaggctccaggccccacctcctcctccatacgttcagaggtgcagctggaggctgctgtggggaccacactgatcctggagaaaagggatggagctgaaaaagatggaatgcttgcagagcatgacctgaggagggaggaacgtggtcaactcacacctgcctcttcctgcagcctcacttctacctgcccccatcataagggcactgagcccttcccaggctggatactaagcacaaagcccatagcactgggctctgatggctgctccactgggttacagaatcacagccctcatgatcattctcagtgagggctctggattgagagggaggccctgggaggagagaagggggcagagtcttccctaccaggtttctacacccccgccaggctgcccatcagggcccagggagcccccagaggactttattcggaccaagcagagctcacagctggacaggtgttgtatatagagtggaatctcttggatgcagcttcaagaataaatttttcttctcttttcaaaaatgtataaaaatcattatacatagcattaaagaaacatttttgagaagtacaaatcatcctcaccttccccagcaattgtgtattcctttcccgtttgtttaggcccacaacaaggtcacctttaaaatacatttgaaagatcaaaacagaacaccattcgtttaggtctatgagactacgtaaaaatgtgagtccattttgtaagcagattcatcagactcaacatatcagtcttttgaatttttcagatatgttcagttcaggtttttctttcaataatgacattcattgctcaccccatgtgctacgcgtggctgggcctgggaagcacacagtccttgtcccctagactggagaaggggtgcgagatcatgtcttgggaagatgtggagggggaaggttacagagaagggcatctccagggtaggagagcaagatctagagggggagaatgcattcagagtccatgtggtctgggcagctggagcaggagagaagccacaaagcccccctcagggtctgacttcaggggtcctgaattgctctgcagaagtccccagtccagtggggaagactgctatgcacacagatgacactaatataacaggataagggccaatctgagcgtcaggggagccagggcatccaacgagagcagagcacatgcctagcttatcctggaaggcttcctggagtaggtaatgtttgaactgagactgaaaaggactagcgagtatggatcaggccaagaagggaataaaggagaaaaggaacttgagcaatatggactgaaagtataattttttttgaactcgggagtctactacccggggccttctctccccgggggctctggtgccagctgcctgcccctctgtttactgttctgggaggtggccaggccataaaaagtgtgcacagcctgcctgacatcgccctttgctcccatgataacagtgcacaaggtggatcctggcctggcacaggcccctgaagtgcagcaggcacttctctctctcctcctaccagtggcctgggagac

SEQ ID NO: 4901 - DNA, 1302 bp, Homo sapiens
  source 1..1302: mol_type = unassigned DNA
gtgagcggttgctcgtcgtcggggcggccggcagcggcggctccagggcccagcatgcgcgggggaccccgcggccaccatgtatgtgggctatgtgctggacaaggattcgcccgggcacaccgtcctcgcccggagcgcagaggccgacgccctacgagtggatgcggcgcagcgtggcggccggaggcggcggtggcagcggtaagactcggaccaaggacaagtaccgcgtggtctacaccgaccaccaacgcctggagctggagaaggagtttcattacagccgttacatcacaatccggcggaaatcagagctggctgccaatctggggctcactgaacggcaggtgaagatctggttccaaaaccggcgggcaaaggagcgcaaagtgaacaagaagaaacagcagcagcaacagcccccacagccgccgatggcccacgacatcacggccaccccagccgggccatccctggggggcctgtgtcccagcaacaccagcctcctggccacctcctctccaatgcctgtgaaagaggagtttctgccatagccccatgcccagcctgtgcgccgggggacctggggactcgggtgctgggagtgtggctcctgtgggcccaggaggtctggtccgagtctcagccctgaccttctgggacatggtggacagtcacctatccaccctctgcatccccttggcccatctgtgcagtaagcctgttggataaagaccttccagctcctgtgttctagacctctgggggataagggagtccagggtggatgatctcaatctcccgtgggcatctcaagccccaaatggttgggggaggggcctagacaaggctccaggccccacctcctcctccatacgttcagaggtgcagctggaggctgctgtggggaccacactgatcctggagaaaagggatggagctgaaaaagatggaatgcttgcagagcatgacctgaggagggaggaacgtggtcaactcacacctgcctcttcctgcagcctcacttctacctgcccccatcataagggcactgagcccttcccaggctggatactaagcacaaagcccatagcactgggctctgatggctgctccactgggttacagaatcacagccctcatgatcattctcagtgagggctctggattgagagggaggccctgggaggagagaagggggcagagtcttccctaccaggtttctacacccccgccaggctgcccatcagggcccagggagcccccagaggactttattcggaccaagcagagctcaca

SEQ ID NO: 4902 - DNA, 982 bp, Homo sapiens
  source 1..982: mol_type = unassigned DNA
gtgagcggttgctcgtcgtcggggcggccggcagcggcggctccagggcccagcatgcgcgggggaccccgcggccaccatgtatgtgggctatgtgctggacaaggattcgcccgtgtaccccggcccagccaggccagccagcctcggcctgggcccgcaagcctgtgtcccagcaacaccagcctcctggccacctcctctccaatgcctgtgaaagaggagtttctgccatagccccatgcccagcctgtgcgccgggggacctggggactcgggtgctgggagtgtggctcctgtgggcccaggaggtctggtccgagtctcagccctgaccttctgggacatggtggacagtcacctatccaccctctgcatccccttggcccatctgtgcagtaagcctgttggataaagaccttccagctcctgtgttctagacctctgggggataagggagtccagggtggatgatctcaatctcccgtgggcatctcaagccccaaatggttgggggaggggcctagacaaggctccaggccccacctcctcctccatacgttcagaggtgcagctggaggctgctgtggggaccacactgatcctggagaaaagggatggagctgaaaaagatggaatgcttgcagagcatgacctgaggagggaggaacgtggtcaactcacacctgcctcttcctgcagcctcacttctacctgcccccatcataagggcactgagcccttcccaggctggatactaagcacaaagcccatagcactgggctctgatggctgctccactgggttacagaatcacagccctcatgatcattctcagtgagggctctggattgagagggaggccctgggaggagagaagggggcagagtcttccctaccaggtttctacacccccgccaggctgcccatcagggcccagggagcccccagaggactttattcggaccaagcagagctcaca

SEQ ID NO: 4903 - DNA, 4501 bp, Homo sapiens
  source 1..4501: mol_type = unassigned DNA
gcaatttgcttccggttgtatttctcaggaagtccgatgacactcggctgtccaggccaggcgctggaagtcccccaggaggaccagctcggtctcccacctcttgagtgcacagctccttggcccctgagtaccccaccacccccatttccagccttcttccttacaaacacgaagggtgggaggaaccagaaaacaggggatcccgcagccctaggctagttctgatcgctttcaggtgtctgcagaggcaagttgctggttgtcacctgtaaaatggggaggataaaaacacctcccagattttgttctagatcctagggggatgtgaggctcaagggagataaaggacactggagagcaccctagaaatgacaggatgaaggcgatggtgacaaatatccgagcgaaacgcttgacaatgagaacagacaagtgcaggtctccaggagtgccgcgagcgcccgcgggttctgagagcgctcaaagccgccgagtcaggctgcccagcccgccgggcctcgccgcagtgatcctcattcccgaatctggcagcgctgtcaaaggcttgtattaggaggtgaacggcggccgcaggcccactccacgcggttgctgaaaccgagctgggcgcgcgcgggggccgaatctcgccgcctccgcgctcctgtcggggcagctcccgatcccgggctgcgcggcttcggtccccaagacggccacttccagccctaggccccttggccgcagcgcttcccaaaccaagagagatcctttctcaactcagagcttttcattagcagtcgttaataatggccctgagttgccttatcatctcctggaaatgagaaataaatttcttcggagaacgtttccctttgtaaaggacagagagttttaaagatacaggtatgatgtaagacacataaatacctaggtaagcattagcagaaattctcttttccttatatttaagtataataaacatacaagtgtagctcaatgaattttcacaaactgacattctgtgtaaccagcagcctaagaaactgctttaccaacgatcccctagctcgcctccagttatgcacgccaataaccactagcctaacttctaccacatgcccattacttctgtagtttaaaacttctgattcttgaatgtaaacgtttaacaataaatcgcttgaatttaactcaaatttcaaatgtaagatgaagtcagagatgcagcctgaatctaggatcataatttgtcttgtgcggagggcgagtaatttccttgggcaagaaaataactggaggtgacagttgtttggggctgcagtcgtccgggccaggagcacagggcgggaaggaatggcccatctcttagggctctctgcttgtcacctaccaggttggtcagaaacgttctcatcaaagcaatggttctcttttcttttctctttgggacagaaggagtttcttgaccgccctcttccctgcaaatgcataaacaaccactgctcctgtctccaagctcagattcctaccaagatagccttttctcttcccctctcttttgtaagtctcttgatttcattctttgaacctgtgattggaggttaaagtgcaccaggttggaaggaggaagctcttaacaataaaggtttgaatatttagctgtgtcaggtcgctgccctctcacgagcctccctcccctttatcttttaaaatgcaaattatgtttcgaggggttgtgcgtagagtgcgcgctgcgcctcgacgtctccaaccattggtgtctgtgtcattactaatagagtcttgtaaacactcgttaatcacggaaggccgccggcctggggctccgcacgccagcctgtggcgggtcttccccgcctctgcagcctagtgggaaggaggtgggaggaaagaaggaagaaagggagggagggaggaggcaggccagagggagggaccgcctcggaggcagaagagccgcgaggagccagcggagcaccgcgggctggggcgcagccacccgccgctcctcgagtcccctcgcccctttcccttcgtgccccccggcagcctccagcgtcggtccccaggcagcatggtgaggtctgctcccggaccctcgccaccatgtacgtgagctacctcctggacaaggacgtgagcatgtaccctagctccgtgcgccactctggcggcctcaacctggcgccgcagaacttcgtcagccccccgcagtacccggactacggcggttaccacgtggcggccgcagctgcagcggcagcgaacttggacagcgcgcagtccccggggccatcctggccggcagcgtatggcgccccactccgggaggactggaatggctacgcgcccggaggcgccgcggccgccgccaacgccgtggctcacggcctcaacggtggctccccggccgcagccatgggctacagcagccccgcagactaccatccgcaccaccacccgcatcaccacccgcaccacccggccgccgcgccttcctgcgcttctgggctgctgcaaacgctcaaccccggccctcctgggcccgccgccaccgctgccgccgagcagctgtctcccggcggccagcggcggaacctgtgcgagtggatgcggaagccggcgcagcagtccctcggcagccaagtgaaaaccaggacgaaagacaaatatcgagtggtgtacacggaccaccagcggctggagctggagaaggagtttcactacagtcgctacatcaccatccggaggaaagccgagctagccgccacgctggggctctctgagaggcaggttaaaatctggtttcagaaccgcagagcaaaggagaggaaaatcaacaagaagaagttgcagcagcaacagcagcagcagccaccacagccgcctccgccgccaccacagcctccccagcctcagccaggtcctctgagaagtgtcccagagcccttgagtccggtgtcttccctgcaagcctcagtgcctggctctgtccctggggttctggggccaactgggggggtgctaaaccccaccgtcacccagtgacccaccgggttctgcagcggcagagcaattccaggctgagccatgaggagcgtggactctgctagactcctcaggagagacccctcccctcccacccacagccatagacctacagacctggctctcagaggaaaaatgggagccaggagtaagacaagtgggatttggggcctcaagaaatatactctcccagatttttactttttcccatctggctttttctgccactgaggagacagaaagcctccgctgggcttcattccggactggcagaagcattgcctggactgaccacaccaaccaggccttcatcctcctccccagctcttctcttcctagatctgcaggctgcacctctggctagagccgaggggagagagggactcaagggaaaggcaagcttgaggccaagatggctgctgcctgctcatggccctcggaggtccagctgggcctcctgcctccgggcaggcaaggtttacactgcggaagccaaaggcagctaagatagaaagctggactgaccaaagactgcagaacccccaggtggcctgcgtcttttttctcttcccttcccagaccaggaaaggcttggctggtgtatgcacagggtgtggtatgagggggtggttattggactccaggcctgaccagggggcccgaacagggacttgtttagagagcctgtcaccagagcttctctgggctgaatgtatgtcagtgctataaatgccagagccaacctggacttcctgtcattttcacaatcttggggctgatgaagaagggggtggggggagtttgtgttgttgttgctgctgtttgggttgttggtctgtgtaacatccaagccagagtttttaaagccttctggatccatggggggagaagtgatatggtgaagggaagtggggagtatttgaacacagttgaattttttctaaaaagaaaaagagataaatgagctttccagatttcagattctgtatttatcttcagattttgtctgcaactattttttattttttaaagaaatgaaatatcttctctgcttgcaagctgatttggaaaattcagagagggagtggagattatctggacagcctcattttaccccagagcatcagaagcctgaaagagcaggttctgagaccttccctgcccccaagcctgagcccagccttggaatgcgtggctctcctgggggtgcctttgggcaaaatgcacatctgaatggccaggtgcttcccagcagtcagaaattatggggggtgggggtgagagggccccctcatagcatctcaccaaatccacatggaggctttttgcaaacagcaggcagttcccttctgcagtgactccctcctaaggacgccccacaacccagctagttaaacgtgagcattaaattttttttaaaaaaaat

SEQ ID NO: 4904 - DNA, 1517 bp, Homo sapiens
  source 1..1517: mol_type = unassigned DNA
cgatgtacggaagctgtcttttggagaaagaagcaggcatgtacccgggcactctcatgagccctgggggcgacggcacagctgggacaggcggcacagggggcggtgggagtccgatgccagcctccaatttcgctgcggcaccggctttctcgcactatatggggtatcctcatatgcccagcatggatcctcactggccgtctctgggagtctggggctcaccctacagtcccccgcgagaagactggagcgtgtatcctgggccgtctagtacaatgggcacagtgccggtgaacgacgtgacctctagccccgccgctttctgctcgaccgactacagcaacttgggccctgtgggcggtggaactagcggcagcagcctaccaggccaggctggcgggtcgcttgtcccgacggacgcaggcgccgccaaggccagttcccccagcaggagccgccacagcccctatgcatggatgcgcaagacggtgcaggtgacggggaaaaccaggacaaaagaaaagtatcgtgtagtttacactgatcatcaaagattggagctggaaaaggaattccattgcaatagatatatcaccatccagagaaaatcagagctggcagttaacctgggcctttccgagagacaggtgaaaatctggtttcagaatcgcagagccaaggagagaaagatgatcaaaaagaaaatctcccagtttgagaatagtggaggctcggtgcaaagtgactctgactccatcagccctggggaactacctaacacttttttcaccacaccatctgctgttcgtggatttcaacctattgagatacagcaggttatagtctccgaatgaaagaaagcaaagagaaatttaaagtgccctttttttagtgatgtcttttgggtctctaagctatctacaggggagttggagcagggtgtaattccctgtaaggcagtatttggaacagatggatgcacaatgggttgaagataatttaggggactcttacttttagaaactatccccagaaaactcctgtcacgtgctgtgctatatgtcagtcactcaggaatcttagtggtaaggtatataattaaaagctagaatcacaggcccttccaactctgttcacaatttcagaaacttgcttatgaatagactgtaaaatacaattttgccagaaagcacatttgtgtatgtgtacttctgtttgttatttgatgctaggtgttttcttttatgctatctttaaggagtgagaagaaggtaaaccgaagtttatctatctttagctacctttccaagtgtttaattcaaaagctaacagaatttttataataagataaatgttttaaaaatcatcagaaggtgattctgattccattgtcactgcttaacaagaataaccaataaaaaagacaattttggccctcaatcatacttgtctggcatcaattatctcagaactttcaacttgcagtgtcattttaaaatcttgtcaaaacaatg

SEQ ID NO: 4905 - DNA, 1431 bp, Homo sapiens
  source 1..1431: mol_type = unassigned DNA
ctctctgccccaagtattttcagccccagccggccacacagctcggatctcctcctgtggatccccccagctctgcgatgatggcagaagagcacacagatctcgaggcccagatcgtcaaggatatccactgcaaggagattgacctggtgaaccgagaccccaagaacattaacgaggacatagtcaaggtggattttgaagacgtgatcgcagagcctgtgggcacctacagctttgacggcgtgtggaaggtgagctacaccaccttcactgtctccaagtactggtgctaccgtctgttgtccacgctgctgggcgtcccactggccctgctctggggcttcctgttcgcctgcatctccttctgccacatctgggcggtggtgccatgcattaagagctacctgatcgagatccagtgcatcagccacatctactcactctgcatccgcaccttctgcaacccactcttcgcggccctgggccaggtctgcagcagcatcaaggtggtgctgcggaaggaggtctaaagccaggtggggcaacagcggtggcagggcagggggtggtgggccagactggtccccgggggacttcttcacaggggctgctggcgagctctttctctttagggactgctccataccccatgatggagcacacggtgtagggaagccagaaagaaaagacggcccagccacagaagcacaatggcccttcgctctcccccagccccaccatgatgcccccatgcctgggcgtgggggaagatcatttgccaagaggcagctactgcaagtctttgcgttcacttgtactgtaacaacataaaccagcacgcggttcccacccggggccaacctctccacgcgcactcaggaaagtgaccagtgaccactggcgttaggaaggtggctccagtaaagggttttggctgcatttggggaatgctgcattttgttcgtgcctgtaagattggtttgtgtcctgaccagctccaaaaatatacttcactgccctgaaaaacagacacagggagagttggttgtctcttcacttggccaaatgtaagtgaagaacagagtctttttcttcttcggattctattgtttgctggaaccgtacacgttccttggaagatcatgtttaagtgactcctgttgcctgagcacaaaaatgggcaccaatggaggaaaatgacccttgggctggcaggggcagtgacccttccagggtaccactgagggaagggcctgggttcaagcctcccggaacctcccctttggctaaccgagcccctgaaatgcccagtactgccatttgacatgagggtaccttcgccctcaggagatgtgacgaaggaacaaggtctaatttgtgcgtgtgtggactcactatggaaataaaatgcagtagaaagagcatgta

SEQ ID NO: 4906 - DNA, 1260 bp, Homo sapiens
  source 1..1260: mol_type = unassigned DNA
ccagctctgcgatgatggcagaagagcacacagatctcgaggcccagatcgtcaaggatatccactgcaaggagattgacctggtgaaccgagaccccaagaacattaacgaggacatagtcaaggtggattttgaagacgtgatcgcagagcctgtgggcacctacagctttgacggcgtgtggaaggtgagctacaccaccttcactgtctccaagtactggtgctaccgtctgttgtccacgctgctgggcgtcccactggccctgctctggggcttcctgttcgcctgcatctccttctgccacatctgggcggtggtgccatgcattaagagctacctgatcgagatccagtgcatcagccacatctactcactctgcatccgcaccttctgcaacccactcttcgcggccctgggccaggtctgcagcagcatcaaggtggtgctgcggaaggaggtctaaagccagggactgctccataccccatgatggagcacacggtgtagggaagccagaaagaaaagacggcccagccacagaagcacaatggcccttcgctctcccccagccccaccatgatgcccccatgcctgggcgtgggggaagatcatttgccaagaggcagctactgcaagtctttgcgttcacttgtactgtaacaacataaaccagcacgcggttcccacccggggccaacctctccacgcgcactcaggaaagtgaccagtgaccactggcgttaggaaggtggctccagtaaagggttttggctgcatttggggaatgctgcattttgttcgtgcctgtaagattggtttgtgtcctgaccagctccaaaaatatacttcactgccctgaaaaacagacacagggagagttggttgtctcttcacttggccaaatgtaagtgaagaacagagtctttttcttcttcggattctattgtttgctggaaccgtacacgttccttggaagatcatgtttaagtgactcctgttgcctgagcacaaaaatgggcaccaatggaggaaaatgacccttgggctggcaggggcagtgacccttccagggtaccactgagggaagggcctgggttcaagcctcccggaacctcccctttggctaaccgagcccctgaaatgcccagtactgccatttgacatgagggtaccttcgccctcaggagatgtgacgaaggaacaaggtctaatttgtgcgtgtgtggactcactatggaaataaaatgcagtagaaa

SEQ ID NO: 4907 - DNA, 1905 bp, Homo sapiens
  source 1..1905: mol_type = unassigned DNA
gtcctgccgagctgtgagggcaacggaggggaaataaaagggaacggctccgaatctgccccagcggccgctgcgagacctcggcgccgacatcgcgacagcgaagcgctttgcacgccaggaaggtcccctctatgtgctgctgagccggtcctggacgcgacgagcccgccctcggtcttcggagcagaaatcgcaaaaacggaaggactggaaatggcagaccatatgatggccatgaaccacgggcgcttccccgacggcaccaatgggctgcaccatcaccctgcccaccgcatgggcatggggcagttcccgagcccccatcaccaccagcagcagcagccccagcacgccttcaacgccctaatgggcgagcacatacactacggcgcgggcaacatgaatgccacgagcggcatcaggcatgcgatggggccggggactgtgaacggagggcaccccccgagcgcgctggcccccgcggccaggtttaacaactcccagttcatgggtcccccggtggccagccagggaggctccctgccggccagcatgcagctgcagaagctcaacaaccagtatttcaaccatcacccctacccccacaaccactacatgccggatttgcaccctgctgcaggccaccagatgaacgggacaaaccagcacttccgagattgcaaccccaagcacagcggcggcagcagcacccccggcggctcgggcggcagcagcacccccggcggctctggcagcagctcgggcggcggcgcgggcagcagcaacagcggcggcggcagcggcagcggcaacatgcccgcctccgtggcccacgtccccgctgcaatgctgccgcccaatgtcatagacactgatttcatcgacgaggaagttcttatgtccttggtgatagaaatgggtttggaccgcatcaaggagctgcccgaactctggctggggcaaaacgagtttgattttatgacggacttcgtgtgcaaacagcagcccagcagagtgagctgttgactcgatcgaaaccccggcgaaagaaatcaaacccccaacttcttcggcgtgaattaaaagaaacattcccttagacacagtatctcacttttcagatcttgaaaggtttgagaacttggaaacaaagtaaactataaacttgtacaaattggttttaaaaaaaattgctgccacttttttttcctgtttttgtttcgtttttgtagccttgacattcacccacctcccttatgtagttgaaatatctagctaacttggtctttttcgttgtttgtttttactcctttccctcactttctccagtgctcaactgttagatattaatcttggcaaactgcttaatcttgtggattttgtagatggtttcaaatgactgaactgcattcagatttacgagtgaaaggaaaaattgcattagttggttgcatgaacttcgaagggcagatattactgcacaaactgccatctcgcttcatttttttaactatgcatttgagtacagactaatttttaaaatatgctaaactggaagattaaacagatgtgggccaaactgttctggatcaggaaagtcatactgttcactttcaagttggctgtcccccccgccgccccccccacccccatatgtacagatgataatagggtgtggaatgtcgtcagtggcaaacatttcacagatttttattttgtttctgtcttcaacatttttgacactgtgctaatagttatattcagtacatgaaaagatactactgtgttgaaagctttttaggaaattttgacagtatttttgtacaaaacatttttttgaaaaaatacttgttaatttattctattttaatttgccaatgtcaataaaaagttaagaaataa

SEQ ID NO: 4908 - DNA, 645 bp, Homo sapiens
  source 1..645: mol_type = unassigned DNA
atggcagaccatatgatggccatgaaccacgggcgcttccccgacggcaccaatgggctgcaccatcaccctgcccaccgcatgggcatggggcagttcccgagcccccatcaccaccagcagcagcagccccagcacgccttcaacgccctaatgggcgagcacatacactacggcgcgggcaacatgaatgccacgagcggcatcaggcatgcgatggggccggggactgtgaacggagggcaccccccgagcgcgctggcccccgcggccaggtttaacaactcccagttcatgggtcccccggtggccagccagggaggctccctgccggccagcatgcagctgcagaagctcaacaaccagtatttcaaccatcacccctacccccacaaccactacatgccggatttgcaccctgctgcaggccaccagatgaacgggacaaaccagcacttccgagattgcaacccccccaatgtcatagacactgatttcatcgacgaggaagttcttatgtccttggtgatagaaatgggtttggaccgcatcaaggagctgcccgaactctggctggggcaaaacgagtttgattttatgacggacttcgtgtgcaaacagcagcccagcagagtgagctgttga

SEQ ID NO: 4909 - DNA, 1793 bp, Homo sapiens
  source 1..1793: mol_type = unassigned DNA
gagggcagggtttgcccggaggaagagcgtgaggcgaagctggggaataacaacaggatgtgcaacaacaggatgaggagggctgatttaatgcctgaagactggaaatggcagaccatatgatggccatgaaccacgggcgcttccccgacggcaccaatgggctgcaccatcaccctgcccaccgcatgggcatggggcagttcccgagcccccatcaccaccagcagcagcagccccagcacgccttcaacgccctaatgggcgagcacatacactacggcgcgggcaacatgaatgccacgagcggcatcaggcatgcgatggggccggggactgtgaacggagggcaccccccgagcgcgctggcccccgcggccaggtttaacaactcccagttcatgggtcccccggtggccagccagggaggctccctgccggccagcatgcagctgcagaagctcaacaaccagtatttcaaccatcacccctacccccacaaccactacatgccggatttgcaccctgctgcaggccaccagatgaacgggacaaaccagcacttccgagattgcaaccccaagcacagcggcggcagcagcacccccggcggctcgggcggcagcagcacccccggcggctctggcagcagctcgggcggcggcgcgggcagcagcaacagcggcggcggcagcggcagcggcaacatgcccgcctccgtggcccacgtccccgctgcaatgctgccgcccaatgtcatagacactgatttcatcgacgaggaagttcttatgtccttggtgatagaaatgggtttggaccgcatcaaggagctgcccgaactctggctggggcaaaacgagtttgattttatgacggacttcgtgtgcaaacagcagcccagcagagtgagctgttgactcgatcgaaaccccggcgaaagaaatcaaacccccaacttcttcggcgtgaattaaaagaaacattcccttagacacagtatctcacttttcagatcttgaaaggtttgagaacttggaaacaaagtaaactataaacttgtacaaattggttttaaaaaaaattgctgccacttttttttcctgtttttgtttcgtttttgtagccttgacattcacccacctcccttatgtagttgaaatatctagctaacttggtctttttcgttgtttgtttttactcctttccctcactttctccagtgctcaactgttagatattaatcttggcaaactgcttaatcttgtggattttgtagatggtttcaaatgactgaactgcattcagatttacgagtgaaaggaaaaattgcattagttggttgcatgaacttcgaagggcagatattactgcacaaactgccatctcgcttcatttttttaactatgcatttgagtacagactaatttttaaaatatgctaaactggaagattaaacagatgtgggccaaactgttctggatcaggaaagtcatactgttcactttcaagttggctgtcccccccgccgccccccccacccccatatgtacagatgataatagggtgtggaatgtcgtcagtggcaaacatttcacagatttttattttgtttctgtcttcaacatttttgacactgtgctaatagttatattcagtacatgaaaagatactactgtgttgaaagctttttaggaaattttgacagtatttttgtacaaaacatttttttgaaaaaatacttgttaatttattctattttaatttgccaatgtcaataaaaagttaagaaa

SEQ ID NO: 4910 - DNA, 1776 bp, Homo sapiens
  source 1..1776: mol_type = unassigned DNA
caaagggggtgtgggctcgggtccccccgcccgatcgcaggggaaggggctgtttgtgcagcgtccggctgtgttatgagtggactggaaatggcagaccatatgatggccatgaaccacgggcgcttccccgacggcaccaatgggctgcaccatcaccctgcccaccgcatgggcatggggcagttcccgagcccccatcaccaccagcagcagcagccccagcacgccttcaacgccctaatgggcgagcacatacactacggcgcgggcaacatgaatgccacgagcggcatcaggcatgcgatggggccggggactgtgaacggagggcaccccccgagcgcgctggcccccgcggccaggtttaacaactcccagttcatgggtcccccggtggccagccagggaggctccctgccggccagcatgcagctgcagaagctcaacaaccagtatttcaaccatcacccctacccccacaaccactacatgccggatttgcaccctgctgcaggccaccagatgaacgggacaaaccagcacttccgagattgcaaccccaagcacagcggcggcagcagcacccccggcggctcgggcggcagcagcacccccggcggctctggcagcagctcgggcggcggcgcgggcagcagcaacagcggcggcggcagcggcagcggcaacatgcccgcctccgtggcccacgtccccgctgcaatgctgccgcccaatgtcatagacactgatttcatcgacgaggaagttcttatgtccttggtgatagaaatgggtttggaccgcatcaaggagctgcccgaactctggctggggcaaaacgagtttgattttatgacggacttcgtgtgcaaacagcagcccagcagagtgagctgttgactcgatcgaaaccccggcgaaagaaatcaaacccccaacttcttcggcgtgaattaaaagaaacattcccttagacacagtatctcacttttcagatcttgaaaggtttgagaacttggaaacaaagtaaactataaacttgtacaaattggttttaaaaaaaattgctgccacttttttttcctgtttttgtttcgtttttgtagccttgacattcacccacctcccttatgtagttgaaatatctagctaacttggtctttttcgttgtttgtttttactcctttccctcactttctccagtgctcaactgttagatattaatcttggcaaactgcttaatcttgtggattttgtagatggtttcaaatgactgaactgcattcagatttacgagtgaaaggaaaaattgcattagttggttgcatgaacttcgaagggcagatattactgcacaaactgccatctcgcttcatttttttaactatgcatttgagtacagactaatttttaaaatatgctaaactggaagattaaacagatgtgggccaaactgttctggatcaggaaagtcatactgttcactttcaagttggctgtcccccccgccgccccccccacccccatatgtacagatgataatagggtgtggaatgtcgtcagtggcaaacatttcacagatttttattttgtttctgtcttcaacatttttgacactgtgctaatagttatattcagtacatgaaaagatactactgtgttgaaagctttttaggaaattttgacagtatttttgtacaaaacatttttttgaaaaaatacttgttaatttattctattttaatttgccaatgtcaataaaaagttaagaaa

SEQ ID NO: 4911 - DNA, 5750 bp, Homo sapiens
  source 1..5750: mol_type = unassigned DNA
ctttccctgtgtcagatcagggatcattttttttccttcctctactccctcccccctacccgcccctccctccctgtttcccttccctccctccctcccctctctgctgggtctgtgcgctggggcgcccgatcccctccgcagctgggacgctccgaactcgaggcaggagtcggctctccggagcctcgtccctcccttccccttccctgcccccttcccccacccccgactcgggcttggcgcggcggccagaggaaccccgagtcccggcccaggcccctgagctggagggatggaaaactcctctgcagcatcagcctcctcggaggcagggagcagccgctcccaggagatcgaggagctggagcgcttcatcgacagctacgtgctggagtaccaggtgcaggggctgctggctgacaagacggagggtgatggcgagagcgagaggacccagtcccacatctcccagtggacagcggactgcagcgaaccgctggacagcagctgttccttctcccgagggcgagcccccccacagcagaatggcagcaaagacaactctctggacatgctgggcacggacatctgggcggccaacaccttcgattccttcagtggtgccacctgggacctgcagccggaaaagctggacttcacccagttccaccgcaaagtccgacacacgcccaagcagcccctgccacacatcgaccgcgaagggtgtggcaaagggaagctggaagatggggatggcatcaacctgaatgacatcgagaaggtccttccagcctggcagggctaccacccgatgccccatgaagtggagatcgcacacaccaagaagctgttccgcaggaggagaaatgatcgaaggcggcagcagagacctccggggggcaacaagccccaacagcatggtgaccaccagccaggcagtgccaaacacaacagggaccaccagaaatcctaccaggggggctcagcaccccacccctcagggaggcccactcaccatggctacagccagaaccggcgctggcaccatggcaacatgaagcacccaccaggcgacaagggggaggcaggcgcacaccgcaatgccaaagagaccatgaccatcgagaacccaaaactggaggacactgcaggggacaccgggcacagcagccttgaggccccccgcagccctgacaccctggccccggtggcttctgagcggctgcccccacagcagtcaggggggccagaggttgagacaaaacgtaaagacagtattcttcccgagcgcatcggggagcggcccaaaattaccctgctccagtcttccaaagacagactgcggcgaaggctaaaggaaaaggatgaagtggccgtggagacgaccactccccagcagaacaagatggacaagctgatcgagatcctgaacagcatgcggaacaacagcagcgacgtggacaccaagctcaccaccttcatggaggaggcccagaactccaccaactccgaggagatgctgggcgagatcgtgcgcacaatctaccagaaggctgtgtccgaccgcagcttcgccttcaccgctgccaagctctgcgacaagatggcgctctttatggtggaggggaccaagttccggagcctgctcctcaacatgctgcagaaggacttcacggtgcgcgaggagctgcagcagcaggacgtggagcgctggctgggcttcatcaccttcctgtgcgaggtcttcggcaccatgcgcagcagcacaggcgagcccttccgtgtgctcgtgtgccccatctacacctgcctcagggagctcttgcaatctcaggatgtgaaggaagatgctgtcctttgctgctctatggagctgcagagtacaggccggctgctggaggaacagctgcctgagatgatgacagagctcctggccagcgcacgggacaagatgctgtgcccctcggagtccatgctgacccggtcgctgctcctagaggtcatcgagctccacgctaacagctggaaccctctgacgccccccatcacgcagtactacaacagaaccatccagaaactgacagcctgacagccagggggcctggcaggcggcccacgggcagctggggccctggtgcacagggccagatggacaggcgggaggacaggggtggccctggcgggagaaagaaatggggaggagggcaggcagagtcggtggccagtctggagccagacggggaagggagcaaatccctgagaggagtgcccccgcacaagccccccagcccgagcatgcaagctcacaccaataagggaagcatgtttctttttcctggtggccctggccctccccttcctcactcccgcctctcccctccccatcagacccatcccccacggagctttgtgtgagggatctcatcgctgtgactcctcggagaccttggcagcctcgcacgccggggcaccgcttgggtcagaaaggacctcggaaggctgaaaaagtgggtcggagacgggctcgcattgttcccgcatgctgtcagccgcagtcgccaactggcagcaggcgacgtgtagcagatgtccgggaggacaaaggcaggcacggtccccaccagccgcccgtaattgacggcctttgtcagccatggcagagctgacgctccacctcccacctccaagtcctcctcactgcagcccccacagcctcaggcctagggggtcaggcgcagcgggggagatggagtttgcagttccacttgcactcttttgtttattgtgttttatttttcaaaagtcggttgctttgaagtctctttggccaatgaaaatgcccgtgatgtgatcacacagtcagcactgttgaggacccccggattagtgggagatcaaacccagctcccctctagaagaaggattcgagccacagacagcttgccagtagccaattagggtaattggaaacttctgccccggcggggggtccccgctggaatcctgtgttcctcgccactggcttccagcgcctctgttttctcaaagggctgatactgtcaccactgggaccaagttaaacctggtcctggccccaggggccttgtggcaaacagggcacagaacgagactggcaaattaaaaccaaaattctagatggtgtcttgcgctccacacgcaggtcttactggggaaaaggatgggagtgggggctccccaggactcgattttagctaatgcgctgtgtcactgccccagctcggacgtagaagcccagccctccgtgagctcttgggaaaggggtgaattcactgggtcatggaagggacagtcaggtgaccagcggggtcgccagatgaagcttcccagccgggaaacaagacggggtttcttggcaggccctggtcctggggagcaggccctgttgttggctggagaggaaggtgtggggtggaacaggtgtccacatagctccatctctgggggctggagcacacactttgatgagcccccccggaaatgatgtcagagcctagccgcttccttatttgctcttttattgaggccgggcaggccctgggtcactttggaggcccctcttggtccacactggactggccgggaggtgatgggcggggaaggttctcgtgattgattgattctgagtctgagagtggcgagtggggagaggcttccccagttctctccagctttccctgcagctgcaacctgccctctggtcccaggtgtggagcctttgcctgtctctaaaaagagcctgttggcgacaaggtgtagggggcacaagtttacctgaaacaggtcagtggtctctcccaagaagcgcacgccacctctggtccctggccctgaaccctgccttcttcctccctccacggtttcttcccagactttctcaagctcctcctcactgcccttcctccccagcccagcctgggaacacagatgccccgcgggtaggaggcctcgagggaggagccgggctgatgcggggctgctcagggcaggccccagggcgagcttgccatcgtggccaggcagcctccacctgtgcttcagtggcccctgcccccctgaagcatgtggggtttgtccgctaggaggaggcaaggcccccgaagagaggagagacctgggagtgggagctcaggtcagggaggaggcaggggagtggggtctcccagacccaacggtgagctcagagcaagcttcacgcaggacgctccgaaacactgtgtggagggggctgtgttgtgggcaccttggggcctgattctccttcctccgaacgggctccttgatggcctggccacaggggcagctccccattggctgttaggaccagagtgtgaagaagaagtgaaatataaatatgtatacatatataaatatatttttaattacatgtcgtgtcacggtggctccagacatactgtttgcctagtttattccactgcttgaaagcgcttcctagccaatctgaacaacaacactttaagctgtttttctaaatgcaggttgctgctcctttttcagatatggaaggaaaacgttaagactattttttttttaaagaaacaacagtcaagcctaaaatttgagaccccgaggcagcttcccgagggagactgctcagacaggaactgcaggacagaagtggatgccccacagaccctggccccctccccaagtccatcccctctctgtggcatgaggaaggccgcgtccgagttgacctctgaatgtatgtgatgagaggcagagctggatattgcatttctaaggcttgcattgctttcccctcgcccgcggttcttggcgcatggaagaggcggtccagccatctgatgttgatcctgtctcagtctccccactgcctgtcaggatgagttagtcattgtttttctccgaggcggcctgcttgccacagccctgctccccaaggcctggtggctttgccgaagctctgggaccgcagccccagcgaggcccccaacctcacccagacgaggccaggagccccgccaccctccacgggatgtgcaccctcagaccccattctctctgttcgtccttccttgaccagtctgtaaaccttcactgtttggggatcgtcctgtccatccatgtaaatgtaaatgttggccgagtcggtatttattctgattgatttttattttattctattattttctccgagggatgagggtggggggtgtgggaagggtaccacagatcaggccggggcagctgtaggggcgggggcccagacagccaggccgccaccagagcagccccatggggtgccccagacgcgggcctccaagaagccaagtcccagtctgttttctggcatcagacaccggcccgtgttccttgtcagacagacagactctcaggcctgcctggggagtcgtgtccctcagctgcagggcactgtgttgggaaaccattggctgggcctttgaggacacagatcagaagaaagaaagacaactttcctctgcgcggaacactcacacggaagggctggccgcctccctgagccggctgggagtggacgacaggacctacctccccagagcaagggcctggggcttcccgccaaagctgccgcggaaccccgctagtgcgaccaccctccctccgtcggtatgtcctgctttccagctgaacccaaactacaagtgggtttaaaaaaataaacaccaccaccaaaaacaaaa

SEQ ID NO: 4912 - DNA, 5810 bp, Homo sapiens
  source 1..5810: mol_type = unassigned DNA
gtcagatcagggatcattttttttccttcctctactccctcccccctacccgcccctccctccctgtttcccttccctccctccctcccctctctgctgggtctgtgcgctggggcgcccgatcccctccgcagctgggacgctccgaactcgaggcaggagtcggctctccggagcctcgtccctcccttccccttccctgcccccttcccccacccccgactcgggcttggcgcggcggccagaggaaccccgagcccgcatttgctgcatcgagcagttggtttagtatcagccaaacttgcagctgttcagaccgcgctccgccgagtcccggcccaggcccctgagctggagggatggaaaactcctctgcagcatcagcctcctcggaggcagggagcagccgctcccaggagatcgaggagctggagcgcttcatcgacagctacgtgctggagtaccaggtgcaggggctgctggctgacaagacggagggtgatggcgagagcgagaggacccagtcccacatctcccagtggacagcggactgcagcgaaccgctggacagcagctgttccttctcccgagggcgagcccccccacagcagaatggcagcaaagacaactctctggacatgctgggcacggacatctgggcggccaacaccttcgattccttcagtggtgccacctgggacctgcagccggaaaagctggacttcacccagttccaccgcaaagtccgacacacgcccaagcagcccctgccacacatcgaccgcgaagggtgtggcaaagggaagctggaagatggggatggcatcaacctgaatgacatcgagaaggtccttccagcctggcagggctaccacccgatgccccatgaagtggagatcgcacacaccaagaagctgttccgcaggaggagaaatgatcgaaggcggcagcagagacctccggggggcaacaagccccaacagcatggtgaccaccagccaggcagtgccaaacacaacagggaccaccagaaatcctaccaggggggctcagcaccccacccctcagggaggcccactcaccatggctacagccagaaccggcgctggcaccatggcaacatgaagcacccaccaggcgacaagggggaggcaggcgcacaccgcaatgccaaagagaccatgaccatcgagaacccaaaactggaggacactgcaggggacaccgggcacagcagccttgaggccccccgcagccctgacaccctggccccggtggcttctgagcggctgcccccacagcagtcaggggggccagaggttgagacaaaacgtaaagacagtattcttcccgagcgcatcggggagcggcccaaaattaccctgctccagtcttccaaagacagactgcggcgaaggctaaaggaaaaggtaccggatgaagtggccgtggagacgaccactccccagcagaacaagatggacaagctgatcgagatcctgaacagcatgcggaacaacagcagcgacgtggacaccaagctcaccaccttcatggaggaggcccagaactccaccaactccgaggagatgctgggcgagatcgtgcgcacaatctaccagaaggctgtgtccgaccgcagcttcgccttcaccgctgccaagctctgcgacaagatggcgctctttatggtggaggggaccaagttccggagcctgctcctcaacatgctgcagaaggacttcacggtgcgcgaggagctgcagcagcaggacgtggagcgctggctgggcttcatcaccttcctgtgcgaggtcttcggcaccatgcgcagcagcacaggcgagcccttccgtgtgctcgtgtgccccatctacacctgcctcagggagctcttgcaatctcaggatgtgaaggaagatgctgtcctttgctgctctatggagctgcagagtacaggccggctgctggaggaacagctgcctgagatgatgacagagctcctggccagcgcacgggacaagatgctgtgcccctcggagtccatgctgacccggtcgctgctcctagaggtcatcgagctccacgctaacagctggaaccctctgacgccccccatcacgcagtactacaacagaaccatccagaaactgacagcctgacagccagggggcctggcaggcggcccacgggcagctggggccctggtgcacagggccagatggacaggcgggaggacaggggtggccctggcgggagaaagaaatggggaggagggcaggcagagtcggtggccagtctggagccagacggggaagggagcaaatccctgagaggagtgcccccgcacaagccccccagcccgagcatgcaagctcacaccaataagggaagcatgtttctttttcctggtggccctggccctccccttcctcactcccgcctctcccctccccatcagacccatcccccacggagctttgtgtgagggatctcatcgctgtgactcctcggagaccttggcagcctcgcacgccggggcaccgcttgggtcagaaaggacctcggaaggctgaaaaagtgggtcggagacgggctcgcattgttcccgcatgctgtcagccgcagtcgccaactggcagcaggcgacgtgtagcagatgtccgggaggacaaaggcaggcacggtccccaccagccgcccgtaattgacggcctttgtcagccatggcagagctgacgctccacctcccacctccaagtcctcctcactgcagcccccacagcctcaggcctagggggtcaggcgcagcgggggagatggagtttgcagttccacttgcactcttttgtttattgtgttttatttttcaaaagtcggttgctttgaagtctctttggccaatgaaaatgcccgtgatgtgatcacacagtcagcactgttgaggacccccggattagtgggagatcaaacccagctcccctctagaagaaggattcgagccacagacagcttgccagtagccaattagggtaattggaaacttctgccccggcggggggtccccgctggaatcctgtgttcctcgccactggcttccagcgcctctgttttctcaaagggctgatactgtcaccactgggaccaagttaaacctggtcctggccccaggggccttgtggcaaacagggcacagaacgagactggcaaattaaaaccaaaattctagatggtgtcttgcgctccacacgcaggtcttactggggaaaaggatgggagtgggggctccccaggactcgattttagctaatgcgctgtgtcactgccccagctcggacgtagaagcccagccctccgtgagctcttgggaaaggggtgaattcactgggtcatggaagggacagtcaggtgaccagcggggtcgccagatgaagcttcccagccgggaaacaagacggggtttcttggcaggccctggtcctggggagcaggccctgttgttggctggagaggaaggtgtggggtggaacaggtgtccacatagctccatctctgggggctggagcacacactttgatgagcccccccggaaatgatgtcagagcctagccgcttccttatttgctcttttattgaggccgggcaggccctgggtcactttggaggcccctcttggtccacactggactggccgggaggtgatgggcggggaaggttctcgtgattgattgattctgagtctgagagtggcgagtggggagaggcttccccagttctctccagctttccctgcagctgcaacctgccctctggtcccaggtgtggagcctttgcctgtctctaaaaagagcctgttggcgacaaggtgtagggggcacaagtttacctgaaacaggtcagtggtctctcccaagaagcgcacgccacctctggtccctggccctgaaccctgccttcttcctccctccacggtttcttcccagactttctcaagctcctcctcactgcccttcctccccagcccagcctgggaacacagatgccccgcgggtaggaggcctcgagggaggagccgggctgatgcggggctgctcagggcaggccccagggcgagcttgccatcgtggccaggcagcctccacctgtgcttcagtggcccctgcccccctgaagcatgtggggtttgtccgctaggaggaggcaaggcccccgaagagaggagagacctgggagtgggagctcaggtcagggaggaggcaggggagtggggtctcccagacccaacggtgagctcagagcaagcttcacgcaggacgctccgaaacactgtgtggagggggctgtgttgtgggcaccttggggcctgattctccttcctccgaacgggctccttgatggcctggccacaggggcagctccccattggctgttaggaccagagtgtgaagaagaagtgaaatataaatatgtatacatatataaatatatttttaattacatgtcgtgtcacggtggctccagacatactgtttgcctagtttattccactgcttgaaagcgcttcctagccaatctgaacaacaacactttaagctgtttttctaaatgcaggttgctgctcctttttcagatatggaaggaaaacgttaagactattttttttttaaagaaacaacagtcaagcctaaaatttgagaccccgaggcagcttcccgagggagactgctcagacaggaactgcaggacagaagtggatgccccacagaccctggccccctccccaagtccatcccctctctgtggcatgaggaaggccgcgtccgagttgacctctgaatgtatgtgatgagaggcagagctggatattgcatttctaaggcttgcattgctttcccctcgcccgcggttcttggcgcatggaagaggcggtccagccatctgatgttgatcctgtctcagtctccccactgcctgtcaggatgagttagtcattgtttttctccgaggcggcctgcttgccacagccctgctccccaaggcctggtggctttgccgaagctctgggaccgcagccccagcgaggcccccaacctcacccagacgaggccaggagccccgccaccctccacgggatgtgcaccctcagaccccattctctctgttcgtccttccttgaccagtctgtaaaccttcactgtttggggatcgtcctgtccatccatgtaaatgtaaatgttggccgagtcggtatttattctgattgatttttattttattctattattttctccgagggatgagggtggggggtgtgggaagggtaccacagatcaggccggggcagctgtaggggcgggggcccagacagccaggccgccaccagagcagccccatggggtgccccagacgcgggcctccaagaagccaagtcccagtctgttttctggcatcagacaccggcccgtgttccttgtcagacagacagactctcaggcctgcctggggagtcgtgtccctcagctgcagggcactgtgttgggaaaccattggctgggcctttgaggacacagatcagaagaaagaaagacaactttcctctgcgcggaacactcacacggaagggctggccgcctccctgagccggctgggagtggacgacaggacctacctccccagagcaagggcctggggcttcccgccaaagctgccgcggaaccccgctagtgcgaccaccctccctccgtcggtatgtcctgctttccagctgaacccaaactacaagtgggtttaaaaaaataaacaccaccacc

SEQ ID NO: 4913 - DNA, 1947 bp, Homo sapiens
  source 1..1947: mol_type = unassigned DNA
atggggagactgccttgcgggccactgccaggccagtggacagcggactgcagcgaaccgctggacagcagctgttccttctcccgagggcgagcccccccacagcagaatggcagcaaagacaactctctggacatgctgggcacggacatctgggcggccaacaccttcgattccttcagtggtgccacctgggacctgcagccggaaaagctggacttcacccagttccaccgcaaagtccgacacacgcccaagcagcccctgccacacatcgaccgcgaagggtgtggcaaagggaagctggaagatggggatggcatcaacctgaatgacatcgagaaggtccttccagcctggcagggctaccacccgatgccccatgaagtggagatcgcacacaccaagaagctgttccgcaggaggagaaatgatcgaaggcggcagcagagacctccggggggcaacaagccccaacagcatggtgaccaccagccaggcagtgccaaacacaacagggaccaccagaaatcctaccaggggggctcagcaccccacccctcagggaggcccactcaccatggctacagccagaaccggcgctggcaccatggcaacatgaagcacccaccaggcgacaagggggaggcaggcgcacaccgcaatgccaaagagaccatgaccatcgagaacccaaaactggaggacactgcaggggacaccgggcacagcagccttgaggccccccgcagccctgacaccctggccccggtggcttctgagcggctgcccccacagcagtcaggggggccagaggttgagacaaaacgtaaagacagtattcttcccgagcgcatcggggagcggcccaaaattaccctgctccagtcttccaaagacagactgcggcgaaggctaaaggaaaaggatgaagtggccgtggagacgaccactccccagcagaacaagatggacaagctgatcgagatcctgaacagcatgcggaacaacagcagcgacgtggacaccaagctcaccaccttcatggaggaggcccagaactccaccaactccgaggagatgctgggcgagatcgtgcgcacaatctaccagaaggctgtgtccgaccgcagcttcgccttcaccgctgccaagctctgcgacaagatggcgctctttatggtggaggggaccaagttccggagcctgctcctcaacatgctgcagaaggacttcacggtgcgcgaggagctgcagcagcaggacgtggagcgctggctgggcttcatcaccttcctgtgcgaggtcttcggcaccatgcgcagcagcacaggcgagcccttccgtgtgctcgtgtgccccatctacacctgcctcagggagctcttgcaatctcaggatgtgaaggaagatgctgtcctttgctgctctatggagctgcagagtacaggccggctgctggaggaacagctgcctgagatgatgacagagctcctggccagcgcacgggacaagatgctgtgcccctcggagtccatgctgacccggtcgctgctcctagaggtcatcgagctccacgctaacagctggaaccagggggcctggcaggcggcccacgggcagctggggccctggtgcacagggccagatggacaggcgggaggacaggggtggccctggcgggagaaagaaatggggaggagggcaggcagagtcggtggccagtctggagcccgagcatgcaagctcacaccaataagggaagcatgtttctttttcctggtggccctggccctccccttcctcactcccgcctctcccctccccatcagacccatcccccacggagctttgtgtgagggatctcatcgctgtgactcctcggagaccttggcagcctcgcacgccggggcaccgcttgggtcagaaaggacctcggaaggctga

SEQ ID NO: 4914 - DNA, 2631 bp, Homo sapiens
  source 1..2631: mol_type = unassigned DNA
tataaaagctgggccggcgcgggccgggccattcgcgacccggaggtgcgcgggcgcgggcgagcagggtctccgggtgggcggcggcgacgccccgcgcaggctggaggccgccgaggctcgccatgccgggagaactctaactcccccatggagtcggccgacttctacgaggcggagccgcggcccccgatgagcagccacctgcagagccccccgcacgcgcccagcagcgccgccttcggctttccccggggcgcgggccccgcgcagcctcccgccccacctgccgccccggagccgctgggcggcatctgcgagcacgagacgtccatcgacatcagcgcctacatcgacccggccgccttcaacgacgagttcctggccgacctgttccagcacagccggcagcaggagaaggccaaggcggccgtgggccccacgggcggcggcggcggcggcgactttgactacccgggcgcgcccgcgggccccggcggcgccgtcatgcccgggggagcgcacgggcccccgcccggctacggctgcgcggccgccggctacctggacggcaggctggagcccctgtacgagcgcgtcggggcgccggcgctgcggccgctggtgatcaagcaggagccccgcgaggaggatgaagccaagcagctggcgctggccggcctcttcccttaccagccgccgccgccgccgccgccctcgcacccgcacccgcacccgccgcccgcgcacctggccgccccgcacctgcagttccagatcgcgcactgcggccagaccaccatgcacctgcagcccggtcaccccacgccgccgcccacgcccgtgcccagcccgcaccccgcgcccgcgctcggtgccgccggcctgccgggccctggcagcgcgctcaaggggctgggcgccgcgcaccccgacctccgcgcgagtggcggcagcggcgcgggcaaggccaagaagtcggtggacaagaacagcaacgagtaccgggtgcggcgcgagcgcaacaacatcgcggtgcgcaagagccgcgacaaggccaagcagcgcaacgtggagacgcagcagaaggtgctggagctgaccagtgacaatgaccgcctgcgcaagcgggtggaacagctgagccgcgaactggacacgctgcggggcatcttccgccagctgccagagagctccttggtcaaggccatgggcaactgcgcgtgaggcgcgcggctgtgggaccgccctgggccagcctccggcggggacccagggagtggtttggggtcgccggatctcgaggcttgcccgagccgtgcgagccaggactaggagattccggtgcctcctgaaagcctggcctgctccgcgtgtcccctcccttcctctgcgccggacttggtgcgtctaagatgagggggccaggcggtggcttctccctgcgaggaggggagaattcttggggctgagctgggagcccggcaactctagtatttaggataaccttgtgccttggaaatgcaaactcaccgctccaatgcctactgagtagggggagcaaatcgtgccttgtcattttatttggaggtttcctgcctccttcccgaggctacagcagacccccatgagagaaggaggggagcaggcccgtggcaggaggagggctcagggagctgagatcccgacaagcccgccagccccagccgctcctccacgcctgtccttagaaaggggtggaaacatagggacttggggcttggaacctaaggttgttcccctagttctacatgaaggtggagggtctctagttccacgcctctcccacctccctccgcacacaccccaccccagcctgctataggctgggcttccccttggggcggaactcactgcgatgggggtcaccaggtgaccagtgggagcccccaccccgagtcacaccagaaagctaggtcgtgggtcagctctgaggatgtatacccctggtgggagagggagacctagagatctggctgtggggcgggcatggggggtgaagggccactgggaccctcagccttgtttgtactgtatgccttcagcattgcctaggaacacgaagcacgatcagtccatcccagagggaccggagttatgacaagctttccaaatattttgctttatcagccgatatcaacacttgtatctggcctctgtgccccagcagtgccttgtgcaatgtgaatgtgcgcgtctctgctaaaccaccattttatttggtttttgttttgttttggttttgctcggatacttgccaaaatgagactctccgtcggcagctgggggaagggtctgagactccctttccttttggttttgggattacttttgatcctgggggaccaatgaggtgaggggggttctcctttgccctcagctttccccagcccctccggcctgggctgcccacaaggcttgtcccccagaggccctggctcctggtcgggaagggaggtggcctcccgccaacgcatcactggggctgggagcagggaaggacggcttggttctcttcttttggggagaacgtagagtctcactctagatgttttatgtattatatctataatataaacatatcaaagtcaa

SEQ ID NO: 4915 - DNA, 2178 bp, Homo sapiens
  source 1..2178: mol_type = unassigned DNA
gatgccgccacacgatggcactgcttccgtagacctggaagaaacgcgggcgcgggagctggcggcggacgcccgggtctgcggggtcggggagtagcgtccggccggagagcccgcacctcgaggagccggcggaggacgcggtgtcgtgaccgcgtctcccccatctgctctgcttttggcgacagcgtcccgtcggcctttcggccaggacgcagcagccgcgtctctgggcctcgacccccagggccggccggacccgggacctccgaggagagcagcgagaaccggcccggattccccgaggcgcccgagtgcggtgcgggcagccctccccgcctgccaggccgccgctgtccccacgtctggtcccccacgcctcttcccgcatctggtcccacggtggaggcgcggggcgagggcctcacgcgcgtgcccacggtcggggggcgtccttggacgcgcgggtcctctcccacgggtctccaccccccgccctccggcgacaggagccggcctgggacgcgcgcgctgcggccaagtcctggttttgatttcactcccaaccccgaggagcgaggaggttccaagcccacaaacaggaagaagagaaggccctggagtgctggcagagggagtgtcattcccagcagcgcagcgcaggccggcccgggccggggagggagcagcagcgcgggcaccctcctgcaacgtgggctgggggtccccagggccggggagggggccccggggaggaactgagagggggcgcgccccgggaaggctcggggcggctccggggggctcccagggcgcccccgccccttcccccgcggccccggggcgcccccgcggtgccggagtcggggcggggcgtgcacgtcagccggggctagaaaaggcggcggggctgggcccagcgaggtgacagcctcgcttggacgcagagcccggcccgacgccgccatgagcgccgcgctcttcagcctggacggcccggcgcgcggcgcgccctggcctgcggagcctgcgcccttctacgaaccgggccgggcgggcaagccgggccgcggggccgagccaggggccctaggcgagccaggcgccgccgcccccgccatgtacgacgacgagagcgccatcgacttcagcgcctacatcgactccatggccgccgtgcccaccctggagctgtgccacgacgagctcttcgccgacctcttcaacagcaatcacaaggcgggcggcgcggggcccctggagcttcttcccggcggccccgcgcgccccttgggcccgggccctgccgctccccgcctgctcaagcgcgagcccgactggggcgacggcgacgcgcccggctcgctgttgcccgcgcaggtggccgcgtgcgcacagaccgtggtgagcttggcggccgcagggcagcccaccccgcccacgtcgccggagccgccgcgcagcagccccaggcagacccccgcgcccggccccgcccgggagaagagcgccggcaagaggggcccggaccgcggcagccccgagtaccggcagcggcgcgagcgcaacaacatcgccgtgcgcaagagccgcgacaaggccaagcggcgcaaccaggagatgcagcagaagttggtggagctgtcggctgagaacgagaagctgcaccagcgcgtggagcagctcacgcgggacctggccggcctccggcagttcttcaagcagctgcccagcccgcccttcctgccggccgccgggacagcagactgccggtaacgcgcggccggggcgggagagactcagcaacgacccatacctcagacccgacggcccggagcggagcgcgccctgccctggcgcagccagagccgccgggtgcccgctgcagtttcttgggacataggagcgcaaagaagctacagcctggacttaccaccactaaactgcgagagaagctaaacgtgtttattttcccttaaattatttttgtaatggtagctttttctacatcttactcctgttgatgcagctaaggtacatttgtaaaaagaaaaaaaaccagacttttcagacaaaccctttgtattgtagataagaggaaaagactgagcatgctcacttttttatattaatttttacagtatttgtaagaataaagcagcatttgaaatcgcccct

SEQ ID NO: 4916 - DNA, 1462 bp, Homo sapiens
  source 1..1462: mol_type = unassigned DNA
gggccggggagggagcagcagcgcgggcaccctcctgcaacgtgggctgggggtccccagggccggggagggggccccggggaggaactgagagggggcgcgccccgggaaggctcggggcggctccggggggctcccagggcgcccccgccccttcccccgcggccccggggcgcccccgcggtgccggagtcggggcggggcgtgcacgtcagccggggctagaaaaggcggcggggctgggcccagcgaggtgacagcctcgcttggacgcagagcccggcccgacgccgccatgagcgccgcgctcttcagcctggacggcccggcgcgcggcgcgccctggcctgcggagcctgcgcccttctacgaaccgggccgggcgggcaagccgggccgcggggccgagccaggggccctaggcgagccaggcgccgccgcccccgccatgtacgacgacgagagcgccatcgacttcagcgcctacatcgactccatggccgccgtgcccaccctggagctgtgccacgacgagctcttcgccgacctcttcaacagcaatcacaaggcgcgcgccccttgggcccgggccctgccgctccccgcctgctcaagcgcgagcccgactggggcgacggcgacgcgcccggctcgctgttgcccgcgcaggtggccgcgtgcgcacagaccgtggtgagcttggcggccgcagggcagcccaccccgcccacgtcgccggagccgccgcgcagcagccccaggcagacccccgcgcccggccccgcccgggagaagagcgccggcaagaggggcccggaccgcggcagccccgagtaccggcagcggcgcgagcgcaacaacatcgccgtgcgcaagagccgcgacaaggccaagcggcgcaaccaggagatgcagcagaagttggtggagctgtcggctgagaacgagaagctgcaccagcgcgtggagcagctcacgcgggacctggccggcctccggcagttcttcaagcagctgcccagcccgcccttcctgccggccgccgggacagcagactgccggtaacgcgcggccggggcgggagagactcagcaacgacccatacctcagacccgacggcccggagcggagcgcgccctgccctggcgcagccagagccgccgggtgcccgctgcagtttcttgggacataggagcgcaaagaagctacagcctggacttaccaccactaaactgcgagagaagctaaacgtgtttattttcccttaaattatttttgtaatggtagctttttctacatcttactcctgttgatgcagctaaggtacatttgtaaaaagaaaaaaaaccagacttttcagacaaaccctttgtattgtagataagaggaaaagactgagcatgctcacttttttatattaatttttacagtatttgtaagaataaagcagcatttgaaatcg

SEQ ID NO: 4917 - DNA, 1554 bp, Homo sapiens
  source 1..1554: mol_type = unassigned DNA
ggaacctcattctgcatagaactttttcaaagtcggagggaggaggttgctcagagtggggtgttgccctctgcgaggatttggagtcccctggcctcccagcagggagtggagaggcattcccagaagcatcagcttcgggcatctccagaaccctggcttggtccctgaccaaggagtgtccccaactgctgaataggccaggagtcgcctttctctaaggcttacatctctccctctggggtgtgtcctgcccctccctgagtcaccccaaggggagagaggggaaaaaagggaagagaagagaggcattgactacagaggaaggaaaaggaagcagagcagaggggggagagaggccacacaggagtgggtgacagaggagactgcagagggcaggtctagggcagaagatcgagagagggcaggcccaggtcaggaggaggtagagagagggcagccggagcaccccaaggggtgcctcaagagcaggtgggggcggggagccgagggggcgggccggccatgtcccacgggacctactacgagtgtgagccccggggtggccagcagccactcgagttctcagggggccgagctgggcccggggagctaggggacatgtgtgagcatgaggcctccattgacctctccgcctacatcgagtctggggaagagcagcttctctccgatctctttgccgtgaagccagcgcctgaggccagaggcctcaagggccccggaacccctgccttcccccactacttgccgcctgaccctcggccctttgcctaccctccacataccttcggcccagacaggaaggcgctggggcctggcatctacagcagcccagggagctacgaccccagggctgtggcggtgaaggaggagccccgggggccagagggcagccgagctgccagccgaggcagctacaatcccctgcagtaccaagtggcacactgtgggcagacagccatgcacctgcccccaactctggcagcacccggccagcctctgcgcgttctcaaggcccctttggccactgccgcacccccctgcagtcccctcctgaaggcgccctccccggctggccccttacacaagggcaagaaggcagtgaacaaagatagccttgagtaccggctgaggcgggagcgcaacaacatcgccgtgcgcaagagccgagacaaggccaagaggcgcattctggagacgcagcagaaggtgctggagtacatggcagagaacgagcgcctccgcagccgcgtggagcagctcacccaggagctagacaccctccgcaacctcttccgccagattcctgaggcggccaacctcatcaagggcgtggggggttgcagctgaggctggctggtggattgtgggcaccaggctccctggcacggcctaactctgcggacccccatcctgctgggggcctagaaccctgagacatagaccatggataaatggcaaccggggtggcaaagagggcaggacccagcataatgattatatggctgaataaagttgcactgtgactgggtg

SEQ ID NO: 4918 - DNA, 3463 bp, Homo sapiens
  source 1..3463: mol_type = unassigned DNA
acactcatgctgaaattcgcaggctagctcgctccgccaggagctggggcttagaccatttccgggagaagacacgccccgacaggaattacgccactggcagagcggaaataggctgagtttcacgcgcgtatgctttgcccgccatggccgcagtcaaggagcctttggagttccatgccaagcggccttggcgccccgaggaggcagtagaagatccggacgaggaggatgaggataatactagtgaagccgagaatgggttctccctggaggaagtgttacggctcggaggcaccaagcaagattaccttatgctggctactttggatgagaatgaggaagtgatagatggaggcaaaaaaggagcaatcgatgaccttcagcaaggtgaattggaagcatttattcaaaatcttaatttggcgaagtatacaaaagcttccttagttgaagaagatgaaccagctgaaaaagaaaattccagcaaaaaagaagtaaaaatacctaaaataaataataaaaatacagcagaaagtcaaaggacatcagttaataaggtgaaaaataagaataggccagaaccacattctgatgagaatggcagtaccacaccgaaagtaaagaaagataaacagaacatctttgaattttttgagagacagactttgttacttaggcctggaggcaaatggtatgatctggagtacagcaatgaatattctttgaaaccccagcctcaggatgttgtatctaagtacaaaacccttgctcagaagctgtatcagcatgaaatcaacttattcaaaagtaagacgaatagtcaaaagggagcctcttctacctggatgaaggcaattgtgtcatcggggacactaggtgacaggatggcagccatgattcttcttattcaggatgatgccgttcacacacttcagtttgtagaaactcttgtgaaccttgttaaaaagaagggcagcaaacagcagtgccttatggccttggatactttcaaagagttgcttatcacagaccttttgccagacaatcggaagctgaggattttcagccagcgtccttttgacaaactggaacagttgtccagtggcaacaaggactcaagagatagaagactgatattatggtattttgaacaccagctgaaacacttagtggctgaatttgtgcaggtcttagaaactttaagtcatgatacattagtaaccactaaaactcgagcccttaccgtggctcatgagctgctttgtaacaagcctgaggaagaaaaggctcttcttgtgcaagtggtaaataaactgggagatcctcagaacagaattgccacaaaagcatcccatctgttagagacattactttgtaaacatcccaatatgaaaggagttgtgtctggtgaagtagaaaggctactcttccgctcaaatatcagctccaaagctcaatattatgcaatttgctttttaaatcaaatggctctgtcccatgaagaaagtgaattggctaacaaattaataactgtttacttttgcttttttcggacttgtgtcaaaaaaaaagatgttgaatcaaaaatgcttagcgcccttttaacaggtgtgaatagggcatacccttattcccagactggtgatgacaaagtaagggagcagattgacacactgtttaaagtgttgcatattgtgaattttaataccagtgtccaggctttaatgttgcttttccaagtaatgaattctcagcagacaatatcggatcgatattacacagcattatacaggaagatgttggatccagggttgatgacgtgttccaagcaagctatgtttcttaaccttgtctacaaatctctgaaagctgacattgtgttgcgccgggtgaaggcttttgtgaagaggttacttcaagttacttgtcaacagatgccaccatttatatgtggagctttatatcttgtgtctgagatccttaaagcaaaaccaggtttaagaagccaactagatgatcatccggagtctgatgatgaagaaaattttattgatgcaaatgatgatgaagacatggaaaaattcactgatgcagacaaagaaacagagatagtgaaaaaacttgagacagaggaaacagttcctgaaactgatgtagaaaccaaaaaaccagaggttgcttcctgggtgcactttgataatttgaaaggtgggaaacagttaaataaatacgatccattcagtagaaaccctctgttctgtggagctgaaaatacaagtctttgggaactcaaaaagttatctgtgcattttcatccctccgtggccctttttgcaaagaccatccttcagggaaactatattcagtattcaggggacccactgcaggatttcactctaatgagatttttggatcgatttgtataccgaaatccaaagccccataaaggcaaagaaaacacagatagtgttgtgatgcagccgaaaagaaaacattttattaaggatattcgtcatcttcctgtgaacagtaaggagttccttgcaaaagaagaaagccaaataccagtggatgaagtgtttttccacaggtattataaaaaagttgctgttaaagagaaacaaaaacgggatgcagatgaagaaagtatagaagacgtggatgatgaagaatttgaagagctgattgacacatttgaagatgataactgtttcagctctggaaaggatgatatggattttgctggaaacgtgaaaaagagaacaaaaggagctaaggataacacattagatgaagattcagaaggtagtgatgatgaacttggtaacctggatgacgatgaagtttctttaggaagtatggatgatgaagaatttgctgaagttgatgaagatggaggaacattcatggatgtgttagatgatgaaagtgagagcgttccagaacttgaagtccactccaaagtcagtactaagaaaagcaagagaaaaggtacagatgattttgactttgctggctcatttcaagggccaagaaaaaagaaaagaaacttaaatgattccagcctatttgtatctgctgaagagtttggccatctattggatgaaaatatgggatccaagtttgataacattggcatgaatgccatggctaacaaagataatgcaagtctcaaacagcttagatgggaggctgaacgtgatgactggctacacaacagagatgcaaaaagtatcatcaagaaaaagaaacattttaaaaagaagaggattaaaaccactcaaaaaactaaaaaacaaaggaaatgagttattaatgtaaattatagattaaaattctacttacatctaatttttgctgttcaaccatgttttttgatctagctctctgattccatacattccagacttctcagtggatttgtaataaactataaataaaaatagctctcatttataaa

SEQ ID NO: 4919 - DNA, 3026 bp, Homo sapiens
  source 1..3026: mol_type = unassigned DNA
gagtttcacgcgcgtatgctttgcccgccatggccgcagtcaaggagcctttggagttccatgccaagcggccttggcgccccgaggaggcagtagaagatccggacgaggaggatgaggataatactagtgaagccgagaatgggttctccctggaggaagtgttacggctcggaggcaccaagcaagattaccttatgctggctactttggatgagaatgaggaagtgatagatggaggcaaaaaaggagcaatcgatgaccttcagcaaggtgaattggaagcatttattcaaaatcttaatttggcgaagtatacaaaagcttccttagttgaagaagatgaaccagctgaaaaagaaaattccagcaaaaaagaagtaaaaatacctaaaataaataataaaaatacagcagaaagtcaaaggacatcagttaataaggtgaaaaataagaataggccagaaccacattctgatgagaatggcagtaccacaccgaaagtaaagaaagataaacagaacatctttgaattttttgagagacagactttgttacttaggcctggaggcaaatggtatgatctggagtacagcaatgaatattctttgaaaccccagcctcaggatgttgtatctaagtacaaaacccttgctcagaagctgtatcagcatgaaatcaacttattcaaaagtaagacgaatagtcaaaagggagcctcttctacctggatgaaggcaattgtgtcatcggggacactaggtgacaggatggcagccatgattcttcttattcaggatgatgccgttcacacacttcagtttgtagaaactcttgtgaaccttgttaaaaagaagggcagcaaacagcagtgccttatggccttggatactttcaaagagttgcttatcacagaccttttgccagacaatcggaagctgaggattttcagccagcgtccttttgacaaactggaacagttgtccagtggcaacaaggactcaagagatagaagactgatattatggtattttgaacaccagctgaaacacttagtggctgaatttgtgcaggtcttagaaactttaagtcatgatacattagtaaccactaaaactcgagcccttaccgtggctcatgagctgctttgtaacaagcctgaggaagaaaaggctcttcttgtgcaagtggtaaataaactgggagatcctcagaacagaattgccacaaaagcatcccatctgttagagacattactttgtaaacatcccaatatgaaaggagttgtgtctggtgaagtagaaaggctactcttccgctcaaatatcagctccaaagctcaatattatgcaatttgctttttaaatcaaatggctctgtcccatgaagaaagtgaattggctaacaaattaataactgtttacttttgcttttttcggacttgtgtcaaaaaaaaagatgttgaatcaaaaatgcttagcgcccttttaacaggtgtgaatagggcatacccttattcccagactggtgatgacaaagtaagggagcagattgacacactgtttaaagtgttgcatattgtgaattttaataccagtgtccaggctttaatgttgcttttccaagtaatgaattctcagcagacaatatcggatcgatattacacagcattatacaggaagatgttggatccagggttgatgacgtgttccaagcaagctatgtttcttaaccttgtctacaaatctctgaaagctgacattgtgttgcgccgggtgaaggcttttgtgaagaggttacttcaagttacttgtcaacagatgccaccatttatatgtggagctttatatcttgtgtctgagatccttaaagcaaaaccaggtttaagaagccaactagatgatcatccggagtctgatgatgaagaaaattttattgatgcaaatgatgatgaagacatggaaaaattcactgatgcagacaaagaaacagagatagtgaaaaaacttgagacagaggaaacagttcctgaaactgatgtagaaaccaaaaaaccagaggttgcttcctgggtgcactttgataatttgaaaggtgggaaacagttaaataaatacgatccattcagtagaaaccctctgttctgtggagctgaaaatacaagtctttgggaactcaaaaagttatctgtgcattttcatccctccgtggccctttttgcaaagaccatccttcagggaaactatattcagtattcaggggacccactgcaggatttcactctaatgagatttttggatcgatttgtataccgaaatccaaagccccataaaggcaaagaaaacacagatagtgttgtgatgcagccgaaaagaaaacattttattaaggatattcgtcatcttcctgtgaacagtaaggagttccttgcaaaagaagaaagccaaataccagtggatgaagtgtttttccacaggtattataaaaaagttgctgttaaagagaaacaaaaacgggatgcagatgaagaaagtatagaagacgtggatgatgaagaatttgaagagctgattgacacatttgaagatgataactgtttcagctctggaaaggatgatatggattttgctggaaacgtgaaaaagagaacaaaaggagctaaggataacacattagatgaagattcagaaggtagtgatgatgaacttggtaacctggatgacgatgaagtttctttaggaagtatggatgatgaagaatttgctgaagttgatgaagatggaggaacattcatggatgtgttagatgatgaaagtgagagcgttccagaacttgaagtccactccaaagtcagtactaagaaaagcaagagaaaaggtacagatgattttgactttgctggctcatttcaagggccaagaaaaaagaaaagaaacttaaatgattccagcctatttgtatctgctgaagagtttggccatctattggatgaaaatatgggatccaagtttgataacattgcatga

SEQ ID NO: 4920 - DNA, 3567 bp, Homo sapiens
  source 1..3567: mol_type = unassigned DNA
aaccctgcctggctccgcccccttcacgccccctcttttccgctccgcgcctgcgcactgccaccctccactctcgcgccagcccggcggcggccggctgtgggctgcagcacgcggtgcacgaggcagagcccacaagccaaagacggagtgggccgagcattccggccacgccttccgcggccaagtcattatggcagccactgagatctctgtcctttctgagcaattcaccaagatcaaagaactcgagttgatgccggaaaaaggcctgaaggaggaggaaaaagacggagtgtgcagagagaaagaccatcggagccctagtgagttggaggccgagcgtacctctggggccttccaggacagcgtcctggaggaagaagtggagctggtgctggccccctcggaggagagcgagaagtacatcctgaccctgcagacggtgcacttcacttctgaagctgtggagttgcaggatatgagcttgctgagcatacagcagcaagaaggggtgcaggtggtggtgcaacagcctggccctgggttgctgtggcttgaggaagggccccggcagagcctgcagcagtgtgtggccattagtatccagcaagagctgtactccccgcaagagatggaggtgttgcagttccacgctctagaggagaatgtgatggtggccagtgaagacagtaagttagcggtgagcctggctgaaactactggactgatcaagctcgaggaagagcaggagaagaaccagttattggctgaaagaacaaaggagcagctcttttttgtggaaacaatgtcaggagatgaaagaagtgacgaaattgttctcacagtttcaaattcaaatgtggaagaacaagaggatcaacctacagctggtcaagcagatgctgaaaaggccaaatctacaaaaaatcaaagaaagacaaagggagcaaaaggaaccttccactgtgatgtctgcatgttcacctcttctagaatgtcaagttttaatcgtcatatgaaaactcacaccagtgagaagcctcacctgtgtcacctctgcctgaaaaccttccgtacggtcactctgctgcggaaccatgttaacacccacacaggaaccaggccctacaagtgtaacgactgcaacatggcatttgtcaccagtggagaactcgtccgacacaggcgctataaacatactcatgagaaaccctttaaatgttccatgtgcaagtatgccagtgtggaggcaagtaaattgaagcgccatgtccgatcccacactggggagcgcccctttcagtgttgccagtgcagctatgccagcagagatacctacaagctgaaacgccacatgagaacgcactcaggtgagaagccttacgaatgccacatctgccacacccgcttcacccagagcgggaccatgaaaatacatattctgcagaaacacggcgaaaatgtccccaaataccagtgtccccattgtgccaccatcattgcacggaaaagcgacctacgtgtgcatatgcgcaacttgcatgcttacagcgctgcagagctgaaatgccgctactgttctgctgtcttccatgaacgctatgccctcattcagcaccagaaaactcataagaatgagaagaggttcaagtgcaaacactgcagttatgcctgcaagcaggaacgtcatatgaccgctcacattcgtacccacactggagagaaaccattcacctgcctttcttgcaataaatgtttccgacagaagcaacttctaaacgctcacttcaggaaataccacgatgcaaatttcatcccgactgtttacaaatgctccaagtgtggcaaaggcttttcccgctggattaacctgcacagacattcggagaagtgtggatcaggggaagcaaagtcggctgcttcaggaaagggaagaagaacaagaaagaggaagcagaccatcctgaaggaagccacaaagggtcagaaggaagctgcgaagggatggaaggaagccgcgaacggagacgaagctgctgctgaggaggcttccaccacgaagggagaacagttcccaggagagatgtttcctgtcgcctgcagagaaaccacagccagagtcaaagaggaagtggatgaaggcgtgacctgtgaaatgctcctcaacacgatggataagtgagagggattcgggttgcgtgttcactgcccccaattcctaaagcaagttagaagtttttagcatttaaggtgtgaaatgctcctcaacacgatggataagtgagagagagtcaggttgcatgttcactgcccctaattcctaaagcaagttagaaatttttagcattttctttgaaacaattaagttcatgacaatggatgacacaagtttgaggtagtgtctagaattgttctcctgtttgtagctggatatttcaaagaaacattgcaggtattttataaaagttttaaaccttgaatgagagggtaacacctcaaacctatggattcattcacttgatattggcaaggtggcccacaatgagtgagtagtgatttttggatatttcaaaatagtctagaccagctagtgcttccacagtcaaagctggacatttttatgttgcattatatacacccatgatatttctaataatatatggttttaaacattaaagacaaatgtttttatacaaatgaattttctacaaaatttaaagctaccataatgcttttaattagttctaaattcaaccaaaaaatgttttactcttataaaaaggaaaactgagtaggaaatgaaatactagattagactagaaaataaggaataaatcgattttactttggtataggagcaaggttcacctttagatttttgtattctcttttaattatgctccttggcaggtatgaaattgccctggttacattccattattgcttattagtatttcactccataacccttttttctgctaaaactactctttttatatttgtaaaataattggcagagtgagaagaaacataaaatcagataaggcaaatgtgtacctgtaaggaatttgtactttttcataatgcccagtgattagtgagtatttcccttttgccagttgacaagatttttccaccctcgagcagcgtgagagatgcctctttaacacttgaaattcatttctatctggatacagaggcagatttttcttcattgcttagttgagcagtttgttttgctgccaacctgtctccacccctgtatttcaagatcattgataagccctaaattcaaattcttaagatatggaccttttattgaaaatatcacaagttcagaatccctatacaatgtgaatatgtggaaataatttcccagcaggaagagcattatattctctttgtaccagcaaattaatttaactcaactcacatgagatttaaattctgtgggctgtagtatgccatcattgtgactgaatttgtgcaatggtttcttaatttttttactgttatttaaagatgttttacataattcaataaaatgaaatgacttaaaattgc

SEQ ID NO: 4921 - DNA, 3491 bp, Homo sapiens
  source 1..3491: mol_type = unassigned DNA
tctcccaggccccctgcaggccctcgtgccctccttacttcccccccgggtctcccagcgccccctgcggggccctcctcccttcctcatccacttcaaccccaaggccaagtcattatggcagccactgagatctctgtcctttctgagcaattcaccaagatcaaagaactcgagttgatgccggaaaaaggcctgaaggaggaggaaaaagacggagtgtgcagagagaaagaccatcggagccctagtgagttggaggccgagcgtacctctggggccttccaggacagcgtcctggaggaagaagtggagctggtgctggccccctcggaggagagcgagaagtacatcctgaccctgcagacggtgcacttcacttctgaagctgtggagttgcaggatatgagcttgctgagcatacagcagcaagaaggggtgcaggtggtggtgcaacagcctggccctgggttgctgtggcttgaggaagggccccggcagagcctgcagcagtgtgtggccattagtatccagcaagagctgtactccccgcaagagatggaggtgttgcagttccacgctctagaggagaatgtgatggtggccagtgaagacagtaagttagcggtgagcctggctgaaactactggactgatcaagctcgaggaagagcaggagaagaaccagttattggctgaaagaacaaaggagcagctcttttttgtggaaacaatgtcaggagatgaaagaagtgacgaaattgttctcacagtttcaaattcaaatgtggaagaacaagaggatcaacctacagctggtcaagcagatgctgaaaaggccaaatctacaaaaaatcaaagaaagacaaagggagcaaaaggaaccttccactgtgatgtctgcatgttcacctcttctagaatgtcaagttttaatcgtcatatgaaaactcacaccagtgagaagcctcacctgtgtcacctctgcctgaaaaccttccgtacggtcactctgctgcggaaccatgttaacacccacacaggaaccaggccctacaagtgtaacgactgcaacatggcatttgtcaccagtggagaactcgtccgacacaggcgctataaacatactcatgagaaaccctttaaatgttccatgtgcaagtatgccagtgtggaggcaagtaaattgaagcgccatgtccgatcccacactggggagcgcccctttcagtgttgccagtgcagctatgccagcagagatacctacaagctgaaacgccacatgagaacgcactcaggtgagaagccttacgaatgccacatctgccacacccgcttcacccagagcgggaccatgaaaatacatattctgcagaaacacggcgaaaatgtccccaaataccagtgtccccattgtgccaccatcattgcacggaaaagcgacctacgtgtgcatatgcgcaacttgcatgcttacagcgctgcagagctgaaatgccgctactgttctgctgtcttccatgaacgctatgccctcattcagcaccagaaaactcataagaatgagaagaggttcaagtgcaaacactgcagttatgcctgcaagcaggaacgtcatatgaccgctcacattcgtacccacactggagagaaaccattcacctgcctttcttgcaataaatgtttccgacagaagcaacttctaaacgctcacttcaggaaataccacgatgcaaatttcatcccgactgtttacaaatgctccaagtgtggcaaaggcttttcccgctggattaacctgcacagacattcggagaagtgtggatcaggggaagcaaagtcggctgcttcaggaaagggaagaagaacaagaaagaggaagcagaccatcctgaaggaagccacaaagggtcagaaggaagctgcgaagggatggaaggaagccgcgaacggagacgaagctgctgctgaggaggcttccaccacgaagggagaacagttcccaggagagatgtttcctgtcgcctgcagagaaaccacagccagagtcaaagaggaagtggatgaaggcgtgacctgtgaaatgctcctcaacacgatggataagtgagagggattcgggttgcgtgttcactgcccccaattcctaaagcaagttagaagtttttagcatttaaggtgtgaaatgctcctcaacacgatggataagtgagagagagtcaggttgcatgttcactgcccctaattcctaaagcaagttagaaatttttagcattttctttgaaacaattaagttcatgacaatggatgacacaagtttgaggtagtgtctagaattgttctcctgtttgtagctggatatttcaaagaaacattgcaggtattttataaaagttttaaaccttgaatgagagggtaacacctcaaacctatggattcattcacttgatattggcaaggtggcccacaatgagtgagtagtgatttttggatatttcaaaatagtctagaccagctagtgcttccacagtcaaagctggacatttttatgttgcattatatacacccatgatatttctaataatatatggttttaaacattaaagacaaatgtttttatacaaatgaattttctacaaaatttaaagctaccataatgcttttaattagttctaaattcaaccaaaaaatgttttactcttataaaaaggaaaactgagtaggaaatgaaatactagattagactagaaaataaggaataaatcgattttactttggtataggagcaaggttcacctttagatttttgtattctcttttaattatgctccttggcaggtatgaaattgccctggttacattccattattgcttattagtatttcactccataacccttttttctgctaaaactactctttttatatttgtaaaataattggcagagtgagaagaaacataaaatcagataaggcaaatgtgtacctgtaaggaatttgtactttttcataatgcccagtgattagtgagtatttcccttttgccagttgacaagatttttccaccctcgagcagcgtgagagatgcctctttaacacttgaaattcatttctatctggatacagaggcagatttttcttcattgcttagttgagcagtttgttttgctgccaacctgtctccacccctgtatttcaagatcattgataagccctaaattcaaattcttaagatatggaccttttattgaaaatatcacaagttcagaatccctatacaatgtgaatatgtggaaataatttcccagcaggaagagcattatattctctttgtaccagcaaattaatttaactcaactcacatgagatttaaattctgtgggctgtagtatgccatcattgtgactgaatttgtgcaatggtttcttaatttttttactgttatttaaagatgttttacataattcaataaaatgaaatgacttaaaattgc

SEQ ID NO: 4922 - DNA, 2964 bp, Homo sapiens
  source 1..2964: mol_type = unassigned DNA
agggtaaagcaggggccctgccaggcctccgagggagtgtgcttggtctggccgagggctgcttggccaagtctgggtgggctcgaggccactaggcccaaagcctgcctggctctgagggtgctaggtctagaaccgtgcacgaggggaatgcctgctcgggcccgaacctcgctgggcgccgggtgtgcactggcccggggcctgcttggacctgaaacttgctaggcccaggatatgcactggccgagagcctgctgggcccaaaccttactaggcccaggatgttcactgactgaaccggctcaggcctaaccttgctaggcccaggatatgcactgggccagagtgtgctcaggcggaaccttgccaggcgcaggatgtgtgctggccctaagcctgctgaggcccaaacctgttcgttctagggttttgtacaaaatcctgctttagcctaaatcctgcttagccttgaccccctcctagacccaagccagatcagcattgttctgaccctactaagtccaaaaccttttgaggccagaccttgtttcaactccaaagcctgctaggttccagcaccccccgcatccctcctcataccacccccttctcccccctatggaaaccgcttgcttatttttcaaacaggccaagtcattatggcagccactgagatctctgtcctttctgagcaattcaccaagatcaaagaactcgagttgatgccggaaaaaggcctgaaggaggaggaaaaagacggagtgtgcagagagaaagaccatcggagccctagtgagttggaggccgagcgtacctctggggccttccaggacagcgtcctggaggaagaagtggagctggtgctggccccctcggaggagagcgagaagtacatcctgaccctgcagacggtgcacttcacttctgaagctgtggagttgcaggatatgagcttgctgagcatacagcagcaagaaggggtgcaggtggtggtgcaacagcctggccctgggttgctgtggcttgaggaagggccccggcagagcctgcagcagtgtgtggccattagtatccagcaagagctgtactccccgcaagagatggaggtgttgcagttccacgctctagaggagaatgtgatggtggccagtgaagacagtaagttagcggtgagcctggctgaaactactggactgatcaagctcgaggaagagcaggagaagaaccagttattggctgaaagaacaaaggagcagctcttttttgtggaaacaatgtcaggagatgaaagaagtgacgaaattgttctcacagtttcaaattcaaatgtggaagaacaagaggatcaacctacagctggtcaagcagatgctgaaaaggccaaatctacaaaaaatcaaagaaagacaaagggagcaaaaggaaccttccactgtgatgtctgcatgttcacctcttctagaatgtcaagttttaatcgtcatatgaaaactcacaccagtgagaagcctcacctgtgtcacctctgcctgaaaaccttccgtacggtcactctgctgcggaaccatgttaacacccacacaggaaccaggccctacaagtgtaacgactgcaacatggcatttgtcaccagtggagaactcgtccgacacaggcgctataaacatactcatgagaaaccctttaaatgttccatgtgcaagtatgccagtgtggaggcaagtaaattgaagcgccatgtccgatcccacactggggagcgcccctttcagtgttgccagtgcagctatgccagcagagatacctacaagctgaaacgccacatgagaacgcactcagaagcaacttctaaacgctcacttcaggaaataccacgatgcaaatttcatcccgactgtttacaaatgctccaagtgtggcaaaggcttttcccgctggattaacctgcacagacattcggagaagtgtggatcaggggaagcaaagtcggctgcttcaggaaagggaagaagaacaagaaagaggaagcagaccatcctgaaggaagccacaaagggtcagaaggaagctgcgaagggatggaaggaagccgcgaacggagacggtgtgatctcagctcaccgcaacctctgcctcctgggttcaagtgattctcatgcctcagtctccggagctgggattacagatgcccgccaccacgcctggctaattgttctattatttttagtagagatggggttttaccatgtctctcactcctgacctcaagtgatctgcccgcctcggcctcccaaagtggtgggattacaggcatgagcccctgtgcctggcctgatggcaccagttttgtggatctcagtgtttcttttcatatccaagaactgggtcttcttgtctccctccatccaccaaaaaaaaaaaaaaaaaaatacttcaaggaagcatggacaaaaatatcctcagacaagttagaacatgagacagtcacgttcttcagtgtggcgctctgtggatgtttgggaaagtaatttggaaaatgagtagagcagggctccccaaccccccagccgtggacctgtgggctgttaggaactgggcctcccagcaggaggtgagcagtgggtgagggagtgaagctttgtattgacagccgctccccatcgggcgcatcaccgcctgagctccgcctcctgtcagatcagcggcagcgttagattctcatgagtgtgaaccctgttgtgaactctgcacgtgcaagggatctaggctgcacactccttacgagaatctaatgcccgacgatctgtcactgtctcccatcacccccagatgggactgtctagatgcaggaaaacaagcccagggctcccactgattctacattatggtgagctgtataattatttcattatatatcacaatgtaataataaaaataaagtacataagaaatgtaatgtgc

SEQ ID NO: 4923 - DNA, 2966 bp, Homo sapiens
  source 1..2966: mol_type = unassigned DNA
attccacccctccccccagtatctcagtgcctcctgtgggccctcctcccctccttatccattccccctcagatctcccaggccccctgcaggccctcgtgccctccttacttcccccccgggtctcccagcgccccctgcggggccctcctcccttcctcatccacttcaaccccaaggccaagtcattatggcagccactgagatctctgtcctttctgagcaattcaccaagatcaaagaactcgagttgatgccggaaaaaggcctgaaggaggaggaaaaagacggagtgtgcagagagaaagaccatcggagccctagtgagttggaggccgagcgtacctctggggccttccaggacagcgtcctggaggaagaagtggagctggtgctggccccctcggaggagagcgagaagtacatcctgaccctgcagacggtgcacttcacttctgaagctgtggagttgcaggatatgagcttgctgagcatacagcagcaagaaggggtgcaggtggtggtgcaacagcctggccctgggttgctgtggcttgaggaagggccccggcagagcctgcagcagtgtgtggccattagtatccagcaagagctgtactccccgcaagagatggaggtgttgcagttccacgctctagaggagaatgtgatggtggccagtgaagacagtaagttagcggtgagcctggctgaaactactggactgatcaagctcgaggaagagcaggagaagaaccagttattggctgaaagaacaaaggagcagctcttttttgtggaaacaatgtcaggagatgaaagaagtgacgaaattgttctcacagtttcaaattcaaatgtggaagaacaagaggatcaacctacagctggtcaagcagatgctgaaaaggccaaatctacaaaaaatcaaagaaagacaaagggagcaaaaggaaccttccactgtgatgtctgcatgttcacctcttctagaatgtcaagttttaatcgtcatatgaaaactcacaccagtgagaagcctcacctgtgtcacctctgcctgaaaaccttccgtacggtcactctgctgcggaaccatgttaacacccacacaggaaccaggccctacaagtgtaacgactgcaacatggcatttgtcaccagtggagaactcgtccgacacaggcgctataaacatactcatgagaaaccctttaaatgttccatgtgcaagtatgccagtgtggaggcaagtaaattgaagcgccatgtccgatcccacactggggagcgcccctttcagtgttgccagtgcagctatgccagcagagatacctacaagctgaaacgccacatgagaacgcactcaggtgagaagccttacgaatgccacatctgccacacccgcttcacccagagcgggaccatgaaaatacatattctgcagaaacacggcgaaaatgtccccaaataccagtgtccccattgtgccaccatcattgcacggaaaagcgacctacgtgtgcatatgcgcaacttgcatgcttacagcgctgcagagctgaaatgccgctactgttctgctgtcttccatgaacgctatgccctcattcagcaccagaaaactcataagaatgagaagaggttcaagtgcaaacactgcagttatgcctgcaagcaggaacgtcatatgaccgctcacattcgtacccacactggagagaaaccattcacctgcctttcttgcaataaatgtttccgacagaagcaacttctaaacgctcacttcaggaaataccacgatgcaaatttcatcccgactgtttacaaatgctccaagtgtggcaaaggcttttcccgctggattacctcaaaatggagtggcttaaaaccacaaacatttatcacctgacagattctctgggttgggaactcggaagtggctgaactgggtggtcctggctcagggccactcctgaggctgcagtcaggatgtccgccagggctgcatcatccgaaggctggactggggccagaggatccacttccaggacagctccgccacacaactgctggcaccggcctcagttccttgctacagggacctctctgcagggctgcttgagtgtcctcctgactcagagcaagtgagagagtgcaagtaggaagccatggtgccttttgcagtctagtcctaaaagcggcacaacagccagctgtgggggctcacacctgtaatcccagtacttcgggaggccaaggcaggtggataacttgaggccaggagctcaagaccagcctggccaacatggtgaaaccctgtctctactttaaaaaaaaaaaaagaaaatagctaggcgtggtagtgcacgcttgtaatcccagctacttgggtggttgggacgggaggatcacttgaacccaggagacagaggttgcagtgagctgagattgtgccactggcctccagcctgggcgacagagcaagactctgtctcaaaaaaaaaaaaaaagtggcacattctagtcacaagaaatgaaccatgaagtcccacccacactcgagtggggaatgaagtttcttttgaaaggaacagcatcaaagaatttcaggacatttaaaaaccactgcacatggctagctagatccttggaccatgtaggcttcagcctaactttataaaagttttataaaagttgaatttcctgaagttgactatttttttaaaaatatttcttcttaaaacagtagtgtagttgtgtttttctgagtagcacagtgggatagttctggaatgtcaaccctattagtttaaaatttcaaataaaagctgtggcagtgctcccaaaacaccattgctcatgcaaaaattgtgaagagttaaaattaacgagtagaattctaaagagaaaaaaactgctctttggtgcaagaaataaaaatgtagagaaaagaacaagtctgc

SEQ ID NO: 4924 - DNA, 2479 bp, Homo sapiens
  source 1..2479: mol_type = unassigned DNA
ggctgcagcacgcggtgcacgaggcagagcccacaagccaaagacggagtgggccgagcattccggccacgccttccgcggccaagtcattatggcagccactgagatctctgtcctttctgagcaattcaccaagatcaaagaactcgagttgatgccggaaaaaggcctgaaggaggaggaaaaagacggagtgtgcagagagaaagaccatcggagccctagtgagttggaggccgagcgtacctctggggccttccaggacagcgtcctggaggaagaagtggagctggtgctggccccctcggaggagagcgagaagtacatcctgaccctgcagacggtgcacttcacttctgaagctgtggagttgcaggatatgagcttgctgagcatacagcagcaagaaggggtgcaggtggtggtgcaacagcctggccctgggttgctgtggcttgaggaagggccccggcagagcctgcagcagtgtgtggccattagtatccagcaagagctgtactccccgcaagagatggaggtgttgcagttccacgctctagaggagaatgtgatggtggccagtgaagacagtaagttagcggtgagcctggctgaaactactggactgatcaagctcgaggaagagcaggagaagaaccagttattggctgaaagaacaaaggagcagctcttttttgtggaaacaatgtcaggagatgaaagaagtgacgaaattgttctcacagtttcaaattcaaatgtggaagaacaagaggatcaacctacagctggtcaagcagatgctgaaaaggccaaatctacaaaaaatcaaagaaagacaaagggagcaaaaggaaccttccactgtgatgtctgcatgttcacctcttctagaatgtcaagttttaatcgtcatatgaaaactcacaccagtgagaagcctcacctgtgtcacctctgcctgaaaaccttccgtacggtcactctgctgcggaaccatgttaacacccacacaggaaccaggccctacaagtgtaacgactgcaacatggcatttgtcaccagtggagaactcgtccgacacaggcgctataaacatactcatgagaaaccctttaaatgttccatgtgcaagtatgccagtgtggaggcaagtaaattgaagcgccatgtccgatcccacactggggagcgcccctttcagtgttgccagtgcagctatgccagcagagatacctacaagctgaaacgccacatgagaacgcactcaggtgagaagccttacgaatgccacatctgccacacccgcttcacccagagcgggaccatgaaaatacatattctgcagaaacacggcgaaaatgtccccaaataccagtgtccccattgtgccaccatcattgcacggaaaagcgacctacgtgtgcatatgcgcaacttgcatgcttacagcgctgcagagctgaaatgccgctactgttctgctgtcttccatgaacgctatgccctcattcagcaccagaaaactcataagaatgagaagaggttcaagtgcaaacactgcagttatgcctgcaagcaggaacgtcatatgaccgctcacattcgtacccacactggagagaaaccattcacctgcctttcttgcaataaatgtttccgacagaagcaacttctaaacgctcacttcaggaaataccacgatgcaaatttcatcccgactgtttacaaatgctccaagtgtggcaaaggcttttcccgctggattaacctgcacagacattcggagaagtgtggatcaggggaagcaaagtcggctgcttcaggaaagggaagaagaacaagaaagaggaagcagaccatcctgaaggaagccacaaagggtcagaaggaagctgcgaagggatggaaggaagccgcgaacggagacgaagctgctgctgaggaggcttccaccacgaagggagaacagttcccaggagagatgtttcctgtcgcctgcagagaaaccacagccagagtcaaagaggaagtggatgaaggcgtgacctgtgaaatgctcctcaacacgatggataattccgcaggctgtacaggaaggatgatgttggtatctgcctggcttctggggaggcctcaggaaacttacaatcaaggcagaaggcgaagagggagtaggcgcgtcacatggtgaaagcaggagcgagagagggggaggcgccacactcctctgaacgaccagattccttgagaaccgccactgtcatgaggacagcaccaagcggatggtgctaaatcattcctaagaaaccgcccccgtgatccagtcacctcctaccaggccccacctccaacactggggattacaattcaacatgagctttggccagggacaaatatccaaactatatcatgtattttactacaaccaaatgtatgttaatttcaaaaacagataacataaatatgtttgaaaacg

SEQ ID NO: 4925 - DNA, 3996 bp, Homo sapiens
  source 1..3996: mol_type = unassigned DNA
agggtaaagcaggggccctgccaggcctccgagggagtgtgcttggtctggccgagggctgcttggccaagtctgggtgggctcgaggccactaggcccaaagcctgcctggctctgagggtgctaggtctagaaccgtgcacgaggggaatgcctgctcgggcccgaacctcgctgggcgccgggtgtgcactggcccggggcctgcttggacctgaaacttgctaggcccaggatatgcactggccgagagcctgctgggcccaaaccttactaggcccaggatgttcactgactgaaccggctcaggcctaaccttgctaggcccaggatatgcactgggccagagtgtgctcaggcggaaccttgccaggcgcaggatgtgtgctggccctaagcctgctgaggcccaaacctgttcgttctagggttttgtacaaaatcctgctttagcctaaatcctgcttagccttgaccccctcctagacccaagccagatcagcattgttctgaccctactaagtccaaaaccttttgaggccagaccttgtttcaactccaaagcctgctaggttccagcaccccccgcatccctcctcataccacccccttctcccccctatggaaaccgcttgcttatttttcaaacaggccaagtcattatggcagccactgagatctctgtcctttctgagcaattcaccaagatcaaagaactcgagttgatgccggaaaaaggcctgaaggaggaggaaaaagacggagtgtgcagagagaaagaccatcggagccctagtgagttggaggccgagcgtacctctggggccttccaggacagcgtcctggaggaagaagtggagctggtgctggccccctcggaggagagcgagaagtacatcctgaccctgcagacggtgcacttcacttctgaagctgtggagttgcaggatatgagcttgctgagcatacagcagcaagaaggggtgcaggtggtggtgcaacagcctggccctgggttgctgtggcttgaggaagggccccggcagagcctgcagcagtgtgtggccattagtatccagcaagagctgtactccccgcaagagatggaggtgttgcagttccacgctctagaggagaatgtgatggtggccagtgaagacagtaagttagcggtgagcctggctgaaactactggactgatcaagctcgaggaagagcaggagaagaaccagttattggctgaaagaacaaaggagcagctcttttttgtggaaacaatgtcaggagatgaaagaagtgacgaaattgttctcacagtttcaaattcaaatgtggaagaacaagaggatcaacctacagctggtcaagcagatgctgaaaaggccaaatctacaaaaaatcaaagaaagacaaagggagcaaaaggaaccttccactgtgatgtctgcatgttcacctcttctagaatgtcaagttttaatcgtcatatgaaaactcacaccagtgagaagcctcacctgtgtcacctctgcctgaaaaccttccgtacggtcactctgctgcggaaccatgttaacacccacacaggaaccaggccctacaagtgtaacgactgcaacatggcatttgtcaccagtggagaactcgtccgacacaggcgctataaacatactcatgagaaaccctttaaatgttccatgtgcaagtatgccagtgtggaggcaagtaaattgaagcgccatgtccgatcccacactggggagcgcccctttcagtgttgccagtgcagctatgccagcagagatacctacaagctgaaacgccacatgagaacgcactcaggtgagaagccttacgaatgccacatctgccacacccgcttcacccagagcgggaccatgaaaatacatattctgcagaaacacggcgaaaatgtccccaaataccagtgtccccattgtgccaccatcattgcacggaaaagcgacctacgattcctgggcctcccttttccatgatcttatttctctttccaaaatatatgacactgtgatacacaaaaatatgttagcagaacaaaaaatttgacccttttgcccaaagagattctggagatgagatgaatttttttgaaaacctttctgaaaggcgaaaggtgttccacaaagtcttcacttttatttttcatctggaccattctgtcattgttgccgtagataccagcacatcacaaaacacagtccagtggggcttggtggggcacaagtctagccagttgctagacttttttgacaccatggcaaagtaacatggtttatatccatctcatgccagtgggtgatacactccacatagccctataagatgctttataaacacattaattcttccttcccatgactgtatgagaaatcaagctctctaaatgtctgagtcactgtgggtaaggtggagtagctccatcacacagctgtccattgtcatttggcttcttacacaagtatcacaagaccatcatgctttagacttagatgagcaaacccagccagaccttaccatgtgtctcaggttaatttcaacataggaaataacagggcactgacttctaacaacgagtggattatttaaggtgtgcatatgcgcaacttgcatgcttacagcgctgcagagctgaaatgccgctactgttctgctgtcttccatgaacgctatgccctcattcagcaccagaaaactcataagaatgagaagaggttcaagtgcaaacactgcagttatgcctgcaagcaggaacgtcatatgaccgctcacattcgtacccacactggagagaaaccattcacctgcctttcttgcaataaatgtttccgacagaagcaacttctaaacgctcacttcaggaaataccacgatgcaaatttcatcccgactgtttacaaatgctccaagtgtggcaaaggcttttcccgctggattaacctgcacagacattcggagaagtgtggatcaggggaagcaaagtcggctgcttcaggaaagggaagaagaacaagaaagaggaagcagaccatcctgaaggaagccacaaagggtcagaaggaagctgcgaagggatggaaggaagccgcgaacggagacggtgtgatctcagctcaccgcaacctctgcctcctgggttcaagtgattctcatgcctcagtctccggagctgggattacagatgcccgccaccacgcctggctaattgttctattatttttagtagagatggggttttaccatgtctctcactcctgacctcaagtgatctgcccgcctcggcctcccaaagtggtgggattacaggcatgagcccctgtgcctggcctgatggcaccagttttgtggatctcagtgtttcttttcatatccaagaactgggtcttcttgtctccctccatccaccaaaaaaaaaaaaaaaaaaatacttcaaggaagcatggacaaaaatatcctcagacaagttagaacatgagacagtcacgttcttcagtgtggcgctctgtggatgtttgggaaagtaatttggaaaatgagtagagcagggctccccaaccccccagccgtggacctgtgggctgttaggaactgggcctcccagcaggaggtgagcagtgggtgagggagtgaagctttgtattgacagccgctccccatcgggcgcatcaccgcctgagctccgcctcctgtcagatcagcggcagcgttagattctcatgagtgtgaaccctgttgtgaactctgcacgtgcaagggatctaggctgcacactccttacgagaatctaatgcccgacgatctgtcactgtctcccatcacccccagatgggactgtctagatgcaggaaaacaagcccagggctcccactgattctacattatggtgagctgtataattatttcattatatatcacaatgtaataataaaaataaagtacataagaaatgtaatgtgc

SEQ ID NO: 4926 - DNA, 3785 bp, Homo sapiens
  source 1..3785: mol_type = unassigned DNA
tcccaggccccctgcaggccctcgtgccctccttacttcccccccgggtctcccagcgccccctgcggggccctcctcccttcctcatccacttcaaccccaaggtatttccgtgcccctgcaggaccctcctcccctccttaggcgctcccccactacccagtcttccagtgccctgcaggctctcctcctctccttatccacccccaccccaggtctcccagtgccctgtatgggaccctcctcccctcctcatccacccccccaggtccaccagtgccccctctggggtcctcctcatccgtgctccccctccccctccctactccccttcccccctgcccccacagtacatcaccccctcccccaaccctgcctggctccgcccccttcacgccccctcttttccgctccgcgcctgcgcactgccaccctccactctcgcgccagcccggcggcggccggctgtgggctgcagcacgcggtgcacgaggcagagcccacaagccaaagacggagtgggccgagcattccggccacgccttccgcggccaagtcattatggcagccactgagatctctgtcctttctgagcaattcaccaagatcaaagaactcgagttgatgccggaaaaaggcctgaaggaggaggaaaaagacggagtgtgcagagagaaagaccatcggagccctagtgagttggaggccgagcgtacctctggggccttccaggacagcgtcctggaggaagaagtggagctggtgctggccccctcggaggagagcgagaagtacatcctgaccctgcagacggtgcacttcacttctgaagctgtggagttgcaggatatgagcttgctgagcatacagcagcaagaaggggtgcaggtggtggtgcaacagcctggccctgggttgctgtggcttgaggaagggccccggcagagcctgcagcagtgtgtggccattagtatccagcaagagctgtactccccgcaagagatggaggtgttgcagttccacgctctagaggagaatgtgatggtggccagtgaagacagtaagttagcggtgagcctggctgaaactactggactgatcaagctcgaggaagagcaggagaagaaccagttattggctgaaagaacaaaggagcagctcttttttgtggaaacaatgtcaggagatgaaagaagtgacgaaattgttctcacagtttcaaattcaaatgtggaagaacaagaggatcaacctacagctggtcaagcagatgctgaaaaggccaaatctacaaaaaatcaaagaaagacaaagggagcaaaaggaaccttccactgtgatgtctgcatgttcacctcttctagaatgtcaagttttaatcgtcatatgaaaactcacaccagtgagaagcctcacctgtgtcacctctgcctgaaaaccttccgtacggtcactctgctgcggaaccatgttaacacccacacaggaaccaggccctacaagtgtaacgactgcaacatggcatttgtcaccagtggagaactcgtccgacacaggcgctataaacatactcatgagaaaccctttaaatgttccatgtgcaagtatgccagtgtggaggcaagtaaattgaagcgccatgtccgatcccacactggggagcgcccctttcagtgttgccagtgcagctatgccagcagagatacctacaagctgaaacgccacatgagaacgcactcaggtgtgcatatgcgcaacttgcatgcttacagcgctgcagagctgaaatgccgctactgttctgctgtcttccatgaacgctatgccctcattcagcaccagaaaactcataagaatgagaagaggttcaagtgcaaacactgcagttatgcctgcaagcaggaacgtcatatgaccgctcacattcgtacccacactggagagaaaccattcacctgcctttcttgcaataaatgtttccgacagaagcaacttctaaacgctcacttcaggaaataccacgatgcaaatttcatcccgactgtttacaaatgctccaagtgtggcaaaggcttttcccgctggattaacctgcacagacattcggagaagtgtggatcaggggaagcaaagtcggctgcttcaggaaagggaagaagaacaagaaagaggaagcagaccatcctgaaggaagccacaaagggtcagaaggaagctgcgaagggatggaaggaagccgcgaacggagacgaagctgctgctgaggaggcttccaccacgaagggagaacagttcccaggagagatgtttcctgtcgcctgcagagaaaccacagccagagtcaaagaggaagtggatgaaggcgtgacctgtgaaatgctcctcaacacgatggataagtgagagggattcgggttgcgtgttcactgcccccaattcctaaagcaagttagaagtttttagcatttaaggtgtgaaatgctcctcaacacgatggataagtgagagagagtcaggttgcatgttcactgcccctaattcctaaagcaagttagaaatttttagcattttctttgaaacaattaagttcatgacaatggatgacacaagtttgaggtagtgtctagaattgttctcctgtttgtagctggatatttcaaagaaacattgcaggtattttataaaagttttaaaccttgaatgagagggtaacacctcaaacctatggattcattcacttgatattggcaaggtggcccacaatgagtgagtagtgatttttggatatttcaaaatagtctagaccagctagtgcttccacagtcaaagctggacatttttatgttgcattatatacacccatgatatttctaataatatatggttttaaacattaaagacaaatgtttttatacaaatgaattttctacaaaatttaaagctaccataatgcttttaattagttctaaattcaaccaaaaaatgttttactcttataaaaaggaaaactgagtaggaaatgaaatactagattagactagaaaataaggaataaatcgattttactttggtataggagcaaggttcacctttagatttttgtattctcttttaattatgctccttggcaggtatgaaattgccctggttacattccattattgcttattagtatttcactccataacccttttttctgctaaaactactctttttatatttgtaaaataattggcagagtgagaagaaacataaaatcagataaggcaaatgtgtacctgtaaggaatttgtactttttcataatgcccagtgattagtgagtatttcccttttgccagttgacaagatttttccaccctcgagcagcgtgagagatgcctctttaacacttgaaattcatttctatctggatacagaggcagatttttcttcattgcttagttgagcagtttgttttgctgccaacctgtctccacccctgtatttcaagatcattgataagccctaaattcaaattcttaagatatggaccttttattgaaaatatcacaagttcagaatccctatacaatgtgaatatgtggaaataatttcccagcaggaagagcattatattctctttgtaccagcaaattaatttaactcaactcacatgagatttaaattctgtgggctgtagtatgccatcattgtgactgaatttgtgcaatggtttcttaatttttttactgttatttaaagatgttttacataattcaataaaatgaaatgacttaaaattgc

SEQ ID NO: 4927 - DNA, 2955 bp, Homo sapiens
  source 1..2955: mol_type = unassigned DNA
agggtaaagcaggggccctgccaggcctccgagggagtgtgcttggtctggccgagggctgcttggccaagtctgggtgggctcgaggccactaggcccaaagcctgcctggctctgagggtgctaggtctagaaccgtgcacgaggggaatgcctgctcgggcccgaacctcgctgggcgccgggtgtgcactggcccggggcctgcttggacctgaaacttgctaggcccaggatatgcactggccgagagcctgctgggcccaaaccttactaggcccaggatgttcactgactgaaccggctcaggcctaaccttgctaggcccaggatatgcactgggccagagtgtgctcaggcggaaccttgccaggcgcaggatgtgtgctggccctaagcctgctgaggcccaaacctgttcgttctagggttttgtacaaaatcctgctttagcctaaatcctgcttagccttgaccccctcctagacccaagccagatcagcattgttctgaccctactaagtccaaaaccttttgaggccagaccttgtttcaactccaaagcctgctaggttccagcaccccccgcatccctcctcataccacccccttctcccccctatggaaaccgcttgcttatttttcaaacaggccaagtcattatggcagccactgagatctctgtcctttctgagcaattcaccaagatcaaagaactcgagttgatgccggaaaaaggcctgaaggaggaggaaaaagacggagtgtgcagagagaaagaccatcggagccctagtgagttggaggccgagcgtacctctggggccttccaggacagcgtcctggaggaagaagtggagctggtgctggccccctcggaggagagcgagaagtacatcctgaccctgcagacggtgcacttcacttctgaagctgtggagttgcaggatatgagcttgctgagcatacagcagcaagaaggggtgcaggtggtggtgcaacagcctggccctgggttgctgtggcttgaggaagggccccggcagagcctgcagcagtgtgtggccattagtatccagcaagagctgtactccccgcaagagatggaggtgttgcagttccacgctctagaggagaatgtgatggtggccagtgaagacagtaagttagcggtgagcctggctgaaactactggactgatcaagctcgaggaagagcaggagaagaaccagttattggctgaaagaacaaaggagcagctcttttttgtggaaacaatgtcaggagatgaaagaagtgacgaaattgttctcacagtttcaaattcaaatgtggaagaacaagaggatcaacctacagctggtcaagcagatgctgaaaaggccaaatctacaaaaaatcaaagaaagacaaagggagcaaaaggaaccttccactgtgatgtctgcatgttcacctcttctagaatgtcaagttttaatcgtcatatgaaaactcacaccagtgagaagcctcacctgtgtcacctctgcctgaaaaccttccgtacggtcactctgctgcggaaccatgttaacacccacacaggaaccaggccctacaagtgtaacgactgcaacatggcatttgtcaccagtggagaactcgtccgacacaggcgctataaacatactcatgagaaaccctttaaatgttccatgtgcaagtatgccagtgtggaggaacgtcatatgaccgctcacattcgtacccacactggagagaaaccattcacctgcctttcttgcaataaatgtttccgacagaagcaacttctaaacgctcacttcaggaaataccacgatgcaaatttcatcccgactgtttacaaatgctccaagtgtggcaaaggcttttcccgctggattctctgggttgggaactcggaagtggctgaactgggtggtcctggctcagggccactcctgaggctgcagtcaggatgtccgccagggctgcatcatccgaaggctggactggggccagaggatccacttccaggacagctccgccacacaactgctggcaccggcctcagttccttgctacagggacctctctgcagggctgcttgagtgtcctcctgactcagagcaagtgagagagtgcaagtaggaagccatggtgccttttgcagtctagtcctaaaagcggcacaacagccagctgtgggggctcacacctgtaatcccagtacttcgggaggccaaggcaggtggataacttgaggccaggagctcaagaccagcctggccaacatggtgaaaccctgtctctactttaaaaaaaaaaaaagaaaatagctaggcgtggtagtgcacgcttgtaatcccagctacttgggtggttgggacgggaggatcacttgaacccaggagacagaggttgcagtgagctgagattgtgccactggcctccagcctgggcgacagagcaagactctgtctcaaaaaaaaaaaaaaagtggcacattctagtcacaagaaatgaaccatgaagtcccacccacactcgagtggggaatgaagtttcttttgaaaggaacagcatcaaagaatttcaggacatttaaaaaccactgcacatggctagctagatccttggaccatgtaggcttcagcctaactttataaaagttttataaaagttgaatttcctgaagttgactatttttttaaaaatatttcttcttaaaacagtagtgtagttgtgtttttctgagtagcacagtgggatagttctggaatgtcaaccctattagtttaaaatttcaaataaaagctgtggcagtgctcccaaaacaccattgctcatgcaaaaattgtgaagagttaaaattaacgagtagaattctaaagagaaaaaaactgctctttggtgcaagaaataaaaatgtagagaaaagaacaagtctgc

SEQ ID NO: 4928 - DNA, 3359 bp, Homo sapiens
  source 1..3359: mol_type = unassigned DNA
agggtaaagcaggggccctgccaggcctccgagggagtgtgcttggtctggccgagggctgcttggccaagtctgggtgggctcgaggccactaggcccaaagcctgcctggctctgagggtgctaggtctagaaccgtgcacgaggggaatgcctgctcgggcccgaacctcgctgggcgccgggtgtgcactggcccggggcctgcttggacctgaaacttgctaggcccaggatatgcactggccgagagcctgctgggcccaaaccttactaggcccaggatgttcactgactgaaccggctcaggcctaaccttgctaggcccaggatatgcactgggccagagtgtgctcaggcggaaccttgccaggcgcaggatgtgtgctggccctaagcctgctgaggcccaaacctgttcgttctagggttttgtacaaaatcctgctttagcctaaatcctgcttagccttgaccccctcctagacccaagccagatcagcattgttctgaccctactaagtccaaaaccttttgaggccagaccttgtttcaactccaaagcctgctaggttccagcaccccccgcatccctcctcataccacccccttctcccccctatggaaaccgcttgcttatttttcaaacaggccaagtcattatggcagccactgagatctctgtcctttctgagcaattcaccaagatcaaagaactcgagttgatgccggaaaaaggcctgaaggaggaggaaaaagacggagtgtgcagagagaaagaccatcggagccctagtgagttggaggccgagcgtacctctggggccttccaggacagcgtcctggaggaagaagtggagctggtgctggccccctcggaggagagcgagaagtacatcctgaccctgcagacggtgcacttcacttctgaagctgtggagttgcaggatatgagcttgctgagcatacagcagcaagaaggggtgcaggtggtggtgcaacagcctggccctgggttgctgtggcttgaggaagggccccggcagagcctgcagcagtgtgtggccattagtatccagcaagagctgtactccccgcaagagatggaggtgttgcagttccacgctctagaggagaatgtgatggtggccagtgaagacagtaagttagcggtgagcctggctgaaactactggactgatcaagctcgaggaagagcaggagaagaaccagttattggctgaaagaacaaaggagcagctcttttttgtggaaacaatgtcaggagatgaaagaagtgacgaaattgttctcacagtttcaaattcaaatgtggaagaacaagaggatcaacctacagctggtcaagcagatgctgaaaaggccaaatctacaaaaaatcaaagaaagacaaagggagcaaaaggaaccttccactgtgatgtctgcatgttcacctcttctagaatgtcaagttttaatcgtcatatgaaaactcacaccagtgagaagcctcacctgtgtcacctctgcctgaaaaccttccgtacggtcactctgctgcggaaccatgttaacacccacacaggaaccaggccctacaagtgtaacgactgcaacatggcatttgtcaccagtggagaactcgtccgacacaggcgctataaacatactcatgagaaaccctttaaatgttccatgtgcaagtatgccagtgtggaggcaagtaaattgaagcgccatgtccgatcccacactggggagcgcccctttcagtgttgccagtgcagctatgccagcagagatacctacaagctgaaacgccacatgagaacgcactcaggtgagaagccttacgaatgccacatctgccacacccgcttcacccagagcgggaccatgaaaatacatattctgcagaaacacggcgaaaatgtccccaaataccagtgtccccattgtgccaccatcattgcacggaaaagcgacctacgtgtgcatatgcgcaacttgcatgcttacagcgctgcagagctgaaatgccgctactgttctgctgtcttccatgaacgctatgccctcattcagcaccagaaaactcataagaatgagaagaggttcaagtgcaaacactgcagttatgcctgcaagcaggaacgtcatatgaccgctcacattcgtacccacactggagagaaaccattcacctgcctttcttgcaataaatgtttccgacagaagcaacttctaaacgctcacttcaggaaataccacgatgcaaatttcatcccgactgtttacaaatgctccaagtgtggcaaaggcttttcccgctggattaacctgcacagacattcggagaagtgtggatcaggggaagcaaagtcggctgcttcaggaaagggaagaagaacaagaaagaggaagcagaccatcctgaaggaagccacaaagggtcagaaggaagctgcgaagggatggaaggaagccgcgaacggagacggtgtgatctcagctcaccgcaacctctgcctcctgggttcaagtgattctcatgcctcagtctccggagctgggattacagatgcccgccaccacgcctggctaattgttctattatttttagtagagatggggttttaccatgtctctcactcctgacctcaagtgatctgcccgcctcggcctcccaaagtggtgggattacaggcatgagcccctgtgcctggcctgatggcaccagttttgtggatctcagtgtttcttttcatatccaagaactgggtcttcttgtctccctccatccaccaaaaaaaaaaaaaaaaaaatacttcaaggaagcatggacaaaaatatcctcagacaagttagaacatgagacagtcacgttcttcagtgtggcgctctgtggatgtttgggaaagtaatttggaaaatgagtagagcagggctccccaaccccccagccgtggacctgtgggctgttaggaactgggcctcccagcaggaggtgagcagtgggtgagggagtgaagctttgtattgacagccgctccccatcgggcgcatcaccgcctgagctccgcctcctgtcagatcagcggcagcgttagattctcatgagtgtgaaccctgttgtgaactctgcacgtgcaagggatctaggctgcacactccttacgagaatctaatgcccgacgatctgtcactgtctcccatcacccccagatgggactgtctagatgcaggaaaacaagcccagggctcccactgattctacattatggtgagctgtataattatttcattatatatcacaatgtaataataaaaataaagtacataagaaatgtaatgtgc

SEQ ID NO: 4929 - DNA, 2023 bp, Homo sapiens
  source 1..2023: mol_type = unassigned DNA
ggctgcagcacgcggtgcacgaggcagagcccacaagccaaagacggagtgggccgagcattccggccacgccttccgcggagcaaaaggaaccttccactgtgatgtctgcatgttcacctcttctagaatgtcaagttttaatcgtcatatgaaaactcacaccagtgagaagcctcacctgtgtcacctctgcctgaaaaccttccgtacggtcactctgctgcggaaccatgttaacacccacacaggaaccaggccctacaagtgtaacgactgcaacatggcatttgtcaccagtggagaactcgtccgacacaggcgctataaacatactcatgagaaaccctttaaatgttccatgtgcaagtatgccagtgtggaggcaagtaaattgaagcgccatgtccgatcccacactggggagcgcccctttcagtgttgccagtgcagctatgccagcagagatacctacaagctgaaacgccacatgagaacgcactcaggtgagaagccttacgaatgccacatctgccacacccgcttcacccagagcgggaccatgaaaatacatattctgcagaaacacggcgaaaatgtccccaaataccagtgtccccattgtgccaccatcattgcacggaaaagcgacctacgtgtgcatatgcgcaacttgcatgcttacagcgctgcagagctgaaatgccgctactgttctgctgtcttccatgaacgctatgccctcattcagcaccagaaaactcataagaatgagaagaggttcaagtgcaaacactgcagttatgcctgcaagcaggaacgtcatatgaccgctcacattcgtacccacactggagagaaaccattcacctgcctttcttgcaataaatgtttccgacagaagcaacttctaaacgctcacttcaggaaataccacgatgcaaatttcatcccgactgtttacaaatgctccaagtgtggcaaaggcttttcccgctggattaacctgcacagacattcggagaagtgtggatcaggggaagcaaagtcggctgcttcaggaaagggaagaagaacaagaaagaggaagcagaccatcctgaaggaagccacaaagggtcagaaggaagctgcgaagggatggaaggaagccgcgaacggagacggtgtgatctcagctcaccgcaacctctgcctcctgggttcaagtgattctcatgcctcagtctccggagctgggattacagatgcccgccaccacgcctggctaattgttctattatttttagtagagatggggttttaccatgtctctcactcctgacctcaagtgatctgcccgcctcggcctcccaaagtggtgggattacaggcatgagcccctgtgcctggcctgatggcaccagttttgtggatctcagtgtttcttttcatatccaagaactgggtcttcttgtctccctccatccaccaaaaaaaaaaaaaaaaaaatacttcaaggaagcatggacaaaaatatcctcagacaagttagaacatgagacagtcacgttcttcagtgtggcgctctgtggatgtttgggaaagtaatttggaaaatgagtagagcagggctccccaaccccccagccgtggacctgtgggctgttaggaactgggcctcccagcaggaggtgagcagtgggtgagggagtgaagctttgtattgacagccgctccccatcgggcgcatcaccgcctgagctccgcctcctgtcagatcagcggcagcgttagattctcatgagtgtgaaccctgttgtgaactctgcacgtgcaagggatctaggctgcacactccttacgagaatctaatgcccgacgatctgtcactgtctcccatcacccccagatgggactgtctagatgcaggaaaacaagcccagggctcccactgattctacattatggtgagctgtataattatttcattatatatcacaatgtaataataaaaataaagtacataagaaatgtaatgtgc

SEQ ID NO: 4930 - DNA, 2262 bp, Homo sapiens
  source 1..2262: mol_type = unassigned DNA
ggctgcagcacgcggtgcacgaggcagagcccacaagccaaagacggagtgggccgagcattccggccacgccttccgcgctcgaggaagagcaggagaagaaccagttattggctgaaagaacaaaggagcagctcttttttgtggaaacaatgtcaggagatgaaagaagtgacgaaattgttctcacagtttcaaattcaaatgtggaagaacaagaggatcaacctacagctggtcaagcagatgctgaaaaggccaaatctacaaaaaatcaaagaaagacaaagggagcaaaaggaaccttccactgtgatgtctgcatgttcacctcttctagaatgtcaagttttaatcgtcatatgaaaactcacaccagtgagaagcctcacctgtgtcacctctgcctgaaaaccttccgtacggtcactctgctgcggaaccatgttaacacccacacaggaaccaggccctacaagtgtaacgactgcaacatggcatttgtcaccagtggagaactcgtccgacacaggcgctataaacatactcatgagaaaccctttaaatgttccatgtgcaagtatgccagtgtggaggcaagtaaattgaagcgccatgtccgatcccacactggggagcgcccctttcagtgttgccagtgcagctatgccagcagagatacctacaagctgaaacgccacatgagaacgcactcaggtgagaagccttacgaatgccacatctgccacacccgcttcacccagagcgggaccatgaaaatacatattctgcagaaacacggcgaaaatgtccccaaataccagtgtccccattgtgccaccatcattgcacggaaaagcgacctacgtgtgcatatgcgcaacttgcatgcttacagcgctgcagagctgaaatgccgctactgttctgctgtcttccatgaacgctatgccctcattcagcaccagaaaactcataagaatgagaagaggttcaagtgcaaacactgcagttatgcctgcaagcaggaacgtcatatgaccgctcacattcgtacccacactggagagaaaccattcacctgcctttcttgcaataaatgtttccgacagaagcaacttctaaacgctcacttcaggaaataccacgatgcaaatttcatcccgactgtttacaaatgctccaagtgtggcaaaggcttttcccgctggattctctgggttgggaactcggaagtggctgaactgggtggtcctggctcagggccactcctgaggctgcagtcaggatgtccgccagggctgcatcatccgaaggctggactggggccagaggatccacttccaggacagctccgccacacaactgctggcaccggcctcagttccttgctacagggacctctctgcagggctgcttgagtgtcctcctgactcagagcaagtgagagagtgcaagtaggaagccatggtgccttttgcagtctagtcctaaaagcggcacaacagccagctgtgggggctcacacctgtaatcccagtacttcgggaggccaaggcaggtggataacttgaggccaggagctcaagaccagcctggccaacatggtgaaaccctgtctctactttaaaaaaaaaaaaagaaaatagctaggcgtggtagtgcacgcttgtaatcccagctacttgggtggttgggacgggaggatcacttgaacccaggagacagaggttgcagtgagctgagattgtgccactggcctccagcctgggcgacagagcaagactctgtctcaaaaaaaaaaaaaaagtggcacattctagtcacaagaaatgaaccatgaagtcccacccacactcgagtggggaatgaagtttcttttgaaaggaacagcatcaaagaatttcaggacatttaaaaaccactgcacatggctagctagatccttggaccatgtaggcttcagcctaactttataaaagttttataaaagttgaatttcctgaagttgactatttttttaaaaatatttcttcttaaaacagtagtgtagttgtgtttttctgagtagcacagtgggatagttctggaatgtcaaccctattagtttaaaatttcaaataaaagctgtggcagtgctcccaaaacaccattgctcatgcaaaaattgtgaagagttaaaattaacgagtagaattctaaagagaaaaaaactgctctttggtgcaagaaataaaaatgtagagaaaagaacaagtctgc

SEQ ID NO: 4931 - DNA, 1767 bp, Homo sapiens
  source 1..1767: mol_type = unassigned DNA
ccgacgcagcggtgttgcacctccctctccggctctgctgcccgggatttccccagaacctgcgccgcgcgagaaggagcctgggagcatccgcccacactgcccggacagtcggctcgactcggtgccctcggccccagccgggctccgctcctcgggcgcgcgaggggccgtggtggcggcggcgcccggcatgtttcatagtccgcggcggctctgctcggccctgctgcagagggacgcgcccggcctgcgccgcctgcccgccccagggctgcgccgcccgttgtccccgccggctgctgttcccaggcccgcatccccccggctgctggcggcggcctcggcggcctcgggcgccgcgaggtcgtgttcccgaacagtgtgttccatgggaaccggtacaagcagactctatagtgctctcgccaagacactgaacagcagcgctgcctcccagcacccagagtatttggtgtcacctgacccagagcatctggagcccattgatcctaaagagcttcttgaggaatgcagggccgtcctgcacacccgacctccccggttccagagggattttgtggatctgaggacagattgccctagtacccacccacctatcagggttatgcaatggaacatcctcgcccaagctcttggagaaggcaaagacaactttgtacagtgccctgttgaagcactcaaatgggaagaaaggaaatgtctcatcctggaagaaatcctggcctaccagcctgatatattgtgcctccaagaggtggaccactattttgacaccttccagccactcctcagtagactaggctatcaaggcacgtttttccccaaaccctggtcaccttgtctagatgtagaacacaacaatggaccagatggttgtgccttattttttcttcaaaaccgattcaagctagtcaacagtgccaatattaggctgacagccatgacattgaaaaccaaccaggtggccattgcacagaccctggagtgcaaggagtcaggccgacagttctgcatcgctgttacccatctaaaagcacgcactggctgggagcggtttcgatcagctcaaggctgtgacctccttcagaacctgcaaaacatcacccaaggagccaagattccccttattgtgtgtggggacttcaatgcagagccaacagaagaggtctacaaacactttgcttcctccagcctcaacctgaacagcgcctacaagctgctgagtgctgatgggcagtcagaacccccatacactacctggaagatccggacctcaggggagtgcaggcacaccctggattacatctggtattctaaacatgctctaaatgtaaggtcagctctcgatctgctcactgaagaacagattggacccaacaggttaccttccttcaattatccttcagaccacctgtctctagtgtgtgacttcagctttactgaggaatctgatggactttcataaatacttgcttttgtctttttaatcacaggagtctatttttttttttttttttttttttttgagacagagtctcgctctgttgcctaggctggagtacagtggcctgatctcggctcactgcaagatccgcctcccgggttcatggcattctcctgcctcagcctccagagcaactgggacaacaggcgcccgtcaccacgcccagctaattttttgtatttttagtagagacggggtttcaccgtgttagccaggatggtctcgatctcctgaccttg

SEQ ID NO: 4932 - DNA, 3505 bp, Homo sapiens
  source 1..3505: mol_type = unassigned DNA
agatggtggcccgtctggctgtggaacccaccgaaagctgagagtctctctctcagccgtaaaggtcggactcgctgaagcaatcaggcccggttctgaagagttttttccccgacgctcgttcggtggtttcttgtgaggacgcggcagcccgtggagtcggctgagggaaaagcgaggcaaggcaggcgggtcgtcaaagtcctacattttagctttcagtgctgaacttccttctcccttaaattattataaacttttgctgctgtttaataaacgtgaagatgtctcgcagtcctgatgcgaaggaagaccctgtggagtgccctctttgcatggagcccttggagatagatgatatcaactttttcccttgcacctgtggctaccagatttgccgattttgttggcatcgaattcgcactgatgaaaatgggctttgtcctgcatgtagaaagccatatccagaagacccagcagtttataaaccactctcccaggaagagctgcaaaggataaagaatgagaaaaaacagaaacaaaatgagagaaaacagaaaatatcagaaaatcgcaaacatttggctagtgtacgtgtcgtacaaaaaaacctcgtctttgttgtaggtttatctcagcgcctagcagacccagaggttttaaaacgaccagaatattttgggaagtttggtaaaatacataaagttgtcatcaataatagcacatcatatgcaggctcacagggtccaagtgccagtgcttatgtaacctatatccggtcagaagacgctctcagagccatacagtgtgtcaacaatgtggtagtagatggcagaacacttaaggcatctctaggtacaacaaaatactgcagttacttcttaaagaatatgcagtgtccaaaacctgactgcatgtatcttcatgaattgggggatgaggcggccagcttcacaaaagaggaaatgcaggcgggtaaacaccaagaatatgaacagaagctacttcaagaattatataaattaaatcccaattttcttcagctatctacgggttcagttgataaaaataagaacaaagtgacaccactgcagagccccattgacaaaccttcagattctctcagtatagggaacggtgataattcccagcagatatctaacagtgatacgccttcaccaccacctggtttgtcaaaatccaatccagtcatccccatcagttcatccaatcacagtgcacggtccccttttgaaggggcagtaacagagtcacagtcgttattctcagacaattttcgccatcccaaccctatcccaagtgggcttcctcctttccccagctccccacagacatccagtgactggcctacagcaccagaaccacagagcctcttcacatcagaaacaatcccagtatcatcctctacagactggcaagcagcttttggctttggttcttctaaacaaccagaggatgacttgggttttgatcccttcgatgtcactcgaaaagccttagcagacctgattgagaaggaactgtccgttcaagaccaaccttccctttcgcccacatctcttcagaactcctcttcacacactacaaccgccaaaggtccaggctctggattcctgcatcctgctgcagctacaaatgccaattctctcaatagtaccttttcagtcttgccccagaggttccctcaatttcagcagcaccgagcggtttataattcattcagttttccaggccaggcagcccgctatccttggatggcctttccacgcaatagcatcatgcacttgaaccacacagcaaaccccacctcaaatagtaatttcttggacttgaatctcccgccacagcacaacacaggtctgggagggatccctgtagcagacaacagcagttctgtagagagtttaaatatgaaggaatggcaggacgggctaagggcacttctacccaacattaacatcaactttggtggactgcccaattcttcttccccctccaacgccaaccacagtgcaccaacgtccaacactgccaccaccgacagcctgagttgggacagccctggcagctggacagacccagccatcatcacaggtattccagcgtcttcaggaaacagtttagactctcttcaagatgacaatcctccacactggctaaaatcccttcaggccctcacagagatggacggccccagcgctgctccatcacagacccaccacagcgcccccttcagcacacagatcccgctgcacagagccagttggaatccctaccctcctccttcaaacccttccagcttccactccccacccccaggctttcagacagccttcagaccccccagcaaaacccccacagatttactacagagttcaacactggaccgccattaggcaaagaggagcaaccattagaaaatgcaggatttgtcccactctgttttctccctctcagcccaccacccacagctcccttctcatctcttatgttctgaagaatccagtacctgatcaattttttttctccctaaccccagatgcaatgcgatcacagggtcattaccatctctttattaattgtaaaaatttttgttgatccagcatttgagtgacactgttgaatgtttctaaaaatgcctttttaaggagagaaaaaaaaatcaaagggcagtctcaatacttagaaaattattgtttgtctgttgcgcataataatgacataatctgcttagcagaaaatgacgattaatctataggaaagctcaagtaaatgcattatcaactgcagaagtttgaaaaccaggttcatttacgtgagattgctaaatgcatgggggaaagcagtggtcctagcatccatcttgtattcagcttatcattattgcagggaaaatgcttttaatttaaattaatttttaattcttttggcaagttgatggcaaggacttgattgtgtcattaagcaaaagaatgtattggaagttgatggaaagacaaattcatctgtagtagtaactggccgattgctaaagagttcataaggaggtgagaagtaatttttttaaaggagaaaaattttttggctttagatttaaagtaaattgaaatgttttaaagaaaaaagtattcacagatttaatacctattaataatataagagctgaaatgtaagtcatttcttcagtccttctcctctgtcggaatcttttttgttttaccataaattcacctgacgagggcactctgagatagcactgctctggggccatctgatcaccatcgggagcaaatctctgacctccttgcctgcagcttttacttaaccctgtagtttctggacgtttgtgcagtattgaaaagacaggagaaaagaaaacagaaacctggttataacctgacgctaaaactaaaaacaaggaaatgtacctctttcttcagaattaaaactaaaatcttaaataaaacagaaaacttgatggtga

SEQ ID NO: 4933 - DNA, 4098 bp, Homo sapiens
  source 1..4098: mol_type = unassigned DNA
agctttaagaaagatgtgccaccttctattaatactacaaatatagatacgttgcttgtggccacagatcaaactgagagaattgtggagcccccagaaaatatccaggagaaaattgcttttattttcaataatctctcacagtcaaatatgacacaaaaggttgaagagctaaaggaaacggtgaaagaagaatttatgccttgggtttcacagtatctggttatgaagagagtcagtattgagccaaactttcatagcctgtattcaaacttccttgacacgctgaagaatcctgaatttaacaagatggttctgaatgagacctacagaaacattaaagacttggatgtgaaatcattgctgctagaggcttatgttaaaggacaacaagaattgctctatgtagtgccctttgttgccaaagtcttagaatctagcattcgtagtgtggtttttaggccaccaaacccttggacaatggcaattatgaatgtattagctgagctacatcaggagcatgacttaaagttaaacttgaagtttgaaatcgaggttctctgcaagaaccttgcattagacatcaatgagctaaaacctggaaacctcctaaaggataaagatcgcctgaagaatttagatgagcaactctctgctccaaagaaagatgtcaagcagccagaagaactccctcccatcacaaccacaacaacttctactacaccagctaccaacaccacttgtacagccacggttccaccacagccacagtacagctaccacgacatcaatgtctattcccttgcgggcttggcaccacacattactctgaatccaacaattcccttgtttcaggcccatccacagttgaagcagtgtgtgcgtcaggcaattgaacgggctgtccaggagctggtccatcctgtggtggatcgatcaattaagattgccatgactacttgtgagcaaatagtcaggaaggattttgccctggattcggaggaatctcgaatgcgaatagcagctcatcacatgatgcgtaacttgacagctggaatggctatgattacatgcagggaacctttgctcatgagcatatctaccaacttaaaaaacagttttgcctcagcccttcgtactgcttccccacaacaaagagaaatgatggatcaggcagctgctcaattagctcaggacaattgtgagttggcttgctgttttattcagaagactgcagtagaaaaagcaggccctgagatggacaagagattagcaactgaatttgagctgagaaaacatgctaggcaagaaggacgcagatactgtgatcctgttgttttaacatatcaagctgaacggatgccagagcaaatcaggctgaaagttggtggtgtggacccaaagcagttggctgtttacgaagagtttgcacgcaatgttcctggcttcttacctacaaatgacttaagtcagcccacgggatttttagcccagcccatgaagcaagcttgggcaacagatgatgtagctcagatttatgataagtgtattacagaactggagcaacatctacatgccatcccaccaactttggccatgaaccctcaagctcaggctcttcgaagtctcttggaggttgtagttttatctcgaaactctcgggatgccatagctgctcttggattgctccaaaaggctgtagagggcttactagatgccacaagtggtgctgatgctgaccttctgctgcgctacagggaatgccacctcttggtcctaaaagctctgcaggatggccgggcatatgggtctccatggtgcaacaaacagatcacaaggtgcctaattgaatgtcgagatgaatataaatataatgtggaggctgtggagctgctaattcgcaatcatttggttaatatgcagcagtatgatcttcacctagcgcagtcaatggagaatggcttaaactacatggctgtggcatttgctatgcagttagtaaaaatcctgctggtggatgaaaggagtgttgctcatgttactgaggcagatctgttccacaccattgaaaccctcatgaggattaatgctcattccagaggcaatgctccagaaggattgccccagctgatggaagtagtgcgatccaactatgaagcaatgattgatcgtgctcatggaggcccaaactttatgatgcattctgggatctctcaagcctcagagtatgatgaccctccaggcctgagggagaaggcagagtatcttctgagggaatgggtgaatctctaccattcagcagcagctggccgcgacagtaccaaagctttctctgcatttgttggacagatgcaccagcaaggaatactgaagaccgatgatctcataacaaggttctttcgtctgtgtactgaaatgtgtgttgaaatcagttaccgtgctcaggctgagcagcagcacaatcctgctgccaatcccaccatgatccgagccaagtgctatcacaacctggatgcctttgttcgactcattgcactgctcgtgaaacactcaggggaggccaccaacactgtcacaaagattaatctgctgaacaaggtccttggtatagtagtgggagttctccttcaggatcatgatgttcgtcagagtgaatttcagcaacttccctaccatcgaatttttatcatgcttctcttggaactcaatgcacctgagcatgtgttggaaaccattaatttccagacacttacagctttctgcaatacattccacatcttgaggcctaccaaagctcctggctttgtatatgcctggcttgaactgatttcccatcggatatttattgcaagaatgctggcacatacgccacagcagaaggggtggcctatgtatgcacagctactgattgatttattcaaatatttagcgcctttccttagaaatgtggaactcaccaaacctatgcaaatcctctacaagggcactttaagagtgctgctggttcttttgcatgatttcccagagttcctttgtgattaccattatgggttctgtgatgtgatcccacctaattgtatccagttaagaaatttgatcctgagtgcctttccaagaaacatgaggctccccgacccattcactcctaatctaaaggtggacatgttgagtgaaattaacattgctccccggattctcaccaatttcactggagtaatgccacctcagttcaaaaaggatttggattcctatcttaaaactcgatcaccagtcactttcctgtctgatctgcgcagcaacctacaggtatccaatgaacctgggaatcgctacaacctccagctcatcaatgcactggtgctctatgtcgggactcaggccattgcgcacatccacaacaagggcagcacaccttcaatgagcaccatcactcactcagcacacatggatatcttccagaatttggctgtggacttggacactgagggtcgctatctctttttgaatgcaattgcaaatcagctccggtacccaaatagccacactcactacttcagttgcaccatgctgtacctttttgcagaggccaatacggaagccatccaagaacagatcacaagagttctcttggaacggttgattgtaaataggccacatccttggggtcttcttattaccttcattgagctgattaaaaacccagcgtttaagttctggaaccatgaatttgtacactgtgccccagaaatcgaaaagttattccagtcggtcgcacagtgctgcatgggacagaagcaggcccagcaagtaatggaagggacaggtgccagttagacgaaactgcatctctgttgtacgtgtcagtctagaggtctcactgcaccgagttcataaactgactgaagaatcctttcagctcttcctgactttcccagccctttggtttgtgggtatctgccccaactactgttgggatcagcctcctgtcttatgtgggcacgttccaaagtttaaatgcatttttttgactcttggccaaaatttagaagatgctgtgaatatcattttgaacttgtgtaaatacatgaaagagaaaac

SEQ ID NO: 4934 - DNA, 8429 bp, Homo sapiens
  source 1..8429: mol_type = unassigned DNA
gacctccggcgccattttgtagagaaacaagcggagttaaccgaagagggggtcgaggagagccggagtcggggacccaggagtttcctgtgtccagcgctgccggagccgcctgaggtgccatgtttcagaacagagtaagacccctggtaaagaagaactgaagatattatacagataccagatatagcctaattacaaagaaagcattaacctgcctctgaggtgactaaaggggaataatggtgattttgcgccgggctcggccgcctgcttccgccccaaccagcaatgaatcttgactcgctctcgctggccttgtctcaaatcagctacctggtggacaatttaaccaagaaaaattaccgagccagccagcaggaaatacagcatattgtgaatcggcacggtcctgaggcagacaggcatttattacgctgcctattttcgcatgtggatttcagtggcgatggtaaaagcagtggcaaagatttccatcagactcagtttctgattcaggagtgtgcgttgctgattacaaagccaaattttatctcgacgctgtcctatgccattgataatccattgcactatcagaagagtttaaagcctgcaccccacttatttgcccagctgagtaaagtgctcaaattaagcaaagtacaagaggtaatttttggccttgccctgttgaattcttccagctcagatcttagaggtttcgctgcccagtttatcaaacagaagcttccagatcttctgcgttcttacattgacgcagacgtcagtggaaatcaagaaggtggcttccaagatatagcaatagaggtcctacacctcctcctctcccatctcctctttgggcagaagggagcctttggagttggacaagaacagatagacgcttttcttaagacgctgcgcagagattttccccaagaacgctgtcccgtggtgctcgcaccacttttataccctgaaaaacgggacattctaatggacaggatcctgcctgattccggaggggtagctaaaaccatgatggagagctctttggctgatttcatgcaagaagtaggctatggcttttgtgcaagtattgaagaatgtcgcaatataatcgtgcagtttggtgttcgggaggtcacagctgcccaggttgcaagggttttgggaatgatggctcgaactcattcaggattaacagatggcattccattacagagtatttctgctccgggcagtgggatctggagtgatgggaaagataaaagtgatggagcacaggcacacacatggaatgtagaagtcttgattgacgttcttaaagaactgaatccaagtttgaatttcaaggaagtaacttatgaactggaccatcctggatttcaaattcgtgacagtaaaggacttcataatgtggtttatggcattcagaggggtttgggtatggaagtgttcccagtagacctcatatatagaccttggaaacatgctgaaggccagctctccttcattcaacattcccttataaatccagagatcttctgttttgctgactatccctgtcatactgttgccactgatattctgaaagcaccaccagaggatgacaatcgagaaattgccacatggaagagcttggatttgattgaatctctgctgaggcttgcagaggttgggcagtatgagcaagtcaaacagctcttcagcttccctatcaaacactgtccagacatgctggtattggccttactacaaattaacacctcttggcataccttgcgccatgaacttatctccactctgatgccaattttccttggaaaccatcctaactcagctattattttgcactatgcatggcatgggcagggacagtctccctcaattcgccaacttatcatgcatgcaatggcagaatggtacatgagaggggagcagtatgatcaggccaaattgtctcgaatacttgatgtggcccaggacttgaaggccttgtcaatgctgctaaatggtactccatttgcctttgttattgaccttgctgcacttgcttcacgtcgtgaatacctcaaacttgataagtggctcacagataaaattcgagagcatggggagccttttatccaggcgtgtatgacttttttaaagagacggtgtccttctattttgggcggacttgccccagaaaaagaccagcccaaaagtgctcaacttcctccagaaactttggcgacaatgttggcctgtctgcaagcttgtgcagggagtgtttctcaggagctatcagaaactatcctcaccatggtagccaattgcagtaatgttatgaataaggccagacaaccaccacctggagttatgccaaaaggacgtcctcctagtgctagcagcttagatgccatttctcctgttcagattgaccctcttgctggaatgacatctcttagtataggtggttcagctgcccctcacacccagagtatgcagggttttcctccaaatttgggttctgcattcagtacccctcagtcaccagcaaaagcatttccacccctttcaacccccaatcagaccactgcattcagtggtattggaggactttcatcacagcttccagtaggtggtcttggcacaggcagcctgactggtataggaactggtgctcttggactccctgcagtgaataacgacccttttgtacagaggaaactgggcacctctggactgaatcagcctacattccagcagagtaagatgaaaccttcggacttgtctcaggtgtggccagaggcaaaccagcactttagtaaagagatagatgatgaagcaaacagctatttccagcgaatatataatcatccaccacatccaaccatgtctgttgatgaggtattagaaatgctgcagagatttaaagactctactataaagagggaacgagaagtatttaactgtatgctaaggaacttgtttgaagaatatcgtttttttccccagtatcctgataaagagttacatataacagcctgcctatttggtggtataattgagaaaggactggtcacttacatggcactaggtctggctctacgatatgttcttgaagccttacgcaagccttttggatccaaaatgtattatttcgggattgctgcactagatagatttaaaaacagattgaaggactatccccagtattgtcagcatttggcttctatcagtcactttatgcaatttccacatcatttacaggagtatattgagtatggacagcagtctagagatcctcctgtgaaaatgcaaggctctatcacaacccctggaagtattgcactggctcaggcccaggctcaggcccaggttccagcaaaagctcctcttgctggtcaagttagcactatggtaaccacctcaacaactaccactgttgctaaaacggttacggtcaccaggccaactggagtcagctttaagaaagatgtgccaccttctattaatactacaaatatagatacgttgcttgtggccacagatcaaactgagagaattgtggagcccccagaaaatatccaggagaaaattgcttttattttcaataatctctcacagtcaaatatgacacaaaaggttgaagagctaaaggaaacggtgaaagaagaatttatgccttgggtttcacagtatctggttatgaagagagtcagtattgagccaaactttcatagcctgtattcaaacttccttgacacgctgaagaatcctgaatttaacaagatggttctgaatgagacctacagaaacattaaagtgctcctgacctctgataaagctgcagccaatttctcagatcgttctttgctgaagaacttgggacattggctaggaatgatcacattagctaaaaacaaacccatcttacacactgacttggatgtgaaatcattgctgctagaggcttatgttaaaggacaacaagaattgctctatgtagtgccctttgttgccaaagtcttagaatctagcattcgtagtgtggtttttaggccaccaaacccttggacaatggcaattatgaatgtattagctgagctacatcaggagcatgacttaaagttaaacttgaagtttgaaatcgaggttctctgcaagaaccttgcattagacatcaatgagctaaaacctggaaacctcctaaaggataaagatcgcctgaagaatttagatgagcaactctctgctccaaagaaagatgtcaagcagccagaagaactccctcccatcacaaccacaacaacttctactacaccagctaccaacaccacttgtacagccacggttccaccacagccacagtacagctaccacgacatcaatgtctattcccttgcgggcttggcaccacacattactctgaatccaacaattcccttgtttcaggcccatccacagttgaagcagtgtgtgcgtcaggcaattgaacgggctgtccaggagctggtccatcctgtggtggatcgatcaattaagattgccatgactacttgtgagcaaatagtcaggaaggattttgccctggattcggaggaatctcgaatgcgaatagcagctcatcacatgatgcgtaacttgacagctggaatggctatgattacatgcagggaacctttgctcatgagcatatctaccaacttaaaaaacagttttgcctcagcccttcgtactgcttccccacaacaaagagaaatgatggatcaggcagctgctcaattagctcaggacaattgtgagttggcttgctgttttattcagaagactgcagtagaaaaagcaggccctgagatggacaagagattagcaactgaatttgagctgagaaaacatgctaggcaagaaggacgcagatactgtgatcctgttgttttaacatatcaagctgaacggatgccagagcaaatcaggctgaaagttggtggtgtggacccaaagcagttggctgtttacgaagagtttgcacgcaatgttcctggcttcttacctacaaatgacttaagtcagcccacgggatttttagcccagcccatgaagcaagcttgggcaacagatgatgtagctcagatttatgataagtgtattacagaactggagcaacatctacatgccatcccaccaactttggccatgaaccctcaagctcaggctcttcgaagtctcttggaggttgtagttttatctcgaaactctcgggatgccatagctgctcttggattgctccaaaaggctgtagagggcttactagatgccacaagtggtgctgatgctgaccttctgctgcgctacagggaatgccacctcttggtcctaaaagctctgcaggatggccgggcatatgggtctccatggtgcaacaaacagatcacaaggtgcctaattgaatgtcgagatgaatataaatataatgtggaggctgtggagctgctaattcgcaatcatttggttaatatgcagcagtatgatcttcacctagcgcagtcaatggagaatggcttaaactacatggctgtggcatttgctatgcagttagtaaaaatcctgctggtggatgaaaggagtgttgctcatgttactgaggcagatctgttccacaccattgaaaccctcatgaggattaatgctcattccagaggcaatgctccagaaggattgccccagctgatggaagtagtgcgatccaactatgaagcaatgattgatcgtgctcatggaggcccaaactttatgatgcattctgggatctctcaagcctcagagtatgatgaccctccaggcctgagggagaaggcagagtatcttctgagggaatgggtgaatctctaccattcagcagcagctggccgcgacagtaccaaagctttctctgcatttgttggacagatgcaccagcaaggaatactgaagaccgatgatctcataacaaggttctttcgtctgtgtactgaaatgtgtgttgaaatcagttaccgtgctcaggctgagcagcagcacaatcctgctgccaatcccaccatgatccgagccaagtgctatcacaacctggatgcctttgttcgactcattgcactgctcgtgaaacactcaggggaggccaccaacactgtcacaaagattaatctgctgaacaaggtccttggtatagtagtgggagttctccttcaggatcatgatgttcgtcagagtgaatttcagcaacttccctaccatcgaatttttatcatgcttctcttggaactcaatgcacctgagcatgtgttggaaaccattaatttccagacacttacagctttctgcaatacattccacatcttgaggcctaccaaagctcctggctttgtatatgcctggcttgaactgatttcccatcggatatttattgcaagaatgctggcacatacgccacagcagaaggggtggcctatgtatgcacagctactgattgatttattcaaatatttagcgcctttccttagaaatgtggaactcaccaaacctatgcaaatcctctacaagggcactttaagagtgctgctggttcttttgcatgatttcccagagttcctttgtgattaccattatgggttctgtgatgtgatcccacctaattgtatccagttaagaaatttgatcctgagtgcctttccaagaaacatgaggctccccgacccattcactcctaatctaaaggtggacatgttgagtgaaattaacattgctccccggattctcaccaatttcactggagtaatgccacctcagttcaaaaaggatttggattcctatcttaaaactcgatcaccagtcactttcctgtctgatctgcgcagcaacctacaggtatccaatgaacctgggaatcgctacaacctccagctcatcaatgcactggtgctctatgtcgggactcaggccattgcgcacatccacaacaagggcagcacaccttcaatgagcaccatcactcactcagcacacatggatatcttccagaatttggctgtggacttggacactgagggtcgctatctctttttgaatgcaattgcaaatcagctccggtacccaaatagccacactcactacttcagttgcaccatgctgtacctttttgcagaggccaatacggaagccatccaagaacagatcacaagagttctcttggaacggttgattgtaaataggccacatccttggggtcttcttattaccttcattgagctgattaaaaacccagcgtttaagttctggaaccatgaatttgtacactgtgccccagaaatcgaaaagttattccagtcggtcgcacagtgctgcatgggacagaagcaggcccagcaagtaatggaagggacaggtgccagttagacgaaactgcatctctgttgtacgtgtcagtctagaggtctcactgcaccgagttcataaactgactgaagaatcctttcagctcttcctgactttcccagccctttggtttgtgggtatctgccccaactactgttgggatcagcctcctgtcttatgtgggcacgttccaaagtttaaatgcatttttttgactcttggccaaaatttagaagatgctgtgaatatcattttgaacttgtgtaaatacatgaaagagaaaacctttgtctggaacttcttggctttgtgcaagctgtgtccaaggcaagtacataaactggtaccttgtaatgaagaggcagctgatgccatgcacttgtctgagggcatagctccatgtcttctgacattcctggtgtcccaaagaatagcaaaaagccagtttgaatattatgtaacttatttttttaatgtggacaggggaccttgaaaatcactaagttattaaaaatgtggatgtgctagaattggatatgtccaggaacatgggaagggctcactattggaatcccatgagtttccattttgtctctacccaaacgtattccaaagctgactgcatttgtaccatcttatttcttttggggattatacacctcagccgcctgagatgggggtcagctctttatataaagggaaaccagaccaggcctaaagcccacccctaccctcacccccccaatcctctcctgaaacttaaaaacagtgggaatataggaaagggaaccaaatctcattaattaattgttctcccccattaccccactgaatgaatggccatacaggctaagctgaataatgacaaagttgaaaggaccaatacagccccttttataaggattttgaatgttttgcaaatgtattggtccctgtgttgtattttgtagccttttcctgggcttcagctcccctacttcttgtatgtgtatgcatactgtagctaaccattaaagtcatgacacaca

SEQ ID NO: 4935 - DNA, 6743 bp, Homo sapiens
  source 1..6743: mol_type = unassigned DNA
gcgacctccggcgccattttgtagagaaacaagcggagttaaccgaagagggggtcgaggagagccggagtcggggacccaggagtttcctgtgtccagcgctgccggagccgcctgaggtgccatgtttcagaacagagtaagacccctggtaaagaagaactgaagatattatacagataccagatatagcctaattacaaagaaagcattaacctgcctctgaggtgactaaaggggaataatggtgattttgcgccgggctcggccgcctgcttccgccccaaccagcaatgaatcttgactcgctctcgctggccttgtctcaaatcagctacctggtggacaatttaaccaagaaaaattaccgagccagccagcaggaaatacagcatattgtgaatcggcacggtcctgaggcagacaggcatttattacgctgcctattttcgcatgtggatttcagtggcgatggtaaaagcagtggcaaagatttccatcagactcagtttctgattcaggagtgtgcgttgctgattacaaagccaaattttatctcgacgctgtcctatgccattgataatccattgcactatcagaagagtttaaagcctgcaccccacttatttgcccagctgagtaaagtgctcaaattaagcaaagtacaagaggtaatttttggccttgccctgttgaattcttccagctcagatcttagaggtttcgctgcccagtttatcaaacagaagcttccagatcttctgcgttcttacattgacgcagacgtcagtggaaatcaagaaggtggcttccaagatatagcaatagaggtcctacacctcctcctctcccatctcctctttgggcagaagggagcctttggagttggacaagaacagatagacgcttttcttaagacgctgcgcagagattttccccaagaacgctgtcccgtggtgctcgcaccacttttataccctgaaaaacgggacattctaatggacaggatcctgcctgattccggaggggtagctaaaaccatgatggagagctctttggctgatttcatgcaagaagtaggctatggcttttgtgcaagtattgaagaatgtcgcaatataatcgtgcagtttggtgttcgggaggtcacagctgcccaggttgcaagggttttgggaatgatggctcgaactcattcaggattaacagatggcattccattacagagtatttctgctccgggcagtgggatctggagtgatgggaaagataaaagtgatggagcacaggcacacacatggaatgtagaagtcttgattgacgttcttaaagaactgaatccaagtttgaatttcaaggaagtaacttatgaactggaccatcctggatttcaaattcgtgacagtaaaggacttcataatgtggtttatggcattcagaggggtttgggtatggaagtgttcccagtagacctcatatatagaccttggaaacatgctgaaggccagctctccttcattcaacattcccttataaatccagagatcttctgttttgctgactatccctgtcatactgttgccactgatattctgaaagcaccaccagaggatgacaatcgagaaattgccacatggaagagcttggatttgattgaatctctgctgaggcttgcagaggttgggcagtatgagcaagtcaaacagctcttcagcttccctatcaaacactgtccagacatgctggtattggccttactacaaattaacacctcttggcataccttgcgccatgaacttatctccactctgatgccaattttccttggaaaccatcctaactcagctattattttgcactatgcatggcatgggcagggacagtctccctcaattcgccaacttatcatgcatgcaatggcagaatggtacatgagaggggagcagtatgatcaggccaaattgtctcgaatacttgatgtggcccaggacttgaaggccttgtcaatgctgctaaatggtactccatttgcctttgttattgaccttgctgcacttgcttcacgtcgtgaatacctcaaacttgataagtggctcacagataaaattcgagagcatggggagccttttatccaggcgtgtatgacttttttaaagagacggtgtccttctattttgggcggacttgccccagaaaaagaccagcccaaaagtgctcaacttcctccagaaactttggcgacaatgttggcctgtctgcaagcttgtgcagggagtgtttctcaggagctatcagaaactatcctcaccatggtagccaattgcagtaatgttatgaataaggccagacaaccaccacctggagttatgccaaaaggacgtcctcctagtgctagcagcttagatgccatttctcctgttcagattgaccctcttgctggaatgacatctcttagtataggtggttcagctgcccctcacacccagagtatgcagggttttcctccaaatttgggttctgcattcagtacccctcagtcaccagcaaaagcatttccacccctttcaacccccaatcagaccactgcattcagtggtattggaggactttcatcacagcttccagtaggtggtcttggcacaggcagcctgactggtataggaactggtgctcttggactccctgcagtgaataacgacccttttgtacagaggaaactgggcacctctggactgaatcagcctacattccagcagacggacttgtctcaggtgtggccagaggcaaaccagcactttagtaaagagatagatgatgaagcaaacagctatttccagcgaatatataatcatccaccacatccaaccatgtctgttgatgaggtattagaaatgctgcagagatttaaagactctactataaagagggaacgagaagtatttaactgtatgctaaggaacttgtttgaagaatatcgtttttttccccagtatcctgataaagagttacatataacagcctgcctatttggtggtataattgagaaaggactggtcacttacatggcactaggtctggctctacgatatgttcttgaagccttacgcaagccttttggatccaaaatgtattatttcgggattgctgcactagatagatttaaaaacagattgaaggactatccccagtattgtcagcatttggcttctatcagtcactttatgcaatttccacatcatttacaggagtatattgagtatggacagcagtctagagatcctcctgtgaaaatgcaaggctctatcacaacccctggaagtattgcactggctcaggcccaggctcaggcccaggttccagcaaaagctcctcttgctggtcaagttagcactatggtaaccacctcaacaactaccactgttgctaaaacggttacggtcaccaggccaactggagtcagctttaagaaagatgtgccaccttctattaatactacaaatatagatacgttgcttgtggccacagatcaaactgagagaattgtggagcccccagaaaatatccaggagaaaattgcttttattttcaataatctctcacagtcaaatatgacacaaaaggttgaagagctaaaggaaacggtgaaagaagaatttatgccttgggtttcacagtatctggttatgaagagagtcagtattgagccaaactttcatagcctgtattcaaacttccttgacacgctgaagaatcctgaatttaacaagatggttctgaatgagacctacagaaacattaaagtgctcctgacctctgataaagctgcagccaatttctcagatcgttctttgctgaagaacttgggacattggctaggaatgatcacattagctaaaaacaaacccatcttacacactgacttggatgtgaaatcattgctgctagaggcttatgttaaaggacaacaagaattgctctatgtagtgccctttgttgccaaagtcttagaatctagcattcgtagtgtggtttttaggccaccaaacccttggacaatggcaattatgaatgtattagctgagctacatcaggagcatgacttaaagttaaacttgaagtttgaaatcgaggttctctgcaagaaccttgcattagacatcaatgagctaaaacctggaaacctcctaaaggataaagatcgcctgaagaatttagatgagcaactctctgctccaaagaaagatgtcaagcagccagaagaactccctcccatcacaaccacaacaacttctactacaccagctaccaacaccacttgtacagccacggttccaccacagccacagtacagctaccacgacatcaatgtctattcccttgcgggcttggcaccacacattactctgaatccaacaattcccttgtttcaggcccatccacagttgaagcagtgtgtgcgtcaggcaattgaacgggctgtccaggagctggtccatcctgtggtggatcgatcaattaagattgccatgactacttgtgagcaaatagtcaggaaggattttgccctggattcggaggaatctcgaatgcgaatagcagctcatcacatgatgcgtaacttgacagctggaatggctatgattacatgcagggaacctttgctcatgagcatatctaccaacttaaaaaacagttttgcctcagcccttcgtactgcttccccacaacaaagagaaatgatggatcaggcagctgctcaattagctcaggacaattgtgagttggcttgctgttttattcagaagactgcagtagaaaaagcaggccctgagatggacaagagattagcaactgaatttgagctgagaaaacatgctaggcaagaaggacgcagatactgtgatcctgttgttttaacatatcaagctgaacggatgccagagcaaatcaggctgaaagttggtggtgtggacccaaagcagttggctgtttacgaagagtttgcacgcaatgttcctggcttcttacctacaaatgacttaagtcagcccacgggatttttagcccagcccatgaagcaagcttgggcaacagatgatgtagctcagatttatgataagtgtattacagaactggagcaacatctacatgccatcccaccaactttggccatgaaccctcaagctcaggctcttcgaagtctcttggaggttgtagttttatctcgaaactctcgggatgccatagctgctcttggattgctccaaaaggctgtagagggcttactagatgccacaagtggtgctgatgctgaccttctgctgcgctacagggaatgccacctcttggtcctaaaagctctgcaggatggccgggcatatgggtctccatggtgcaacaaacagatcacaaggtgcctaattgaatgtcgagatgaatataaatataatgtggaggctgtggagctgctaattcgcaatcatttggttaatatgcagcagtatgatcttcacctagcgcagtcaatggagaatggcttaaactacatggctgtggcatttgctatgcagttagtaaaaatcctgctggtggatgaaaggagtgttgctcatgttactgaggcagatctgttccacaccattgaaaccctcatgaggattaatgctcattccagaggcaatgctccagaaggattgccccagctgatggaagtagtgcgatccaactatgaagcaatgattgatcgtgctcatggaggcccaaactttatgatgcattctgggatctctcaagcctcagagtatgatgaccctccaggcctgagggagaaggcagagtatcttctgagggaatgggtgaatctctaccattcagcagcagctggccgcgacagtaccaaagctttctctgcatttgttggacagatgcaccagcaaggaatactgaagaccgatgatctcataacaaggttctttcgtctgtgtactgaaatgtgtgttgaaatcagttaccgtgctcaggctgagcagcagcacaatcctgctgccaatcccaccatgatccgagccaagtgctatcacaacctggatgcctttgttcgactcattgcactgctcgtgaaacactcaggggaggccaccaacactgtcacaaagattaatctgctgaacaaggtccttggtatagtagtgggagttctccttcaggatcatgatgttcgtcagagtgaatttcagcaacttccctaccatcgaatttttatcatgcttctcttggaactcaatgcacctgagcatgtgttggaaaccattaatttccagacacttacagctttctgcaatacattccacatcttgaggcctaccaaagctcctggctttgtatatgcctggcttgaactgatttcccatcggatatttattgcaagaatgctggcacatacgccacagcagaaggggtggcctatgtatgcacagctactgattgatttattcaaatatttagcgcctttccttagaaatgtggaactcaccaaacctatgcaaatcctctacaagggcactttaagagtgctgctggttcttttgcatgatttcccagagttcctttgtgattaccattatgggttctgtgatgtgatcccacctaattgtatccagttaagaaatttgatcctgagtgcctttccaagaaacatgaggctccccgacccattcactcctaatctaaaggaaataatgtta

SEQ ID NO: 4936 - DNA, 6223 bp, Homo sapiens
  source 1..6223: mol_type = unassigned DNA
gcgacctccggcgccattttgtagagaaacaagcggagttaaccgaagagggggtcgaggagagccggagtcggggacccaggagtttcctgtgtccagcgctgccggagccgcctgaggtgccatgtttcagaacagagtaagacccctggtaaagaagaactgaagatattatacagataccagatatagcctaattacaaagaaagcattaacctgcctctgaggtgactaaaggggaataatggtgattttgcgccgggctcggccgcctgcttccgccccaaccagcaatgaatcttgactcgctctcgctggccttgtctcaaatcagctacctggtggacaatttaaccaagaaaaattaccgagccagccagcaggaaatacagcatattgtgaatcggcacggtcctgaggcagacaggcatttattacgctgcctattttcgcatgtggatttcagtggcgatggtaaaagcagtggcaaagatttccatcagactcagtttctgattcaggagtgtgcgttgctgattacaaagccaaattttatctcgacgctgtcctatgccattgataatccattgcactatcagaagagtttaaagcctgcaccccacttatttgcccagctgagtaaagtgctcaaattaagcaaagtacaagaggtaatttttggccttgccctgttgaattcttccagctcagatcttagaggtttcgctgcccagtttatcaaacagaagcttccagatcttctgcgttcttacattgacgcagacgtcagtggaaatcaagaaggtggcttccaagatatagcaatagaggtcctacacctcctcctctcccatctcctctttgggcagaagggagcctttggagttggacaagaacagatagacgcttttcttaagacgctgcgcagagattttccccaagaacgctgtcccgtggtgctcgcaccacttttataccctgaaaaacgggacattctaatggacaggatcctgcctgattccggaggggtagctaaaaccatgatggagagctctttggctgatttcatgcaagaagtaggctatggcttttgtgcaagtattgaagaatgtcgcaatataatcgtgcagtttggtgttcgggaggtcacagctgcccaggttgcaagggttttgggaatgatggctcgaactcattcaggattaacagatggcattccattacagagtatttctgctccgggcagtgggatctggagtgatgggaaagataaaagtgatggagcacaggcacacacatggaatgtagaagtcttgattgacgttcttaaagaactgaatccaagtttgaatttcaaggaagtaacttatgaactggaccatcctggatttcaaattcgtgacagtaaaggacttcataatgtggtttatggcattcagaggggtttgggtatggaagtgttcccagtagacctcatatatagaccttggaaacatgctgaaggccagctctccttcattcaacattcccttataaatccagagatcttctgttttgctgactatccctgtcatactgttgccactgatattctgaaagcaccaccagaggatgacaatcgagaaattgccacatggaagagcttggatttgattgaatctctgctgaggcttgcagaggttgggcagtatgagcaagtcaaacagctcttcagcttccctatcaaacactgtccagacatgctggtattggccttactacaaattaacacctcttggcataccttgcgccatgaacttatctccactctgatgccaattttccttggaaaccatcctaactcagctattattttgcactatgcatggcatgggcagggacagtctccctcaattcgccaacttatcatgcatgcaatggcagaatggtacatgagaggggagcagtatgatcaggccaaattgtctcgaatacttgatgtggcccaggacttgaaggccttgtcaatgctgctaaatggtactccatttgcctttgttattgaccttgctgcacttgcttcacgtcgtgaatacctcaaacttgataagtggctcacagataaaattcgagagcatggggagccttttatccaggcgtgtatgacttttttaaagagacggtgtccttctattttgggcggacttgccccagaaaaagaccagcccaaaagtgctcaacttcctccagaaactttggcgacaatgttggcctgtctgcaagcttgtgcagggagtgtttctcaggagctatcagaaactatcctcaccatggtagccaattgcagtaatgttatgaataaggccagacaaccaccacctggagttatgccaaaaggacgtcctcctagtgctagcagcttagatgccatttctcctgttcagattgaccctcttgctggaatgacatctcttagtataggtggttcagctgcccctcacacccagagtatgcagggttttcctccaaatttgggttctgcattcagtacccctcagtcaccagcaaaagcatttccacccctttcaacccccaatcagaccactgcattcagtggtattggaggactttcatcacagcttccagtaggtggtcttggcacaggcagcctgactggtataggaactggtgctcttggactccctgcagtgaataacgacccttttgtacagaggaaactgggcacctctggactgaatcagcctacattccagcagagtaagatgaaaccttcggacttgtctcaggtgtggccagaggcaaaccagcactttagtaaagagatagatgatgaagcaaacagctatttccagcgaatatataatcatccaccacatccaaccatgtctgttgatgaggtattagaaatgctgcagagatttaaagactctactataaagagggaacgagaagtatttaactgtatgctaaggaacttgtttgaagaatatcgtttttttccccagtatcctgataaagagttacatataacagcctgcctatttggtggtataattgagaaaggactggtcacttacatggcactaggtctggctctacgatatgttcttgaagccttacgcaagccttttggatccaaaatgtattatttcgggattgctgcactagatagatttaaaaacagattgaaggactatccccagtattgtcagcatttggcttctatcagtcactttatgcaatttccacatcatttacaggagtatattgagtatggacagcagtctagagatcctcctgtgaaaatgcaaggctctatcacaacccctggaagtattgcactggctcaggcccaggctcaggcccaggttccagcaaaagctcctcttgctggtcaagttagcactatggtaaccacctcaacaactaccactgttgctaaaacggttacggtcaccaggccaactggagtcagctttaagaaagatgtgccaccttctattaatactacaaatatagatacgttgcttgtggccacagatcaaactgagagaattgtggagcccccagaaaatatccaggagaaaattgcttttattttcaataatctctcacagtcaaatatgacacaaaaggttgaagagctaaaggaaacggtgaaagaagaatttatgccttgggtttcacagtatctggttatgaagagagtcagtattgagccaaactttcatagcctgtattcaaacttccttgacacgctgaagaatctcataacaaggttctttcgtctgtgtactgaaatgtgtgttgaaatcagttaccgtgctcaggctgagcagcagcacaatcctgctgccaatcccaccatgatccgagccaagtgctatcacaacctggatgcctttgttcgactcattgcactgctcgtgaaacactcaggggaggccaccaacactgtcacaaagattaatctgctgaacaaggtccttggtatagtagtgggagttctccttcaggatcatgatgttcgtcagagtgaatttcagcaacttccctaccatcgaatttttatcatgcttctcttggaactcaatgcacctgagcatgtgttggaaaccattaatttccagacacttacagctttctgcaatacattccacatcttgaggcctaccaaagctcctggctttgtatatgcctggcttgaactgatttcccatcggatatttattgcaagaatgctggcacatacgccacagcagaaggggtggcctatgtatgcacagctactgattgatttattcaaatatttagcgcctttccttagaaatgtggaactcaccaaacctatgcaaatcctctacaagggcactttaagagtgctgctggttcttttgcatgatttcccagagttcctttgtgattaccattatgggttctgtgatgtgatcccacctaattgtatccagttaagaaatttgatcctgagtgcctttccaagaaacatgaggctccccgacccattcactcctaatctaaaggtggacatgttgagtgaaattaacattgctccccggattctcaccaatttcactggagtaatgccacctcagttcaaaaaggatttggattcctatcttaaaactcgatcaccagtcactttcctgtctgatctgcgcagcaacctacaggtatccaatgaacctgggaatcgctacaacctccagctcatcaatgcactggtgctctatgtcgggactcaggccattgcgcacatccacaacaagggcagcacaccttcaatgagcaccatcactcactcagcacacatggatatcttccagaatttggctgtggacttggacactgagggtcgctatctctttttgaatgcaattgcaaatcagctccggtacccaaatagccacactcactacttcagttgcaccatgctgtacctttttgcagaggccaatacggaagccatccaagaacagatcacaagagttctcttggaacggttgattgtaaataggccacatccttggggtcttcttattaccttcattgagctgattaaaaacccagcgtttaagttctggaaccatgaatttgtacactgtgccccagaaatcgaaaagttattccagtcggtcgcacagtgctgcatgggacagaagcaggcccagcaagtaatggaagggacaggtgccagttagacgaaactgcatctctgttgtacgtgtcagtctagaggtctcactgcaccgagttcataaactgactgaagaatcctttcagctcttcctgactttcccagccctttggtttgtgggtatctgccccaactactgttgggatcagcctcctgtcttatgtgggcacgttccaaagtttaaatgcatttttttgactcttggccaaaatttagaagatgctgtgaatatcattttgaacttgtgtaaatacatgaaagagaaaacctttgtctggaacttcttggctttgtgcaagctgtgtccaaggcaagtacataaactggtaccttgtaatgaagaggcagctgatgccatgcacttgtctgagggcatagctccatgtcttctgacattcctggtgtcccaaagaatagcaaaaagccagtttgaatattatgtaacttatttttttaatgtggacaggggaccttgaaaatcactaagttattaaaaatgtggatgtgctagaattggatatgtccaggaacatgggaagggctcactattggaatcccatgagtttccattttgtctctacccaaacgtattccaaagctgactgcatttgtaccatcttatttcttttggggattatacacctcagccgcctgagatgggggtcagctctttatataaagggaaaccagaccaggcctaaagcccacccctaccctcacccccccaatcctctcctgaaacttaaaaacagtgggaatataggaaagggaaccaaatctcattaattaattgttctcccccattaccccactgaatgaatggccatacaggctaagctgaataatgacaaagttgaaaggaccaatacagccccttttataaggattttgaatgttttgcaaatgtattggtccctgtgttgtattttgtagccttttcctgggcttcagctcccctacttcttgtatgtgtatgcatactgtagctaaccattaaagtcatgacac

SEQ ID NO: 4937 - DNA, 4997 bp, Homo sapiens
  source 1..4997: mol_type = unassigned DNA
gcgacctccggcgccattttgtagagaaacaagcggagttaaccgaagagggggtcgaggagagccggagtcggggacccaggagtttcctgtgtccagcgctgccggagccgcctgaggtgccatgtttcagaacagagtaagacccctggtaaagaagaactgaagatattatacagataccagatatagcctaattacaaagaaagcattaacctgcctctgaggtgactaaaggggaataatggtgattttgcgccgggctcggccgcctgcttccgccccaaccagcaatgaatcttgactcgctctcgctggccttgtctcaaatcagctacctggtggacaatttaaccaagaaaaattaccgagccagccagcaggaaatacagcatattgtgaatcggcacggtcctgaggcagacaggcatttattacgctgcctattttcgcatgtggatttcagtggcgatggtaaaagcagtggcaaagatttccatcagactcagtttctgattcaggagtgtgcgttgctgattacaaagccaaattttatctcgacgctgtcctatgccattgataatccattgcactatcagaagagtttaaagcctgcaccccacttatttgcccagctgagtaaagtgctcaaattaagcaaagtacaagaggtaatttttggccttgccctgttgaattcttccagctcagatcttagaggtttcgctgcccagtttatcaaacagaagcttccagatcttctgcgttcttacattgacgcagacgtcagtggaaatcaagaaggtggcttccaagatatagcaatagaggtcctacacctcctcctctcccatctcctctttgggcagaagggagcctttggagttggacaagaacagatagacgcttttcttaagacgctgcgcagagattttccccaagaacgctgtcccgtggtgctcgcaccacttttataccctgaaaaacgggacattctaatggacaggatcctgcctgattccggaggggtagctaaaaccatgatggagagctctttggctgatttcatgcaagaagtaggctatggcttttgtgcaagtattgaagaatgtcgcaatataatcgtgcagtttggtgttcgggaggtcacagctgcccaggttgcaagggttttgggaatgatggctcgaactcattcaggattaacagatggcattccattacagagtatttctgctccgggcagtgggatctggagtgatgggaaagataaaagtgatggagcacaggcacacacatggaatgtagaagtcttgattgacgttcttaaagaactgaatccaagtttgaatttcaaggaagtaacttatgaactggaccatcctggatttcaaattcgtgacagtaaaggacttcataatgtggtttatggcattcagaggggtttgggtatggaagtgttcccagtagacctcatatatagaccttggaaacatgctgaaggccagctctccttcattcaacattcccttataaatccagagatcttctgttttgctgactatccctgtcatactgttgccactgatattctgaaagcaccaccagaggatgacaatcgagaaattgccacatggaagagcttggatttgattgaatctctgctgaggcttgcagaggttgggcagtatgagcaagtcaaacagctcttcagcttccctatcaaacactgtccagacatgctggtattggccttactacaaattaacacctcttggcataccttgcgccatgaacttatctccactctgatgccaattttccttggaaaccatcctaactcagctattattttgcactatgcatggcatgggcagggacagtctccctcaattcgccaacttatcatgcatgcaatggcagaatggtacatgagaggggagcagtatgatcaggccaaattgtctcgaatacttgatgtggcccaggacttgaaggccttgtcaatgctgctaaatggtactccatttgcctttgttattgaccttgctgcacttgcttcacgtcgtgaatacctcaaacttgataagtggctcacagataaaattcgagagcatggggagccttttatccaggcgtgtatgacttttttaaagagacggtgtccttctattttgggcggacttgccccagaaaaagaccagcccaaaagtgctcaacttcctccagaaactttggcgacaatgttggcctgtctgcaagcttgtgcagggagtgtttctcaggagctatcagaaactatcctcaccatggtagccaattgcagtaatgttatgaataaggccagacaaccaccacctggagttatgccaaaaggacgtcctcctagtgctagcagcttagatgccatttctcctgttcagattgaccctcttgctggaatgacatctcttagtataggtggttcagctgcccctcacacccagagtatgcagggttttcctccaaatttgggttctgcattcagtacccctcagtcaccagcaaaagcatttccacccctttcaacccccaatcagaccactgcattcagtggtattggaggactttcatcacagcttccagtaggtggtcttggcacaggcagcctgactggtataggaactggtgctcttggactccctgcagtgaataacgacccttttgtacagaggaaactgggcacctctggactgaatcagcctacattccagcagagtaagatgaaaccttcggacttgtctcaggtgtggccagaggcaaaccagcactttagtaaagagatagatgatgaagcaaacagctatttccagcgaatatataatcatccaccacatccaaccatgtctgttgatgaggtattagaaatgctgcagagatttaaagactctactataaagagggaacgagaagtatttaactgtatgctaaggaacttgtttgaagaatatcgtttttttccccagtatcctgataaagagttacatataacagcctgcctatttggtggtataattgagaaaggactggtcacttacatggcactaggtctggctctacgatatgttcttgaagccttacgcaagccttttggatccaaaatgtattatttcgggattgctgcactagatagatttaaaaacagattgaaggactatccccagtattgtcagcatttggcttctatcagtcactttatgcaatttccacatcatttacaggagtatattgagtatggacagcagtctagagatcctcctgtgaaaatgcaaggctctatcacaacccctggaagtattgcactggctcaggcccaggctcaggcccaggttccagcaaaagctcctcttgctggtcaagttagcactatggtaaccacctcaacaactaccactgttgctaaaacggttacggtcaccaggccaactggagtcagctttaagaaagatgtgccaccttctattaatactacaaatatagatacgttgcttgtggccacagatcaaactgagagaattgtggagcccccagaaaatatccaggagaaaattgcttttattttcaataatctctcacagtcaaatatgacacaaaaggttgaagagctaaaggaaacggtgaaagaagaatttatgccttgggtttcacagtatctggttatgaagagagtcagtattgagccaaactttcatagcctgtattcaaacttccttgacacgctgaagaatcctgaatttaacaagatggttctgaatgagacctacagaaacattaaagtgctcctgacctctgataaagctgcagccaatttctcagatcgttctttgctgaagaacttgggacattggctaggaatgatcacattagctaaaaacaaacccatcttacacactgacttggatgtgaaatcattgctgctagaggcttatgttaaaggacaacaagaattgctctatgtagtgccctttgttgccaaagtcttagaatctagcattcgtagtgtggtttttaggccaccaaacccttggacaatggcaattatgaatgtattagctgagctacatcaggagcatgacttaaagttaaacttgaagtttgaaatcgaggttctctgcaagaaccttgcattagacatcaatgagctaaaacctggaaacctcctaaaggataaagatcgcctgaagaatttagatgagcaactctctgctccaaagaaagatgtcaagcagccagaagaactccctcccatcacaaccacaacaacttctactacaccagctaccaacaccacttgtacagccacggttccaccacagccacagtacagctaccacgacatcaatgtctattcccttgcgggcttggcaccacacattactctgaatccaacaattcccttgtttcaggcccatccacagttgaagcagtgtgtgcgtcaggcaattgaacgggctgtccaggagctggtccatcctgtggtggatcgatcaattaagattgccatgactacttgtgagcaaatagtcaggaaggattttgccctggattcggaggaatctcgaatgcgaatagcagctcatcacatgatgcgtaacttgacagctggaatggctatgattacatgcagggaacctttgctcatgagcatatctaccaacttaaaaaacagttttgcctcagcccttcgtgtaagttggctatttccttggtataggtacaaaacgtattactgcttgtctgtaataatttttttctttgtctatatatggcactgggcgttaccacttattcttaataatcaccatatttgtttgatgtcttccatcattttagattgtaattctgtgaggcaaagcatcatgtctgtgtgtttttttttttttctgttatattctcaacacgatgtttgacagatagtagatacccaaatatttgttggtttaaataaattaagattt

SEQ ID NO: 4938 - DNA, 2241 bp, Homo sapiens
  source 1..2241: mol_type = unassigned DNA
aggtccttggtatagtagtgggagttctccttcaggatcatgatgttcgtcagagtgaatttcagcaacttccctaccatcgaatttttatcatgcttctcttggaactcaatgcacctgagcatgtgttggaaaccattaatttccagacacttacagctttctgcaatacattccacatcttgaggcctaccaaagctcctggctttgtatatgcctggcttgaactgatttcccatcggatatttattgcaagaatgctggcacatacgccacagcagaaggggtggcctatgtatgcacagctactgattgatttattcaaatatttagcgcctttccttagaaatgtggaactcaccaaacctatgcaaatcctctacaagggcactttaagagtgctgctggttcttttgcatgatttcccagagttcctttgtgattaccattatgggttctgtgatgtgatcccacctaattgtatccagttaagaaatttgatcctgagtgcctttccaagaaacatgaggctccccgacccattcactcctaatctaaaggtggacatgttgagtgaaattaacattgctccccggattctcaccaatttcactggagtaatgccacctcagttcaaaaaggatttggattcctatcttaaaactcgatcaccagtcactttcctgtctgatctgcgcagcaacctacaggtatccaatgaacctgggaatcgctacaacctccagctcatcaatgcactggtgctctatgtcgggactcaggccattgcgcacatccacaacaagggcagcacaccttcaatgagcaccatcactcactcagcacacatggatatcttccagaatttggctgtggacttggacactgagggtcgctatctctttttgaatgcaattgcaaatcagtccggtacccaaatagccacactcactacttcagttgcaccatgctgtacctttttgcagaggccaatacggaagccatccaagaacagatcacaagagttctcttggaacggttgattgtaaataggccacatccttggggtcttcttattaccttcattgagctgattaaaaacccagcgtttaagttctggaaccatgaatttgtacactgtgccccagaaatcgaaaagttattccagtcggtcgcacagtgctgcatgggacagaagcaggcccagcaagtaatggaagggacaggtgccagttagacgaaactgcatctctgttgtacgtgtcagtctagaggtctcactgcaccgagttcataaactgactgaagaatcctttcagctcttcctgactttcccagccctttggtttgtgggtatctgccccaactactgttgggatcagcctcctgtcttatgtgggcacgttccaaagtttaaatgcatttttttgactcttggccaaaatttagaagatgctgtgaatatcattttgaacttgtgtaaatacatgaaagagaaaacctttgtctggaacttcttggctttgtgcaagctgtgtccaaggcaagtacataaactggtaccttgtaatgaagaggcagctgatgccatgcacttgtctgagggcatagctccatgtcttctgacattcctggtgtcccaaagaatagcaaaaagccagtttgaatattatgtaacttatttttttaatgtggacaggggaccttgaaaatcactaagttattaaaaatgtggatgtgctagaattggatatgtccaggaacatgggaagggctcactattggaatcccatgagtttccattttgtctctacccaaacgtattccaaagctgactgcatttgtaccatcttatttcttttggggattatacacctcagccgcctgagatgggggtcagctctttatataaagggaaaccagaccaggcctaaagcccacccctaccctcacccccccaatcctctcctgaaacttaaaaacagtgggaatataggaaagggaaccaaatctcattaattaattgttctcccccattaccccactgaatgaatggccatacaggctaagctgaataatgacaaagttgaaaggaccaatacagccccttttataaggattttgaatgttttgcaaatgtattggtccctgtgttgtattttgtagccttttcctgggcttcagctcccctacttcttgtatgtgtatgcatactgtagctaaccattaaagtcatgacac

SEQ ID NO: 4939 - DNA, 3280 bp, Homo sapiens
  source 1..3280: mol_type = unassigned DNA
aacacaaacacaaacacgaacacgaacacgctcagcgtccccggggagggcggactgaagccacctcaccattcatcgcccctggaccccgcagtccccctcggactcagggccagagccttctgcgaagcaacctagccccagggaaacggtagcggccgcagaagccccgctctctgtaacggccgcggaggagcagcaagcctccctgtgagtcggtgggagacaagacggagcggcggtaagggcggtagggaagtgaagcgcctctctccaccttgttagaagcgcgctgaaagcggcctgcctacccaccccatcgctgccgttttgcagtcgtcgctcccaccttccgctgccgcctggagggaagccggagcgacgggggtcacggcggcggtcagagggtaaaggtcttgctcccagcagcctccgcggtggatacgtcgccatcttggatccgcgggacaagaaaattcatgcgagggagacgtggtgggcggtccttcctgtgacacgacccttgagtgacagttctatttgattgcctccggtactgtgaggaaaggacacgactctatggtgaggactgatggacatacattatctgagaaaagaaactaccaggtgacaaacagcatgtttggtgcttcaagaaagaagtttgtagagggggtcgacagtgactaccatgacgaaaacatgtactacagccagtcttctatgtttccacatcggtcagaaaaagatatgctggcatcaccatctacatcaggtcagctgtctcagtttggggcaagtttatacgggcaacaaagtgcactaggccttccaatgagggggatgagcaacaatacccctcagttaaatcgcagcttatcacaaggcactcagttaccgagccacgtcacgccaacaacaggggtaccaacaatgtcacttcacacgcctccatctccaagcaggggtattttgcctatgaatcctaggaatatgatgaaccactcccaggttggtcagggcattggaattcctagcaggacaaatagcatgagcagttcagggttaggtagccccaacagaagctcgccaagcataatatgtatgccaaagcagcagccttctcgacagccttttactgtgaacagtatgtctggatttggaatgaacaggaatcaggcatttggaatgaataactccttatcaagtaacatttttaatggaacagacggaagtgaaaatgtgacaggattggacctttcagatttcccagcattagcagaccgaaacaggagggaaggaagtggtaacccaactccattaataaaccccttggctggaagagctccttatgttggaatggtaacaaaaccagcaaatgaacaatcccaggacttctcaatacacaatgaagattttccagcattaccaggctccagctataaagatccaacatcaagtaatgatgacagtaaatctaatttgaatacatctggcaagacaacttcaagtacagatggacccaaattccctggagataaaagttcaacaacacaaaataataaccagcagaaaaaagggatccaggtgttacctgatggtcgggttactaacattcctcaagggatggtgacggaccaatttggaatgattggcctgttaacatttatcagggcagcagagacagacccaggaatggtacatcttgcattaggaagtgacttaacaacattaggcctcaatctgaactctcctgaaaatctctaccccaaatttgcgtcaccctgggcatcttcaccttgtcgacctcaagacatagacttccatgttccatctgagtacttaacgaacattcacattagggataagctggctgcaataaaacttggccgatatggtgaagaccttctcttctatctctattacatgaatggaggagacgtattacaacttttagctgcagtggagctttttaaccgtgattggagataccacaaagaagaacgagtatggattaccagggcaccaggcatggagccaacaatgaaaaccaatacctatgagaggggaacatattacttctttgactgtcttaactggaggaaagtagctaaggagttccatctggaatatgacaaattagaagaacggcctcacctgccatccaccttcaactacaaccctgctcagcaagccttctaaaaaaaaaaaaaaaaaaaaaaaaagacttcccttttcttggggtatggctgtctcagcacaatactcaacataactgcagaactgatgtggctcaggcaccctggttttaattccttgaggatctggcaattggcttacgcaaaaggtcaccatttgaggtcctgccttactaattatgtgctgcccaacaactaaatttgtaatttgtttttctctagtttgagcagggtctgaattttttcatttatttccttttttgccagcagacagacttgagtctgtaaagacaagcaaatacactgacagaagtttaccatagtttctaaaatgtaaaaaagaaaacccccaaaagactcaagaaaattagaccacaaattttgcattgttcattgtagcactattggtaataaaataacaaatgtttgtgcatttttatgtgaagatccttctcgtatttcatttggaaagatgagcaagaggtctgcttccttcattttacttccccttctgtttttgaaaggcagtttcgccaagcttaatgcaagaatatctgactgtttagaagaaagatattgccacaatctctggatggttttccagggttgtgttattactgagcttcatctttccagaatgagcaaaacactgtccagtctttgttacgattttgtaataaatgtgtacattttttttaaatttttggacatcacatgaataaaggtatgtatgtacgaatgtgtatatattatatatatgacatctattttggaaaatgtttgccctgctgtacctcatttttaggaggtgtgcatggatgcaatatatgaaaatgggacattctggaactgctggtcaggggactttgtcgccctgtgcactaaaagggccagattttcagcagccaaggacatccatacccaagtgaatgtgatgggacttaaaagaagtgaactgagacaattcactctggctgtttgaacagcagcgtttcataggaagagaaaaaaagatcaatcttgtattttctgaccacataaaggcttcttctctttgtaataaagtagaaaagctctcctca

SEQ ID NO: 4940 - DNA, 3152 bp, Homo sapiens
  source 1..3152: mol_type = unassigned DNA
agcgtccccggggagggcggactgaagccacctcaccattcatcgcccctggaccccgcagtccccctcggactcagggccagagccttctgcgaagcaacctagccccagggaaacggtagcggccgcagaagccccgctctctgtaacggccgcggaggagcagcaagcctccctgtgagtcggtgggagacaagacggagcggcgtcgtcgctcccaccttccgctgccgcctggagggaagccggagcgacgggggtcacggcggcggtcagagggtaaaggtcttgctcccagcagcctccgcggtggatacgtcgccatcttggatccgcgggacaagaaaattcatgcgagggagacgtggtgggcggtccttcctgtgacacgacccttgagtgacagttctatttgattgcctccggtactgtgaggaaaggacacgactctatggtgaggactgatggacatacattatctgagaaaagaaactaccaggtgacaaacagcatgtttggtgcttcaagaaagaagtttgtagagggggtcgacagtgactaccatgacgaaaacatgtactacagccagtcttctatgtttccacatcggtcagaaaaagatatgctggcatcaccatctacatcaggtcagctgtctcagtttggggcaagtttatacgggcaacaaagtgcactaggccttccaatgagggggatgagcaacaatacccctcagttaaatcgcagcttatcacaaggcactcagttaccgagccacgtcacgccaacaacaggggtaccaacaatgtcacttcacacgcctccatctccaagcaggggtattttgcctatgaatcctaggaatatgatgaaccactcccaggttggtcagggcattggaattcctagcaggacaaatagcatgagcagttcagggttaggtagccccaacagaagctcgccaagcataatatgtatgccaaagcagcagccttctcgacagccttttactgtgaacagtatgtctggatttggaatgaacaggaatcaggcatttggaatgaataactccttatcaagtaacatttttaatggaacagacggaagtgaaaatgtgacaggattggacctttcagatttcccagcattagcagaccgaaacaggagggaaggaagtggtaacccaactccattaataaaccccttggctggaagagctccttatgttggaatggtaacaaaaccagcaaatgaacaatcccaggacttctcaatacacaatgaagattttccagcattaccaggctccagctataaagatccaacatcaagtaatgatgacagtaaatctaatttgaatacatctggcaagacaacttcaagtacagatggacccaaattccctggagataaaagttcaacaacacaaaataataaccagcagaaaaaagggatccaggtgttacctgatggtcgggttactaacattcctcaagggatggtgacggaccaatttggaatgattggcctgttaacatttatcagggcagcagagacagacccaggaatggtacatcttgcattaggaagtgacttaacaacattaggcctcaatctgaactctcctgaaaatctctaccccaaatttgcgtcaccctgggcatcttcaccttgtcgacctcaagacatagacttccatgttccatctgagtacttaacgaacattcacattagggataagctggctgcaataaaacttggccgatatggtgaagaccttctcttctatctctattacatgaatggaggagacgtattacaacttttagctgcagtggagctttttaaccgtgattggagataccacaaagaagaacgagtatggattaccagggcaccaggcatggagccaacaatgaaaaccaatacctatgagaggggaacatattacttctttgactgtcttaactggaggaaagtagctaaggagttccatctggaatatgacaaattagaagaacggcctcacctgccatccaccttcaactacaaccctgctcagcaagccttctaaaaaaaaaaaaaaaaaaaaaaaaagacttcccttttcttggggtatggctgtctcagcacaatactcaacataactgcagaactgatgtggctcaggcaccctggttttaattccttgaggatctggcaattggcttacgcaaaaggtcaccatttgaggtcctgccttactaattatgtgctgcccaacaactaaatttgtaatttgtttttctctagtttgagcagggtctgaattttttcatttatttccttttttgccagcagacagacttgagtctgtaaagacaagcaaatacactgacagaagtttaccatagtttctaaaatgtaaaaaagaaaacccccaaaagactcaagaaaattagaccacaaattttgcattgttcattgtagcactattggtaataaaataacaaatgtttgtgcatttttatgtgaagatccttctcgtatttcatttggaaagatgagcaagaggtctgcttccttcattttacttccccttctgtttttgaaaggcagtttcgccaagcttaatgcaagaatatctgactgtttagaagaaagatattgccacaatctctggatggttttccagggttgtgttattactgagcttcatctttccagaatgagcaaaacactgtccagtctttgttacgattttgtaataaatgtgtacattttttttaaatttttggacatcacatgaataaaggtatgtatgtacgaatgtgtatatattatatatatgacatctattttggaaaatgtttgccctgctgtacctcatttttaggaggtgtgcatggatgcaatatatgaaaatgggacattctggaactgctggtcaggggactttgtcgccctgtgcactaaaagggccagattttcagcagccaaggacatccatacccaagtgaatgtgatgggacttaaaagaagtgaactgagacaattcactctggctgtttgaacagcagcgtttcataggaagagaaaaaaagatcaatcttgtattttctgaccacataaaggcttcttctctttgtaataaagtagaaaagctctcctca

SEQ ID NO: 4941 - DNA, 582 bp, Homo sapiens
  source 1..582: mol_type = unassigned DNA
aaacacaaacacgaacacgaacacgctcagcgtccccggggagggcggactgaagccacctcaccattcatcgcccctggaccccgcagtccccctcggactcagggccagagccttctgagcagcaagcctccctgtgagtcggtgggagacaagacggagcggcggtaagggcggtagggaagtgaagcgcctctctccaccttgttagaagcgcgctgaaagcggcctgcctacccaccccatcgctgccgttttgcagtcgtcgctcccaccttccgctgccgcctggagggaagccggagcgacgggggtcacggcggcggtcagagggtaaaggtcttgctcccagcagcctccgcggtggatacgtcgccatcttggatccgcgggacaagaaaattcatgcgagggagacgtggtgggcggtccttcctgtgacacgacccttgagtgacagttctatttgattgcctccggtactgtgaggaaaggacacgactctatggtgaggactgatggacatacattatctgagaaaagaaactaccaggtgacaaacagcatgtttggtgcttcaag

SEQ ID NO: 4942 - DNA, 1085 bp, Homo sapiens
  source 1..1085: mol_type = unassigned DNA
gtcgctgtactcgggccgctgcagcagcagcagctccagatcctaggcccggtcccatccgcgagtggtggggcttccccagactccactcccctaggctcccgccagcgcggaggagccgctgccgccgcgctgcttcctgggggagaagagaaggcggcagcggccgtggccgtggccgacgagctcgagcccgctttagacggctctgccgccttcccggcagctggtgctgtctgtggcttcttaccttctctcaatacacgtatatcatctgccagttatgtgtatttctgttagtgtgtttgcaagtgtcagatgggagacactggactggctaacgggtgtcaggatcctgcaggccctgggataccgaaggctgtgcatggtggagggagaaggaatgcaactgcgatgccgcctctgccaccgcaccaggaagagggagacgtggtgggcggtccttcctgtgacacgacccttgagtgacagttctatttgattgcctccggtactgtgaggaaaggacacgactctatggtgaggactgatggacatacattatctgagaaaagaaactaccaggtgacaaacagcatgtttggtgcttcaagaaagaagtttgtagagggggtcgacagtgactaccatgacgaaaacatgtactacagccagtcttctatgtttccacatcggtcagaaaaagatatgctggcatcaccatctacatcaggtcagctgtctcagtttggggcaagtttatacgggcaacaaagtgcactaggccttccaatgagggggatgagcaacaatacccctcagttaaatcgcagcttatcacaaggcactcagttaccgagccacgtcacgccaacaacaggggtaccaacaatgtcacttcacacgcctccatctccaagcaggggtattttgcctatgaatcctaggaatatgatgaaccactcccaggttggtcagggcattggaattcctagcaggacaaatagcatgagcagttcagggttaggtagccccaacagaagctcgccaagcataatatgtatgccaaagcagcagccttctcg

SEQ ID NO: 4943 - DNA, 2288 bp, Homo sapiens
  source 1..2288: mol_type = unassigned DNA
gctgtactcgggccgctgcagcagcagcagctccagatcctaggcccggtcccatccgcgagtggtggggcttccccagactccactcccctaggctcccgccagcgcggaggagccgctgccgccgcgctgcttcctgggggagaagagaaggcggcagcggccgtggccgtggccgacgagctcgagcccgctttagacggctctgccgccttcccggcagctggtgctgtctgtggcttcttaccttctctcaatacacgtatatcatctgccagttatgtgtatttctgttagtgtgtttgcaagtgtcagatgggagacactggactggctaacgggtgtcaggatcctgcaggccctgggataccgaaggctgtgcatggtggagggagaaggaatgcaactgcgatgccgcctctgccaccgcaccaggaaggtgaagcttccgtagtgtcgtagactgagtccggatgatcctggggcggcggaggaaccacagacgcttctgtctgtgaagttgcaagtcctgggtttctacttccgcaggggcctctccaccttttgctgtcagggagacgtggtgggcggtccttcctgtgacacgacccttgagtgacagttctatttgattgcctccggtactgtgaggaaaggacacgactctatggtgaggactgatggacatacattatctgagaaaagaaactaccaggtgacaaacagcatgtttggtgcttcaagaaagaagtttgtagagggggtcgacagtgactaccatgacgaaaacatgtactacagccagtcttctatgtttccacatcggtcagaaaaagatatgctggcatcaccatctacatcaggtcagctgtctcagtttggggcaagtttatacgggcaacaaagtgcactaggccttccaatgagggggatgagcaacaatacccctcagttaaatcgcagcttatcacaaggcactcagttaccgagccacgtcacgccaacaacaggggtaccaacaatgtcacttcacacgcctccatctccaagcaggggtattttgcctatgaatcctaggaatatgatgaaccactcccaggttggtcagggcattggaattcctagcaggacaaatagcatgagcagttcagggttaggtagccccaacagaagctcgccaagcataatatgtatgccaaagcagcagccttctcgacagccttttactgtgaacagtatgtctggatttggaatgaacaggaatcaggcatttggaatgaataactccttatcaagtaacatttttaatggaacagacggaagtgaaaatgtgacaggattggacctttcagatttcccagcattagcagaccgaaacaggagggaaggaagtggtaacccaactccattaataaaccccttggctggaagagctccttatgttggaatggtaacaaaaccagcaaatgaacaatcccaggacttctcaatacacaatgaagattttccagcattaccaggctccagctataaagatccaacatcaagtaatgatgacagtaaatctaatttgaatacatctggcaagacaacttcaagtacagatggacccaaattccctggagataaaagttcaacaacacaaaataataaccagcagaaaaaagggatccaggtgttacctgatggtcgggttactaacattcctcaagggatggtgacggaccaatttggaatgattggcctgttaacatttatcagggcagcagagacagacccaggaatggtacatcttgcattaggaagtgacttaacaacattaggcctcaatctgaactctcctgaaaatctctaccccaaatttgcgtcaccctgggcatcttcaccttgtcgacctcaagacatagacttccatgttccatctgagtacttaacgaacattcacattagggataagctggctgcaataaaacttggccgatatggtgaagaccttctcttctatctctattacatgaatggaggagacgtattacaacttttagctgcagtggagctttttaaccgtgattggagataccacaaagaagaacgagtatggattaccagggcaccaggcatggagccaacaatgaaaaccaatacctatgagaggggaacatattacttctttgactgtcttaactggaggaaagtagctaaggagttccatctggaatatgacaaattagaagaacggcctcacctgccatccaccttcaactacaaccctgctcagcaagccttct

SEQ ID NO: 4944 - DNA, 4753 bp, Homo sapiens
  source 1..4753: mol_type = unassigned DNA
gtcaacaaagtaatcttgagataacagttactgtttgagattcttacagttgtgaaatttggagaaaactaaaaattaattgggaagtggcaaaataaattgaaaatggtaaaacaaaaattaaaagctatagcgcaggctaaaaggacggtagaaagttttcttcaaaaattaagaacccaaggttataagaatactaaaaagttaagaaattgagatgattaaaatagacaaagtagagaagttgggttaaattttaatttttaaaggaagccagctgattgttttaacttaaaatgaacaaaaatacatttaatttattctatatatatttattgagcgcctactgtgtaataggtaatataaacttctgggctttgtatcatatttctatatttcctatccatttaccatatatgggaaccctactgccaccctgttgtaccccaccctcaaaatgcgcacatgcgcacgcacacacgtttgtatatgaaagcggtcaattacaggtggaagtcctcagggcttctgcttcactgcctgtgcctcagctatatctttctggccatttgcaggaggcactatcattgtcaccatttgtgtgtaaccgaagcttcaagcattctagatataacctccatctgagcataatgaaaagacaagttatatcgtaacaatctccctcttgttagctcacaagctataattttaggttaccatcttccatgggggaaatatatgctttttattctctttgttacatctctaggatttggggtttctattatgctggttgcgtattcctttgctaaattgttcatggaattctttgacatgaaatcaatctgcaagtatcttttgagcacctacatacacctagtacagtgccgtgcattatttaggaagaaggcgcaatcatttcgaattatattatggttggtttttataatctcttaaaaaatatttgtagaatcaataaccagtgtcctttcttattatttagacggaagtgaaaatgtgacaggattggacctttcagatttcccagcattagcagaccgaaacaggagggaaggaagtggtaacccaactccattaataaaccccttggctggaagagctccttatggtaattaagctttttaatgatggccagtagaaagtttccattgtatgtgcacacacatatacatttacatgtacgtatacatatgcttgtgtgtgtacacatgtatgtttgcattttctaatcaggttagtgtaattttttcagaattgatatattagaagtgatttttcttcccagaataccatgatagcaaagttaaatgggaaaactttgtacaaaaacccaagaggaagtcctcattggtattcagaagttattttcttctgttatccctgccttagtttaccttaagtgttttattttgtggtctgccttttctctccttaattgatcacacattttttcaaaataatatattcctggtgattaataatgactgactatacattgaagatgtttttctgagccaaggtttttctcaacctccacactgttgacatttgggccaggtaattctttgtagagaggagatgtggggggctattgtgtttatacagaatgttaagcaatattcctggccttggcctacaagatgctagtagcactttctgtttctaacccccatagcctctattgtgacagacacaaatgttttcagacattggcagatgtcacctggggaaaaaaaattgccccctgttgaaaaccattgctcatgggtcatgtatagcttatgcagactcttggtctccgttaatatccttcatcaccctttttcactgtctctaatagataagaaatttggctaatcagggataaatggaaataaaggaggggaaacatatgcaataacaatataacaatgtagatatgaaaattctgtgacagcaatgtagctatactatttttatcacatagtttttttcttttgggaaaacctgatagagaccagtaacaaaacggtgaatttaaaagaatcagttcatccattattttaagatagaattaatatttgatcacattttcaaccaagaaggatttctgtgccattcagatatgaatacaaataacagtatatgaagaagggaaacatttattgtttatattctaaagtttccaaattagtctccccaaaataaaaaaaaaaatgatctgccctggaagttgagtacctagctacttgattctcagttcagactctaatgtttttaacctttcctcataggtccattttttcatccctttaatcattcccgttgctctccttggaccatctctagtttctccatatcgttcttgaattgtggagccccaaactggatattgttctccaataagggcccgactaatgccaagtatagtgggaggattatttcccagttcttgcatgttttacatctataacatggagtccaagaaaatctgaaataatatggagttgttttataattgattgcaatttgctcactctgtaagtcgctttcaagtagaatactgacatattcttttaaattttattttgttcatttgtatttgagagttaactggtatttataatatctagtcaaatatttaaataaaacaagcttttaaaccaaaattgttaataattaatccaatatcaaattaaatttttaagcacctacgcatgacatggattactgttgatttcccttgtattattttgtatgttgagttattaatcagtaaatgaaaatttagttcttcattgttaccctggatactaattttttgaagtacgctttcatagcattaaaaaaaagaaaccttttggtgtattatcatgaggaaagttaactttataatctgtagcaaaatatcataaatatcaattgcaattctccggattattttcattacatagttggaatggtaacaaaaccagcaaatgaacaatcccaggacttctcaatacacaatgaagattttccagcattaccaggctccagctataaagatccaacatcaagtaatgatgacagtaaatctgtaagtaactgagaagtgtgtatgtgagtgatgtagtttttcccttcagatttctcttatattaacaattacttactaaatactattacaaaactgttttatcttgatatctgtaataacctaacttctgaagaatgtggaaaagctttataacttagaagatagcctatttttttcctatttcatataggtttgcaaatttctgttgaacttctcagagttaatttagacttttattgtagtccctgtcagctggatcccatgaagtttgataatatagccttctaaggagctgtgtttttcttgagtaagttttctccttgaagaatttatacacatttttatacctgtgttgattcaaccaactcagcttcttctttctgacttaacaaatatgtttatttcttccacatttcactgaaaatagcttttctctgtgtgtgatgggagtttatatattattaaaataattgataaagaagatcggtaagaattaaaataagtacaaagttttaaagcttgtatgtctaacttatcttcaaggtagctttggtgattttaggtaatatactatatttagtttctcttttacatgaaagcattgaggagtgtaacttcaagtgtatcccaaagcataaagacctgagaaagagatagatttttttttttctgtgactgaagatctgagataaataagatattttcccttgatttctttttctttaaatactcaaatgtggatgatataggatttatttgtataccatggaacaatgatggaaacaattttctatagaacttgaaaaacaggtaataatttaactaccaatttaaatgtaataaagaataaatagcaaggtattaatatgtgaacttgaatttgtatacttaacaaattttaatgtcacatttaatttttttcatgctagaatttgaatacatctggcaagacaacttcaagtacagatggacccaaattccctggagataaaagttcaacaacacaaaataataaccagcagaaaaaagggatccaggtgttacctgatggtcgggttactaacattcctcaagggatggtgacggaccaatttggaatgattggcctgttaacatttatcagggcagcagagacagacccaggaatggtacatcttgcattaggaagtgacttaacaacattaggcctcaatctgaactctcctgaaaatctctaccccaaatttgcgtcaccctgggcatcttcaccttgtcgacctcaagacatagacttccatgttccatctgagtacttaacgaacattcacattagggataagctggctgcaataaaacttggccgatatggtgaagaccttctcttctatctctattacatgaatggaggagacgtattacaacttttagctgcagtggagctttttaaccgtgattggagataccacaaagaagaacgagtatggattaccagggcaccaggcatggagccaacaatgaaaaccaatacctatgagaggggaacatattacttctttgactgtcttaactggaggaaagtagctaaggagttccatctggaatatgacaaattagaagaacggcctcacctgccatccaccttcaactacaaccctgctcagcaagccttctaaaaaaaaaaaaaaaaaaaaaaaa

SEQ ID NO: 4945 - DNA, 1545 bp, Homo sapiens
  source 1..1545: mol_type = unassigned DNA
acaaacacaaacacaaacacgaacacgaacacgctcagcgtccccggggagggcggactgaagccacctcaccattcatcgcccctggaccccgcagtccccctcggactcagggccagagccttctgcgaagcaacctagccccagggaaacggtagcggccgcagaagccccgctctctgtaacggccgcggaggagcagcaagcctccctgtgagtcggtgggagacaagacggagcggcggtaagggcggtagggaagtgaagcgcctctctccaccttgttagaagcgcgctgaaagcggcctgcctacccaccccatcgctgccgttttgcagtcgtcgctcccaccttccgctgccgcctggagggaagccggagcgacgggggtcacggcggcggtcagagggtaaaggtcttgctcccagcagcctccgcggtggatacgtcgccatcttggatccgcgggacaagaaaattcatgcgagggagacgtggtgggcggtccttcctgtgacacgacccttgagtgacagttctatttgattgcctccggtactgtgaggaaaggacacgactctatggtgaggactgatggacatacattatctgagaaaagaaactaccaggtgacaaacagcatgtttggtgcttcaagaaagaagtttgtagagggggtcgacagtgactaccatgacgaaaacatgtactacagccagtcttctatgtttccacatcggtcagaaaaagatatgctggcatcaccatctacatcaggtcagctgtctcagtttggggcaagtttatacgggcaacaaagtgcactaggccttccaatgagggggatgagcaacaatacccctcagttaaatcgcagcttatcacaaggcactcagttaccgagccacgtcacgccaacaacaggggtaccaacaatgtcacttcacacgcctccatctccaagcaggggtattttgcctatgaatcctaggaatatgatgaaccactcccaggttggtcagggcattggaattcctagcaggacaaatagcatgagcagttcagggttaggtagccccaacagaagctcgccaagcataatatgtatgccaaagcagcagccttctcgacagccttttactgtgaacagtatgtctggatttggaatgaacaggaatcaggcatttggaatgaataactccttatcaagtaacatttttaatggaacagacggaagtgaaaatgtgacaggattggacctttcagatttcccagcattagcagaccgaaacaggagggaaggaagtggtaacccaactccattaataaaccccttggctggaagagctccttatgttggaatggtaacaaaaccagcaaatgaacaatcccaggacttctcaatacacaatgaagattttccagcattaccaggctccagctataaagatccaacatcaagtaatgatgacagtaaatctaatttgaatacatctggcaagacaacttcaagtacagatggacccaaattccctggagataaa

SEQ ID NO: 4946 - DNA, 2852 bp, Homo sapiens
  source 1..2852: mol_type = unassigned DNA
gaagagaggaggggaggcctcctccgccgccgccatcttggaccgggcccggtcagcttccgcggagccatcggcagacgccgcggcctcccttgagccccgacccccgtcgtcagaacaaccccgggcccactcccccaaccccacttccgcttcgcgccgctatcgcgatagcgcccgggcccggggcgcgagaaaaaggcggcgggcgctcgcctcccccgcctgtcgcgatacgctcctcagcggcggcgccagctcctgtgcgtccgtctccaagagagtatgaagagagtgcgtctgtagggcagggaagatggcggacaagcgcaaactccaaggtgagattgatcgctgcctcaagaaggtgtccgagggcgtggagcagtttgaagatatttggcagaagctccacaatgcagccaacgcgaaccagaaagaaaagtatgaggctgacctaaagaaggagattaagaagctacaacggctgagggaccaaatcaagacatgggtagcgtccaacgagatcaaggacaagaggcagcttatagacaaccgcaagctcattgagacgcaaatggaacggttcaaagttgtggaacgagagaccaaaaccaaagcttacagcaaagagggcctgggcctggcccagaaggtagatcctgcccagaaggagaaggaagaggttggccagtggctcacgaataccatcgacacgctcaacatgcaggtggaccagtttgagagtgaagtggagtcactgtcagtgcagacacgcaagaagaagggcgacaaggataagcaggaccggattgagggcttgaagcggcacatcgagaagcaccgctaccacgtgcgcatgctagagaccatcctgcgcatgctggacaatgactccatcctcgttgacgccatccgcaagatcaaggacgacgttgagtactatgttgactcatcccaggaccccgacttcgaggagaacgagtttctctacgatgacctggacctcgaggacattccacaggcgctggtcgccacctcccctcccagccacagccacatggaggatgagatcttcaaccagtccagcagcacgcccacctcaaccacctccagctctcccatcccgcccagcccagccaactgtaccacggaaaactctgaagatgataagaagaggggacgttccacagacagtgaagtcagccagtctccagccaaaaacggctccaagcctgtccacagcaaccagcaccctcagtccccagctgtgccgcccacctacccctccggccccccgcctgctgcctctgccttgagcaccactcctggcaacaatggggtccccgcccccgcagcacccccaagtgccctgggccccaaggccagtccagctcccagccacaactcgggcacccctgctccctatgcccaggctgtggccccaccagctcccagtgggcccagcacgacccagccccggccccccagcgtccagcctagcggaggcggaggcggcggcagcggaggtggagggagcagcagcagtagtaacagcagtgccggtggaggggctggcaagcagaatggcgccaccagttacagctcagttgtggcagacagcccggcagaggtggctttgagcagcagtgggggcaacaatgccagcagccaggccttgggccccccttccggcccccacaacccacctcccagcacctcgaaggaacccagtgcggcagccccaacgggggctgggggcgtggccccaggctcagggaacaactcagggggacccagcctcctggtgccactgcctgtgaatcctcccagctccccaacgcccagcttcagtgatgccaaggcagccggtgccctgctcaatgggcctccacagttcagcaccgccccagaaatcaaggcccctgagcctctgagctccttgaagtccatggcggaacgggcagccatcagctctggcattgaggaccctgtgccaacgctgcacctgaccgagcgagacatcatcctgagcagtacatcagcacctccggcctcagcccagccgcccctgcagctgtcagaggtgaacataccgctgtcgctgggtgtctgtccactgggccctgtgcccctcaccaaggagcagctctatcagcaggccatggaagaggccgcctggcaccacatgcctcacccctctgactctgagcgtattcggcagtacctcccccggaacccctgtccgacgcccccctaccaccaccagatgccacccccacactcggacactgtggaattctaccagcgcctgtcgaccgagacactcttcttcatcttctactatctggagggcactaaggcacagtatctggcagccaaggccctaaagaagcagtcatggcgattccacaccaagtacatgatgtggttccagaggcacgaggagcccaagaccatcactgacgagtttgagcagggcacctacatctactttgactacgagaagtggggccagcggaagaaggaaggcttcacctttgagtaccgctacctggaggaccgggacctccagtgacaccggcccctccctctacccacccccttcccccgcatgctgatccccctgcccaggtgagggccctgccctggaagactggagggaggccccaagccacggggcatccccctctcccaggaagcagggagggggccgggaggttttcctctcagccccaccctgggggcccgggggcgagggctgccccctcctcccctccccagtgagggacattttttggtaaacctattttcattttggaaaatatttatgaataaatagttttatatga

SEQ ID NO: 4947 - DNA, 2570 bp, Homo sapiens
  source 1..2570: mol_type = unassigned DNA
gaggaggggaggcctcctccgccgccgccatcttggaccgggcccggtcagcttccgcggagccatcggcagacgccgcggcctcccttgagccccgacccccgtcgtcagaacaaccccgggcccactcccccaaccccacttccgcttcgcgccgctatcgcgatagcgcccgggcccggggcgcgagaaaaaggcggcgggcgctcgcctcccccgcctgtcgcgatacgctcctcagcggcggcgccagctcctgtgcgtccgtctccaagagagtatgaagagagtgcgtctgtagggcagggaagatggcggacaagcgcaaactccaaggtgagattgatcgctgcctcaagaaggtgtccgagggcgtggagcagtttgaagatatttggcagaagctccacaatgcagccaacgcgaaccagaaagaaaagtatgaggctgacctaaagaaggagattaagaagctacaacggctgagggaccaaatcaagacatgggtagcgtccaacgagatcaaggacaagaggcagcttatagacaaccgcaagctcattgagacgcaaatggaacggttcaaagttgtggaacgagagaccaaaaccaaagcttacagcaaagagggcctgggcctggcccagaaggtagatcctgcccagaaggagaaggaagaggttggccagtggctcacgaataccatcgacacgctcaacatgcaggtggaccagtttgagagtgaagtggagtcactgtcagtgcagacacgcaagaagaagggcgacaaggataagcaggaccggattgagggcttgaagcggcacatcgagaagcaccgctaccacgtgcgcatgctagagaccatcctgcgcatgctggacaatgactccatcctcgttgacgccatccgcaagatcaaggacgacgttgagtactatgttgactcatcccaggaccccgacttcgaggagaacgagtttctctacgatgacctggacctcgaggacattccacaggcgctggtcgccacctcccctcccagccacagccacatggaggatgagatcttcaaccagtccagcagcacgcccacctcaaccacctccagctctcccatcccgcccagcccagccaactgtaccacggaaaactctgaagatgataagaagaggggacgttccacagacagtgaagtcagccagtctccagccaaaaacggctccaagcctgtccacagcaaccagcaccctcagtccccagctgtgccgcccacctacccctccggccccccgcctgctgcctctgccttgagcaccactcctggcaacaatggggtccccgcccccgcagcacccccaagtgccctgggccccaaggccagtccagctcccagccacaactcgggcacccctgctccctatgcccaggctgtggccccaccagctcccagtgggcccagcacgacccagccccggccccccagcgtccagcctagcggaggcggaggcggcggcagcggaggtggagggagcagcagcagtagtaacagcagtgccggtggaggggctggcaagcagaatggcgccaccagttacagctcagttgtggcagacagcccggcagaggtggctttgagcagcagtgggggcaacaatgccagcagccaggccttgggccccccttccggcccccacaacccacctcccagcacctcgaaggaacccagtgcggcagccccaacgggggctgggggcgtggccccaggctcagggaacaactcagggggacccagcctcctggtgccactgcctgtgaatcctcccagctccccaacgcccagcttcagtgatgccaaggcagccggtgccctgctcaatgggcctccacagttcagcaccgccccagaaatcaaggcccctgagcctctgagctccttgaagtccatggcggaacgggcagccatcagctctggcattgaggaccctgtgccaacgctgcacctgaccgagcgagacatcatcctgagcagtacatcagcacctccggcctcagcccagccgcccctgcagctgtcagaggtgaacataccgctgtcgctgggtgtctgtccactgggccctgtgcccctcaccaaggagcagctctatcagcaggccatggaagaggccgcctggcaccacatgcctcacccctctgactctgagcgtattcggcagtacctcccccggaacccctgtccgacgcccccctaccaccaccagatgccacccccacactcggacactgtggaattctaccagcgcctgtcgaccgagacactcttcttcatcttctactatctggagcccagagatgttagaactgcttgggttgacagcgaggctggtccactgaggcacacctcagccccgcttccagttgcccactggctcacccgcggcccctccccagccctgctccagcagccccagtctaggccgaccccactctgctcatcggcacattctcaggcctccctggagaccactggggagctgtccagccccctcccaaccccacttctctga

SEQ ID NO: 4948 - DNA, 4138 bp, Homo sapiens
  source 1..4138: mol_type = unassigned DNA
aaattctccctgggggtaaggtaccagccctgtcctttatgggcttcttgttctaaagcatatccgtcccatatggttgctgctagtcacatgtggtgattagtaactagttaaaaatgaaaaattcagttcctccattacacttgccacatttcagatgttcagtggccaacagatatgcgcaaatagagtgtttccagcattgcaaagttctgttggatagcactgtttgccagatgttcccttctttgtgggtgaggactcttttggtgtgacttccctctgtattgaggctcttgttcctcagtatggggctgtttctgtctttacagtaagtgactactccagggttccctgccctgcacacgtagagtgggagcggcccgtggatcccagggaactgtgcttttcattgtaggccccctccctggaggggaagagggcaatctccgctggtatctcagaagtcttcttctgaggcataagcctctcttcccagggctcccctggtctcgctgtcaggccctaaggtatgtcttcccttggactaaagctccttggaactcccttttgacctcagtcttctctgggttccaggtaacttcctttaaaataaagacgctcctctcttgaagttttgggttcctgccctgatggtctatgtctccctgactctaaattaccaatccacttgctatgggattcctccatgagtgcagatcggctccctcacagctgcggtacctttgcaccctcttatcttagtaagatttctgtcttctcccaggtctctcttgggtactgccttctgcccccaaatctctaagccttcttggtattagcttctttgggttaggagtgttatttccttttggtttaaggatcctgctctggaataaatgtcttggtggtttgagtcccttctacttggcattcagccctgtctgcatgagcgggttcagctcttcacagctttcggcatctctgctcgccgtcgttttcccccacccccaatctttcttctcctacctacagcttacacacacacacacacacacacacacacacacacacacgcccttctctgtgagctgccagtttcatttgtctcctgacttgtctgagggatgacctctcctagccacctctgcccagcccctctgagtaggaagtgtgatttccagggctaatgcctccatcccagtcatcagctgtgtgcagcatgactgtcctgctctgaaaaacctttttgagtgtattctggggagaaggtactccatgctctaggaattttccacttcctgagtcagaggcacacaaaaaagtatgtaacttttcttgtttcaacaaacttatggggtcccctgttggccagacactatgctgggcagtcaagcgagcatcaggagaactggggctggtctcttgtcagatagcaaatgcttcttctctttaccagtcccacctacctcactatgctgactaggtccatgtctctgggtttttaccagccagggaatacgtgttaattcctctccaatctctcctagcagcgtccgtctccaagagagtatgaagagagtgcgtctgtagggcagggaagatggcggacaagcgcaaactccaaggtgagattgatcgctgcctcaagaaggtgtccgagggcgtggagcagtttgaagatatttggcagaagctccacaatgcagccaacgcgaaccagaaagaaaagtatgaggctgacctaaagaaggagattaagaagctacaacggctgagggaccaaatcaagacatgggtagcgtccaacgagatcaaggacaagaggcagcttatagacaaccgcaagctcattgagacgcaaatggaacggttcaaagttgtggaacgagagaccaaaaccaaagcttacagcaaagagggcctgggcctggcccagaaggtagatcctgcccagaaggagaaggaagaggttggccagtggctcacgaataccatcgacacgctcaacatgcaggtggaccagtttgagagtgaagtggagtcactgtcagtgcagacacgcaagaagaagggcgacaaggataagcaggaccggattgagggcttgaagcggcacatcgagaagcaccgctaccacgtgcgcatgctagagaccatcctgcgcatgctggacaatgactccatcctcgttgacgccatccgcaagatcaaggacgacgttgagtactatgttgactcatcccaggaccccgacttcgaggagaacgagtttctctacgatgacctggacctcgaggacattccacaggcgctggtcgccacctcccctcccagccacagccacatggaggatgagatcttcaaccagtccagcagcacgcccacctcaaccacctccagctctcccatcccgcccagcccagccaactgtaccacggaaaactctgaagatgataagaagaggggacgttccacagacagtgaagtcagccagtctccagccaaaaacggctccaagcctgtccacagcaaccagcaccctcagtccccagctgtgccgcccacctacccctccggccccccgcctgctgcctctgccttgagcaccactcctggcaacaatggggtccccgcccccgcagcacccccaagtgccctgggccccaaggccagtccagctcccagccacaactcgggcacccctgctccctatgcccaggctgtggccccaccagctcccagtgggcccagcacgacccagccccggccccccagcgtccagcctagcggaggcggaggcggcggcagcggaggtggagggagcagcagcagtagtaacagcagtgccggtggaggggctggcaagcagaatggcgccaccagttacagctcagttgtggcagacagcccggcagaggtggctttgagcagcagtgggggcaacaatgccagcagccaggccttgggccccccttccggcccccacaacccacctcccagcacctcgaaggaacccagtgcggcagccccaacgggggctgggggcgtggccccaggctcagggaacaactcagggggacccagcctcctggtgccactgcctgtgaatcctcccagctccccaacgcccagcttcagtgatgccaaggcagccggtgccctgctcaatgggcctccacagttcagcaccgccccagaaatcaaggcccctgagcctctgagctccttgaagtccatggcggaacgggcagccatcagctctggcattgaggaccctgtgccaacgctgcacctgaccgagcgagacatcatcctgagcagtacatcagcacctccggcctcagcccagccgcccctgcagctgtcagaggtgaacataccgctgtcgctgggtgtctgtccactgggccctgtgcccctcaccaaggagcagctctatcagcaggccatggaagaggccgcctggcaccacatgcctcacccctctgactctgagcgtattcggcagtacctcccccggaacccctgtccgacgcccccctaccaccaccagatgccacccccacactcggacactgtggaattctaccagcgcctgtcgaccgagacactcttcttcatcttctactatctggagggcactaaggcacagtatctggcagccaaggccctaaagaagcagtcatggcgattccacaccaagtacatgatgtggttccagaggcacgaggagcccaagaccatcactgacgagtttgagcagggcacctacatctactttgactacgagaagtggggccagcggaagaaggaaggcttcacctttgagtaccgctacctggaggaccgggacctccagtgacaccggcccctccctctacccacccccttcccccgcatgctgatccccctgcccaggtgagggccctgccctggaagactggagggaggccccaagccacggggcatccccctctcccaggaagcagggagggggccgggaggttttcctctcagccccaccctgggggcccgggggcgagggctgccccctcctcccctccccagtgagggacattttttggtaaacctattttcattttggaaaatatttatgaataaatagttttatatg

SEQ ID NO: 4949 - DNA, 1269 bp, Homo sapiens
  source 1..1269: mol_type = unassigned DNA
gaaggaacccagtgcggcagccccaacgggggctgggggcgtggccccaggctcagggaacaactcagggggacccagcctcctggtgccactgcctgtgaatcctcccagctccccaacgcccagcttcagtgatgccaaggcagccggtgccctgctcaatgggcctccacagttcagcaccgccccagaaatcaaggcccctgagcctctgagctccttgaagtccatggcggaacgggcagccatcagctctggcattgaggaccctgtgccaacgctgcacctgaccgagcgagacatcatcctgagcagtacatcagcacctccggcctcagcccagccgcccctgcagctgtcagaggtgaacataccgctgtcgctgggtgtctgtccactgggccctgtgcccctcaccaaggagcagctctatcagcaggccatggaagaggccgcctggcaccacatgcctcacccctctgactctgagcgtattcggcagtacctcccccggaacccctgtccgacgcccccctaccaccaccagatgccacccccacactcggacactgtggaattctaccagcgcctgtcgaccgagacactcttcttcatcttctactatctggagggcactaaggcacagtatctggcagccaaggccctaaagaagcagtcatggcgattccacaccaagtacatgatgtggttccagaggcacgaggagcccaagaccatcactgacgagtttgagcagctggcgcagtccctcagcctgaccaagtactcctccctctggctgtctgctcagcctggaacaccgccctctcatcctccacttggccagctcctaggcctcctgtaggtctcagcccaaatgtcccttcctcaaagaaaccttcctggagccacccagcccagtgcctcccctttgcagtgctgggcacactcgcttggggtgtgggattttcccagtatgtgtccctgcaccaggctgtgggctctgctgccgagggaccttgatggcccccacttcacctccaggtcccagcactcagcagggcaggggctcagtgccgaaactattttttttgaatgggcttctcaagttctaatactgggaaattcctgctgcttgcaaacactctggaaccaacctacctgggtttcagcccagtccagctgggcgactctaggcaagtcactcgaacctctgtgtctcaattaacttatctgtaaaaatggggggaagaccacctacctaatgca

SEQ ID NO: 4950 - DNA, 2611 bp, Homo sapiens
  source 1..2611: mol_type = unassigned DNA
cggaggagtcttaccctaatgtaagatggtggcccgtctggctgtggaacccaccgaaagctgagagtctctctctcagccgtaaaggtcggactcgctgaagcaatcaggcccggttctgaagagttttttccccgacgctcgttcggtggtttcttgtgaggacgcggcagcccgtggagtcggctgagggaaaagcgaggcaaggcaggcgggtcgtcaaagtcctacattttagctttcagtgctgaacttccttctcccttaaattattataaacttttgctgctgtttaataaacgtgaagatgtctcgcagtcctgatgcgaaggaagaccctgtggagtgccctctttgcatggagcccttggagatagatgatatcaactttttcccttgcacctgtggctaccagatttgccgattttgttggcatcgaattcgcactgatgaaaatgggctttgtcctgcatgtagaaagccatatccagaagacccagcagtttataaaccactctcccaggaagagctgcaaaggataaagaatgagaaaaaacagaaacaaaatgagagaaaacagaaaatatcagaaaatcgcaaacatttggctagtgtacgtgtcgtacaaaaaaacctcgtctttgttgtaggtttatctcagcgcctagcagacccagaggttttaaaacgaccagaatattttgggaagtttggtaaaatacataaagttgtcatcaataatagcacatcatatgcaggctcacagggtccaagtgccagtgcttatgtaacctatatccggtcagaagacgctctcagagccatacagtgtgtcaacaatgtggtagtagatggcagaacacttaaggcatctctaggtacaacaaaatactgcagttacttcttaaagaatatgcagtgtccaaaacctgactgcatgtatcttcatgaattgggggatgaggcggccagcttcacaaaagaggaaatgcaggcgggtaaacaccaagaatatgaacagaagctacttcaagaattatataaattaaatcccaattttcttcagctatctacgggttcagttgataaaaataagaacaaagtgacaccactgcagaggtatgatacccccattgacaaaccttcagattctctcagtatagggaacggtgataattcccagcagatatctaacagtgatacgccttcaccaccacctggtttgtcaaaatccaatccagtcatccccatcagttcatccaatcacagtgcacggtccccttttgaaggggcagtaacagagtcacagtcgttattctcagacaattttcgccatcccaaccctatcccaagtgggcttcctcctttccccagctccccacagacatccagtgactggcctacagcaccagaaccacagagcctcttcacatcagaaacaatcccagtatcatcctctacagactggcaagcagcttttggctttggttcttctaaacaaccagaggatgacttgggttttgatcccttcgatgtcactcgaaaagccttagcagacctgattgagaaggaactgtccgttcaagaccaaccttccctttcgcccacatctcttcagaactcctcttcacacactacaaccgccaaaggtccaggctctggattcctgcatcctgctgcagctacaaatgccaattctctcaatagtaccttttcagtcttgccccagaggttccctcaatttcagcagcaccgagcggtttataattcattcagttttccaggccaggcagcccgctatccttggatggcctttccacgcaatagcatcatgcacttgaaccacacagcaaaccccacctcaaatagtaatttcttggacttgaatctcccgccacagcacaacacaggtctgggagggatccctgtagcagacaacagcagttctgtagagagtttaaatatgaaggaatggcaggacgggctaagggcacttctacccaacattaacatcaactttggtggactgcccaattcttcttccccctccaacgccaaccacagtgcaccaacgtccaacactgccaccaccgacagcctgagttgggacagccctggcagctggacagacccagccatcatcacaggtattccagcgtcttcaggaaacagtttagactctcttcaagatgacaatcctccacactggctaaaatcccttcaggccctcacagagatggacggccccagcgctgctccatcacagacccaccacagcgcccccttcagcacacagatcccgctgcacagagccagttggaatccctaccctcctccttcaaacccttccagcttccactccccacccccaggcatttactacagagttcaacactggaccgccattaggcaaagaggagcaaccattagaaaatgcaggatttgtcccactctgttttctccctctcagcccaccacccacagctcccttctcatctcttatgttctgaagaatccagtacctgatcaattttttttctccctaaccccagatgcaatgcgatcacagggtcattaccatctctttattaattgtaaaaatttttgttga

SEQ ID NO: 4951 - DNA, 4631 bp, Homo sapiens
  source 1..4631: mol_type = unassigned DNA
ggtggcccgtctggctgtggaacccaccgaaagctgagagtctctctctcagccgtaaaggtcggactcgctgaagcaatcaggcccggttctgaagagttttttccccgacgctcgttcggtggtttcttgtgaggacgcggcagcccgtggagtcggctgagggaaaagcgaggcaaggcaggcgggtcgtcaaagtcctacattttagctttcagtgctgaacttccttctcccttaaattattataaacttttgctgctgtttaataaacgtgaagatgtctcgcagtcctgatgcgaaggaagaccctgtggagtgccctctttgcatggagcccttggagatagatgatatcaactttttcccttgcacctgtggctaccagatttgccgattttgttggcatcgaattcgcactgatgaaaatgggctttgtcctgcatgtagaaagccatatccagaagacccagcagtttataaaccactctcccaggaagagctgcaaaggataaagaatgagaaaaaacagaaacaaaatgagagaaaacagaaaatatcagaaaatcgcaaacatttggctagtgtacgtgtcgtacaaaaaaacctcgtctttgttgtaggtttatctcagcgcctagcagacccagaggttttaaaacgaccagaatattttgggaagtttggtaaaatacataaagttgtcatcaataatagcacatcatatgcaggctcacagggtccaagtgccagtgcttatgtaacctatatccggtcagaagacgctctcagagccatacagtgtgtcaacaatgtggtagtagatggcagaacacttaaggcatctctaggtacaacaaaatactgcagttacttcttaaagaatatgcagtgtccaaaacctgactgcatgtatcttcatgaattgggggatgaggcggccagcttcacaaaagaggaaatgcaggcgggtaaacaccaagaatatgaacagaagctacttcaagaattatataaattaaatcccaattttcttcagctatctacgggttcagttgataaaaataagaacaaagtgacaccactgcagaggtatgatacccccattgacaaaccttcagattctctcagtatagggaacggtgataattcccagcagatatctaacagtgatacgccttcaccaccacctggtttgtcaaaatccaatccagtcatccccatcagttcatccaatcacagtgcacggtccccttttgaaggggcagtaacagagtcacagtcgttattctcagacaattttcgccatcccaaccctatcccaagtgggcttcctcctttccccagctccccacagacatccagtgactggcctacagcaccagaaccacagagcctcttcacatcagaaacaatcccagtatcatcctctacagactggcaagcagcttttggctttggttcttctaaacaaccagaggatgacttgggttttgatcccttcgatgtcactcgaaaagccttagcagacctgattgagaaggaactgtccgttcaagaccaaccttccctttcgcccacatctcttcagaactcctcttcacacactacaaccgccaaaggtccaggctctggattcctgcatcctgctgcagctacaaatgccaattctctcaatagtaccttttcagtcttgccccagaggttccctcaatttcagcagcaccgagcggtttataattcattcagttttccaggccaggcagcccgctatccttggatggcctttccacgcaatagcatcatgcacttgaaccacacagcaaaccccacctcaaatagtaatttcttggacttgaatctcccgccacagcacaacacaggtctgggagggatccctgtagcaggggaagaagaggtgaaggtttcgaccatgccactgtcaacctcttcccattcattacaacaaggacagcagcctacaagtctccacactactgtggcctgacaacagaactgagaggagaggattagactctggggtgcttgcatgggcaactggatttttgcatgattcctttatgattttgcttttaatgtatacacccagaagagccaatataaacgttcctcatgcctacagctagcgtgttacctcatagttgttgaagtatttcttcattaggcctttaacataatttattagtgtaataattttggcattgtttctcatgagtgatactatttctaactcataaaaataaacttgtagtactaagatcccaggtgagattagctagaattgttgttattttggctctattattgaaaaattatacaaaggtaatggtagtatcttgttttctggtttgtgaaaaaataatatcctaatctcctgaaaaatttgcaaattaacaagataatgtctattgcattctttgaatacttgagaagaaagaatacatataaaacaaaattggtggtgtcatttaatgctcagaaggatattgttggcgattgtttttagttgtctagatttatatcctataatatgcattacatgtgtagaaactgttttgttctctctcttttgcacttttgcactttctttttgaatggttgttaattatgcatagatggttaaaagataattattgtagcctaaatgcaatataatctcttttctaatgcactgcctagtataccaggaaatgcctcaaaaacagaacttcagtttatagttgacttatctgaaacttgaatacggagtaaacattgtatgtgaaaagcaaccatagtagtgtaacattgttactgaacaaacagtaattctgtgggatattgttttggaaatttcattgtttaataattaaaatgtgataataagataatattataagtacctgaccagaatgagactaaggcagaagagaagagattggatgtcctctaaaattaggccacctaaattgtaacagataattttaatcaagagaatagtggagtactttattaggacataatgtgaagtgatatttctgaaaacacatttcttgaaatagttttaaaactgataataaaggaaaagaaactgtacttagtttggagcagtggacaaaagctgattcagaaaacatgaccatattctgcctacatgaagcatctgggaagaaagggaaagtcacacctcctcttgagattttaaccattatgataaaaggtatgctttaatttgttaaaaaaaaaagtatgaaaggggataatgtgaatacaaaaaagaagcctagagattgaaaataataataatagaacatgttattaggagatggtacttaatgtcatgttggagttggagttttcaaggttacctctatataaaattggattattttctgttagatataatgtgacaaattaaatgactttatcccaaggtacagtgaggtaaacaaaaatctattcttagatatccttagatttggttaactgaggctgtagaagcagcgaattgtctagccatttaagttatttttgtaaaattcagcataaacatcaatctctaatttctatctagaagtgactttaagacattacaagaacattgccaatttggaaaatgccaataaaatactgtagacttattaatattgtagacttattatcagtcttttactatagcttaatttaattatggttttcatttttactgtaagaggccaagacttcacttatgtctcctgtggagctgaggctcctgggccttgttattataacaaactctggctccttgtaatgatgcttactagctcaaagccttctccagcattcagtgttagcctttcattgcctggatcttcttacaaagccatagcaagtggttagtgccatttgctccttggtgttgagagatatacctgttaaatgaggcttctttcctttctcattcatagccagcgtggaaaaatcatcaggtagtttgcccagatttgccagagccctaaataaaatggcaaaacgatctccctgcctgcttctcctccccacccccacttacatgcacaccgtaaatcaagaaatgctttttgggcaattagactttatcttctaaatttttgcatagaatggctaaacatgatcttttgcctcactttgtaattcctacaccttccttgtaagcttcaccttttgcttacctaatattttatttaaacatggttttttaaaaaacctgaagctttaaaatcatagtcataattaattttacactaaaggacagaagaaattatacaacacataaaagaagccactacttcacatagcaagcaaattgaaatcaaaatgacagaagaatgagaaattctttaaaagcttcaggttttttttgttgttgttgttaaattcctgcatgatgcatcatgtgcaagggaaacttaatatacttttacacccttaacctttataaagtgactagcttttcccttaacataggaatttttaacctggagcccagatttttgagagtacacacaaaattgtgggtttgtgtgcatgtacatatgtccatttttttctagggagaagatccatagttattagatttgtgaaggatttggtgatccccttctcccatc

SEQ ID NO: 4952 - DNA, 1609 bp, Homo sapiens
  source 1..1609: mol_type = unassigned DNA
cggaggagtcttaccctaatgtaagatggtggcccgtctggctgtggaacccaccgaaagctgagagtctctctctcagccgtaaaggtcggactcgctgaagcaatcaggcccggttctgaagagttttttccccgacgctcgttcggtggtttcttgtgaggacgcggcagcccgtggagtcggctgagggaaaagcgaggcaaggcaggcgggtcgtcaaagtcctacattttagctttcagtgctgaacttccttctcccttaaattattataaacttttgctgctgtttaataaacgtgaagatgtctcgcagtcctgatgcgaaggaagaccctgtggagtgccctctttgcatggagcccttggagatagatgatatcaactttttcccttgcacctgtggctaccagatttgccgattttgttggcatcgaattcgcactgatgaaaatgggctttgtcctgcatgtagaaagccatatccagaagacccagcagtttataaaccactctcccaggaagagctgcaaaggataaagaatgagaaaaaacagaaacaaaatgagagaaaacagaaaatatcagaaaatcgcaaacatttggctagtgtacgtgtcgtacaaaaaaacctcgtctttgttgtaggtttatctcagcgcctagcagacccagaggttttaaaacgaccagaatattttgggaagtttggtaaaatacataaagttgtcatcaataatagcacatcatatgcaggctcacagggtccaagtgccagtgcttatgtaacctatatccggtcagaagacgctctcagagccatacagtgtgtcaacaatgtggtagtagatggcagaacacttaaggcatctctaggtacaacaaaatactgcagttacttcttaaagaatatgcagtgtccaaaacctgactgcatgtatcttcatgaattgggggatgaggcggccagcttcacaaaagaggaaatgcaggcgggtaaacaccaagaatatgaacagaagctacttcaagaattatataaattaaatcccaattttcttcagctatctacgggttcagttgataaaaataagaacaaagtgacaccactgcagaggtatgatacccccattgacaaaccttcagattctctcagtatagggaacggtgataattcccagcagatatctaacagtgatacgccttcaccaccacctggtttgtcaaaatccaatccagtcatccccatcagttcatccaatcacagtgcacggtccccttttgaaggggcagtaacagagtcacagtcgttattctcagacaattttcgccatcccaaccctatcccaagtgggcttcctcctttccccagctccccacagacatccagtgactggcctacagcaccagaaccacagagcctcttcacatcagaaacaatcccagtatcatcctctacagactggcaagcagcttttggctttggttcttctaaacaaccagaggatgacttgggttttgatcccttcgatgtcactcgaaaagccttagcagaccttacagagccaattgagaggaagagactggcagtgctgaagagaagatag

SEQ ID NO: 4953 - DNA, 2215 bp, Homo sapiens
  source 1..2215: mol_type = unassigned DNA
accctaatgtaagatggtggcccgtctggctgtggaacccaccgaaagctgagagtctctctctcagccgtaaaggtcggactcgctgaagcaatcaggcccggttctgaagagttttttccccgacgctcgttcggtggtttcttgtgaggacgcggcagcccgtggagtcggctgagggaaaagcgaggcaaggcaggcgggtcgtcaaagtcctacattttagctttcagtgctgaacttccttctcccttaaattattataaacttttgctgctgtttaataaacgtgaagatgtctcgcagtcctgatgcgaaggaagaccctgtggagtgccctctttgcatggagcccttggagatagatgatatcaactttttcccttgcacctgtggctaccagatttgccgattttgttggcatcgaattcgcactgatgaaaatgggctttgtcctgcatgtagaaagccatatccagaagacccagcagtttataaaccactctcccaggaagagctgcaaaggataaagaatgagaaaaaacagaaacaaaatgagagaaaacagaaaatatcagaaaatcgcaaacatttggctagtgtacgtgtcgtacaaaaaaacctcgtctttgttgtaggtttatctcagcgcctagcagacccagaggttttaaaacgaccagaatattttgggaagtttggtaaaatacataaagttgtcatcaataatagcacatcatatgcaggctcacagggtccaagtgccagtgcttatgtaacctatatccggtcagaagacgctctcagagccatacagtgtgtcaacaatgtggtagtagatggcagaacacttaaggcatctctaggtacaacaaaatactgcagttacttcttaaagaatatgcagtgtccaaaacctgactgcatgtatcttcatgaattgggggatgaggcggccagcttcacaaaagaggaaatgcaggcgggtaaacaccaagaatatgaacagaagctacttcaagaattatataaattaaatcccaattttcttcagctatctacgggttcagttgataaaaataagaacaaagtgacaccactgcagagccccattgacaaaccttcagattctctcagtatagggaacggtgataattcccagcagatatctaacagtgatacgccttcaccaccacctggtttgtcaaaatccaatccagtcatccccatcagttcatccaatcacagtgcacggtccccttttgaaggggcagtaacagagtcacagtcgttattctcagacaattttcgccatcccaaccctatcccaagtgggcttcctcctttccccagctccccacagacatccagtgactggcctacagcaccagaaccacagagcctcttcacatcagaaacaatcccagtatcatcctctacagactggcaagcagcttttggctttggttcttctaaacaaccagaggatgacttgggttttgatcccttcgatgtcactcgaaaagccttagcagacctgattgagaaggaactgtccgttcaagaccaaccttccctttcgcccacatctcttcagaactcctcttcacacactacaaccgccaaaggtccaggctctggattcctgcatcctgctgcagctacaaatgccaattctctcaatagtaccttttcagtcttgccccagaggttccctcaatttcagcagcaccgagcggtttataattcattcagttttccaggccaggcagcccgctatccttggatggcctttccacgcaatagcatcatgcacttgaaccacacagcaaaccccacctcaaatagtaatttcttggacttgaatctcccgccacagcacaacacaggtctgggagggatccctgtagcaggtattccagcgtcttcaggaaacagtttagactctcttcaagatgacaatcctccacactggctaaaatcccttcaggccctcacagagatggacggccccagcgctgctccatcacagacccaccacagcgcccccttcagcacacagatcccgctgcacagagccagttggaatccctaccctcctccttcaaacccttccagcttccactccccacccccaggctttcagacagccttcagaccccccagcaaaacccccacagatttactacagagttcaacactggaccgccattag

SEQ ID NO: 4954 - DNA, 1687 bp, Homo sapiens
  source 1..1687: mol_type = unassigned DNA
atgtctcgcagtcctgatgcgaaggaagaccctgtggagtgccctctttgcatggagcccttggagatagatgatatcaactttttcccttgcacctgtggctaccagatttgccgattttgttggcatcgaattcgcactgatgaaaatgggctttgtcctgcatgtagaaagccatatccagaagacccagcagtttataaaccactctcccaggaagagctgcaaaggataaagaatgagaaaaaacagaaacaaaatgagagaaaacagaaaatatcagaaaatcgcaaacatttggctagtgtacgtgtcgtacaaaaaaacctcgtctttgttgtaggtttatctcagcgcctagcagacccagaggttttaaaacgaccagaatattttgggaagtttggtaaaatacataaagttgtcatcaataatagcacatcatatgcaggctcacagggtccaagtgccagtgcttatgtaacctatatccggtcagaagacgctctcagagccatacagtgtgtcaacaatgtggtagtagatggcagaacacttaaggcatctctaggtacaacaaaatactgcagttacttcttaaagaatatgcagtgtccaaaacctgactgcatgtatcttcatgaattgggggatgaggcggccagcttcacaaaagaggaaatgcaggcgggtaaacaccaagaatatgaacagaagctacttcaagaattatataaattaaatcccaattttcttcagctatctacgggttcagttgataaaaataagaacaaagtgacaccactgcagaggtatgatacccccattgacaaaccttcagattctctcagtatagggaacggtgataattcccagcagatatctaacagtgatacgccttcaccaccacctggtttgtcaaaatccaatccagtcatccccatcagttcatccaatcacagtgcacggtccccttttgaaggggcagtaacagagtcacagtcgttattctcagacaattttcgccatcccaaccctatcccaagtgggcttcctcctttccccagctccccacagacatccagtgactggcctacagcaccagaaccacagagcctcttcacatcagaaacaatcccagtatcatcctctacagactggcaagcagcttttggctttggttcttctaaacaaccagaggatgacttgggttttgatcccttcgatgtcactcgaaaagccttagcagaccttacagagccaattgagaggaagagactggcagtgctgaagagaagataggctcattcagtaggataatagatgtcgttgggtggtgggaagagataagctcctgagacgagcatgtggtatagcttaagagaggtgggtggccaggcgcggtggctcacgcctgtaatcccaacactttgggaggccaaggcaggcagatcacaaggtcaggagatcgagaccatcctggctaacacggtgaaaccccgtctctactaaaaatacaaaaaaattagctgggcgtggtggcgggcacctgtagccccagctactcgggaggctgaggcaggagaatggcgcgaacccaggaggtggagcttgcagtgagccgagatggtgccactgtgctccagcctgggcaacagagcgagactccgtctaaaaaaaaaaaaaa

SEQ ID NO: 4955 - DNA, 3297 bp, Homo sapiens
  source 1..3297: mol_type = unassigned DNA
tggtggcccgtctggctgtggaacccaccgaaagctgagagtctctctctcagccgtaaaggtcggactcgctgaagcaatcaggcccggttctgaagagttttttccccgacgctcgttcggtggtttcttgtgaggacgcggcagcccgtggagtcggctgagggaaaagcgaggcaaggcaggcgggtcgtcaaagtcctacattttagctttcagtgctgaacttccttctcccttaaattattataaacttttgctgctgtttaataaacgtgaagatgtctcgcagtcctgatgcgaaggaagaccctgtggagtgccctctttgcatggagcccttggagatagatgatatcaactttttcccttgcacctgtggctaccagatttgccgattttgttggcatcgaattcgcactgatgaaaatgggctttgtcctgcatgtagaaagccatatccagaagacccagcagtttataaaccactctcccaggaagagctgcaaaggataaagaatgagaaaaaacagaaacaaaatgagagaaaacagaaaatatcagaaaatcgcaaacatttggctagtgtacgtgtcgtacaaaaaaacctcgtctttgttgtaggtttatctcagcgcctagcagacccagaggttttaaaacgaccagaatattttgggaagtttggtaaaatacataaagttgtcatcaataatagcacatcatatgcaggctcacagggtccaagtgccagtgcttatgtaacctatatccggtcagaagacgctctcagagccatacagtgtgtcaacaatgtggtagtagatggcagaacacttaaggcatctctaggtacaacaaaatactgcagttacttcttaaagaatatgcagtgtccaaaacctgactgcatgtatcttcatgaattgggggatgaggcggccagcttcacaaaagaggaaatgcaggcgggtaaacaccaagaatatgaacagaagctacttcaagaattatataaattaaatcccaattttcttcagctatctacgggttcagttgataaaaataagaacaaagtgacaccactgcagaggtatgatacccccattgacaaaccttcagattctctcagtatagggaacggtgataattcccagcagatatctaacagtgatacgccttcaccaccacctggtttgtcaaaatccaatccagtcatccccatcagttcatccaatcacagtgcacggtccccttttgaaggggcagtaacagagtcacagtcgttattctcagacaattttcgccatcccaaccctatcccaagtgggcttcctcctttccccagctccccacagacatccagtgactggcctacagcaccagaaccacagagcctcttcacatcagaaacaatcccagtatcatcctctacagactggcaagcagcttttggctttggttcttctaaacaaccagaggatgacttgggttttgatcccttcgatgtcactcgaaaagccttagcagacctgattgagaaggaactgtccgttcaagaccaaccttccctttcgcccacatctcttcagaactcctcttcacacactacaaccgccaaaggtccaggctctggattcctgcatcctgctgcagctacaaatgccaattctctcaatagtaccttttcagtcttgccccagaggttccctcaatttcagcagcaccgagcggtttataattcattcagttttccaggccaggcagcccgctatccttggatggcctttccacgcaatagcatcatgcacttgaaccacacagcaaaccccacctcaaatagtaatttcttggacttgaatctcccgccacagcacaacacaggtctgggagggatccctgtagcaggtattccagcgtcttcaggaaacagtttagactctcttcaagatgacaatcctccacactggctaaaatcccttcaggccctcacagagatggacggccccagcgctgctccatcacagacccaccacagcgcccccttcagcacacagatcccgctgcacagagccagttggaatccctaccctcctccttcaaacccttccagcttccactccccacccccaggctttcagacagccttcagaccccccagcaaaacccccacagatttactacagagttcaacactggaccgccattaggcaaagaggagcaaccattagaaaatgcaggatttgtcccactctgttttctccctctcagcccaccacccacagctcccttctcatctcttatgttctgaagaatccagtacctgatcaattttttttctccctaaccccagatgcaatgcgatcacagggtcattaccatctctttattaattgtaaaaatttttgttgatccagcatttgagtgacactgttgaatgtttctaaaaatgcctttttaaggagagaaaaaaaaatcaaagggcagtctcaatacttagaaaattattgtttgtctgttgcgcataataatgacataatctgcttagcagaaaatgacgattaatctataggaaagctcaagtaaatgcattatcaactgcagaagtttgaaaaccaggttcatttacgtgagattgctaaatgcatgggggaaagcagtggtcctagcatccatcttgtattcagcttatcattattgcagggaaaatgcttttaatttaaattaatttttaattcttttggcaagttgatggcaaggacttgattgtgtcattaagcaaaagaatgtattggaagttgatggaaagacaaattcatctgtagtagtaactggccgattgctaaagagttcataaggaggtgagaagtaatttttttaaaggagaaaaattttttggctttagatttaaagtaaattgaaatgttttaaagaaaaaagtattcacagatttaatacctattaataatataagagctgaaatgtaagtcatttcttcagtccttctcctctgtcggaatcttttttgttttaccataaattcacctgacgagggcactctgagatagcactgctctggggccatctgatcaccatcgggagcaaatctctgacctccttgcctgcagcttttacttaaccctgtagtttctggacgtttgtgcagtattgaaaagacaggagaaaagaaaacagaaacctggttataacctgacgctaaaactaaaaacaaggaaatgtacctctttcttcagaattaaaactaaaatcttaaataaaacagaaaacttgatggtg

SEQ ID NO: 4956 - DNA, 4642 bp, Homo sapiens
  source 1..4642: mol_type = unassigned DNA
ggtggcccgtctggctgtggaacccaccgaaagctgagagtctctctctcagccgtaaaggtcggactcgctgaagcaatcaggcccggttctgaagagttttttccccgacgctcgttcggtggtttcttgtgaggacgcggcagcccgtggagtcggctgagggaaaagcgaggcaaggcaggcgggtcgtcaaagtcctacattttagctttcagtgctgaacttccttctcccttaaattattataaacttttgctgctgtttaataaacgtgaagatgtctcgcagtcctgatgcgaaggaagaccctgtggagtgccctctttgcatggagcccttggagatagatgatatcaactttttcccttgcacctgtggctaccagatttgccgattttgttggcatcgaattcgcactgatgaaaatgggctttgtcctgcatgtagaaagccatatccagaagacccagcagtttataaaccactctcccaggaagagctgcaaaggataaagaatgagaaaaaacagaaacaaaatgagagaaaacagaaaatatcagaaaatcgcaaacatttggctagtgtacgtgtcgtacaaaaaaacctcgtctttgttgtaggtttatctcagcgcctagcagacccagaggttttaaaacgaccagaatattttgggaagtttggtaaaatacataaagttgtcatcaataatagcacatcatatgcaggctcacagggtccaagtgccagtgcttatgtaacctatatccggtcagaagacgctctcagagccatacagtgtgtcaacaatgtggtagtagatggcagaacacttaaggcatctctaggtacaacaaaatactgcagttacttcttaaagaatatgcagtgtccaaaacctgactgcatgtatcttcatgaattgggggatgaggcggccagcttcacaaaagaggaaatgcaggcgggtaaacaccaagaatatgaacagaagctacttcaagaattatataaattaaatcccaattttcttcagctatctacgggttcagttgataaaaataagaacaaagtgacaccactgcagagccccattgacaaaccttcagattctctcagtatagggaacggtgataattcccagcagatatctaacagtgatacgccttcaccaccacctggtttgtcaaaatccaatccagtcatccccatcagttcatccaatcacagtgcacggtccccttttgaaggggcagtaacagagtcacagtcgttattctcagacaattttcgccatcccaaccctatcccaagtgggcttcctcctttccccagctccccacagacatccagtgactggcctacagcaccagaaccacagagcctcttcacatcagaaacaatcccagtatcatcctctacagactggcaagcagcttttggctttggttcttctaaacaaccagaggatgacttgggttttgatcccttcgatgtcactcgaaaagccttagcagacctgattgagaaggaactgtccgttcaagaccaaccttccctttcgcccacatctcttcagaactcctcttcacacactacaaccgccaaaggtccaggctctggattcctgcatcctgctgcagctacaaatgccaattctctcaatagtaccttttcagtcttgccccagaggttccctcaatttcagcagcaccgagcggtttataattcattcagttttccaggccaggcagcccgctatccttggatggcctttccacgcaatagcatcatgcacttgaaccacacagcaaaccccacctcaaatagtaatttcttggacttgaatctcccgccacagcacaacacaggtctgggagggatccctgtagcaggggaagaagaggtgaaggtttcgaccatgccactgtcaacctcttcccattcattacaacaaggacagcagcctacaagtctccacactactgtggcctgacaacagaactgagaggagaggattagactctggggtgcttgcatgggcaactggatttttgcatgattcctttatgattttgcttttaatgtatacacccagaagagccaatataaacgttcctcatgcctacagctagcgtgttacctcatagttgttgaagtatttcttcattaggcctttaacataatttattagtgtaataattttggcattgtttctcatgagtgatactatttctaactcataaaaataaacttgtagtactaagatcccaggtgagattagctagaattgttgttattttggctctattattgaaaaattatacaaaggtaatggtagtatcttgttttctggtttgtgaaaaaataatatcctaatctcctgaaaaatttgcaaattaacaagataatgtctattgcattctttgaatacttgagaagaaagaatacatataaaacaaaattggtggtgtcatttaatgctcagaaggatattgttggcgattgtttttagttgtctagatttatatcctataatatgcattacatgtgtagaaactgttttgttctctctcttttgcacttttgcactttctttttgaatggttgttaattatgcatagatggttaaaagataattattgtagcctaaatgcaatataatctcttttctaatgcactgcctagtataccaggaaatgcctcaaaaacagaacttcagtttatagttgacttatctgaaacttgaatacggagtaaacattgtatgtgaaaagcaaccatagtagtgtaacattgttactgaacaaacagtaattctgtgggatattgttttggaaatttcattgtttaataattaaaatgtgataataagataatattataagtacctgaccagaatgagactaaggcagaagagaagagattggatgtcctctaaaattaggccacctaaattgtaacagataattttaatcaagagaatagtggagtactttattaggacataatgtgaagtgatatttctgaaaacacatttcttgaaatagttttaaaactgataataaaggaaaagaaactgtacttagtttggagcagtggacaaaagctgattcagaaaacatgaccatattctgcctacatgaagcatctgggaagaaagggaaagtcacacctcctcttgagattttaaccattatgataaaaggtatgctttaatttgttaaaaaaaaaagtatgaaaggggataatgtgaatacaaaaaagaagcctagagattgaaaataataataatagaacatgttattaggagatggtacttaatgtcatgttggagttggagttttcaaggttacctctatataaaattggattattttctgttagatataatgtgacaaattaaatgactttatcccaaggtacagtgaggtaaacaaaaatctattcttagatatccttagatttggttaactgaggctgtagaagcagcgaattgtctagccatttaagttatttttgtaaaattcagcataaacatcaatctctaatttctatctagaagtgactttaagacattacaagaacattgccaatttggaaaatgccaataaaatactgtagacttattaatattgtagacttattatcagtcttttactatagcttaatttaattatggttttcatttttactgtaagaggccaagacttcacttatgtctcctgtggagctgaggctcctgggccttgttattataacaaactctggctccttgtaatgatgcttactagctcaaagccttctccagcattcagtgttagcctttcattgcctggatcttcttacaaagccatagcaagtggttagtgccatttgctccttggtgttgagagatatacctgttaaatgaggcttctttcctttctcattcatagccagcgtggaaaaatcatcaggtagtttgcccagatttgccagagccctaaataaaatggcaaaacgatctccctgcctgcttctcctccccacccccacttacatgcacaccgtaaatcaagaaatgctttttgggcaattagactttatcttctaaatttttgcatagaatggctaaacatgatcttttgcctcactttgtaattcctacaccttccttgtaagcttcaccttttgcttacctaatattttatttaaacatggttttttaaaaaacctgaagctttaaaatcatagtcataattaattttacactaaaggacagaagaaattatacaacacataaaagaagccactacttcacatagcaagcaaattgaaatcaaaatgacagaagaatgagaaattctttaaaagcttcaggttttttttgttgttgttgttaaattcctgcatgatgcatcatgtgcaagggaaacttaatatacttttacacccttaacctttataaagtgactagcttttcccttaacataggaatttttaacctggagcccagatttttgagagtacacacaaaattgtgggtttgtgtgcatgtacatatgtccatttttttctagggagaagatccatagttattagatttgtgaaggatttggtgatccccttctcccatcaaaaaaaaaaaaaaaaagaa

SEQ ID NO: 4957 - DNA, 3563 bp, Homo sapiens
  source 1..3563: mol_type = unassigned DNA
agcgtgcgcctgcgcacgggaggccggaggagtcttaccctaatgtaagatggtggcccgtctggctgtggaacccaccgaaagctgagagtctctctctcagccgtaaaggtcggactcgctgaagcaatcaggcccggttctgaagagttttttccccgacgctcgttcggtggtttcttgtgaggacgcggcagcccgtggagtcggctgagggaaaagcgaggcaaggcaggcgggtcgtcaaagtcctacattttagctttcagtgctgaacttccttctcccttaaattattataaacttttgctgctgtttaataaacgtgaagatgtctcgcagtcctgatgcgaaggaagaccctgtggagtgccctctttgcatggagcccttggagatagatgatatcaactttttcccttgcacctgtggctaccagatttgccgattttgttggcatcgaattcgcactgatgaaaatgggctttgtcctgcatgtagaaagccatatccagaagacccagcagtttataaaccactctcccaggaagagctgcaaaggataaagaatgagaaaaaacagaaacaaaatgagagaaaacagaaaatatcagaaaatcgcaaacatttggctagtgtacgtgtcgtacaaaaaaacctcgtctttgttgtaggtttatctcagcgcctagcagacccagaggttttaaaacgaccagaatattttgggaagtttggtaaaatacataaagttgtcatcaataatagcacatcatatgcaggctcacagggtccaagtgccagtgcttatgtaacctatatccggtcagaagacgctctcagagccatacagtgtgtcaacaatgtggtagtagatggcagaacacttaaggcatctctaggtacaacaaaatactgcagttacttcttaaagaatatgcagtgtccaaaacctgactgcatgtatcttcatgaattgggggatgaggcggccagcttcacaaaagaggaaatgcaggcgggtaaacaccaagaatatgaacagaagctacttcaagaattatataaattaaatcccaattttcttcagctatctacgggttcagttgataaaaataagaacaaagtgacaccactgcagaggtatgatacccccattgacaaaccttcagattctctcagtatagggaacggtgataattcccagcagatatctaacagtgatacgccttcaccaccacctggtttgtcaaaatccaatccagtcatccccatcagttcatccaatcacagtgcacggtccccttttgaaggggcagtaacagagtcacagtcgttattctcagacaattttcgccatcccaaccctatcccaagtgggcttcctcctttccccagctccccacagacatccagtgactggcctacagcaccagaaccacagagcctcttcacatcagaaacaatcccagtatcatcctctacagactggcaagcagcttttggctttggttcttctaaacaaccagaggatgacttgggttttgatcccttcgatgtcactcgaaaagccttagcagacctgattgagaaggaactgtccgttcaagaccaaccttccctttcgcccacatctcttcagaactcctcttcacacactacaaccgccaaaggtccaggctctggattcctgcatcctgctgcagctacaaatgccaattctctcaatagtaccttttcagtcttgccccagaggttccctcaatttcagcagcaccgagcggtttataattcattcagttttccaggccaggcagcccgctatccttggatggcctttccacgcaatagcatcatgcacttgaaccacacagcaaaccccacctcaaatagtaatttcttggacttgaatctcccgccacagcacaacacaggtctgggagggatccctgtagcagacaacagcagttctgtagagagtttaaatatgaaggaatggcaggacgggctaagggcacttctacccaacattaacatcaactttggtggactgcccaattcttcttccccctccaacgccaaccacagtgcaccaacgtccaacactgccaccaccgacagcctgagttgggacagccctggcagctggacagacccagccatcatcacaggtattccagcgtcttcaggaaacagtttagactctcttcaagatgacaatcctccacactggctaaaatcccttcaggccctcacagagatggacggccccagcgctgctccatcacagacccaccacagcgcccccttcagcacacagatcccgctgcacagagccagttggaatccctaccctcctccttcaaacccttccagcttccactccccacccccaggctttcagacagccttcagaccccccagcaaaacccccacagatttactacagagttcaacactggaccgccattaggcaaagaggagcaaccattagaaaatgcaggatttgtcccactctgttttctccctctcagcccaccacccacagctcccttctcatctcttatgttctgaagaatccagtacctgatcaattttttttctccctaaccccagatgcaatgcgatcacagggtcattaccatctctttattaattgtaaaaatttttgttgatccagcatttgagtgacactgttgaatgtttctaaaaatgcctttttaaggagagaaaaaaaaatcaaagggcagtctcaatacttagaaaattattgtttgtctgttgcgcataataatgacataatctgcttagcagaaaatgacgattaatctataggaaagctcaagtaaatgcattatcaactgcagaagtttgaaaaccaggttcatttacgtgagattgctaaatgcatgggggaaagcagtggtcctagcatccatcttgtattcagcttatcattattgcagggaaaatgcttttaatttaaattaatttttaattcttttggcaagttgatggcaaggacttgattgtgtcattaagcaaaagaatgtattggaagttgatggaaagacaaattcatctgtagtagtaactggccgattgctaaagagttcataaggaggtgagaagtaatttttttaaaggagaaaaattttttggctttagatttaaagtaaattgaaatgttttaaagaaaaaagtattcacagatttaatacctattaataatataagagctgaaatgtaagtcatttcttcagtccttctcctctgtcggaatcttttttgttttaccataaattcacctgacgagggcactctgagatagcactgctctggggccatctgatcaccatcgggagcaaatctctgacctccttgcctgcagcttttacttaaccctgtagtttctggacgtttgtgcagtattgaaaagacaggagaaaagaaaacagaaacctggttataacctgacgctaaaactaaaaacaaggaaatgtacctctttcttcagaattaaaactaaaatcttaaataaaacagaaaacttgatggtgaca

SEQ ID NO: 4958 - DNA, 6176 bp, Homo sapiens
  source 1..6176: mol_type = unassigned DNA
caatgaaaacgaggggggcgcggaggaggaggcggcggcgtcggtggcggcggcgacggcggcgcggaggcgaaggcagcggcgggcgcagcgaggagggcgaggccgggggccgagagggcgggagggcgtagtggcggcccgtcggggcggctgaggcgggcagccgaagcagtggctctcggagggggaacaaagagcagcgactaaggcggcagaggagcggcggcggtggcggcgctgcagcagcgggcgggactggtatggtggttccacagggcagaccccgctgcactcacagggaggaggaggcggcagcggcggaggaaggcggcgcaccccgagaggcatgcccaaagaaaaatacgagccccctgaccctcggaggatgtatacaattatgtcttctgaggaagcagcaaatggaaagaaatcccactgggcagagcttgaaataagtggaaaagtaagaagcttaagcgcatctttgtggtcactaactcacctgacagctttgcatttgagtgacaattccctgtcccgaattccttcagacattgccaagcttcacaatctggtgtatttggacctgtcatctaataaaattcgtagcttacccgcagaactcggaaacatggtatcactcagggagctccatttaaataacaacctgttacgagttctaccttttgagctgggaaaactgtttcagttgcagactttaggcctgaaaggaaatccccttacccaggatatattgaacctttatcaggaaccagatggaacaagacggctgctgaactatttgcttgataatttgtcaggtactgcaaaaagaattacaacagaacaaccacctccaaggtcttggattatgttacaagaaccagataggacaaggccaactgccttgttttctgtcatgtgctataatgttctttgtgataaatatgcgacccggcagttatacggctactgtccatcatgggcgctaaactgggactacaggaaaaaggccattattcaagaaatcttgagctgcaatgctgatatcgtaagtcttcaggaggttgaaacggaacagtattacagtttttttctggtagagctgaaagaacgtggctataatggattcttcagtcctaagtctagagctaggacaatgtcagaacaagaaaggaaacatgttgatggctgtgcaatattcttcaagacagaaaaatttactttggttcagaaacacactgttgaatttaatcagctagccatggcaaattctgaggggtctgaagctatgctgaacagagtcatgacaaaagataacattggggttgcagtactgctagaacttcggaaggaatcgattgaaatgccgtccggaaagccacatcttggaacagaaaaacaacttattcttgtggctaacgcccacatgcattgggaccctgaatactctgatgtgaagttggtacaaactatgatgttcctctcagaagtgaagaacattattgataaagcctctcgcaacctcaaatccagtgttttgggagaatttggaactattccacttgtgttatgtgcagatcttaattctttgccagactctggtgttgtagaatatttgagcacaggtggagtagaaacaaatcacaaagactttaaggagttgaggtataatgaaagtctcacaaacttcagctgtcatgggaagaatggaaccaccaatggaaggatcactcatggtttcaagttacagagtgcctatgagagtggcctgatgccttacacgaattacacatttgatttcaagggtataatagactacattttctattctaaacctcagctgaacaccttaggcatcctgggccctctggaccaccactggctggttgagaataacatcagtggctgcccgcaccccctcatcccctctgaccacttctcactttttgcacaactggagctcttactgcctttcctgccccaagtcaacggcatccaccttcctggcaggaggtagtcaagcaccttcagaggacagccttgattcacttgtaaacttgtgaaaatctgaacataggggagtgaggtatggccactgaggatttttgcttgcttaagaatgatttggactttcaatctgattatttgataaggatatagtatgaaagccaggtgctagcaacagacaaattctgagcccaatatgctttatactgctagacagggattggtgtgtttgcacctgtctttcatttgtcataagagattttcctatttcttctacccaatagaatattttcatgcctggaaataggaaaatgtgtgaacagcgtattctcttcacacagaaatctgtagcactgcttttttgaggccagtagcaacatccagagatcattcttccatactttactccctcctttttcagacttgtttgtaaagtacagaatctgaatttagcctttatgattgtatatgatccacagaagacctgatttatgaaattttgtactaaaatcatttggaaatgattgtattgtaaactgaggctaaatttttttttaaacctgtttcatgtgttataaaggccagcttgtaaaagaagctgcaacagactttctctgctcatgatttgcactcttagggttttgttagcccttttgtactactttctttttaaattgagaacatggttctttacatataaatctgcttcaaccttaggatgttttcagaccagaggcaacttattcatgaatttttatgaaaactatctactaggacagataagctgaacagtgatgatctgtagacatttatggactgaatgtaatggttgatatatgtacattctgatatttttaaatctttaactttttaaagttaaaaacctacagctgcttaggtccagcttcttaactctttttgagacacttcctgtcctatctccactgtgcctgcctaaatttgttctcaccaagcactgcctgtgcatgcagagaaaatctgtgcatcctcttttatatttttaaaatactgtttaacatttgtgagaattttatgaaaatgcttttgtatgagctgtggctttttcccattgtgaagcattgaatatcacattttggaacatgttatagggtgagtccctggatctttgctcaccagatccaagcactgcttctcggtgtcattgcagtgtgctgcttgtcacccagaatactactatcatgtgaattctttttgtcgtcagtgtcttttccttagtctttttgttgttgttgttgttgttgttttaatcattccttttttaagaagaagtaattttccatttatgaagcagtatgaattagatgtattttcaaaacaggtccctaagacaattcttcagatcatttttaaaatgactaagtcattttagtatgtcaagcaagataaaaattacatcataccgtctattttgcccatagtgccatttagagatgaaaaccagctttaactttgcaaagtgaacatgtacatggtctgctctcatttattcattcttctctcaaaagtcaaatgaatgcagagggagcttggtcaaactgcttttgtttcaactgcaggcaggggagcaaaaggacgccatgtgagcattaggaaaaaaaatactcactcttactaacaatttttatacagaaaatgagtcattttggaaatgattcttatgttttttttttttctccttttagaaaattctccaaaaggttttgatgttgaatcttggtcttggacctgttttttcctttgagggttttttgttttttgttttttctaggatttcattgtgatgttttggttttgttttttgctttttgtttaagttgtgctgacaccaaacacatccagtttataatcagtacattggaaagctggtattgatgtagaaccagtgcataactttttatggggttttgttattggtttttttttgtaaagtgtgaataaaaggtatgtttactcatttttcctgaacactgtgttggtaatgtgcatcatgacaatttccagtgaaggtgagctggagctggttggactaatgagactgaggaagcagcttttcctacgatctgcattatgtaatcacaggtccagagagctttatggaagcgggagaggaggagcacttactcatgttgtatttgttaatggaggatgtcatcttttcatagatgctggaactagagtgcacttgttagatgctaaaggtttgagctttacacaaaatgtcttcatctgtatttgttattgtctacaatatatttgaatttggggcagcatattaagatgtaatggcctgttatgtcttgaaaatacttgttttgcctcttccaggcatactgcattctgtggatcagtttgaacagcttctccaccttatttggacagtgataaattgaaccaagagtgtagatttacaagtgtaaccttcaaaagaggaagaactatttggggtctgtaggtaatgaacagtcacaccaaaatagactatgatgcttttgttaagaaaggtttcatgttttagatattttccgtgtcctaaataattttcaataatctataatccctaaaatgcaataaaaactagtatgttttcacggtgtatattttttttcaaaaattctgtaacaaatatatttaatgtgttgccataatgtcatttcagtatttttgctggataaatccattttagaaatgtcttacaaaaagtttagggcatgttttctgttttaaagaccagaagtttgaaggcacccaaatccttgtcgccaatctcctgaagtacagctttaccatattagtggtcattatttatgctttgagagtttcaatattgttcgtcaagttaacttatggcataatttaagctaaagttgtagaaatgaattgttgagtgcaactttcatagtcccaaagataggcagagaacatctccagaaatgtgtgtgtgtgtgtgtgtgtgtgtgtgtgtgtttaatatgatttagtgacaaccaggaaaacttacttgggattattagcactttcaaacttagggacattattaaattggatggaatgcacttctaaatgtttaaattaaaatttcaaagctctttcgagattcaggttctcaataataatattcaagttttagagtttcactttgtactatttaaatttatggaactagtttccatactgacttgtaaggttttggggtcatatataaggactaaagccaagctaggcaaaacaatgacagcaccgttttttcagtgaagctctcagaatgtccagtacagatgttgcagataattccaagaactccttcagcaggtgttcttcaccattcgtaaacagtattttaagatgttcactttgctcttctttttggttacatacattttaataactggtatgttgaagtagtgtctaaaagtatctagtctttattcacagtacattatattgtgtgatgcactggactaactcttgtttaccattcatgtaacaaaacccagcacattatctgcactataagctcaaagaatgtcacatccgcccagacagctctttgatgagggtgatgggaactgaataaaccatacggactggcagtaacaagggcttttactgttctgttcagtggaaccttcttggtcaaattgtaattagctagcattatatttatatacagggtcttttttctttaccgatgtattttcctactcatagccaaccaataaattcagtatctgtttcaaatattttagaagtgtagtttgtatagctgtagtactgaggtttgaggaaaaataaatgttgatcagcagaccacgtatttaaaattctgaatcttctgggacagggttgtaactcagccttccaaagggaagagtgcagggggacggggccatgatatggggaaatggtgtaaactaatgtatttctttattggctgttattctgtataacactcatatctttgccaaagttcaattttatatttaggcaactgatggtccttttgcatttaggattttcgttgttgttaccttatacctcatgatataaggaatgggctcatgtgtcttccgtcttttggaaggaggttgacatattttaaataaatgcttttaaatacagta

SEQ ID NO: 4959 - DNA, 6303 bp, Homo sapiens
  source 1..6303: mol_type = unassigned DNA
ggcgcggaggaggaggcggcggcgtcggtggcggcggcgacggcggcgcggaggcgaaggcagcggcgggcagccgaagcagtggctctcggagggggaacaaagagcagcgactaaggcggcagaggagcggcggcggtggcggcgctgcagcagcgggcgggactggtatggtggttccacagggcagaccccgctgcactcacagggaggaggaggcggcagcggcggaggaaggcggcgcaccccgagagcactaatcgctattttctttggaaacttcctttgattctttacctccttcaccttccccgaagagcctgctaaccaacacctgtggccttctgtttttaactgttgttgccattgacagcgttgtgaatggtcatctcgctcgagctctttggatttgttgttactgtgcatgcccaaagaaaaatacgagccccctgaccctcggaggatgtatacaattatgtcttctgaggaagcagcaaatggaaagaaatcccactgggcagagcttgaaataagtggaaaagtaagaagcttaagcgcatctttgtggtcactaactcacctgacagctttgcatttgagtgacaattccctgtcccgaattccttcagacattgccaagcttcacaatctggtgtatttggacctgtcatctaataaaattcgtagcttacccgcagaactcggaaacatggtatcactcagggagctccatttaaataacaacctgttacgagttctaccttttgagctgggaaaactgtttcagttgcagactttaggcctgaaaggaaatccccttacccaggatatattgaacctttatcaggaaccagatggaacaagacggctgctgaactatttgcttgataatttgtcaggtactgcaaaaagaattacaacagaacaaccacctccaaggtcttggattatgttacaagaaccagataggacaaggccaactgccttgttttctgtcatgtgctataatgttctttgtgataaatatgcgacccggcagttatacggctactgtccatcatgggcgctaaactgggactacaggaaaaaggccattattcaagaaatcttgagctgcaatgctgatatcgtaagtcttcaggaggttgaaacggaacagtattacagtttttttctggtagagctgaaagaacgtggctataatggattcttcagtcctaagtctagagctaggacaatgtcagaacaagaaaggaaacatgttgatggctgtgcaatattcttcaagacagaaaaatttactttggttcagaaacacactgttgaatttaatcagctagccatggcaaattctgaggggtctgaagctatgctgaacagagtcatgacaaaagataacattggggttgcagtactgctagaacttcggaaggaatcgattgaaatgccgtccggaaagccacatcttggaacagaaaaacaacttattcttgtggctaacgcccacatgcattgggaccctgaatactctgatgtgaagttggtacaaactatgatgttcctctcagaagtgaagaacattattgataaagcctctcgcaacctcaaatccagtgttttgggagaatttggaactattccacttgtgttatgtgcagatcttaattctttgccagactctggtgttgtagaatatttgagcacaggtggagtagaaacaaatcacaaagactttaaggagttgaggtataatgaaagtctcacaaacttcagctgtcatgggaagaatggaaccaccaatggaaggatcactcatggtttcaagttacagagtgcctatgagagtggcctgatgccttacacgaattacacatttgatttcaagggtataatagactacattttctattctaaacctcagctgaacaccttaggcatcctgggccctctggaccaccactggctggttgagaataacatcagtggctgcccgcaccccctcatcccctctgaccacttctcactttttgcacaactggagctcttactgcctttcctgccccaagtcaacggcatccaccttcctggcaggaggtagtcaagcaccttcagaggacagccttgattcacttgtaaacttgtgaaaatctgaacataggggagtgaggtatggccactgaggatttttgcttgcttaagaatgatttggactttcaatctgattatttgataaggatatagtatgaaagccaggtgctagcaacagacaaattctgagcccaatatgctttatactgctagacagggattggtgtgtttgcacctgtctttcatttgtcataagagattttcctatttcttctacccaatagaatattttcatgcctggaaataggaaaatgtgtgaacagcgtattctcttcacacagaaatctgtagcactgcttttttgaggccagtagcaacatccagagatcattcttccatactttactccctcctttttcagacttgtttgtaaagtacagaatctgaatttagcctttatgattgtatatgatccacagaagacctgatttatgaaattttgtactaaaatcatttggaaatgattgtattgtaaactgaggctaaatttttttttaaacctgtttcatgtgttataaaggccagcttgtaaaagaagctgcaacagactttctctgctcatgatttgcactcttagggttttgttagcccttttgtactactttctttttaaattgagaacatggttctttacatataaatctgcttcaaccttaggatgttttcagaccagaggcaacttattcatgaatttttatgaaaactatctactaggacagataagctgaacagtgatgatctgtagacatttatggactgaatgtaatggttgatatatgtacattctgatatttttaaatctttaactttttaaagttaaaaacctacagctgcttaggtccagcttcttaactctttttgagacacttcctgtcctatctccactgtgcctgcctaaatttgttctcaccaagcactgcctgtgcatgcagagaaaatctgtgcatcctcttttatatttttaaaatactgtttaacatttgtgagaattttatgaaaatgcttttgtatgagctgtggctttttcccattgtgaagcattgaatatcacattttggaacatgttatagggtgagtccctggatctttgctcaccagatccaagcactgcttctcggtgtcattgcagtgtgctgcttgtcacccagaatactactatcatgtgaattctttttgtcgtcagtgtcttttccttagtctttttgttgttgttgttgttgttgttttaatcattccttttttaagaagaagtaattttccatttatgaagcagtatgaattagatgtattttcaaaacaggtccctaagacaattcttcagatcatttttaaaatgactaagtcattttagtatgtcaagcaagataaaaattacatcataccgtctattttgcccatagtgccatttagagatgaaaaccagctttaactttgcaaagtgaacatgtacatggtctgctctcatttattcattcttctctcaaaagtcaaatgaatgcagagggagcttggtcaaactgcttttgtttcaactgcaggcaggggagcaaaaggacgccatgtgagcattaggaaaaaaaatactcactcttactaacaatttttatacagaaaatgagtcattttggaaatgattcttatgttttttttttttctccttttagaaaattctccaaaaggttttgatgttgaatcttggtcttggacctgttttttcctttgagggttttttgttttttgttttttctaggatttcattgtgatgttttggttttgttttttgctttttgtttaagttgtgctgacaccaaacacatccagtttataatcagtacattggaaagctggtattgatgtagaaccagtgcataactttttatggggttttgttattggtttttttttgtaaagtgtgaataaaaggtatgtttactcatttttcctgaacactgtgttggtaatgtgcatcatgacaatttccagtgaaggtgagctggagctggttggactaatgagactgaggaagcagcttttcctacgatctgcattatgtaatcacaggtccagagagctttatggaagcgggagaggaggagcacttactcatgttgtatttgttaatggaggatgtcatcttttcatagatgctggaactagagtgcacttgttagatgctaaaggtttgagctttacacaaaatgtcttcatctgtatttgttattgtctacaatatatttgaatttggggcagcatattaagatgtaatggcctgttatgtcttgaaaatacttgttttgcctcttccaggcatactgcattctgtggatcagtttgaacagcttctccaccttatttggacagtgataaattgaaccaagagtgtagatttacaagtgtaaccttcaaaagaggaagaactatttggggtctgtaggtaatgaacagtcacaccaaaatagactatgatgcttttgttaagaaaggtttcatgttttagatattttccgtgtcctaaataattttcaataatctataatccctaaaatgcaataaaaactagtatgttttcacggtgtatattttttttcaaaaattctgtaacaaatatatttaatgtgttgccataatgtcatttcagtatttttgctggataaatccattttagaaatgtcttacaaaaagtttagggcatgttttctgttttaaagaccagaagtttgaaggcacccaaatccttgtcgccaatctcctgaagtacagctttaccatattagtggtcattatttatgctttgagagtttcaatattgttcgtcaagttaacttatggcataatttaagctaaagttgtagaaatgaattgttgagtgcaactttcatagtcccaaagataggcagagaacatctccagaaatgtgtgtgtgtgtgtgtgtgtgtgtgtgtgtgtttaatatgatttagtgacaaccaggaaaacttacttgggattattagcactttcaaacttagggacattattaaattggatggaatgcacttctaaatgtttaaattaaaatttcaaagctctttcgagattcaggttctcaataataatattcaagttttagagtttcactttgtactatttaaatttatggaactagtttccatactgacttgtaaggttttggggtcatatataaggactaaagccaagctaggcaaaacaatgacagcaccgttttttcagtgaagctctcagaatgtccagtacagatgttgcagataattccaagaactccttcagcaggtgttcttcaccattcgtaaacagtattttaagatgttcactttgctcttctttttggttacatacattttaataactggtatgttgaagtagtgtctaaaagtatctagtctttattcacagtacattatattgtgtgatgcactggactaactcttgtttaccattcatgtaacaaaacccagcacattatctgcactataagctcaaagaatgtcacatccgcccagacagctctttgatgagggtgatgggaactgaataaaccatacggactggcagtaacaagggcttttactgttctgttcagtggaaccttcttggtcaaattgtaattagctagcattatatttatatacagggtcttttttctttaccgatgtattttcctactcatagccaaccaataaattcagtatctgtttcaaatattttagaagtgtagtttgtatagctgtagtactgaggtttgaggaaaaataaatgttgatcagcagaccacgtatttaaaattctgaatcttctgggacagggttgtaactcagccttccaaagggaagagtgcagggggacggggccatgatatggggaaatggtgtaaactaatgtatttctttattggctgttattctgtataacactcatatctttgccaaagttcaattttatatttaggcaactgatggtccttttgcatttaggattttcgttgttgttaccttatacctcatgatataaggaatgggctcatgtgtcttccgtcttttggaaggaggttgacatattttaaataaatgcttttaaatacagtagcaaacattgtgttggggttataataattcattaaatgtcttgttgcctgta

SEQ ID NO: 4960 - DNA, 2649 bp, Homo sapiens
  source 1..2649: mol_type = unassigned DNA
atctagcgcccccgtcaggacgtgcgaaaagcgacggcgcagcacggtgcggcgcagctcctgctcgcctttcccttcgctgggcgagaggtgtctatggggcacccgctgccgccgccgctaccgccaccgccaccgccaccgccgccgagtgctgtctctatggcgaggaggaggaggaggagcgcgagctcagcgacacaagtacataaataaaggataaaatattttatgaaacaaatcttcaatcaagtataacattttgatgcttggcatctagactcccttgtgccctcactatgccagcggcaactgtagatcatagccaaagaatttgtgaagtttgggcttgcaacttggatgaagagatgaagaaaattcgtcaagttatccgaaaatataattacgttgctatggacaccgagtttccaggtgtggttgcaagacccattggagaattcaggagcaatgctgactatcaataccaactattgcggtgtaatgtagacttgttaaagataattcagctaggactgacatttatgaatgagcaaggagaataccctccaggaacttcaacttggcagtttaattttaaatttaatttgacggaggacatgtatgcccaggactctatagagctactaacaacatctggtatccagtttaaaaaacatgaggaggaaggaattgaaacccagtactttgcagaacttcttatgacttctggagtggtcctctgtgaaggggtcaaatggttgtcatttcatagcggttacgactttggctacttaatcaaaatcctaaccaactctaacttgcctgaagaagaacttgacttctttgagatccttcgattgttttttcctgtcatttatgatgtgaagtacctcatgaagagctgcaaaaatctcaaaggtggattacaggaggtggcagaacagttagagctggaacggataggaccacaacatcaggcaggatctgattcattgctcacaggaatggcctttttcaaaatgagagaaatgttctttgaagatcatattgatgatgccaaatattgtggtcatttgtatggccttggttctggttcatcctatgtacagaatggcacagggaatgcatatgaagaggaagccaacaagcagtcatgacatgaaatagtccttttatttttatttcgagctacacacatgcttgtatataggttttatctctggttgaatccctcgaacaatagacagtacctttcccccccctttcatggcccattttattgtctgcctttcagtactaagtatgaccgttcctatctcagatcttaataaaaagaaaaaaaaaaacgcattcaggttaaatttggccttaatttaatatacttgttagcaagcgtgtgtgacagagagtggggaaagctacatcattgaatattttgataaactttaccgacttgagtttggtttatttttcccttttcctaaattaactagcactgactgtaatttatttccctgtttcacgtctctcccttccattctgcaggagttttagctatttgagatcgtggaccatcagttttgcactttagagagtgtttctgactctaaacctgttttatcagaaaatttgttttttcttgatcttagctggaaaaatctgccaactttacacagtatttacttggttttgacccacagaatatagcacgttgtgcaaactgtcgattcagcgaaacttaaaaaagacaagaaactactgaggagcttagtaactgctgtttctgtacgtagtgtttaatcttccaagcacatctagtgtctgtcagtttctaattggcatgtgtaggctgctctgtgactgaagaattttcaaaccagctttacacccttcaggaaaaatcccttgtgattggatgtttactatctgccaggaaactggtactcaagatgttgaagctacagttattttatgatagcacacttcccttgatctgcttatttttattccatcaccatttaccctttttttttttttaaattttgtagccattcttatgatgctcttgatttgttggttacacaaatcaattttattaaaaatccaaagataagtctttaggtatattttgtaccaaattaaattagaagacaaaaattgtgctttcatagttgctacaaaggtaaataatggagagatttggtacaaaacaacaaaatatatatatattctcatatatatatatatagctgataaaattacctgaggagtgtaatgcttatttttttgtgtatatctttgcaatctattttatatatattgacaaaagagactgtgaaatacttagccatgcagaatatgtgaccagaccagagcatgtgtaggaagactttacggtaatcattaactctaccccgaaatgatggactacaagttataatgtgtgttacctacacttcaatcagtaatattagcaaatctccaaatgttagtcacattggtttgtctcccttgtacattctttattcatgatattacagtgctgtaactgggtggtcctttttaaacaaaacattatttgcaaaacagagggtattatttgtttttaaagcttttgtaaataaaggcttcaaaatgttttcttataaa

SEQ ID NO: 4961 - DNA, 568 bp, Homo sapiens
  source 1..568: mol_type = unassigned DNA
agtgggacggaaattgggagtggagggcggtggcctagatcctcacctcttcgtattgtttcacgcggcagtgcttgggagtcagtgtagctccagtcagtgttatcagcaccttcgcactggcgctttgccagggaagagagttatctatggcttgaatacctcggtgccgtcctctcgtttctctgggaaactgcagtacggagatgctttctccagtaatgagaaggcctttggtgtctcttcggggcttctgggactgcagtagagagagagaaggatttgaaatttccctgcccaagaatcaacaggaactctgtttatagaccagaaatgtgacatctatctttggtacataaataaaggataaaatattttatgaaacaaatcttcaatcaagtataacattttgatgcttggcatctagactcccttgtgccctcactatgccagcggcaactgtagatcatagccaaagaatttgtgaagtttgggcttgcaacttggatgaagagatgaagaaaattcgtcaagttatccgaaaatataattacgttgctatggacac

SEQ ID NO: 4962 - DNA, 1885 bp, Homo sapiens
  source 1..1885: mol_type = unassigned DNA
atctagcgcccccgtcaggacgtgcgaaaagcgacggcgcagcacggtgcggcgcagctcctgctcgcctttcccttcgctgggcgagaggtgtctatggggcacccgctgccgccgccgctaccgccaccgccaccgccaccgccgccgagtgctgtctctatggcgaggaggaggaggaggagcgcgagctcagcgacacaagtacataaataaaggataaaatattttatgaaacaaatcttcaatcaagtataacattttgatgcttggcatctagactcccttgtgccctcactatgccagcggcaactgtagatcatagccaaagaatttgtgaagtttgggcttgcaacttggatgaagagatgaagaaaattcgtcaagttatccgaaaatataattacgttgctatggacaccgagtttccaggtgtggttgcaagacccattggagaattcaggagcaatgctgactatcaataccaactattgcggtgtaatgtagacttgttaaagataattcagctaggactgacatttatgaatgagcaaggagaataccctccaggaacttcaacttggcagtttaattttaaatttaatttgacggaggacatgtatgcccaggactctatagagctactaacaacatctggtatccagtttaaaaaacatgaggaggaaggaattgaaacccagtactttgcagaacttcttatgacttctggagtggtcctctgtgaaggggtcaaatggttgtcatttcatagcggttacgactttggctacttaatcaaaatcctaaccaactctaacttgcctgaagaagaacttgacttctttgagatccttcgattgttttttcctgtcatttatgatgtgaagtacctcatgaagagctgcaaaaatctcaaaggtggattacaggaggtggcagaacagttagagctggaacggataggaccacaacatcaggcaggatctgattcattgctcacaggaatggcctttttcaaaatgagagaagtatgaagacatcactgcctttttctcagttggttgttaggttgagaacattaaaaatcttgtggccaaagattttgggcaacaagtacctactaagtaaagatataattagagataccatatgagtcacatccaccacacttaaaagtattcaaaaataagtcatcttgaaatgtagttcagaaggaactgggagaacatgttcatcatagaaccaacaattttaaaacataaactacctgagaagtcatgtaggtccaaccatattatttctcaggtgagaaaacaggctaataacttccatgattaaacacattactagtgggagaactccagagttcttttctgactcccattggtgctcctcctacaaggcaaggaatctttatattaggtttattctagcatgaccccttttaaggtttaaactggtgataaatatattatttgctcatgtcattcttcagtgctttgaagattttatagagaagaactcaggctcttttactgcattgagtcttaaaaggggggttgaattccgaagggatcaaataaatccaacgtagtagttgcatcagaaaccatattaggaaaaccctccttaaacggcaaaaggcagagatcagttccttgagtataaagtgttagggatggaagaatgaaactaaatgaacccattatctactcctaagtaattaagtgatgtgcacagatacacctagctataggtaaacaggaaaattggttgtgcaaaaaacaagtgaggtttttcttgactataagttttcccttttggaaaaattcgctgtggatttgagtatattttctcttagacattaaattgagactgagaattt

SEQ ID NO: 4963 - DNA, 700 bp, Homo sapiens
  source 1..700: mol_type = unassigned DNA
gggacgatgaacctgagagggtgcgcgatggcgccagctggagtgcggctggcggaggaaggagcctggcggcgggttgggggctggaaggatttgaaatttccctgcccaagaatcaacaggaactctgtttatagaccagaaatgtgacatctatctttggtacataaataaaggataaaatattttatgaaacaaatcttcaatcaagtataacattttgatgcttggcatctagactcccttgtgccctcactatgccagcggcaactgtagatcatagccaaagaatttgtgaagtttgggcttgcaacttggatgaagagatgaagaaaattcgtcaagttatccgaaaatataattacgttgctatggacaccgagtttccaggtgtggttgcaagacccattggagaattcaggagcaatgctgactatcaataccaactattgcggtgtaatgtagacttgttaaagataattcagctaggactgacatttatgaatgagcaaggagaataccctccaggaacttcaacttggcagtttaattttaaatttaatttgacggaggacatgtatgcccaggactctatagagctactaacaacatctggtatccagtttaaaaaacatgaggaggaaggaattgaaacccagtactttgcagaacttcttatgacttctggagtggtcctctg

SEQ ID NO: 4964 - DNA, 2528 bp, Homo sapiens
  source 1..2528: mol_type = unassigned DNA
gggtagagtggtgccgtccggttgtttggtgggaggcacgtaagaccgctctgggcacgggggcgctcacctcactggctcgttcggttctaggagcagatccggggtagagggaaaagagctccgggccaggggctgccgtcgccgccgtcggggagtcagcccgccagcccgccagctcgtcagcccgccagccagcgcttcgcgggccctgtcggtcccgatcagaccaaacattgtctggcttgcactgtaaaactagttagctgaagacgacttctcaggtttcttcaggatgcctgcagcacttgtggagaatagccaggttatctgtgaagtgtgggccagtaatctagaagaagagatgaggaagatccgagaaatcgtgctcagttacagttatattgccatggacacagaatttccaggtgttgtggtgcgaccaattggtgaatttcgtagttccatagattaccaatatcagcttctgcggtgcaatgttgaccttttaaaaattatccagctgggccttacattcacaaatgagaagggagagtatccttctggaatcaatacttggcagttcaatttcaaatttaaccttacagaggacatgtactcccaggattccatagatctccttgctaactcaggactacagtttcagaagcatgaagaggaagggattgacacactgcactttgcagagctgcttatgacatcaggagtggttctctgtgacaatgtcaaatggctttcatttcatagtggctatgattttggctatatggtaaagttgcttacagattctcgtttgccagaagaggaacatgaattctttcatattctgaaccttttcttcccatccatttatgatgtgaaatacctgatgaagagctgcaaaaatcttaagggaggtcttcaggaagttgctgatcagttggatttgcagaggattggaaggcagcaccaggcaggctcagactcactgctgacaggaatggctttctttaggatgaaagagttgttttttgaggacagcattgatgatgccaagtactgtgggcggctctatggcttaggcacaggagtggcccagaagcagaatgaggatgtggactctgcccaggagaagatgagcatcctggcgattatcaacaacatgcagcagtgatggcgccaggctctgcagggtgggcctgatcccagagtggtgcttactgtgctgactgtgtacttatcttccccaagagaaaatgcttcttttgagcacactgtacctaccatctgcattgagcagaaagacttttgttttactgaagacaaaagatgtttttattttagacccagaagagaggagtttgctctgaatttgtaaataagtcttccccattcctcatactcgagcctctcctctctggttgcctcctgccaccagcatccatggctcatttgacacctttttaaatatcaggacaagtctgaaacaaagtagtaaaatgtatataactcttacctgttgtcattctttttcttttaaatttgttgctaatctctgataatgaagattcttactctgattctcagctgagctgtgagggcttccagggaaaatggaacaaaatggtgttcttaggtaatgggttgtagatactgagtcttcctttccttttctgacccttctcgaggacatttgctttcctcacacttttgtagtctctctttacatattactatatggaaatgaattgctctgtgctgaaatttgaagaccagataatgaaactgaaaagcaaacaattttactgaatctgtctacccttcattcatgagaactccagaatgagtgttgaccactgaagcatcttttaagtctgtgttccattgtgccattcaggtttgctgtcacatatgcatcatctgaaatcatttgaaatttttgtacaataaaatatcctggatttgatcctgaaggaaactagtaagatcagatttttgggtcatgtctgttgtattttcagtaatgtgatttcagatggtcatctggattctcccacttctctactccattatttctctacttttccttccagcaaacctgaaacgtgagggagatggattaatgtgagtaacaggaatgtgtctttaaaaagctagagtggttacatttaatcaggcagtaagataatttgggttcttgagttgttttggagtaatatcccacaactggggtaggaagctcaggacttttttctttaaagctagtcatttcaaaagcatattgtatttttttgaatgactacagtatggacaatttcaaaaaccaaaacccactttggattggtggaagtaaaaactggtaactcactcaagtgaatgaatggtcttgcattttaaaagcttatgggaaactcaatttgaaatgattagaaaatgtcaagtattataagctggtatttaagatgcttgtaaatactatttatgtttttaattttgtaaaataaagatttctttttaaccactggcat

SEQ ID NO: 4965 - DNA, 2604 bp, Homo sapiens
  source 1..2604: mol_type = unassigned DNA
agagagcaggcgagtcgggcggatcgggtgggtagagtggtgccgtccggttgtttggtgggaggcacgtaagaccgctctgggcacgggggcgctcacctcactggctcgttcggttctaggagcagatccggggtagagggaaaagagctccgggccaggggctgccgtcgccgccgtcggggagtcagcccgccagcccgccagctcgtcagcccgccagccagcgcttcgcgggccctgtcggtcccggtaagcgggcctgcgcttaccggaaagaggagcgtaagatgaaagagtatcagaccaaacattgtctggcttgcactgtaaaactagttagctgaagacgacttctcaggtttcttcaggatgcctgcagcacttgtggagaatagccaggttatctgtgaagtgtgggccagtaatctagaagaagagatgaggaagatccgagaaatcgtgctcagttacagttatattgccatggacacagaatttccaggtgttgtggtgcgaccaattggtgaatttcgtagttccatagattaccaatatcagcttctgcggtgcaatgttgaccttttaaaaattatccagctgggccttacattcacaaatgagaagggagagtatccttctggaatcaatacttggcagttcaatttcaaatttaaccttacagaggacatgtactcccaggattccatagatctccttgctaactcaggactacagtttcagaagcatgaagaggaagggattgacacactgcactttgcagagctgcttatgacatcaggagtggttctctgtgacaatgtcaaatggctttcatttcatagtggctatgattttggctatatggtaaagttgcttacagattctcgtttgccagaagaggaacatgaattctttcatattctgaaccttttcttcccatccatttatgatgtgaaatacctgatgaagagctgcaaaaatcttaagggaggtcttcaggaagttgctgatcagttggatttgcagaggattggaaggcagcaccaggcaggctcagactcactgctgacaggaatggctttctttaggatgaaagagttgttttttgaggacagcattgatgatgccaagtactgtgggcggctctatggcttaggcacaggagtggcccagaagcagaatgaggatgtggactctgcccaggagaagatgagcatcctggcgattatcaacaacatgcagcagtgatggcgccaggctctgcagggtgggcctgatcccagagtggtgcttactgtgctgactgtgtacttatcttccccaagagaaaatgcttcttttgagcacactgtacctaccatctgcattgagcagaaagacttttgttttactgaagacaaaagatgtttttattttagacccagaagagaggagtttgctctgaatttgtaaataagtcttccccattcctcatactcgagcctctcctctctggttgcctcctgccaccagcatccatggctcatttgacacctttttaaatatcaggacaagtctgaaacaaagtagtaaaatgtatataactcttacctgttgtcattctttttcttttaaatttgttgctaatctctgataatgaagattcttactctgattctcagctgagctgtgagggcttccagggaaaatggaacaaaatggtgttcttaggtaatgggttgtagatactgagtcttcctttccttttctgacccttctcgaggacatttgctttcctcacacttttgtagtctctctttacatattactatatggaaatgaattgctctgtgctgaaatttgaagaccagataatgaaactgaaaagcaaacaattttactgaatctgtctacccttcattcatgagaactccagaatgagtgttgaccactgaagcatcttttaagtctgtgttccattgtgccattcaggtttgctgtcacatatgcatcatctgaaatcatttgaaatttttgtacaataaaatatcctggatttgatcctgaaggaaactagtaagatcagatttttgggtcatgtctgttgtattttcagtaatgtgatttcagatggtcatctggattctcccacttctctactccattatttctctacttttccttccagcaaacctgaaacgtgagggagatggattaatgtgagtaacaggaatgtgtctttaaaaagctagagtggttacatttaatcaggcagtaagataatttgggttcttgagttgttttggagtaatatcccacaactggggtaggaagctcaggacttttttctttaaagctagtcatttcaaaagcatattgtatttttttgaatgactacagtatggacaatttcaaaaaccaaaacccactttggattggtggaagtaaaaactggtaactcactcaagtgaatgaatggtcttgcattttaaaagcttatgggaaactcaatttgaaatgattagaaaatgtcaagtattataagctggtatttaagatgcttgtaaatactatttatgtttttaattttgtaaaataaagatttctttttaaccactggca

SEQ ID NO: 4966 - DNA, 692 bp, Homo sapiens
  source 1..692: mol_type = unassigned DNA
ggatcgggtgggtagagtggtgccgtccggttgtttggtgggaggcacgtaagaccgctctgggcacgggggcgctcacctcactggctcgttcggttctaggagcagatccggggtagagggaaaagagctccgggccaggggctgccgtcgccgccgtcggggagtcagcccgccagcccgccagctcgtcagcccgccagccagcgcttcgcgggccctgtcggtcccggtaagcgggcctgcgcttaccggaaagaggagcatcagaccaaacattgtctggcttgcactgtaaaactagttagctgaagacgacttctcaggtttcttcaggatgcctgcagcacttgtggagaatagccaggttatctgtgaagtgtgggccagtaatctagaagaagagatgaggaagatccgagaaatcgtgctcagttacagttatattgccatggacacagaatttccaggtgttgtggtgcgaccaattggtgaatttcgtagttccatagattaccaatatcagcttctgcggtgcaatgttgaccttttaaaaattatccagctgggccttacattcacaaatgagaagggagagtatccttctggaatcaatacttggcagttcaatttcaaatttaaccttacagaggacatgtactcccaggattccatagatctccttgctaact

SEQ ID NO: 4967 - DNA, 2708 bp, Homo sapiens
  source 1..2708: mol_type = unassigned DNA
gaggaccaaaatggaggagtaagaatcatgattaaattgagcgagcgcaactaatcacgcgaagagggccgcaggcgggccgtcttccgcaagcgtgcttccaggcctccactccccacctattcggcggcaccctgttacttctgctcctgcgcgctgcttcccgcgacctcacaggcagagcgaacacgcacggagtcgcaggggcgcgcaaagggggaggagcgggcgtgaccaggcgcgcgcgcgcgtctggagtgactctagagagcaggagcagatccggggtagagggaaaagagctccgggccaggggctgccgtcgccgccgtcggggagtcagcccgccagcccgccagctcgtcagcccgccagccagcgcttcgcgggccctgtcggtcccgatcagaccaaacattgtctggcttgcactgtaaaactagttagctgaagacgacttctcaggtttcttcaggatgcctgcagcacttgtggagaatagccaggttatctgtgaagtgtgggccagtaatctagaagaagagatgaggaagatccgagaaatcgtgctcagttacagttatattgccatggacacagaatttccaggtgttgtggtgcgaccaattggtgaatttcgtagttccatagattaccaatatcagcttctgcggtgcaatgttgaccttttaaaaattatccagctgggccttacattcacaaatgagaagggagagtatccttctggaatcaatacttggcagttcaatttcaaatttaaccttacagaggacatgtactcccaggattccatagatctccttgctaactcaggactacagtttcagaagcatgaagaggaagggattgacacactgcactttgcagagctgcttatgacatcaggagtggttctctgtgacaatgtcaaatggctttcatttcatagtggctatgattttggctatatggtaaagttgcttacagattctcgtttgccagaagaggaacatgaattctttcatattctgaaccttttcttcccatccatttatgatgtgaaatacctgatgaagagctgcaaaaatcttaagggaggtcttcaggaagttgctgatcagttggatttgcagaggattggaaggcagcaccaggcaggctcagactcactgctgacaggaatggctttctttaggatgaaagagttgttttttgaggacagcattgatgatgccaagtactgtgggcggctctatggcttaggcacaggagtggcccagaagcagaatgaggatgtggactctgcccaggagaagatgagcatcctggcgattatcaacaacatgcagcagtgatggcgccaggctctgcagggtgggcctgatcccagagtggtgcttactgtgctgactgtgtacttatcttccccaagagaaaatgcttcttttgagcacactgtacctaccatctgcattgagcagaaagacttttgttttactgaagacaaaagatgtttttattttagacccagaagagaggagtttgctctgaatttgtaaataagtcttccccattcctcatactcgagcctctcctctctggttgcctcctgccaccagcatccatggctcatttgacacctttttaaatatcaggacaagtctgaaacaaagtagtaaaatgtatataactcttacctgttgtcattctttttcttttaaatttgttgctaatctctgataatgaagattcttactctgattctcagctgagctgtgagggcttccagggaaaatggaacaaaatggtgttcttaggtaatgggttgtagatactgagtcttcctttccttttctgacccttctcgaggacatttgctttcctcacacttttgtagtctctctttacatattactatatggaaatgaattgctctgtgctgaaatttgaagaccagataatgaaactgaaaagcaaacaattttactgaatctgtctacccttcattcatgagaactccagaatgagtgttgaccactgaagcatcttttaagtctgtgttccattgtgccattcaggtttgctgtcacatatgcatcatctgaaatcatttgaaatttttgtacaataaaatatcctggatttgatcctgaaggaaactagtaagatcagatttttgggtcatgtctgttgtattttcagtaatgtgatttcagatggtcatctggattctcccacttctctactccattatttctctacttttccttccagcaaacctgaaacgtgagggagatggattaatgtgagtaacaggaatgtgtctttaaaaagctagagtggttacatttaatcaggcagtaagataatttgggttcttgagttgttttggagtaatatcccacaactggggtaggaagctcaggacttttttctttaaagctagtcatttcaaaagcatattgtatttttttgaatgactacagtatggacaatttcaaaaaccaaaacccactttggattggtggaagtaaaaactggtaactcactcaagtgaatgaatggtcttgcattttaaaagcttatgggaaactcaatttgaaatgattagaaaatgtcaagtattataagctggtatttaagatgcttgtaaatactatttatgtttttaattttgtaaaataaagatttctttttaaccactggca

SEQ ID NO: 4968 - DNA, 516 bp, Homo sapiens
  source 1..516: mol_type = unassigned DNA
ctaggagcagatccggggtagagggaaaagagctccgggccaggggctgccgtcgccgccgtcggggagtcagcccgccagcccgccagctcgtcagcccgccagccagcgcttcgcgggccctgtcggtcccgttcttgcggccccataactttttcttggtgttctatggctttatgaatggaggagccaactcacagacctgggccattcgggtggttttaagaagtttgaactgcggttcaatccagggcagtgccttgagacactgtttggagatcagaccaaacattgtctggcttgcactgtaaaactagttagctgaagacgacttctcaggtttcttcaggatgcctgcagcacttgtggagaatagccaggttatctgtgaagtgtgggccagtaatctagaagaagagatgaggaagatccgagaaatcgtgctcagttacagttatattgccatggacacagaatttccaggtgttgtggtgcgaccaattggtgaatttcgta

SEQ ID NO: 4969 - DNA, 920 bp, Homo sapiens
  source 1..920: mol_type = unassigned DNA
aagagctccgggccaggggctgccgtcgccgccgtcggggagtcagcccgccagcccgccagctcgtcagcccgccagccagcgcttcgcgggccctgtcggtcccggtaagcgggcctgcgcttaccggaaagaggagcgtaagatgaaagagtgtgagagaccattggggatcagaccaaacattgtctggcttgcactgtaaaactagttagctgaagacgacttctcaggtttcttcaggatgcctgcagcacttgtggagaatagccaggttatctgtgaagtgtgggccagtaatctagaagaagagatgaggaagatccgagaaatcgtgctcagttacagttatattgccatggacacagaatttccaggtgttgtggtgcgaccaattggtgaatttcgtagttccatagattaccaatatcagcttctgcggtgcaatgttgaccttttaaaaattatccagctgggccttacattcacaaatgagaagggagagtatccttctggaatcaatacttggcagttcaatttcaaatttaaccttactggctatgattttggctatatggtaaagttgcttacagattctcgtttgccagaagaggaacatgaattctttcatattctgaaccttttcttcccatccatttatgatgtgaaatacctgatgaagagctgcaaaaatcttaagggaggtcttcaggaagttgctgatcagttggatttgcagaggattggaaggcagcaccaggcaggctcagactcactgctgacaggaatggctttctttaggatgaaagagttgttttttgaggacagcattgatgatgccaagtactgtgggcggctctatggcttaggcacaggagtggcccagaagcagaatgaggatgtggactctgcccaggaga

SEQ ID NO: 4970 - DNA, 620 bp, Homo sapiens
  source 1..620: mol_type = unassigned DNA
gtgaccaggcgcgcgcgcgcgtctggagtgactctagagagcaggcgagtcgggcggatcgggagcagatccggggtagagggaaaagagctccgggccaggggctgccgtcgccgccgtcggggagtcagcccgccagcccgccagctcgtcagcccgccagccagcgcttcgcgggccctgtcggtcccgatcagaccaaacattgtctggcttgcactgtaaaactagttagctgaagacgacttctcaggtttcttcaggatgcctgcagcacttgtggagaatagccaggttatctgtgaagtgtgggccagtaatctagaagaagagatgaggaagatccgagaaatcgtgctcagttacagttatattgccatggacacagaatttccaggtgttgtggtgcgaccaattggtgaatttcgtagttccatagattaccaatatcagcttctgcggtgcaatgttgaccttttaaaaattatccagctgggccttacattcacaaatgagaagggagagtatccttctggaatcaatacttggcagttcaatttcaaatttaaccttacagaggacatgtactcccaggattccatagatctccttgctaactc

SEQ ID NO: 4971 - DNA, 945 bp, Homo sapiens
  source 1..945: mol_type = unassigned DNA
gtagagggaaaagagctccgggccaggggctgccgtcgccgccgtcggggagtcagcccgccagcccgccagctcgtcagcccgccagccagcgcttcgcgggccctgtcggtcccgatcagaccaaacattgtctggcttgcactgtaaaactagttagctgaagacgacttctcaggtttcttcaggatgcctgcagcacttgtggagaatagccaggttatctgtgaagtgtgggccagtaatctagaagaagagatgaggaagatccgagaaatcgtgctcagttacagttatattgccatggacacagaatttccaggtgttgtggtgcgaccaattggtgaatttcgtagttccatagattaccaatatcagcttctgcggtgcaatgttgaccttttaaaaattatccagctgggccttacattcacaaatgagaagggagagtatccttctggaatcaatacttggcagttcaatttcaaatttaaccttactggctatgattttggctatatggtaaagttgcttacagattctcgtttgccagaagaggaacatgaattctttcatattctgaaccttttcttcccatccatttatgatgtgaaatacctgatgaagagctgcaaaaatcttaagggaggtcttcaggaagttgctgatcagttggatttgcagaggattggaaggcagcaccaggcaggctcagactcactgctgacaggaatggctttctttaggatgaaagagttgttttttgaggacagcattgatgatgccaagtactgtgggcggctctatggcttaggcacaggagtggcccagaagcagaatgaggatgtggactctgcccaggagaagatgagcatcctggcgattatcaacaacatgcagcagtgatggcgccaggctctgcagggtgggcctgatcccagagtg

SEQ ID NO: 4972 - DNA, 562 bp, Homo sapiens
  source 1..562: mol_type = unassigned DNA
tcgttcggttctaggagcagatccggggtagagggaaaagagctccgggccaggggctgccgtcgccgccgtcggggagtcagcccgccagcccgccagctcgtcagcccgccagccagcgcttcgcgggccctgtcggtcccggccttgattgcttgcagagaaaactttcctgtggctttatcattagttgcccttcagagctttcctgtgtaaataagaagctatgttttggagaagtttacaccgtagatgaacgggagcgatctgaacatactgcactgcaggtcaacacagagcagggacttcagtaattcataggtatcagaccaaacattgtctggcttgcactgtaaaactagttagctgaagacgacttctcaggtttcttcaggatgcctgcagcacttgtggagaatagccaggttatctgtgaagtgtgggccagtaatctagaagaagagatgaggaagatccgagaaatcgtgctcagttacagttatattgccatggacacagaatttccaggtgttgtggtgcgaccaattggtgaatttcgtag

SEQ ID NO: 4973 - DNA, 648 bp, Homo sapiens
  source 1..648: mol_type = unassigned DNA
agagagcaggcgagtcgggcggatcgggagcagatccggggtagagggaaaagagctccgggccaggggctgccgtcgccgccgtcggggagtcagcccgccagcccgccagctcgtcagcccgccagccagcgcttcgcgggccctgtcggtcccggtaagcgggcctgcgcttaccggaaagaggagcgacacagaatttccaggtgttgtggtgcgaccaattggtgaatttcgtagttccatagattaccaatatcagcttctgcggtgcaatgttgaccttttaaaaattatccagctgggccttacattcacaaatgagaagggagagtatccttctggaatcaatacttggcagttcaatttcaaatttaaccttacagaggacatgtactcccaggattccatagatctccttgctaactcaggactacagtttcagaagcatgaagaggaagggattgacacactgcactttgcagagctgcttatgacatcaggagtggttctctgtgacaatgtcaaatggctttcatttcatagtggctatgattttggctatatggtaaagttgcttacagattctcgtttgccagaagaggaacatgaattctttcatattctgaaccttttcttcccatccat

SEQ ID NO: 4974 - DNA, 912 bp, Homo sapiens
  source 1..912: mol_type = unassigned DNA
atggaggagtaagaatcatgattaaattgagcgagcgcaactaatcacgcgaagagggccgcaggcgggccgtcttccgcaagcgtgcttccaggcctccactccccacctattcggcggcaccctgttacttctgctcctgcgcgctgcttcccgcgacctcacaggcagagcgaacacgcacggagtcgcaggggcgcgcaaagggggaggagcgggcgtgaccaggcgcgcgcgcgcgtctggagtgactctagagagcaggagcagatccggggtagagggaaaagagctccgggccaggggctgccgtcgccgccgtcggggagtcagcccgccagcccgccagctcgtcagcccgccagccagcgcttcgcgggccctgtcggtcccggtaagcgggcctgcgcttaccggaaagaggagcgtaagatgaaagagtatcagaccaaacattgtctggcttgcactgtaaaactagttagctgaagacgacttctcaggtttcttcaggatgcctgcagcacttgtggagaatagccaggttatctgtgaagtgtgggccagtaatctagaagaagagatgaggaagatccgagaaatcgtgctcagttacagttatattgccatggacacagaatttccaggtgttgtggtgcgaccaattggtgaatttcgtagttccatagattaccaatatcagcttctgcggtgcaatgttgaccttttaaaaattatccagctgggccttacattcacaaatgagaagggagagtatccttctggaatcaatacttggcagttcaatttcaaatttaaccttacagaggacatgtactcccaggattccatagatctccttgctaactcaggactacagtttcagaagcatgaagaggaagggattgacac

SEQ ID NO: 4975 - DNA, 923 bp, Homo sapiens
  source 1..923: mol_type = unassigned DNA
gttcggttctaggagcagatccggggtagagggaaaagagctccgggccaggggctgccgtcgccgccgtcggggagtcagcccgccagcccgccagctcgtcagcccgccagccagcgcttcgcgggccctgtcggtcccggacacagaatttccaggtgttgtggtgcgaccaattggtgaatttcgtagttccatagattaccaatatcagcttctgcggtgcaatgttgaccttttaaaaattatccagctgggccttacattcacaaatgagaagggagagtatccttctggaatcaatacttggcagttcaatttcaaatttaaccttacagaggacatgtactcccaggattccatagatctccttgctaactcaggactacagtttcagaagcatgaagaggaagggattgacacactgcactttgcagagctgcttatgacatcaggagtggttctctgtgacaatgtcaaatggctttcatttcatagtggctatgattttggctatatggtaaagttgcttacagattctcgtttgccagaagaggaacatgaattctttcatattctgaaccttttcttcccatccatttatgatgtgaaatacctgatgaagagctgcaaaaatcttaagggaggtcttcaggaagttgctgatcagttggatttgcagaggattggaaggcagcaccaggcaggctcagactcactgctgacaggaatggctttctttaggatgaaagagttgttttttgaggacagcattgatgatgccaagtactgtgggcggctctatggcttaggcacaggagtggcccagaagcagaatgaggatgtggactctgcccaggagaagatgagcatcctggcgattatcaacaacatgcagcagtgatggcgccaggctctgcagg

SEQ ID NO: 4976 - DNA, 1158 bp, Homo sapiens
  source 1..1158: mol_type = unassigned DNA
agagagcaggcgagtcgggcggatcgggagcagatccggggtagagggaaaagagctccgggccaggggctgccgtcgccgccgtcggggagtcagcccgccagcccgccagctcgtcagcccgccagccagcgcttcgcgggccctgtcggtcccgagaggacatgtactcccaggattccatagatctccttgctaactcaggactacagtttcagaagcatgaagaggaagggattgacacactgcactttgcagagctgcttatgacatcaggagtggttctctgtgacaatgtcaaatggctttcatttcatagtggctatgattttggctatatggtaaagttgcttacagattctcgtttgccagaagaggaacatgaattctttcatattctgaaccttttcttcccatccatttatgatgtgaaatacctgatgaagagctgcaaaaatcttaagggaggtcttcaggaagttgctgatcagttggatttgcagaggattggaaggcagcaccaggcaggctcagactcactgctgacaggaatggctttctttaggatgaaagagttgttttttgaggacagcattgatgatgccaagtactgtgggcggctctatggcttaggcacaggagtggcccagaagcagaatgaggatgtggactctgcccaggagaagatgagcatcctggcgattatcaacaacatgcagcagtgatggcgccaggctctgcagggtgggcctgatcccagagtggtgcttactgtgctgactgtgtacttatcttccccaagagaaaatgcttcttttgagcacactgtacctaccatctgcattgagcagaaagacttttgttttactgaagacaaaagatgtttttattttagacccagaagagaggagtttgctctgaatttgtaaataagtcttccccattcctcatactcgagcctctcctctctggttgcctcctgccaccagcatccatggctcatttgacacctttttaaatatcaggacaagtctgaaacaaagtagtaaaatgtatataactcttacctgttgtcattctttttcttttaaatttgttgctaatctctgataatgaagattcttactctgattctcagctgagctgtgagggcttcca

SEQ ID NO: 4977 - DNA, 1151 bp, Homo sapiens
  source 1..1151: mol_type = unassigned DNA
gttcggttctaggagcagatccggggtagagggaaaagagctccgggccaggggctgccgtcgccgccgtcggggagtcagcccgccagcccgccagctcgtcagcccgccagccagcgcttcgcgggccctgtcggtcccggacacagaatttccaggtgttgtggtgcgaccaattggtgaatttcgtagttccatagattaccaatatcagcttctgcggtgcaatgttgaccttttaaaaattatccagctgggccttacattcacaaatgagaagggagagtatccttctggaatcaatacttggcagttcaatttcaaatttaaccttacatataagaaagaaaaagtcaacaataatacatgtgttgcttgagctaaaagacataggagaacagacaacacatacccattacatttctaggaaatacgagagaggacatgtactcccaggattccatagatctccttgctaactcaggactacagtttcagaagcatgaagaggaagggattgacacactgcactttgcagagctgcttatgacatcaggagtggttctctgtgacaatgtcaaatggctttcatttcatagtggctatgattttggctatatggtaaagttgcttacagattctcgtttgccagaagaggaacatgaattctttcatattctgaaccttttcttcccatccatttatgatgtgaaatacctgatgaagagctgcaaaaatcttaagggaggtcttcaggaagttgctgatcagttggatttgcagaggattggaaggcagcaccaggcaggctcagactcactgctgacaggaatggctttctttaggatgaaagagttgttttttgaggacagcattgatgatgccaagtactgtgggcggctctatggcttaggcacaggagtggcccagaagcagaatgaggatgtggactctgcccaggagaagatgagcatcctggcgattatcaacaacatgcagcagtgatggcgccaggctctgcagggtgggcctgatcccagagtggtgcttactgtgctgactgtgtacttatcttccccaagagaaaatgcttcttttgagcacactgtacctaccatctgcattgagcagaaagacttttgttttactga

SEQ ID NO: 4978 - DNA, 623 bp, Homo sapiens
  source 1..623: mol_type = unassigned DNA
ctagagagcaggcgagtcgggcggatcgggagcagatccggggtagagggaaaagagctccgggccaggggctgccgtcgccgccgtcggggagtcagcccgccagcccgccagctcgtcagcccgccagccagcgcttcgcgggccctgtcggtcccggtaagcgggcctgcgcttaccggaaagagatcagaccaaacattgtctggcttgcactgtaaaactagttagctgaagacgacttctcaggtttcttcaggatgcctgcagcacttgtggagaatagccaggttatctgtgaagtgtgggccagtaatctagaagaagagatgaggaagatccgagaaatcgtgctcagttacagttatattgccatggacacagaatttccaggtgttgtggtgcgaccaattggtgaatttcgtagttccatagattaccaatatcagcttctgcggtgcaatgttgaccttttaaaaattatccagctgggccttacattcacaaatgagaagggagagtatccttctggaatcaatacttggcagttcaatttcaaatttaaccttactggctatgattttggctatatggtaaagttgcttacagattctcgtttgcca

SEQ ID NO: 4979 - DNA, 862 bp, Homo sapiens
  source 1..862: mol_type = unassigned DNA
aaagaggaccaaaatggaggagtaagaatcatgattaaattgagcgagcgcaactaatcacgcgaagagggccgcaggcgggccgtcttccgcaagcgtgcttccaggcctccactccccacctattcggcggcaccctgttacttctgctcctgcgcgctgcttcccgcgacctcacaggcagagcgaacacgcacggagtcgcaggggcgcgcaaagggggaggagcgggcgtgaccaggcgcgcgcgcgcgtctggagtgactctagagagcagagaggacatgtactcccaggattccatagatctccttgctaactcaggactacagtttcagaagcatgaagaggaagggattgacacactgcactttgcagagctgcttatgacatcaggagtggttctctgtgacaatgtcaaatggctttcatttcatagtggctatgattttggctatatggtaaagttgcttacagattctcgtttgccagaagaggaacatgaattctttcatattctgaaccttttcttcccatccatttatgatgtgaaatacctgatgaagagctgcaaaaatcttaagggaggtcttcaggaagttgctgatcagttggatttgcagaggattggaaggcagcaccaggcaggctcagactcactgctgacaggaatggctttctttaggatgaaagagttgttttttgaggacagcattgatgatgccaagtactgtgggcggctctatggcttaggcacaggagtggcccagaagcagaatgaggatgtggactctgcccaggagaagatgagcatcctggcgattatcaacaacatgcagcagtgatggcgccaggctctgca

SEQ ID NO: 4980 - DNA, 904 bp, Homo sapiens
  source 1..904: mol_type = unassigned DNA
atcgggtgggtagagtggtgccgtccggttgtttggtgggaggcacgtaagaccgctctgggcacgggggcgctcacctcactggctcgttcggttctaggagcagatccggggtagagggaaaagagctccgggccaggggctgccgtcgccgccgtcggggagtcagcccgccagcccgccagctcgtcagcccgccagccagcgcttcgcgggccctgtcggtcccggacacagaatttccaggtgttgtggtgcgaccaattggtgaatttcgtagttccatagattaccaatatcagcttctgcggtgcaatgttgaccttttaaaaattatccagctgggccttacattcacaaatgagaagggagagtatccttctggaatcaatacttggcagttcaatttcaaatttaaccttactggctatgattttggctatatggtaaagttgcttacagattctcgtttgccagaagaggaacatgaattctttcatattctgaaccttttcttcccatccatttatgatgtgaaatacctgatgaagagctgcaaaaatcttaagggaggtcttcaggaagttgctgatcagttggatttgcagaggattggaaggcagcaccaggcaggctcagactcactgctgacaggaatggctttctttaggatgaaagagttgttttttgaggacagcattgatgatgccaagtactgtgggcggctctatggcttaggcacaggagtggcccagaagcagaatgaggatgtggactctgcccaggagaagatgagcatcctggcgattatcaacaacatgcagcagtgatggcgccaggctctgcagggtgggcctgatcccagagtggtgcttactgtgctgactgtgtacttatcttcccc

SEQ ID NO: 4981 - DNA, 1605 bp, Homo sapiens
  source 1..1605: mol_type = unassigned DNA
agagtggtgccgtccggttgtttggtgggaggcacgtaagaccgctctgggcacgggggcgctcacctcactggctcgttcggttctaggagcagatccggggtagagggaaaagagctccgggccaggggctgccgtcgccgccgtcggggagtcagcccgccagcccgccagctcgtcagcccgccagccagcgcttcgcgggccctgtcggtcccgatcagaccaaacattgtctggcttgcactgtaaaactagttagctgaagagatgaggaagatccgagaaatcgtgctcagttacagttatattgccatggacacagaatttccaggtgttgtggtgcgaccaattggtgaatttcgtagttccatagattaccaatatcagcttctgcggtgcaatgttgaccttttaaaaattatccagctgggccttacattcacaaatgagaagggagagtatccttctggaatcaatacttggcagttcaatttcaaatttaaccttacagaggacatgtactcccaggattccatagatctccttgctaactcaggactacagtttcagaagcatgaagaggaagggattgacacactgcactttgcagagctgcttatgacatcaggagtggttctctgtgacaatgtcaaatggctttcatttcatagtggctatgattttggctatatggtaaagttgcttacagattctcgtttgccagaagaggaacatgaattctttcatattctgaaccttttcttcccatccatttatgatgtgaaatacctgatgaagagctgcaaaaatcttaagggaggtcttcaggaagttgctgatcagttggatttgcagaggattggaaggcagcaccaggcaggctcagactcactgctgacaggaatggctttctttaggatgaaagagttgttttttgaggacagcattgatgatgccaagtactgtgggcggctctatggcttaggcacaggagtggcccagaagcagaatgaggatgtggactctgcccaggagaagatgagcatcctggcgattatcaacaacatgcagcagtgatggcgccaggctctgcagggtgggcctgatcccagagtggtgcttactgtgctgactgtgtacttatcttccccaagagaaaatgcttcttttgagcacactgtacctaccatctgcattgagcagaaagacttttgttttactgaagacaaaagatgtttttattttagacccagaagagaggagtttgctctgaatttgtaaataagtcttccccattcctcatactcgagcctctcctctctggttgcctcctgccaccagcatccatggctcatttgacacctttttaaatatcaggacaagtctgaaacaaagtagtaaaatgtatataactcttacctgttgtcattctttttcttttaaatttgttgctaatctctgataatgaagattcttactctgattctcagctgagctgtgagggcttccagggaaaatggaacaaaatggtgttcttaggtaatgggttgtagatactgagtcttcctttccttttctgacccttctcgaggacatttgctt

SEQ ID NO: 4982 - DNA, 5882 bp, Homo sapiens
  source 1..5882: mol_type = unassigned DNA
ctaaactcgaattaagagggaaaaaaaatcagggaggaggtggcaagccacaccccacggtgcccgcgaacttccccggcagcggactgtagcccaggcagacgccgtcgagatgcagggcccaccgctcctgaccgccgcccacctcctctgcgtgtgcaccgccgcgctggccgtggctcccgggcctcggtttctggtgacagccccagggatcatcaggcccggaggaaatgtgactattggggtggagcttctggaacactgcccttcacaggtgactgtgaaggcggagctgctcaagacagcatcaaacctcactgtctctgtcctggaagcagaaggagtctttgaaaaaggctcttttaagacacttactcttccatcactacctctgaacagtgcagatgagatttatgagctacgtgtaaccggacgtacccaggatgagattttattctctaatagtacccgcttatcatttgagaccaagagaatatctgtcttcattcaaacagacaaggccttatacaagccaaagcaagaagtgaagtttcgcattgttacactcttctcagattttaagccttacaaaacctctttaaacattctcattaaggaccccaaatcaaatttgatccaacagtggttgtcacaacaaagtgatcttggagtcatttccaaaacttttcagctatcttcccatccaatacttggtgactggtctattcaagttcaagtgaatgaccagacatactatcaatcatttcaggtttcagaatatgtattaccaaaatttgaagtgactttgcagacaccattatattgttctatgaattctaagcatttaaatggtaccatcacggcaaagtatacatatgggaagccagtgaaaggagacgtaacgcttacatttttacctttatccttttggggaaagaagaaaaatattacaaaaacatttaagataaatggatctgcaaacttctcttttaatgatgaagagatgaaaaatgtaatggattcttcaaatggactttctgaatacctggatctatcttcccctggaccagtagaaattttaaccacagtgacagaatcagttacaggtatttcaagaaatgtaagcactaatgtgttcttcaagcaacatgattacatcattgagttttttgattatactactgtcttgaagccatctctcaacttcacagccactgtgaaggtaactcgtgctgatggcaaccaactgactcttgaagaaagaagaaataatgtagtcataacagtgacacagagaaactatactgagtactggagcggatctaacagtggaaatcagaaaatggaagctgttcagaaaataaattatactgtcccccaaagtggaacttttaagattgaattcccaatcctggaggattccagtgagctacagttgaaggcctatttccttggtagtaaaagtagcatggcagttcatagtctgtttaagtctcctagtaagacatacatccaactaaaaacaagagatgaaaatataaaggtgggatcgccttttgagttggtggttagtggcaacaaacgattgaaggagttaagctatatggtagtatccaggggacagttggtggctgtaggaaaacaaaattcaacaatgttctctttaacaccagaaaattcttggactccaaaagcctgtgtaattgtgtattatattgaagatgatggggaaattataagtgatgttctaaaaattcctgttcagcttgtttttaaaaataagataaagctatattggagtaaagtgaaagctgaaccatctgagaaagtctctcttaggatctctgtgacacagcctgactccatagttgggattgtagctgttgacaaaagtgtgaatctgatgaatgcctctaatgatattacaatggaaaatgtggtccatgagttggaactttataacacaggatattatttaggcatgttcatgaattcttttgcagtctttcaggaatgtggactctgggtattgacagatgcaaacctcacgaaggattatattgatggtgtttatgacaatgcagaatatgctgagaggtttatggaggaaaatgaaggacatattgtagatattcatgacttttctttgggtagcagtccacatgtccgaaagcattttccagagacttggatttggctagacaccaacatgggttacaggatttaccaagaatttgaagtaactgtacctgattctatcacttcttgggtggctactggttttgtgatctctgaggacctgggtcttggactaacaactactccagtggagctccaagccttccaaccatttttcatttttttgaatcttccctactctgttatcagaggtgaagaatttgctttggaaataactatattcaattatttgaaagatgccactgaggttaaggtaatcattgagaaaagtgacaaatttgatattctaatgacttcaaatgaaataaatgccacaggccaccagcagacccttctggttcccagtgaggatggggcaactgttctttttcccatcaggccaacacatctgggagaaattcctatcacagtcacagctctttcacccactgcttctgatgctgtcacccagatgattttagtaaaggctgaaggaatagaaaaatcatattcacaatccatcttattagacttgactgacaataggctacagagtaccctgaaaactttgagtttctcatttcctcctaatacagtgactggcagtgaaagagttcagatcactgcaattggagatgttcttggtccttccatcaatggcttagcctcattgattcggatgccttatggctgtggtgaacagaacatgataaattttgctccaaatatttacattttggattatctgactaaaaagaaacaactgacagataatttgaaagaaaaagctctttcatttatgaggcaaggttaccagagagaacttctctatcagagggaagatggctctttcagtgcttttgggaattatgacccttctgggagcacttggttgtcagcttttgttttaagatgtttccttgaagccgatccttacatagatattgatcagaatgtgttacacagaacatacacttggcttaaaggacatcagaaatccaacggtgaattttgggatccaggaagagtgattcatagtgagcttcaaggtggcaataaaagtccagtaacacttacagcctatattgtaacttctctcctgggatatagaaagtatcagcctaacattgatgtgcaagagtctatccattttttggagtctgaattcagtagaggaatttcagacaattatactctagcccttataacttatgcattgtcatcagtggggagtcctaaagcgaaggaagctttgaatatgctgacttggagagcagaacaagaaggtggcatgcaattctgggtgtcatcagagtccaaactttctgactcctggcagccacgctccctggatattgaagttgcagcctatgcactgctctcacacttcttacaatttcagacttctgagggaatcccaattatgaggtggctaagcaggcaaagaaatagcttgggtggttttgcatctactcaggataccactgtggctttaaaggctctgtctgaatttgcagccctaatgaatacagaaaggacaaatatccaagtgaccgtgacggggcctagctcaccaagtcctgtaaagtttctgattgacacacacaaccgcttactccttcagacagcagagcttgctgtggtacagccaacggcagttaatatttccgcaaatggttttggatttgctatttgtcagctcaatgttgtatataatgtgaaggcttctgggtcttctagaagacgaagatctatccaaaatcaagaagcctttgatttagatgttgctgtaaaagaaaataaagatgatctcaatcatgtggatttgaatgtgtgtacaagcttttcgggcccgggtaggagtggcatggctcttatggaagttaacctattaagtggctttatggtgccttcagaagcaatttctctgagcgagacagtgaagaaagtggaatatgatcatggaaaactcaacctctatttagattctgtaaatgaaacccagttttgtgttaatattcctgctgtgagaaactttaaagtttcaaatacccaagatgcttcagtgtccatagtggattactatgagccaaggagacaggctgtgagaagttacaactctgaagtgaagctgtcctcctgtgacctttgcagtgatgtccagggctgccgtccttgtgaggatggagcttcaggctcccatcatcactcttcagtcatttttattttctgtttcaagcttctgtactttatggaactttggctgtgatttatttttaaaggactctgtgtaacactaacatttccagtagtcacatgtgattgttttgttttcgtagaagaatactgcttctattttgaaaaaagagttttttttctttctatggggttgcagggatggtgtacaacaggtcctagcatgtatagctgcatagatttcttcacctgatctttgtgtggaagatcagaatgaatgcagttgtgtgtctatattttcccctctcaaaatcttttagaatttttttggaggtgtttgttttctccagaataaaggtattactttagaataggtattctcctcattttgtgaaagaaatgaacctagattcttaagcattattacacatccatgtttgcttaaagatggatttccctgggaatgggagaaaacagccagcaggaggagcttcatctgttcccttcccacctccaacctagccctactgcccaccccaccccaacccaccccatgcccagtggtctcagtagatacttcttaactggaaattctttcttttcagaatctaggtggtgaattttttttaagtggcacggtctttttctgcttgaaatctgatcacaccccccagccattgccctccctctctttttcctctgtagagaaatgtgaggggcagtacatttactgtgcttttcacaccatctcagaggttgaggagcatactgaaaattgccctggggggtgctgggtgtgctatctccttcccacatcctcagccccacaccagctctatttcaggggtgagagtcagagagcactgcaatatgtgcttcatgggatttcgattcgaagatcctagaccagggagacactgtgagccagggatacaacaaaatactaggtaagtcactgcagaccgacctccctgcagtttgggaaagaagctgggtttgtggagaatcagagcatcttgacatgactgctgacctaaagatccctggcattggccagggatcctgtggaacctcttctagttcaggggtgtgagcattagactgccagttgtctagtgacatctgatgcttgctgtgaacttttaagatccccgaatcctgagcacctcaatctttaattgccctgtattccgaagggtaatataatttatctggatggaaattttaaagatgaatcccccttttttcttttcttctctcttttctttccttctccctttcttctttgccttctaaatatactgaaatgatttagatatgtgtcaacaattaatgatcttttattcaatctaagaaatggtttagtttttctctttagctctatggcatttcactcaagtggacaggggaaaaagtaattgccatgggctccaaagaatttgctttatgtttttagctatttaaaaataaatccatcaaaaataaagtatgcaaatgtatctttt

SEQ ID NO: 4983 - DNA, 9221 bp, Homo sapiens
  source 1..9221: mol_type = unassigned DNA
atagttgctatgaatttctcctcacaaggatgggcctgtttactcaccctgggcatcgttggtagagcgctagtgtaaacagcctgaggaacccggtgggccggggaagtgggcgcgctctgttctccgcggccagctgggacgccgggccaggtggggccgcctgcgtttagcaactgctttctcaccccctggatttgcgatgtttgccacagcagcgagaagcgccattgtaatggggatgggaggggtggagcctccaagtcctgtctcaatttagatctctcactctgctgttaggcgcgcccatttcagattactaaactcgaattaagagggaaaaaaaatcagggaggaggtggcaagccacaccccacggtgcccgcgaacttccccggcagcggactgtagcccaggcagacgccgtcgagatgcagggcccaccgctcctgaccgccgcccacctcctctgcgtgtgcaccgccgcgctggccgtggctcccgggcctcggtttctggtgacagccccagggatcatcaggcccggaggaaatgtgactattggggtggagcttctggaacactgcccttcacaggtgactgtgaaggcggagctgctcaagacagcatcaaacctcactgtctctgtcctggaagcagaaggagtctttgaaaaaggctcttttaagacacttactcttccatcagaccccaaatcaaatttgatccaacagtggttgtcacaacaaagtgatcttggagtcatttccaaaacttttcagctatcttcccatccaatacttggtgactggtctattcaagttcaagtgaatgaccagacatactatcaatcatttcaggtttcagaatatgtattaccaaaatttgaagtgactttgcagacaccattatattgttctatgaattctaagcatttaaatggtaccatcacggcaaagtatacatatgggaagccagtgaaaggagacgtaacgcttacatttttacctttatccttttggggaaagaagaaaaatattacaaaaacatttaagataaatggatctgcaaacttctcttttaatgatgaagagatgaaaaatgtaatggattcttcaaatggactttctgaatacctggatctatcttcccctggaccagtagaaattttaaccacagtgacagaatcagttacaggtatttcaagaaatgtaagcactaatgtgttcttcaagcaacatgattacatcattgagttttttgattatactactgtcttgaagccatctctcaacttcacagccactgtgaaggtaactcgtgctgatggcaaccaactgactcttgaagaaagaagaaataatgtagtcataacagtgacacagagaaactatactgagtactggagcggatctaacagtggaaatcagaaaatggaagctgttcagaaaataaattatactgtcccccaaagtggaacttttaagattgaattcccaatcctggaggattccagtgagctacagttgaaggcctatttccttggtagtaaaagtagcatggcagttcatagtctgtttaagtctcctagtaagacatacatccaactaaaaacaagagatgaaaatataaaggtgggatcgccttttgagttggtggttagtggcaacaaacgattgaaggagttaagctatatggtagtatccaggggacagttggtggctgtaggaaaacaaaattcaacaatgttctctttaacaccagaaaattcttggactccaaaagcctgtgtaattgtgtattatattgaagatgatggggaaattataagtgatgttctaaaaattcctgttcagcttgtttttaaaaataagataaagctatattggagtaaagtgaaagctgaaccatctgagaaagtctctcttaggatctctgtgacacagcctgactccatagttgggattgtagctgttgacaaaagtgtgaatctgatgaatgcctctaatgatattacaatggaaaatgtggtccatgagttggaactttataacacaggatattatttaggcatgttcatgaattcttttgcagtctttcaggaatgtggactctgggtattgacagatgcaaacctcacgaaggattatattgatggtgtttatgacaatgcagaatatgctgagaggtttatggaggaaaatgaaggacatattgtagatattcatgacttttctttgggtagcagtccacatgtccgaaagcattttccagagacttggatttggctagacaccaacatgggttacaggatttaccaagaatttgaagtaactgtacctgattctatcacttcttgggtggctactggttttgtgatctctgaggacctgggtcttggactaacaactactccagtggagctccaagccttccaaccatttttcatttttttgaatcttccctactctgttatcagaggtgaagaatttgctttggaaataactatattcaattatttgaaagatgccactgaggttaaggtaatcattgagaaaagtgacaaatttgatattctaatgacttcaaatgaaataaatgccacaggccaccagcagacccttctggttcccagtgaggatggggcaactgttctttttcccatcaggccaacacatctgggagaaattcctatcacagtcacagctctttcacccactgcttctgatgctgtcacccagatgattttagtaaaggctgaaggaatagaaaaatcatattcacaatccatcttattagacttgactgacaataggctacagagtaccctgaaaactttgagtttctcatttcctcctaatacagtgactggcagtgaaagagttcagatcactgcaattggagatgttcttggtccttccatcaatggcttagcctcattgattcggatgccttatggctgtggtgaacagaacatgataaattttgctccaaatatttacattttggattatctgactaaaaagaaacaactgacagataatttgaaagaaaaagctctttcatttatgaggcaaggttaccagagagaacttctctatcagagggaagatggctctttcagtgcttttgggaattatgacccttctgggagcacttggttgtcagcttttgttttaagatgtttccttgaagccgatccttacatagatattgatcagaatgtgttacacagaacatacacttggcttaaaggacatcagaaatccaacggtgaattttgggatccaggaagagtgattcatagtgagcttcaaggtggcaataaaagtccagtaacacttacagcctatattgtaacttctctcctgggatatagaaagtatcagcctaacattgatgtgcaagagtctatccattttttggagtctgaattcagtagaggaatttcagacaattatactctagcccttataacttatgcattgtcatcagtggggagtcctaaagcgaaggaagctttgaatatgctgacttggagagcagaacaagaaggtggcatgcaattctgggtgtcatcagagtccaaactttctgactcctggcagccacgctccctggatattgaagttgcagcctatgcactgctctcacacttcttacaatttcagacttctgagggaatcccaattatgaggtggctaagcaggcaaagaaatagcttgggtggttttgcatctactcaggataccactgtggctttaaaggctctgtctgaatttgcagccctaatgaatacagaaaggacaaatatccaagtgaccgtgacggggcctagctcaccaagtcctgtaaagtttctgattgacacacacaaccgcttactccttcagacagcagagcttgctgtggtacagccaacggcagttaatatttccgcaaatggttttggatttgctatttgtcagctcaatgttgtatataatgtgaaggcttctgggtcttctagaagacgaagatctatccaaaatcaagaagcctttgatttagatgttgctgtaaaagaaaataaagatgatctcaatcatgtggatttgaatgtgtgtacaagcttttcgggcccgggtaggagtggcatggctcttatggaagttaacctattaagtggctttatggtgccttcagaagcaatttctctgagcgagacagtgaagaaagtggaatatgatcatggaaaactcaacctctatttagattctgtaaatgaaacccagttttgtgttaatattcctgctgtgagaaactttaaagtttcaaatacccaagatgcttcagtgtccatagtggattactatgagccaaggagacaggctgtgagaagttacaactctgaagtgaagctgtcctcctgtgacctttgcagtgatgtccagggctgccgtccttgtgaggatggagcttcaggctcccatcatcactcttcagtcatttttattttctgtttcaagcttctgtactttatggaactttggctgtgatttatttttaaaggactctgtgtaacactaacatttccagtagtcacatgtgattgttttgttttcgtagaagaatactgcttctattttgaaaaaagagttttttttctttctatggggttgcagggatggtgtacaacaggtcctagcatgtatagctgcatagatttcttcacctgatctttgtgtggaagatcagaatgaatgcagttgtgtgtctatattttcccctctcaaaatcttttagaatttttttggaggtgtttgttttctccagaataaaggtattactttagaataggtattctcctcattttgtgaaagaaatgaacctagattcttaagcattattacacatccatgtttgcttaaagatggatttccctgggaatgggagaaaacagccagcaggaggagcttcatctgttcccttcccacctccaacctagccctactgcccaccccaccccaacccaccccatgcccagtggtctcagtagatacttcttaactggaaattctttcttttcagaatctaggtggtgaattttttttaagtggcacggtctttttctgcttgaaatctgatcacaccccccagccattgccctccctctctttttcctctgtagagaaatgtgaggggcagtacatttactgtgcttttcacaccatctcagaggttgaggagcatactgaaaattgccctggggggtgctgggtgtgctatctccttcccacatcctcagccccacaccagctctatttcaggggtgagagtcagagagcactgcaatatgtgcttcatgggatttcgattcgaagatcctagaccagggagacactgtgagccagggatacaacaaaatactaggtaagtcactgcagaccgacctccctgcagtttgggaaagaagctgggtttgtggagaatcagagcatcttgacatgactgctgacctaaagatccctggcattggccagggatcctgtggaacctcttctagttcaggggtgtgagcattagactgccagttgtctagtgacatctgatgcttgctgtgaacttttaagatccccgaatcctgagcacctcaatctttaattgccctgtattccgaagggtaatataatttatctggatggaaattttaaagatgaatcccccttttttcttttcttctctcttttctttccttctccctttcttctttgccttctaaatatactgaaatgatttagatatgtgtcaacaattaatgatcttttattcaatctaagaaatggtttagtttttctctttagctctatggcatttcactcaagtggacaggggaaaaagtaattgccatgggctccaaagaatttgctttatgtttttagctatttaaaaataaatccatcaaaaataaagtatgcaaatgtatcttttaaagttaatttttaaaaatgctcttattttagtgaattttcagaaattatagtggaatggatgctcatatattgcttatggatattttggataccaaagtaggaataactgacattcagtattttaaagctggcaaacctgtacatagaaaatagatccccagacagtggtctatgaagagggcagttaagtatcaaatacttaattttcttgcctttttttcttaagtggggaaaagtttctagatctcttacacctctgacacaatctgttctaaaacaggcacttgtaatgttggggcctccttgtaaacgtgtttttgccctttactctctgggagttctttaaaggtgaaatcatcttacaaagaaattgggggagggtcttggcaaaggactttcccctcctctttcctggcctgggaaccttatactgacaatcaatactttatattttaaagtatataatttatagttaacttctagtgtaatatattaggaaacactagaatggaaaggccattggaagacaggttgtatcttttttagaccatatttccttgtttaaaaactatcatttgaatacttttttggtgaagaactccatgttttcaagttaaaggtcacctcgtaggccaggcgcagtggctcatgcctgtaatcccagcactctgggaggctgaggcgggtgaatcacaaggttaggagtttgagaccagcctggccaatatggtgaaaccccgtccctactaaaaatacaaaatttagccaggcgtggtggcatgcacctgtagtcccacctactcgggaggctgaggcaggagaatcacttgaacctgagagacagaggttgcagtgagccgagatcacgccactgcactccagcctgggggacagagtgagattctgtctcaaaaaacaaaaaacaaaaaagtcaccttgtaactcatctctttttattgtaagtttattaaaaatgaagaggacaacaatgagaaggaacataaagggttagctagcactgtctcctggtgcatggggctgtgcagatgtcccggccacttcttccttcatacttcccttagagaacttgctctgctacaagcagtgggcttggactaaaagtgattaaaataccacaggcataaggagaaaaggagtatatgtagtagtaataattactagtataaattattttcttcacatgctatgagtaataatattaaaaaactcattttaccattaagattccttatgctgaagctcttccatttagaatactgtcaatgtcatttactggtatgaactaaagtcccccttcttttccactcactgggaaccttagtaaaacaccagcatatcttacctctctttctgactggccgatgcttccagagactgaatgttgggaaaacctagtagccaaacaattctaggacagaataacatttttatatttggttccaccatcttattacatttagttatagttttaaaaaagaaattcaagcccattaaaatatgtctggtcaatgaaatgcttccttttattgtgttgtgctattgtgctttgtttttcaaaacattgtaaaaatagtatctttggtttagtattttggattatatattataatctgaggagtgttttgcttatgtagaatccagatatatttctgttacctaggagatgttacttacatatgtaatactgtatcctgcacatggaaatattcagaattgtagatagcataactctccctgctcctattcttttgagcctaggtataattttttttttttttttagaaaaagacatatttagctttaatttctatttatgctaaacatatttataagtagtctgtcaatataataccaactatttttatttttacataattcaattatttcatttgacatgtctggcagactcaagacattaagtaaaaaattggaactatgatttttctttgtcattttttaaaaaagaattattttattaacctgctggcatataatctggagttcttttcacaaccttactttttctgatttgctttattgaatgattgaatactcatttctttctaaaaatatgttgtaaattctcccttggcaagatttctccctatgagggtagttattatttgagtctgccaagtggttaccatggggcaaggtgccatgatgtattcttgggtgcattggttttttgcgcattgtaaatttaagacacttatagtaagtggactcattcatagatgagtttcagaaccttttacgttctcggtagaggcttctgtcggacaggcagaagagtgtattcctcacttttttttttgtcttcaaattccagtaaggcatagcacttttaagaaattagaatttttctatcatctatgcaaatgatatttatgttaatattaaatatcttatgttacactgggagtaatttgaggtgcaattatttttattactactttgaatagaggaccattatccttctttcttcagaaaactaagaagtaagtgtaacttttaaagtaagtatatatcagtgagagtaggcttgttttacaactatttctagccagtgagttgtgttttcatgtctcatcaaaagacaataccacattgcatcattttacaaaatatgttgtcattttcatttcagttgtaacataggaaaatagatatttcctagatgatttctgagtttcttactgcaaagaacagttataaattggtatacatgtgtctctgtaatagggataatattgatatatctgttgctacatatttaagaatcattctatcttatgttgtcttgaggccaagatttaccacgtttgcccagtgtattgaattggtggtagaaggtagttccatgttccatttgtagatctttaagattttatctttgataactttaatagaatgtggctcagttctggtccttcaagcctgtatggtttggattttcagtaggggacagttgatgtggagtcaatctctttggtacacaggaagctttataaaatttcattcacgaatctcttattttgggaagctgttttgcatatgagaagaacactgttgaaataaggaactaaagctttatatattgatcaaggtgattctgaaagttttaatttttaatgttgtaatgttatgttattgttaattgtactttattatgtattcaatagaaaatcatgatttattaataaaagcttaaattctcatctattt

SEQ ID NO: 4984 - DNA, 9401 bp, Homo sapiens
  source 1..9401: mol_type = unassigned DNA
atagttgctatgaatttctcctcacaaggatgggcctgtttactcaccctgggcatcgttggtagagcgctagtgtaaacagcctgaggaacccggtgggccggggaagtgggcgcgctctgttctccgcggccagctgggacgccgggccaggtggggccgcctgcgtttagcaactgctttctcaccccctggatttgcgatgtttgccacagcagcgagaagcgccattgtaatggggatgggaggggtggagcctccaagtcctgtctcaatttagatctctcactctgctgttaggcgcgcccatttcagattactaaactcgaattaagagggaaaaaaaatcagggaggaggtggcaagccacaccccacggtgcccgcgaacttccccggcagcggactgtagcccaggcagacgccgtcgagatgcagggcccaccgctcctgaccgccgcccacctcctctgcgtgtgcaccgccgcgctggccgtggctcccgggcctcggtttctggtgacagccccagggatcatcaggcccggaggaaatgtgactattggggtggagcttctggaacactgcccttcacaggtgactgtgaaggcggagctgctcaagacagcatcaaacctcactgtctctgtcctggaagcagaaggagtctttgaaaaaggctcttttaagacacttactcttccatcactacctctgaacagtgcagatgagatttatgagctacgtgtaaccggacgtacccaggatgagattttattctctaatagtacccgcttatcatttgagaccaagagaatatctgtcttcattcaaacagacaaggccttatacaagccaaagcaagaagtgaagtttcgcattgttacactcttctcagattttaagccttacaaaacctctttaaacattctcattaaggaccccaaatcaaatttgatccaacagtggttgtcacaacaaagtgatcttggagtcatttccaaaacttttcagctatcttcccatccaatacttggtgactggtctattcaagttcaagtgaatgaccagacatactatcaatcatttcaggtttcagaatatgtattaccaaaatttgaagtgactttgcagacaccattatattgttctatgaattctaagcatttaaatggtaccatcacggcaaagtatacatatgggaagccagtgaaaggagacgtaacgcttacatttttacctttatccttttggggaaagaagaaaaatattacaaaaacatttaagataaatggatctgcaaacttctcttttaatgatgaagagatgaaaaatgtaatggattcttcaaatggactttctgaatacctggatctatcttcccctggaccagtagaaattttaaccacagtgacagaatcagttacaggtatttcaagaaatgtaagcactaatgtgttcttcaagcaacatgattacatcattgagttttttgattatactactgtcttgaagccatctctcaacttcacagccactgtgaaggtaactcgtgctgatggcaaccaactgactcttgaagaaagaagaaataatgtagtcataacagtgacacagagaaactatactgagtactggagcggatctaacagtggaaatcagaaaatggaagctgttcagaaaataaattatactgtcccccaaagtggaacttttaagattgaattcccaatcctggaggattccagtgagctacagttgaaggcctatttccttggtagtaaaagtagcatggcagttcatagtctgtttaagtctcctagtaagacatacatccaactaaaaacaagagatgaaaatataaaggtgggatcgccttttgagttggtggttagtggcaacaaacgattgaaggagttaagctatatggtagtatccaggggacagttggtggctgtaggaaaacaaaattcaacaatgttctctttaacaccagaaaattcttggactccaaaagcctgtgtaattgtgtattatattgaagatgatggggaaattataagtgatgttctaaaaattcctgttcagcttgtttttaaaaataagataaagctatattggagtaaagtgaaagctgaaccatctgagaaagtctctcttaggatctctgtgacacagcctgactccatagttgggattgtagctgttgacaaaagtgtgaatctgatgaatgcctctaatgatattacaatggaaaatgtggtccatgagttggaactttataacacaggatattatttaggcatgttcatgaattcttttgcagtctttcaggaatgtggactctgggtattgacagatgcaaacctcacgaaggattatattgatggtgtttatgacaatgcagaatatgctgagaggtttatggaggaaaatgaaggacatattgtagatattcatgacttttctttgggtagcagtccacatgtccgaaagcattttccagagacttggatttggctagacaccaacatgggttacaggatttaccaagaatttgaagtaactgtacctgattctatcacttcttgggtggctactggttttgtgatctctgaggacctgggtcttggactaacaactactccagtggagctccaagccttccaaccatttttcatttttttgaatcttccctactctgttatcagaggtgaagaatttgctttggaaataactatattcaattatttgaaagatgccactgaggttaaggtaatcattgagaaaagtgacaaatttgatattctaatgacttcaaatgaaataaatgccacaggccaccagcagacccttctggttcccagtgaggatggggcaactgttctttttcccatcaggccaacacatctgggagaaattcctatcacagtcacagctctttcacccactgcttctgatgctgtcacccagatgattttagtaaaggctgaaggaatagaaaaatcatattcacaatccatcttattagacttgactgacaataggctacagagtaccctgaaaactttgagtttctcatttcctcctaatacagtgactggcagtgaaagagttcagatcactgcaattggagatgttcttggtccttccatcaatggcttagcctcattgattcggatgccttatggctgtggtgaacagaacatgataaattttgctccaaatatttacattttggattatctgactaaaaagaaacaactgacagataatttgaaagaaaaagctctttcatttatgaggcaaggttaccagagagaacttctctatcagagggaagatggctctttcagtgcttttgggaattatgacccttctgggagcacttggttgtcagcttttgttttaagatgtttccttgaagccgatccttacatagatattgatcagaatgtgttacacagaacatacacttggcttaaaggacatcagaaatccaacggtgaattttgggatccaggaagagtgattcatagtgagcttcaaggtggcaataaaagtccagtaacacttacagcctatattgtaacttctctcctgggatatagaaagtatcagcctaacattgatgtgcaagagtctatccattttttggagtctgaattcagtagaggaatttcagacaattatactctagcccttataacttatgcattgtcatcagtggggagtcctaaagcgaaggaagctttgaatatgctgacttggagagcagaacaagaaggtggcatgcaattctgggtgtcatcagagtccaaactttctgactcctggcagccacgctccctggatattgaagttgcagcctatgcactgctctcacacttcttacaatttcagacttctgagggaatcccaattatgaggtggctaagcaggcaaagaaatagcttgggtggttttgcatctactcaggataccactgtggctttaaaggctctgtctgaatttgcagccctaatgaatacagaaaggacaaatatccaagtgaccgtgacggggcctagctcaccaagtcctcttgctgtggtacagccaacggcagttaatatttccgcaaatggttttggatttgctatttgtcagctcaatgttgtatataatgtgaaggcttctgggtcttctagaagacgaagatctatccaaaatcaagaagcctttgatttagatgttgctgtaaaagaaaataaagatgatctcaatcatgtggatttgaatgtgtgtacaagcttttcgggcccgggtaggagtggcatggctcttatggaagttaacctattaagtggctttatggtgccttcagaagcaatttctctgagcgagacagtgaagaaagtggaatatgatcatggaaaactcaacctctatttagattctgtaaatgaaacccagttttgtgttaatattcctgctgtgagaaactttaaagtttcaaatacccaagatgcttcagtgtccatagtggattactatgagccaaggagacaggctgtgagaagttacaactctgaagtgaagctgtcctcctgtgacctttgcagtgatgtccagggctgccgtccttgtgaggatggagcttcaggctcccatcatcactcttcagtcatttttattttctgtttcaagcttctgtactttatggaactttggctgtgatttatttttaaaggactctgtgtaacactaacatttccagtagtcacatgtgattgttttgttttcgtagaagaatactgcttctattttgaaaaaagagttttttttctttctatggggttgcagggatggtgtacaacaggtcctagcatgtatagctgcatagatttcttcacctgatctttgtgtggaagatcagaatgaatgcagttgtgtgtctatattttcccctctcaaaatcttttagaatttttttggaggtgtttgttttctccagaataaaggtattactttagaataggtattctcctcattttgtgaaagaaatgaacctagattcttaagcattattacacatccatgtttgcttaaagatggatttccctgggaatgggagaaaacagccagcaggaggagcttcatctgttcccttcccacctccaacctagccctactgcccaccccaccccaacccaccccatgcccagtggtctcagtagatacttcttaactggaaattctttcttttcagaatctaggtggtgaattttttttaagtggcacggtctttttctgcttgaaatctgatcacaccccccagccattgccctccctctctttttcctctgtagagaaatgtgaggggcagtacatttactgtgcttttcacaccatctcagaggttgaggagcatactgaaaattgccctggggggtgctgggtgtgctatctccttcccacatcctcagccccacaccagctctatttcaggggtgagagtcagagagcactgcaatatgtgcttcatgggatttcgattcgaagatcctagaccagggagacactgtgagccagggatacaacaaaatactaggtaagtcactgcagaccgacctccctgcagtttgggaaagaagctgggtttgtggagaatcagagcatcttgacatgactgctgacctaaagatccctggcattggccagggatcctgtggaacctcttctagttcaggggtgtgagcattagactgccagttgtctagtgacatctgatgcttgctgtgaacttttaagatccccgaatcctgagcacctcaatctttaattgccctgtattccgaagggtaatataatttatctggatggaaattttaaagatgaatcccccttttttcttttcttctctcttttctttccttctccctttcttctttgccttctaaatatactgaaatgatttagatatgtgtcaacaattaatgatcttttattcaatctaagaaatggtttagtttttctctttagctctatggcatttcactcaagtggacaggggaaaaagtaattgccatgggctccaaagaatttgctttatgtttttagctatttaaaaataaatccatcaaaaataaagtatgcaaatgtatcttttaaagttaatttttaaaaatgctcttattttagtgaattttcagaaattatagtggaatggatgctcatatattgcttatggatattttggataccaaagtaggaataactgacattcagtattttaaagctggcaaacctgtacatagaaaatagatccccagacagtggtctatgaagagggcagttaagtatcaaatacttaattttcttgcctttttttcttaagtggggaaaagtttctagatctcttacacctctgacacaatctgttctaaaacaggcacttgtaatgttggggcctccttgtaaacgtgtttttgccctttactctctgggagttctttaaaggtgaaatcatcttacaaagaaattgggggagggtcttggcaaaggactttcccctcctctttcctggcctgggaaccttatactgacaatcaatactttatattttaaagtatataatttatagttaacttctagtgtaatatattaggaaacactagaatggaaaggccattggaagacaggttgtatcttttttagaccatatttccttgtttaaaaactatcatttgaatacttttttggtgaagaactccatgttttcaagttaaaggtcacctcgtaggccaggcgcagtggctcatgcctgtaatcccagcactctgggaggctgaggcgggtgaatcacaaggttaggagtttgagaccagcctggccaatatggtgaaaccccgtccctactaaaaatacaaaatttagccaggcgtggtggcatgcacctgtagtcccacctactcgggaggctgaggcaggagaatcacttgaacctgagagacagaggttgcagtgagccgagatcacgccactgcactccagcctgggggacagagtgagattctgtctcaaaaaacaaaaaacaaaaaagtcaccttgtaactcatctctttttattgtaagtttattaaaaatgaagaggacaacaatgagaaggaacataaagggttagctagcactgtctcctggtgcatggggctgtgcagatgtcccggccacttcttccttcatacttcccttagagaacttgctctgctacaagcagtgggcttggactaaaagtgattaaaataccacaggcataaggagaaaaggagtatatgtagtagtaataattactagtataaattattttcttcacatgctatgagtaataatattaaaaaactcattttaccattaagattccttatgctgaagctcttccatttagaatactgtcaatgtcatttactggtatgaactaaagtcccccttcttttccactcactgggaaccttagtaaaacaccagcatatcttacctctctttctgactggccgatgcttccagagactgaatgttgggaaaacctagtagccaaacaattctaggacagaataacatttttatatttggttccaccatcttattacatttagttatagttttaaaaaagaaattcaagcccattaaaatatgtctggtcaatgaaatgcttccttttattgtgttgtgctattgtgctttgtttttcaaaacattgtaaaaatagtatctttggtttagtattttggattatatattataatctgaggagtgttttgcttatgtagaatccagatatatttctgttacctaggagatgttacttacatatgtaatactgtatcctgcacatggaaatattcagaattgtagatagcataactctccctgctcctattcttttgagcctaggtataattttttttttttttttagaaaaagacatatttagctttaatttctatttatgctaaacatatttataagtagtctgtcaatataataccaactatttttatttttacataattcaattatttcatttgacatgtctggcagactcaagacattaagtaaaaaattggaactatgatttttctttgtcattttttaaaaaagaattattttattaacctgctggcatataatctggagttcttttcacaaccttactttttctgatttgctttattgaatgattgaatactcatttctttctaaaaatatgttgtaaattctcccttggcaagatttctccctatgagggtagttattatttgagtctgccaagtggttaccatggggcaaggtgccatgatgtattcttgggtgcattggttttttgcgcattgtaaatttaagacacttatagtaagtggactcattcatagatgagtttcagaaccttttacgttctcggtagaggcttctgtcggacaggcagaagagtgtattcctcacttttttttttgtcttcaaattccagtaaggcatagcacttttaagaaattagaatttttctatcatctatgcaaatgatatttatgttaatattaaatatcttatgttacactgggagtaatttgaggtgcaattatttttattactactttgaatagaggaccattatccttctttcttcagaaaactaagaagtaagtgtaacttttaaagtaagtatatatcagtgagagtaggcttgttttacaactatttctagccagtgagttgtgttttcatgtctcatcaaaagacaataccacattgcatcattttacaaaatatgttgtcattttcatttcagttgtaacataggaaaatagatatttcctagatgatttctgagtttcttactgcaaagaacagttataaattggtatacatgtgtctctgtaatagggataatattgatatatctgttgctacatatttaagaatcattctatcttatgttgtcttgaggccaagatttaccacgtttgcccagtgtattgaattggtggtagaaggtagttccatgttccatttgtagatctttaagattttatctttgataactttaatagaatgtggctcagttctggtccttcaagcctgtatggtttggattttcagtaggggacagttgatgtggagtcaatctctttggtacacaggaagctttataaaatttcattcacgaatctcttattttgggaagctgttttgcatatgagaagaacactgttgaaataaggaactaaagctttatatattgatcaaggtgattctgaaagttttaatttttaatgttgtaatgttatgttattgttaattgtactttattatgtattcaatagaaaatcatgatttattaataaaagcttaaattctcatctattt

SEQ ID NO: 4985 - DNA, 1548 bp, Homo sapiens
  source 1..1548: mol_type = unassigned DNA
attctcagcgctgggagccgccgcccccgcagctgctgccgccgccgccagggcccggactcggacgcgtggtagcctagagtcctggggagcttctgtccacctgtcctgcagaggagtcgtttccagcccggctgccccaggatgggtgagttcaacgagaagaagacaacatgtggcaccgtttgcctcaagtacctgctgtttacctacaattgctgcttctggctggctggcctggctgtcatggcagtgggcatctggacgctggccctcaagagtgactacatcagcctgctggcctcaggcacctacctggccacagcctacatcctggtggtggcgggcactgtcgtcatggtgactggggtcttgggctgctgcgccaccttcaaggagcgtcggaacctgctgcgcctgtacttcatcctgctcctcatcatctttctgctggagatcatcgctggtatcctcgcctacgcctactaccagcagctgaacacggagctcaaggagaacctgaaggacaccatgaccaagcgctaccaccagccgggccatgaggctgtgaccagcgctgtggaccagctgcagcaggagttccactgctgtggcagcaacaactcacaggactggcgagacagtgagtggatccgctcacaggaggccggtggccgtgtggtcccagacagctgctgcaagacggtggtggctctttgtgggcagcgagaccatgcctccaacatctacaaggtggagggcggctgcatcaccaagttggagaccttcatccaggagcacctgagggtcattggggctgtggggatcggcattgcctgtgtgcaggtctttggcatgatcttcacgtgctgcctgtacaggagtctcaagctggagcactactgaccctgccttgggccttgctgctgctgcacccaactactgagctgagaccactgagtaccaggggctgggctccctgatgacacccaccctgtgccatcaccataacctctggggaccccaacctcagaggcagcttcaagtgccttttgctgcgcaccaatgcccagcaggggaggtgaggggggctggcggggcgaagtttggggggtgttttgtggggctccccagacacactctctgcctggtggtcagatgcaggttggaaggggccttgctgagtggcgcaaggccgagcgttcccagcagggggagaaacccttcacaccccaggcccttcaggaactggggccttgccttgcagccacatggccccatcccagttggggaagccaggtgagctctgacccttgggcctgggcctctgcccctcccaacccagccctcgtctccctcgacagcgcccctgctgtcttccccaccgcagtcaccaccacccgaaatgccacgtggtcactgtgcactgccctgttcatgtgcctctgcggggcagggccttcctggttttgttcactgctgtacccagatgcctacaaccatccctgccacatacaggtgctcaataaacacttgtagagcagatgg

SEQ ID NO: 4986 - DNA, 1648 bp, Homo sapiens
  source 1..1648: mol_type = unassigned DNA
cgcgggttcagacctgccgagcgcccgccgccgcgggaggggcttgaggccggggcggggccggggcggggcggggcggggcgtccccctcgtaggctccgggccgcgcattctcagcgctgggagccgccgcccccgcagctgctgccgccgccgccagggcccggactcggacgcgtgcctagagtcctggggagcttctgtccacctgtcctgcagaggagtcgtttccagcccggctgccccaggatgggtgagttcaacgagaagaagacaacatgtggcaccgtttgcctcaagtacctgctgtttacctacaattgctgcttctggctggctggcctggctgtcatggcagtgggcatctggacgctggccctcaagagtgactacatcagcctgctggcctcaggcacctacctggccacagcctacatcctggtggtggcgggcactgtcgtcatggtgactggggtcttgggctgctgcgccaccttcaaggagcgtcggaacctgctgcgcctgtacttcatcctgctcctcatcatctttctgctggagatcatcgctggtatcctcgcctacgcctactaccagcagctgaacacggagctcaaggagaacctgaaggacaccatgaccaagcgctaccaccagccgggccatgaggctgtgaccagcgctgtggaccagctgcagcaggagttccactgctgtggcagcaacaactcacaggactggcgagacagtgagtggatccgctcacaggaggccggtggccgtgtggtcccagacagctgctgcaagacggtggtggctctttgtgggcagcgagaccatgcctccaacatctacaaggtggagggcggctgcatcaccaagttggagaccttcatccaggagcacctgagggtcattggggctgtggggatcggcattgcctgtgtgcaggtctttggcatgatcttcacgtgctgcctgtacaggagtctcaagctggagcactactgaccctgccttgggccttgctgctgctgcacccaactactgagctgagaccactgagtaccaggggctgggctccctgatgacacccaccctgtgccatcaccataacctctggggaccccaacctcagaggcagcttcaagtgccttttgctgcgcaccaatgcccagcaggggaggtgaggggggctggcggggcgaagtttggggggtgttttgtggggctccccagacacactctctgcctggtggtcagatgcaggttggaaggggccttgctgagtggcgcaaggccgagcgttcccagcagggggagaaacccttcacaccccaggcccttcaggaactggggccttgccttgcagccacatggccccatcccagttggggaagccaggtgagctctgacccttgggcctgggcctctgcccctcccaacccagccctcgtctccctcgacagcgcccctgctgtcttccccaccgcagtcaccaccacccgaaatgccacgtggtcactgtgcactgccctgttcatgtgcctctgcggggcagggccttcctggttttgttcactgctgtacccagatgcctacaaccatccctgccacatacaggtgctcaataaacacttgtagagca

SEQ ID NO: 4987 - DNA, 1486 bp, Homo sapiens
  source 1..1486: mol_type = unassigned DNA
attctcagcgctgggagccgccgcccccgcagctgctgccgccgccgccagggcccggactcggacgcgtggtagccccaggatgggtgagttcaacgagaagaagacaacatgtggcaccgtttgcctcaagtacctgctgtttacctacaattgctgcttctggctggctggcctggctgtcatggcagtgggcatctggacgctggccctcaagagtgactacatcagcctgctggcctcaggcacctacctggccacagcctacatcctggtggtggcgggcactgtcgtcatggtgactggggtcttgggctgctgcgccaccttcaaggagcgtcggaacctgctgcgcctgtacttcatcctgctcctcatcatctttctgctggagatcatcgctggtatcctcgcctacgcctactaccagcagctgaacacggagctcaaggagaacctgaaggacaccatgaccaagcgctaccaccagccgggccatgaggctgtgaccagcgctgtggaccagctgcagcaggagttccactgctgtggcagcaacaactcacaggactggcgagacagtgagtggatccgctcacaggaggccggtggccgtgtggtcccagacagctgctgcaagacggtggtggctctttgtgggcagcgagaccatgcctccaacatctacaaggtggagggcggctgcatcaccaagttggagaccttcatccaggagcacctgagggtcattggggctgtggggatcggcattgcctgtgtgcaggtctttggcatgatcttcacgtgctgcctgtacaggagtctcaagctggagcactactgaccctgccttgggccttgctgctgctgcacccaactactgagctgagaccactgagtaccaggggctgggctccctgatgacacccaccctgtgccatcaccataacctctggggaccccaacctcagaggcagcttcaagtgccttttgctgcgcaccaatgcccagcaggggaggtgaggggggctggcggggcgaagtttggggggtgttttgtggggctccccagacacactctctgcctggtggtcagatgcaggttggaaggggccttgctgagtggcgcaaggccgagcgttcccagcagggggagaaacccttcacaccccaggcccttcaggaactggggccttgccttgcagccacatggccccatcccagttggggaagccaggtgagctctgacccttgggcctgggcctctgcccctcccaacccagccctcgtctccctcgacagcgcccctgctgtcttccccaccgcagtcaccaccacccgaaatgccacgtggtcactgtgcactgccctgttcatgtgcctctgcggggcagggccttcctggttttgttcactgctgtacccagatgcctacaaccatccctgccacatacaggtgctcaataaacacttgtagagcagatgg

SEQ ID NO: 4988 - DNA, 793 bp, Homo sapiens
  source 1..793: mol_type = unassigned DNA
cgccgccagggcccggactcggacgcgtgcctagagtcctggggagcttctgtccacctgtcctgcagaggagtcgtttccagcccggctggtgagtgctggccagggtggggcagagcaggcggggcggcgaaagtccagacctggctgtgctgtctggaaacgtggcccagggcgctcagctgctgtctgcaccccacgccctccctggcttccccatgctcacagcttgcccactgctgcagccccaggatgggtgagttcaacgagaagaagacaacatgtggcaccgtttgcctcaagtacctgctgtttacctacaattgctgcttctggctggctggcctggctgtcatggcagtgggcatctggacgctggccctcaagagtgactacatcagcctgctggcctcaggcacctacctggccacagcctacatcctggtggtggcgggcactgtcgtcatggtgactggggtcttgggctgctgcgccaccttcaaggagcgtcggaacctgctgcgcctgtacttcatcctgctcctcatcatctttctgctggagatcatcgctggtatcctcgcctacgcctactaccagcagctgaacacggagctcaaggagaacctgaaggacaccatgaccaagcgctaccaccagccgggccatgaggctgtgaccagcgctgtggaccagctgcagcaggagttccactgctgtggcagcaacaactcacaggactggcgagacagtgagtggatccgctcacaggaggccggtggccgtgtggtcc

SEQ ID NO: 4989 - DNA, 561 bp, Homo sapiens
  source 1..561: mol_type = unassigned DNA
gctgccgccgccgccagggcccggactcggacgcgtggtagcctagagtcctggggagcttctgtccacctgtcctgcagaggagtcgtttccagcccggctggtgagtgctggccagggtggggcagagcaggcggggcggcgaaagtccagacctggctgtgctgtctggaaacgtggcccagggcgctcagctgctgtctgcaccccacgccctccctggcttccccatgctcacagcttgcccactgctgcaggtcgggcgggcacggggcatctggggaggggcatagcctgtctgtgctgccccctcagccccaggatgggtgagttcaacgagaagaagacaacatgtggcaccgtttgcctcaagtacctgctgtttacctacaattgctgcttctggctggctggcctggctgtcatggcagtgggcatctggacgctggccctcaagagtgactacatcagcctgctggcctcaggcacctacctggccacagcctacatcctggtggtggcgggcactgtcgtcatggtgactggggtcttgggctgctg

SEQ ID NO: 4990 - DNA, 565 bp, Homo sapiens
  source 1..565: mol_type = unassigned DNA
tgaggccggggcggggccggggcggggcggggcggggcgtccccctcgtaggctccgggccgcgcattctcagcgctgggagccgccgcccccgcagctgctgccgccgccgccagggcccggactcggacgcgtggtaggctgtagctgccgctgtttgtgggggaagggccagtgatgggtctggagcgaaggccaagagtggggcacctgggggaagcctagagtcctggggagcttctgtccacctgtcctgcagaggagtcgtttccagcccggctgccccaggatgggtgagttcaacgagaagaagacaacatgtggcaccgtttgcctcaagtacctgctgtttacctacaattgctgcttctggctggctggcctggctgtcatggcagtgggcatctggacgctggccctcaagagtgactacatcagcctgctggcctcaggcacctacctggccacagcctacatcctggtggtggcgggcactgtcgtcatggtgactggggtcttgggctgctgcgccaccttcaaggagcgtcggaacctgctgcgcctg

SEQ ID NO: 4991 - DNA, 713 bp, Homo sapiens
  source 1..713: mol_type = unassigned DNA
ggctggttgtgaactcccgacctcaagtgattgcacctgccttggcctcccaaagtgctggcattataggcatgagacaccgcacctggactcctttcctctactttctttgggttaatttgctagtctctttttattatttatttatttattttgagatggagtctcactctgtcgcccaggctggagtgcagtggcaccatctcggctcactgcaagcttcgcctcccgggttcacgccattctcctgcctcagcctcccaagtagctgggactacaggcgcccgccaccacgcccggctaattttttgtatttctagtacagacggggtttcaccgtgttagccaggatggtcttgatctcctgaccttgtgatctgcctgccttggccccccaaagtgctgggattacaggcgtgagccaccgcgcctggccctgtgtcccctcctatccgtctcccagtcaggggcccggtgctgtggccccgctgacccctcccctgcctcctcagccccaggatgggtgagttcaacgagaagaagacaacatgtggcaccgtttgcctcaagtacctgctgtttacctacaattgctgcttctggctggctggcctggctgtcatggcagtgggcatctggacgctggccctcaagagtgactacatcagcctgctggcctcaggcacctacctggccacagcctacatcctggt

SEQ ID NO: 4992 - DNA, 771 bp, Homo sapiens
  source 1..771: mol_type = unassigned DNA
ccgccgcccccgcagctgctgccgccgccgccagggcccggactcggacgcgtgcctagagtcctggggagcttctgtccacctgtcctgcagaggagtcgtttccagcccggctggcccataggctcctgccagcctgtgacgtgcggccccgggaatgccgtggggagcgggcaggctggcatgagctcaccggaggtacccgctagggcttcctcccccggccgctagcagggccccaggatgggtgagttcaacgagaagaagacaacatgtggcaccgtttgcctcaagtacctgctgtttacctacaattgctgcttctggctggctggcctggctgtcatggcagtgggcatctggacgctggccctcaagagtgactacatcagcctgctggcctcaggcacctacctggccacagcctacatcctggtggtggcgggcactgtcgtcatggtgactggggtcttgggctgctgcgccaccttcaaggagcgtcggaacctgctgcgcctgtacttcatcctgctcctcatcatctttctgctggagatcatcgctggtatcctcgcctacgcctactaccagcagctgaacacggagctcaaggagaacctgaaggacaccatgaccaagcgctaccaccagccgggccatgaggctgtgaccagcgctgtggaccagctgcagcaggagttccactgctgtggcagcaacaactcacaggactggcgagacagtgagtggatccgctcacaggaggccggt

SEQ ID NO: 4993 - DNA, 797 bp, Homo sapiens
  source 1..797: mol_type = unassigned DNA
cgccgccagggcccggactcggacgcgtggtagcctagagtcctggggagcttctgtccacctgtcctgcagaggagtcgtttccagcccggctggtgagtgctggccagggtggggcagagcaggcggggcggcgaaagtccagacctggctgtgctgtctggaaacgtggcccagggcgctcagctgctgtctgcaccccacgccctccctggcttccccatgctcacagcttgcccactgctgcagccccaggatgggtgagttcaacgagaagaagacaacatgtggcaccgtttgcctcaagtacctgctgtttacctacaattgctgcttctggctggctggcctggctgtcatggcagtgggcatctggacgctggccctcaagagtgactacatcagcctgctggcctcaggcacctacctggccacagcctacatcctggtggtggcgggcactgtcgtcatggtgactggggtcttgggctgctgcgccaccttcaaggagcgtcggaacctgctgcgcctgtacttcatcctgctcctcatcatctttctgctggagatcatcgctggtatcctcgcctacgcctactaccagcagctgaacacggagctcaaggagaacctgaaggacaccatgaccaagcgctaccaccagccgggccatgaggctgtgaccagcgctgtggaccagctgcagcaggagttccactgctgtggcagcaacaactcacaggactggcgagacagtgagtggatccgctcacaggaggccggtggccgtgtggtcc

SEQ ID NO: 4994 - DNA, 545 bp, Homo sapiens
  source 1..545: mol_type = unassigned DNA
attctccccaccccggccaggatgaaggaagggctgccctttaacagaccgtaaacaggcctggagagcttaggaaggggctgagctggggcctgtctgagcccctacccctctgctgtctgagtggcctcctccgcccttactgcaggcccataggctcctgccagcctgtgacgtgcggccccgggaatgccgtggggagcgggcaggctggcatgagctcaccggaggtacccgctagggcttcctcccccggccgctagcagggccccaggatgggtgagttcaacgagaagaagacaacatgtggcaccgtttgcctcaagtacctgctgtttacctacaattgctgcttctggctggctggcctggctgtcatggcagtgggcatctggacgctggccctcaagagtgactacatcagcctgctggcctcaggcacctacctggccacagcctacatcctggtggtggcgggcactgtcgtcatggtgactggggtcttgggctgctgcgccaccttcaaggagcgtcggaacctgctg

SEQ ID NO: 4995 - DNA, 648 bp, Homo sapiens
  source 1..648: mol_type = unassigned DNA
caccaggggtctgtcctggctgtcagggctcctgagtcgctaggaagtgacacgtcctgttcccacaggggctcattcacaggcctcccaggacagtggctggctctgccccgacttctgggctggcttggccccaggatgggtgagttcaacgagaagaagacaacatgtggcaccgtttgcctcaagtacctgctgtttacctacaattgctgcttctggctggctggcctggctgtcatggcagtgggcatctggacgctggccctcaagagtgactacatcagcctgctggcctcaggcacctacctggccacagcctacatcctggtggtggcgggcactgtcgtcatggtgactggggtcttgggctgctgcgccaccttcaaggagcgtcggaacctgctgcgcctgtacttcatcctgctcctcatcatctttctgctggagatcatcgctggtatcctcgcctacgcctactaccagcagctgaacacggagctcaaggagaacctgaaggacaccatgaccaagcgctaccaccagccgggccatgaggctgtgaccagcgctgtggaccagctgcagcaggagttccactgctgtggcagcaacaactcacaggactggcgagacagtgagtggatc

SEQ ID NO: 4996 - DNA, 1407 bp, Homo sapiens
  source 1..1407: mol_type = unassigned DNA
gactcggacgcgtgcctagagtcctggggagcttctgtccacctgtcctgcagaggagtcgtttccagcccggctgccccaggatgggtgagttcaacgagaagaagacaacatgtggcaccgtttgcctcaagtacctgctgtttacctacaattgctgcttctggctggctggcctggctgtcatggcagtgggcatctggacgctggccctcaagagtgactacatcagcctgctggcctcaggcacctacctggccacagcctacatcctggtggtggcgggcactgtcgtcatggtgactggggtcttgggctgctgcgccaccttcaaggagcgtcggaacctgctgcgcctgtacttcatcctgctcctcatcatctttctgctggagatcatcgctggtatcctcgcctacgcctactaccagcagctgaacacggagctcaaggagaacctgaaggacaccatgaccaagcgctaccaccagccgggccatgaggctgtgaccagcgctgtggaccagctgcagcaggagttccactgctgtggcagcaacaactcacaggactggcgagacagtgagtggatccgctcacaggaggccggtggccgtgtggtcccagacagctgctgcaagacggtggtggctctttgtgggcagcgagaccatgcctccaacatctacaaggtggagggcggctgcatcaccaagttggagaccttcatccaggagcacctgagggtcattggggctgtggggatcggcattgcctgtgtgcaggtctttggcatgatcttcacgtgctgcctgtacaggagtctcaagctggagcactactgaccctgccttgggccttgctgctgctgcacccaactactgagctgagaccactgagtaccaggggctgggctccctgatgacacccaccctgtgccatcaccataacctctggggaccccaacctcagaggcagcttcaagtgccttttgctgcgcaccaatgcccagcaggggagatgcaggttggaaggggccttgctgagtggcgcaaggccgagcgttcccagcagggggagaaacccttcacaccccaggcccttcaggaactggggccttgccttgcagccacatggccccatcccagttggggaagccaggtgagctctgacccttgggcctgggcctctgcccctcccaacccagccctcgtctccctcgacagcgcccctgctgtcttccccaccgcagtcaccaccacccgaaatgccacgtggtcactgtgcactgccctgttcatgtgcctctgcggggcagggccttcctggttttgttcactgctgtacccagatgcctacaaccatccctgccacatacaggtgctcaataaacacttgtagagcaga

SEQ ID NO: 4997 - DNA, 4268 bp, Homo sapiens
  source 1..4268: mol_type = unassigned DNA
attgaagaaaacatgagtatgaaatggaacctcagctctttcaatgacttccctttttgagttgactccgcctccatatgtagccttttcattttcatgaaagtgaagtgatttttagaattcttagttgttttctttagaagaacatttctagggaataatacaagaagatttaggaatcattgaagttataaatctttggaatgagcaaactcagaatggtgctacttgaagactctggatctgctgacttcagaagacattttgtcaacttgagtcccttcaccattactgtggtcttacttctcagtgcctgttttgtcaccagttctcttggaggaacagacaaggagctgaggctagtggatggtgaaaacaagtgtagcgggagagtggaagtgaaagtccaggaggagtggggaacggtgtgtaataatggctggagcatggaagcggtctctgtgatttgtaaccagctgggatgtccaactgctatcaaagcccctggatgggctaattccagtgcaggttctggacgcatttggatggatcatgtttcttgtcgtgggaatgagtcagctctttgggattgcaaacatgatggatggggaaagcatagtaactgtactcaccaacaagatgctggagtgacctgctcagatggatccaatttggaaatgaggctgacgcgtggagggaatatgtgttctggaagaatagagatcaaattccaaggacggtggggaacagtgtgtgatgataacttcaacatagatcatgcatctgtcatttgtagacaacttgaatgtggaagtgctgtcagtttctctggttcatctaattttggagaaggctctggaccaatctggtttgatgatcttatatgcaacggaaatgagtcagctctctggaactgcaaacatcaaggatggggaaagcataactgtgatcatgctgaggatgctggagtgatttgctcaaagggagcagatctgagcctgagactggtagatggagtcactgaatgttcaggaagattagaagtgagattccaaggagaatgggggacaatatgtgatgacggctgggacagttacgatgctgctgtggcatgcaagcaactgggatgtccaactgccgtcacagccattggtcgagttaacgccagtaagggatttggacacatctggcttgacagcgtttcttgccagggacatgaacctgctatctggcaatgtaaacaccatgaatggggaaagcattattgcaatcacaatgaagatgctggcgtgacatgttctgatggatcagatctggagctaagacttagaggtggaggcagccgctgtgctgggacagttgaggtggagattcagagactgttagggaaggtgtgtgacagaggctggggactgaaagaagctgatgtggtttgcaggcagctgggatgtggatctgcactcaaaacatcttatcaagtgtactccaaaatccaggcaacaaacacatggctgtttctaagtagctgtaacggaaatgaaacttctctttgggactgcaagaactggcaatggggtggacttacctgtgatcactatgaagaagccaaaattacctgctcagcccacagggaacccagactggttggaggggacattccctgttctggacgtgttgaagtgaagcatggtgacacgtggggctccatctgtgattcggacttctctctggaagctgccagcgttctatgcagggaattacagtgtggcacagttgtctctatcctggggggagctcactttggagagggaaatggacagatctgggctgaagaattccagtgtgagggacatgagtcccatctttcactctgcccagtagcaccccgcccagaaggaacttgtagccacagcagggatgttggagtagtctgctcaagatacacagaaattcgcttggtgaatggcaagaccccgtgtgagggcagagtggagctcaaaacgcttggtgcctggggatccctctgtaactctcactgggacatagaagatgcccatgttctttgccagcagcttaaatgtggagttgccctttctaccccaggaggagcacgttttggaaaaggaaatggtcagatctggaggcatatgtttcactgcactgggactgagcagcacatgggagattgtcctgtaactgctctaggtgcttcattatgtccttcagagcaagtggcctctgtaatctgctcaggaaaccagtcccaaacactgtcctcgtgcaattcatcgtctttgggcccaacaaggcctaccattccagaagaaagtgctgtggcctgcatagagagtggtcaacttcgcctggtaaatggaggaggtcgctgtgctgggagagtagagatctatcatgagggctcctggggcaccatctgtgatgacagctgggacctgagtgatgcccacgtggtttgcagacagctgggctgtggagaggccattaatgccactggttctgctcattttggggaaggaacagggcccatctggctggatgagatgaaatgcaatggaaaagaatcccgcatttggcagtgccattcacacggctgggggcagcaaaattgcaggcacaaggaggatgcgggagttatctgctcagaattcatgtctctgagactgaccagtgaagccagcagagaggcctgtgcagggcgtctggaagttttttacaatggagcttggggcactgttggcaagagtagcatgtctgaaaccactgtgggtgtggtgtgcaggcagctgggctgtgcagacaaagggaaaatcaaccctgcatctttagacaaggccatgtccattcccatgtgggtggacaatgttcagtgtccaaaaggacctgacacgctgtggcagtgcccatcatctccatgggagaagagactggccagcccctcggaggagacctggatcacatgtgacaacaagataagacttcaggaaggacccacttcctgttctggacgtgtggagatctggcatggaggttcctgggggacagtgtgtgatgactcttgggacttggacgatgctcaggtggtgtgtcaacaacttggctgtggtccagctttgaaagcattcaaagaagcagagtttggtcaggggactggaccgatatggctcaatgaagtgaagtgcaaagggaatgagtcttccttgtgggattgtcctgccagacgctggggccatagtgagtgtgggcacaaggaagacgctgcagtgaattgcacagatatttcagtgcagaaaaccccacaaaaagccacaacaggtcgctcatcccgtcagtcatcctttattgcagtcgggatccttggggttgttctgttggccattttcgtcgcattattcttcttgactaaaaagcgaagacagagacagcggcttgcagtttcctcaagaggagagaacttagtccaccaaattcaataccgggagatgaattcttgcctgaatgcagatgatctggacctaatgaattcctcagaaaattcccatgagtcagctgatttcagtgctgctgaactaatttctgtgtctaaatttcttcctatttctggaatggaaaaggaggccattctgagccacactgaaaaggaaaatgggaatttataacccagtgagttcagcctttaagataccttgatgaagacctggactattgaatggagcagaaattcacctctctcactgactattacagttgcatttttatggagttcttcttctcctaggattcctaagactgctgctgaatttataaaaattaagtttgtgaatgtgactacttagtggtgtatatgagactttcaagggaattaaataaataaataagaatgttattgatttgagtttgctttaattacttgtccttaattctattaatttctaaatgggcttcctaattttttgtagagtttcctagatgtattataatgtgttttatttgacagtgtttcaatttgcatatacagtactgtatattttttcttatttggtttgaataattttcctattaccaaataaaaataaatttatttttactttagtttttctaagacaggaaaagttaatgatattgaagggtctgtaaataatatatggctaactttataaggcatgactcacaacgattctttaactgctttttgttactgtaattctgttcactagaataaaatgcagagccacacctggtgagggcacaaa

SEQ ID NO: 4998 - DNA, 3800 bp, Homo sapiens
  source 1..3800: mol_type = unassigned DNA
gaattcttagttgttttctttagaagaacatttctagggaataatacaagaagatttaggaatcattgaagttataaatctttggaatgagcaaactcagaatggtgctacttgaagactctggatctgctgacttcagaagacattttgtcaacttgagtcccttcaccattactgtggtcttacttctcagtgcctgttttgtcaccagttctcttggaggaacagacaaggagctgaggctagtggatggtgaaaacaagtgtagcgggagagtggaagtgaaagtccaggaggagtggggaacggtgtgtaataatggctggagcatggaagcggtctctgtgatttgtaaccagctgggatgtccaactgctatcaaagcccctggatgggctaattccagtgcaggttctggacgcatttggatggatcatgtttcttgtcgtgggaatgagtcagctctttgggattgcaaacatgatggatggggaaagcatagtaactgtactcaccaacaagatgctggagtgacctgctcagatggatccaatttggaaatgaggctgacgcgtggagggaatatgtgttctggaagaatagagatcaaattccaaggacggtggggaacagtgtgtgatgataacttcaacatagatcatgcatctgtcatttgtagacaacttgaatgtggaagtgctgtcagtttctctggttcatctaattttggagaaggctctggaccaatctggtttgatgatcttatatgcaacggaaatgagtcagctctctggaactgcaaacatcaaggatggggaaagcataactgtgatcatgctgaggatgctggagtgatttgctcaaagggagcagatctgagcctgagactggtagatggagtcactgaatgttcaggaagattagaagtgagattccaaggagaatgggggacaatatgtgatgacggctgggacagttacgatgctgctgtggcatgcaagcaactgggatgtccaactgccgtcacagccattggtcgagttaacgccagtaagggatttggacacatctggcttgacagcgtttcttgccagggacatgaacctgctatctggcaatgtaaacaccatgaatggggaaagcattattgcaatcacaatgaagatgctggcgtgacatgttctgatggatcagatctggagctaagacttagaggtggaggcagccgctgtgctgggacagttgaggtggagattcagagactgttagggaaggtgtgtgacagaggctggggactgaaagaagctgatgtggtttgcaggcagctgggatgtggatctgcactcaaaacatcttatcaagtgtactccaaaatccaggcaacaaacacatggctgtttctaagtagctgtaacggaaatgaaacttctctttgggactgcaagaactggcaatggggtggacttacctgtgatcactatgaagaagccaaaattacctgctcagcccacagggaacccagactggttggaggggacattccctgttctggacgtgttgaagtgaagcatggtgacacgtggggctccatctgtgattcggacttctctctggaagctgccagcgttctatgcagggaattacagtgtggcacagttgtctctatcctggggggagctcactttggagagggaaatggacagatctgggctgaagaattccagtgtgagggacatgagtcccatctttcactctgcccagtagcaccccgcccagaaggaacttgtagccacagcagggatgttggagtagtctgctcaagtaagacccagaaaacatctttaattggttctcatactgtgaaagggacagggttagggagtcatagctgtctttttctaaagccctgtctccttccaggatacacagaaattcgcttggtgaatggcaagaccccgtgtgagggcagagtggagctcaaaacgcttggtgcctggggatccctctgtaactctcactgggacatagaagatgcccatgttctttgccagcagcttaaatgtggagttgccctttctaccccaggaggagcacgttttggaaaaggaaatggtcagatctggaggcatatgtttcactgcactgggactgagcagcacatgggagattgtcctgtaactgctctaggtgcttcattatgtccttcagagcaagtggcctctgtaatctgctcaggaaaccagtcccaaacactgtcctcgtgcaattcatcgtctttgggcccaacaaggcctaccattccagaagaaagtgctgtggcctgcatagagagtggtcaacttcgcctggtaaatggaggaggtcgctgtgctgggagagtagagatctatcatgagggctcctggggcaccatctgtgatgacagctgggacctgagtgatgcccacgtggtttgcagacagctgggctgtggagaggccattaatgccactggttctgctcattttggggaaggaacagggcccatctggctggatgagatgaaatgcaatggaaaagaatcccgcatttggcagtgccattcacacggctgggggcagcaaaattgcaggcacaaggaggatgcgggagttatctgctcagaattcatgtctctgagactgaccagtgaagccagcagagaggcctgtgcagggcgtctggaagttttttacaatggagcttggggcactgttggcaagagtagcatgtctgaaaccactgtgggtgtggtgtgcaggcagctgggctgtgcagacaaagggaaaatcaaccctgcatctttagacaaggccatgtccattcccatgtgggtggacaatgttcagtgtccaaaaggacctgacacgctgtggcagtgcccatcatctccatgggagaagagactggccagcccctcggaggagacctggatcacatgtgacaacaagataagacttcaggaaggacccacttcctgttctggacgtgtggagatctggcatggaggttcctgggggacagtgtgtgatgactcttgggacttggacgatgctcaggtggtgtgtcaacaacttggctgtggtccagctttgaaagcattcaaagaagcagagtttggtcaggggactggaccgatatggctcaatgaagtgaagtgcaaagggaatgagtcttccttgtgggattgtcctgccagacgctggggccatagtgagtgtgggcacaaggaagacgctgcagtgaattgcacagatatttcagtgcagaaaaccccacaaaaagccacaacaggtcgctcatcccgtcagtcatcctttattgcagtcgggatccttggggttgttctgttggccattttcgtcgcattattcttcttgactaaaaagcgaagacagagacagcggcttgcagtttcctcaagaggagagaacttagtccaccaaattcaataccgggagatgaattcttgcctgaatgcagatgatctggacctaatgaattcctcaggaggccattctgagccacactgaaaaggaaaatgggaatttataacccagtgagttcagcctttaagataccttgatgaagacctggactattgaatggagcagaaattcacctctctcactgactattacagttgcatttttatggagttcttcttctcctaggattcctaagactgctgctgaatttataaaaattaagtttgtgaatgtgactacttagtggtgtatatgagactttcaagggaattaaataaataaataagaatgtta

SEQ ID NO: 4999 - DNA, 3701 bp, Homo sapiens
  source 1..3701: mol_type = unassigned DNA
gaattcttagttgttttctttagaagaacatttctagggaataatacaagaagatttaggaatcattgaagttataaatctttggaatgagcaaactcagaatggtgctacttgaagactctggatctgctgacttcagaagacattttgtcaacttgagtcccttcaccattactgtggtcttacttctcagtgcctgttttgtcaccagttctcttggaggaacagacaaggagctgaggctagtggatggtgaaaacaagtgtagcgggagagtggaagtgaaagtccaggaggagtggggaacggtgtgtaataatggctggagcatggaagcggtctctgtgatttgtaaccagctgggatgtccaactgctatcaaagcccctggatgggctaattccagtgcaggttctggacgcatttggatggatcatgtttcttgtcgtgggaatgagtcagctctttgggattgcaaacatgatggatggggaaagcatagtaactgtactcaccaacaagatgctggagtgacctgctcagatggatccaatttggaaatgaggctgacgcgtggagggaatatgtgttctggaagaatagagatcaaattccaaggacggtggggaacagtgtgtgatgataacttcaacatagatcatgcatctgtcatttgtagacaacttgaatgtggaagtgctgtcagtttctctggttcatctaattttggagaaggctctggaccaatctggtttgatgatcttatatgcaacggaaatgagtcagctctctggaactgcaaacatcaaggatggggaaagcataactgtgatcatgctgaggatgctggagtgatttgctcaaagggagcagatctgagcctgagactggtagatggagtcactgaatgttcaggaagattagaagtgagattccaaggagaatgggggacaatatgtgatgacggctgggacagttacgatgctgctgtggcatgcaagcaactgggatgtccaactgccgtcacagccattggtcgagttaacgccagtaagggatttggacacatctggcttgacagcgtttcttgccagggacatgaacctgctatctggcaatgtaaacaccatgaatggggaaagcattattgcaatcacaatgaagatgctggcgtgacatgttctgatggatcagatctggagctaagacttagaggtggaggcagccgctgtgctgggacagttgaggtggagattcagagactgttagggaaggtgtgtgacagaggctggggactgaaagaagctgatgtggtttgcaggcagctgggatgtggatctgcactcaaaacatcttatcaagtgtactccaaaatccaggcaacaaacacatggctgtttctaagtagctgtaacggaaatgaaacttctctttgggactgcaagaactggcaatggggtggacttacctgtgatcactatgaagaagccaaaattacctgctcagcccacagggaacccagactggttggaggggacattccctgttctggacgtgttgaagtgaagcatggtgacacgtggggctccatctgtgattcggacttctctctggaagctgccagcgttctatgcagggaattacagtgtggcacagttgtctctatcctggggggagctcactttggagagggaaatggacagatctgggctgaagaattccagtgtgagggacatgagtcccatctttcactctgcccagtagcaccccgcccagaaggaacttgtagccacagcagggatgttggagtagtctgctcaagatacacagaaattcgcttggtgaatggcaagaccccgtgtgagggcagagtggagctcaaaacgcttggtgcctggggatccctctgtaactctcactgggacatagaagatgcccatgttctttgccagcagcttaaatgtggagttgccctttctaccccaggaggagcacgttttggaaaaggaaatggtcagatctggaggcatatgtttcactgcactgggactgagcagcacatgggagattgtcctgtaactgctctaggtgcttcattatgtccttcagagcaagtggcctctgtaatctgctcaggaaaccagtcccaaacactgtcctcgtgcaattcatcgtctttgggcccaacaaggcctaccattccagaagaaagtgctgtggcctgcatagagagtggtcaacttcgcctggtaaatggaggaggtcgctgtgctgggagagtagagatctatcatgagggctcctggggcaccatctgtgatgacagctgggacctgagtgatgcccacgtggtttgcagacagctgggctgtggagaggccattaatgccactggttctgctcattttggggaaggaacagggcccatctggctggatgagatgaaatgcaatggaaaagaatcccgcatttggcagtgccattcacacggctgggggcagcaaaattgcaggcacaaggaggatgcgggagttatctgctcagaattcatgtctctgagactgaccagtgaagccagcagagaggcctgtgcagggcgtctggaagttttttacaatggagcttggggcactgttggcaagagtagcatgtctgaaaccactgtgggtgtggtgtgcaggcagctgggctgtgcagacaaagggaaaatcaaccctgcatctttagacaaggccatgtccattcccatgtgggtggacaatgttcagtgtccaaaaggacctgacacgctgtggcagtgcccatcatctccatgggagaagagactggccagcccctcggaggagacctggatcacatgtgacaacaagataagacttcaggaaggacccacttcctgttctggacgtgtggagatctggcatggaggttcctgggggacagtgtgtgatgactcttgggacttggacgatgctcaggtggtgtgtcaacaacttggctgtggtccagctttgaaagcattcaaagaagcagagtttggtcaggggactggaccgatatggctcaatgaagtgaagtgcaaagggaatgagtcttccttgtgggattgtcctgccagacgctggggccatagtgagtgtgggcacaaggaagacgctgcagtgaattgcacagatatttcagtgcagaaaaccccacaaaaagccacaacaggtcgctcatcccgtcagtcatcctttattgcagtcgggatccttggggttgttctgttggccattttcgtcgcattattcttcttgactaaaaagcgaagacagagacagcggcttgcagtttcctcaagaggagagaacttagtccaccaaattcaataccgggagatgaattcttgcctgaatgcagatgatctggacctaatgaattcctcaggaggccattctgagccacactgaaaaggaaaatgggaatttataacccagtgagttcagcctttaagataccttgatgaagacctggactattgaatggagcagaaattcacctctctcactgactattacagttgcatttttatggagttcttcttctcctaggattcctaagactgctgctgaatttataaaaattaagtttgtgaatgtgactacttagtggtgtatatgagactttcaagggaattaaataaataaataagaatgtta

SEQ ID NO: 5000 - DNA, 2954 bp, Homo sapiens
  source 1..2954: mol_type = unassigned DNA
ggattgaggggttgactgagcgttgcgagccttagctttctcccgaacgccagcgctgaggacacgatgtcgcggctctcccgctcactgctttgggccgccacctgcctgggcgtgctctgcgtgctgtccgcggacaagaacacgacccagcacccgaacgtgacgactttagcgcccatctccaacgtaacctcggcgccggtgacgtccctcccgctggtcaccactccggcaccagaaacctgtgaaggtcgaaacagctgcgtttcctgttttaatgttagcgttgttaatactacctgcttttggatagaatgtaaagatgagagctattgttcacataactcaacagttagtgattgtcaagtggggaacacgacagacttctgttccgctaaacccacagttcagccctccccttctacaacttccaagacagttactacatcaggtacaacaaataacactgtgactccaacctcacaacctgtgcgaaagtctacctttgatgcagccagtttcattggaggaattgtcctggtcttgggtgtgcaggctgtaattttctttctttataaattctgcaaatctaaagaacgaaattaccacactctgtaaacagacccattgaattaataaggactggtgattcatttgtgtaactcactgaagccaaaatactatcttttaagatgtcccacatggaagacgctattccaggatctttaaatttccatggatgcatataggatgtttgggagcatcatccgtgaagaaaaaatcaattaaatcattgtgttcaacaggaatatttaaaatattctgcatgaatcctgtggctgtcttattttaaatagctgctgctgtgggattatattttttttccttaacatgccaaatataactttctgaaagtgatggaaaatgttgtcttgtgcagacaacatcatggctcttggcagtttaaatttagtaattttaatttagtgaacagaattgagaagaacgtgccaaatgagaatcaattaggtggatttttggctgtcatttcaaaagtggaataaatttattaatttagtagtactaaatggtatccttagattaaaattttgtgcttgataacagctgttttttctacattagaaataagatgccacacaaggaactacattccagatttaaagaaatgaaaggataccattagtgtgtataacagattattgttcatacttgtaaagcatcttatgtcattgagaatataaagaacagtgccttagaagacagtgaaaggtaagctctagcttaatgtctatgatttgttctttgacattaaggaaggtaaggattggtcagaggatgtaacttgatgtgagcagtagtaaacctgttttagatatcatactgttaatattttattgaaaatttatttcagagcggagaaacttaagctaaagtctgttatacagaattgaaagccttcgtatcttgaacctcccaacatttttcttatggctgttgaaaagtatagagctaaattgatttaattacactttcctttgtactttaaaaaaaagtatgctagcactattgtaccttgaaaggatttccaccagactgtcttgagtagtgacttctttggtgaggcaagaaggatatacattattttagaatcatttactatttaaatgagacaatcatattattttagaatcatttattttaaatgagacaatcattttaagttttaagataacagaagtgaccaatgtaatttcacaacacctaaggattttttggttgatcaggttactgtagatttttactgattgtcctggatgaatagactgtgctttttctttttctctcccttccttcttggtttcccatagtataataagcatgcatactttaacttctatagttttctcctttagagggtcgtcttcagttttagaggtttacttctcccttgcctttgactcattggactagtgcagaggctttaagtagtttaaaatgggcttttgcttttctaggtcattaacgttttttatttagtttctttagccaatagtggctgagtttcgcacttgattttcaatattttatagtaagaaatgacaaactgctttgtttcatttcataaacaaactctgcatttagataactattaaaggttgttaagatgaagatttactgtttctttgttactcgttggtacagctgtttgttttacttgcacatttgtacatatacttaatgttttcaagtgccttaattgtttaaaatctctggcttcaaagtttcttggggaaaggtcggtttacctcacattttttgtttccattagtaatattctaggtacctcacaaaatgtattatggtgccatggctgttagtttttagtgagtgctgtaggattaattcgaaaataggcagaattccattcctcccaaggtggcaaaaattagctatactgatgtaattgtcatttacctgggtatgaattccctgacacacattcatgtcaacatatgtagcaaattttgtgaaaacataacaatttgaagcttctgtaattttgagcactgctctaacaacaagcataatataaaattagttagattttgcaagtctacaaatgagctcttgcaacagaactcacagcctttttacttttttcccctaactttagcaatgtagtatcttgagccattaatttttgggtttttttaaaatccagaaggtatatagaaaccttttcagatttttcatctgatttgttcttgcagatgttcttctatcaaataccttattttaccttacagatatttgttgcacaggcagatactgctgtatttagacatttctatttcagttcattaaaaactgcaaaaccaatctgtatcatgtaccaaactgacttaaaataaatctacatgtttattgaa

SEQ ID NO: 5001 - DNA, 2993 bp, Homo sapiens
  source 1..2993: mol_type = unassigned DNA
ggattgaggggttgactgagcgttgcgagccttagctttctcccgaacgccagcgctgaggacacgatgtcgcggctctcccgctcactgctttgggccgccacctgcctgggcgtgctctgcgtgctgtccgcggacaagaacacgacccagcacccgaacgtgacgactttagcgcccatctccaacgtaacctcggcgccggtgacgtccctcccgctggtcaccactccggcaccagaaacctgtgaaggtcgaaacagctgcgtttcctgttttaatgttagcgttgttaatactacctgcttttggatagaatgtaaagatgagagctattgttcacataactcaacagttagtgattgtcaagtggggaacacgacagacttctgttccgtttccacggccactccagtgccaacagccaattctacagctaaacccacagttcagccctccccttctacaacttccaagacagttactacatcaggtacaacaaataacactgtgactccaacctcacaacctgtgcgaaagtctacctttgatgcagccagtttcattggaggaattgtcctggtcttgggtgtgcaggctgtaattttctttctttataaattctgcaaatctaaagaacgaaattaccacactctgtaaacagacccattgaattaataaggactggtgattcatttgtgtaactcactgaagccaaaatactatcttttaagatgtcccacatggaagacgctattccaggatctttaaatttccatggatgcatataggatgtttgggagcatcatccgtgaagaaaaaatcaattaaatcattgtgttcaacaggaatatttaaaatattctgcatgaatcctgtggctgtcttattttaaatagctgctgctgtgggattatattttttttccttaacatgccaaatataactttctgaaagtgatggaaaatgttgtcttgtgcagacaacatcatggctcttggcagtttaaatttagtaattttaatttagtgaacagaattgagaagaacgtgccaaatgagaatcaattaggtggatttttggctgtcatttcaaaagtggaataaatttattaatttagtagtactaaatggtatccttagattaaaattttgtgcttgataacagctgttttttctacattagaaataagatgccacacaaggaactacattccagatttaaagaaatgaaaggataccattagtgtgtataacagattattgttcatacttgtaaagcatcttatgtcattgagaatataaagaacagtgccttagaagacagtgaaaggtaagctctagcttaatgtctatgatttgttctttgacattaaggaaggtaaggattggtcagaggatgtaacttgatgtgagcagtagtaaacctgttttagatatcatactgttaatattttattgaaaatttatttcagagcggagaaacttaagctaaagtctgttatacagaattgaaagccttcgtatcttgaacctcccaacatttttcttatggctgttgaaaagtatagagctaaattgatttaattacactttcctttgtactttaaaaaaaagtatgctagcactattgtaccttgaaaggatttccaccagactgtcttgagtagtgacttctttggtgaggcaagaaggatatacattattttagaatcatttactatttaaatgagacaatcatattattttagaatcatttattttaaatgagacaatcattttaagttttaagataacagaagtgaccaatgtaatttcacaacacctaaggattttttggttgatcaggttactgtagatttttactgattgtcctggatgaatagactgtgctttttctttttctctcccttccttcttggtttcccatagtataataagcatgcatactttaacttctatagttttctcctttagagggtcgtcttcagttttagaggtttacttctcccttgcctttgactcattggactagtgcagaggctttaagtagtttaaaatgggcttttgcttttctaggtcattaacgttttttatttagtttctttagccaatagtggctgagtttcgcacttgattttcaatattttatagtaagaaatgacaaactgctttgtttcatttcataaacaaactctgcatttagataactattaaaggttgttaagatgaagatttactgtttctttgttactcgttggtacagctgtttgttttacttgcacatttgtacatatacttaatgttttcaagtgccttaattgtttaaaatctctggcttcaaagtttcttggggaaaggtcggtttacctcacattttttgtttccattagtaatattctaggtacctcacaaaatgtattatggtgccatggctgttagtttttagtgagtgctgtaggattaattcgaaaataggcagaattccattcctcccaaggtggcaaaaattagctatactgatgtaattgtcatttacctgggtatgaattccctgacacacattcatgtcaacatatgtagcaaattttgtgaaaacataacaatttgaagcttctgtaattttgagcactgctctaacaacaagcataatataaaattagttagattttgcaagtctacaaatgagctcttgcaacagaactcacagcctttttacttttttcccctaactttagcaatgtagtatcttgagccattaatttttgggtttttttaaaatccagaaggtatatagaaaccttttcagatttttcatctgatttgttcttgcagatgttcttctatcaaataccttattttaccttacagatatttgttgcacaggcagatactgctgtatttagacatttctatttcagttcattaaaaactgcaaaaccaatctgtatcatgtaccaaactgacttaaaataaatctacatgtttattgaa

SEQ ID NO: 5002 - DNA, 2936 bp, Homo sapiens
  source 1..2936: mol_type = unassigned DNA
ggattgaggggttgactgagcgttgcgagccttagctttctcccgaacgccagcgctgaggacacgatgtcgcggctctcccgctcactgctttgggccgccacctgcctgggcgtgctctgcgtgctgtccgcggacaagaacacgacccagcacccgaacgtgacgactttagcgcccatctccaacgtaacctcggcgccggtgacgtccctcccgctggtcaccactccggcaccagaaacctgtgaaggtcgaaacagctgcgtttcctgttttaatgttagcgttgttaatactacctgcttttggatagaatgtaaagatgagagctattgttcacataactcaacagttagtgattgtcaagtggggaacacgacagacttctgttccgtttccacggccactccagtgccaacagccaattctacaggtacaacaaataacactgtgactccaacctcacaacctgtgcgaaagtctacctttgatgcagccagtttcattggaggaattgtcctggtcttgggtgtgcaggctgtaattttctttctttataaattctgcaaatctaaagaacgaaattaccacactctgtaaacagacccattgaattaataaggactggtgattcatttgtgtaactcactgaagccaaaatactatcttttaagatgtcccacatggaagacgctattccaggatctttaaatttccatggatgcatataggatgtttgggagcatcatccgtgaagaaaaaatcaattaaatcattgtgttcaacaggaatatttaaaatattctgcatgaatcctgtggctgtcttattttaaatagctgctgctgtgggattatattttttttccttaacatgccaaatataactttctgaaagtgatggaaaatgttgtcttgtgcagacaacatcatggctcttggcagtttaaatttagtaattttaatttagtgaacagaattgagaagaacgtgccaaatgagaatcaattaggtggatttttggctgtcatttcaaaagtggaataaatttattaatttagtagtactaaatggtatccttagattaaaattttgtgcttgataacagctgttttttctacattagaaataagatgccacacaaggaactacattccagatttaaagaaatgaaaggataccattagtgtgtataacagattattgttcatacttgtaaagcatcttatgtcattgagaatataaagaacagtgccttagaagacagtgaaaggtaagctctagcttaatgtctatgatttgttctttgacattaaggaaggtaaggattggtcagaggatgtaacttgatgtgagcagtagtaaacctgttttagatatcatactgttaatattttattgaaaatttatttcagagcggagaaacttaagctaaagtctgttatacagaattgaaagccttcgtatcttgaacctcccaacatttttcttatggctgttgaaaagtatagagctaaattgatttaattacactttcctttgtactttaaaaaaaagtatgctagcactattgtaccttgaaaggatttccaccagactgtcttgagtagtgacttctttggtgaggcaagaaggatatacattattttagaatcatttactatttaaatgagacaatcatattattttagaatcatttattttaaatgagacaatcattttaagttttaagataacagaagtgaccaatgtaatttcacaacacctaaggattttttggttgatcaggttactgtagatttttactgattgtcctggatgaatagactgtgctttttctttttctctcccttccttcttggtttcccatagtataataagcatgcatactttaacttctatagttttctcctttagagggtcgtcttcagttttagaggtttacttctcccttgcctttgactcattggactagtgcagaggctttaagtagtttaaaatgggcttttgcttttctaggtcattaacgttttttatttagtttctttagccaatagtggctgagtttcgcacttgattttcaatattttatagtaagaaatgacaaactgctttgtttcatttcataaacaaactctgcatttagataactattaaaggttgttaagatgaagatttactgtttctttgttactcgttggtacagctgtttgttttacttgcacatttgtacatatacttaatgttttcaagtgccttaattgtttaaaatctctggcttcaaagtttcttggggaaaggtcggtttacctcacattttttgtttccattagtaatattctaggtacctcacaaaatgtattatggtgccatggctgttagtttttagtgagtgctgtaggattaattcgaaaataggcagaattccattcctcccaaggtggcaaaaattagctatactgatgtaattgtcatttacctgggtatgaattccctgacacacattcatgtcaacatatgtagcaaattttgtgaaaacataacaatttgaagcttctgtaattttgagcactgctctaacaacaagcataatataaaattagttagattttgcaagtctacaaatgagctcttgcaacagaactcacagcctttttacttttttcccctaactttagcaatgtagtatcttgagccattaatttttgggtttttttaaaatccagaaggtatatagaaaccttttcagatttttcatctgatttgttcttgcagatgttcttctatcaaataccttattttaccttacagatatttgttgcacaggcagatactgctgtatttagacatttctatttcagttcattaaaaactgcaaaaccaatctgtatcatgtaccaaactgacttaaaataaatctacatgtttattgaa

SEQ ID NO: 5003 - DNA, 3014 bp, Homo sapiens
  source 1..3014: mol_type = unassigned DNA
atcgtccgagccccacctccctcctcttcgcccccgcacgccgaaaacaggggcctctcacgtgacccctgcgcgctcccgcgggggagcgtagtctcggaggcggcgccgcaggggattgaggggttgactgagcgttgcgagccttagctttctcccgaacgccagcgctgaggacacgatgtcgcggctctcccgctcactgctttgggccgccacctgcctgggcgtgctctgcgtgctgtccgcggacaagaacacgacccagcacccgaacgtgacgactttagcgcccatctccaacgtaacctcggcgccggtgacgtccctcccgctggtcaccactccggcaccagaaacctgtgaaggtcgaaacagctgcgtttcctgttttaatgttagcgttgttaatactacctgcttttggatagaatgtaaagatgagagctattgttcacataactcaacagttagtgattgtcaagtggggaacacgacagacttctgttccggtacaacaaataacactgtgactccaacctcacaacctgtgcgaaagtctacctttgatgcagccagtttcattggaggaattgtcctggtcttgggtgtgcaggctgtaattttctttctttataaattctgcaaatctaaagaacgaaattaccacactctgtaaacagacccattgaattaataaggactggtgattcatttgtgtaactcactgaagccaaaatactatcttttaagatgtcccacatggaagacgctattccaggatctttaaatttccatggatgcatataggatgtttgggagcatcatccgtgaagaaaaaatcaattaaatcattgtgttcaacaggaatatttaaaatattctgcatgaatcctgtggctgtcttattttaaatagctgctgctgtgggattatattttttttccttaacatgccaaatataactttctgaaagtgatggaaaatgttgtcttgtgcagacaacatcatggctcttggcagtttaaatttagtaattttaatttagtgaacagaattgagaagaacgtgccaaatgagaatcaattaggtggatttttggctgtcatttcaaaagtggaataaatttattaatttagtagtactaaatggtatccttagattaaaattttgtgcttgataacagctgttttttctacattagaaataagatgccacacaaggaactacattccagatttaaagaaatgaaaggataccattagtgtgtataacagattattgttcatacttgtaaagcatcttatgtcattgagaatataaagaacagtgccttagaagacagtgaaaggtaagctctagcttaatgtctatgatttgttctttgacattaaggaaggtaaggattggtcagaggatgtaacttgatgtgagcagtagtaaacctgttttagatatcatactgttaatattttattgaaaatttatttcagagcggagaaacttaagctaaagtctgttatacagaattgaaagccttcgtatcttgaacctcccaacatttttcttatggctgttgaaaagtatagagctaaattgatttaattacactttcctttgtactttaaaaaaaagtatgctagcactattgtaccttgaaaggatttccaccagactgtcttgagtagtgacttctttggtgaggcaagaaggatatacattattttagaatcatttactatttaaatgagacaatcatattattttagaatcatttattttaaatgagacaatcattttaagttttaagataacagaagtgaccaatgtaatttcacaacacctaaggattttttggttgatcaggttactgtagatttttactgattgtcctggatgaatagactgtgctttttctttttctctcccttccttcttggtttcccatagtataataagcatgcatactttaacttctatagttttctcctttagagggtcgtcttcagttttagaggtttacttctcccttgcctttgactcattggactagtgcagaggctttaagtagtttaaaatgggcttttgcttttctaggtcattaacgttttttatttagtttctttagccaatagtggctgagtttcgcacttgattttcaatattttatagtaagaaatgacaaactgctttgtttcatttcataaacaaactctgcatttagataactattaaaggttgttaagatgaagatttactgtttctttgttactcgttggtacagctgtttgttttacttgcacatttgtacatatacttaatgttttcaagtgccttaattgtttaaaatctctggcttcaaagtttcttggggaaaggtcggtttacctcacattttttgtttccattagtaatattctaggtacctcacaaaatgtattatggtgccatggctgttagtttttagtgagtgctgtaggattaattcgaaaataggcagaattccattcctcccaaggtggcaaaaattagctatactgatgtaattgtcatttacctgggtatgaattccctgacacacattcatgtcaacatatgtagcaaattttgtgaaaacataacaatttgaagcttctgtaattttgagcactgctctaacaacaagcataatataaaattagttagattttgcaagtctacaaatgagctcttgcaacagaactcacagcctttttacttttttcccctaactttagcaatgtagtatcttgagccattaatttttgggtttttttaaaatccagaaggtatatagaaaccttttcagatttttcatctgatttgttcttgcagatgttcttctatcaaataccttattttaccttacagatatttgttgcacaggcagatactgctgtatttagacatttctatttcagttcattaaaaactgcaaaaccaatctgtatcatgtaccaaactgacttaaaataaatctacatgtttattgaatt

SEQ ID NO: 5004 - DNA, 2414 bp, Homo sapiens
  source 1..2414: mol_type = unassigned DNA
gcggcgccgcaggggattgaggggttgactgagcgttgcgagccttagctttctcccgaacgccagcgctgaggacacgatgtcgcggctctcccgctcactgctttgggccgccacctgcctgggcgtgctctgcgtgctgtccgcggacaagaacacgacccagcacccgaacgtgacgactttagcgcccatctccaacgtaacctcggcgccggtgacgtccctcccgctggtcaccactccggcaccagaaacctgtgaaggtcgaaacagctgcgtttcctgttttaatgttagcgttgttaatactacctgcttttggatagaatgtaaagatgagagctattgttcacataactcaacagttagtgattgtcaagtggggaacacgacagacttctgttccgtttccacggccactccagtgccaacagccaattctacagctaaacccacagttcagccctccccttctacaacttccaagacagttactacatcaggtacaacaaataacactgtgactccaacctcacaacctgtgcgaaagtctacctttgatgcagccagtttcattggaggaattgtcctggtcttggaaataagatgccacacaaggaactacattccagatttaaagaaatgaaaggataccattagtgtgtataacagattattgttcatacttgtaaagcatcttatgtcattgagaatataaagaacagtgccttagaagacagtgaaaggtaagctctagcttaatgtctatgatttgttctttgacattaaggaaggtaaggattggtcagaggatgtaacttgatgtgagcagtagtaaacctgttttagatatcatactgttaatattttattgaaaatttatttcagagcggagaaacttaagctaaagtctgttatacagaattgaaagccttcgtatcttgaacctcccaacatttttcttatggctgttgaaaagtatagagctaaattgatttaattacactttcctttgtactttaaaaaaaagtatgctagcactattgtaccttgaaaggatttccaccagactgtcttgagtagtgacttctttggtgaggcaagaaggatatacattattttagaatcatttactatttaaatgagacaatcatattattttagaatcatttattttaaatgagacaatcattttaagttttaagataacagaagtgaccaatgtaatttcacaacacctaaggattttttggttgatcaggttactgtagatttttactgattgtcctggatgaatagactgtgctttttctttttctctcccttccttcttggtttcccatagtataataagcatgcatactttaacttctatagttttctcctttagagggtcgtcttcagttttagaggtttacttctcccttgcctttgactcattggactagtgcagaggctttaagtagtttaaaatgggcttttgcttttctaggtcattaacgttttttatttagtttctttagccaatagtggctgagtttcgcacttgattttcaatattttatagtaagaaatgacaaactgctttgtttcatttcataaacaaactctgcatttagataactattaaaggttgttaagatgaagatttactgtttctttgttactcgttggtacagctgtttgttttacttgcacatttgtacatatacttaatgttttcaagtgccttaattgtttaaaatctctggcttcaaagtttcttggggaaaggtcggtttacctcacattttttgtttccattagtaatattctaggtacctcacaaaatgtattatggtgccatggctgttagtttttagtgagtgctgtaggattaattcgaaaataggcagaattccattcctcccaaggtggcaaaaattagctatactgatgtaattgtcatttacctgggtatgaattccctgacacacattcatgtcaacatatgtagcaaattttgtgaaaacataacaatttgaagcttctgtaattttgagcactgctctaacaacaagcataatataaaattagttagattttgcaagtctacaaatgagctcttgcaacagaactcacagcctttttacttttttcccctaactttagcaatgtagtatcttgagccattaatttttgggtttttttaaaatccagaaggtatatagaaaccttttcagatttttcatctgatttgttcttgcagatgttcttctatcaaataccttattttaccttacagatatttgttgcacaggcagatactgctgtatttagacatttctatttcagttcattaaaaactgcaaaaccaatctgtatcatgtaccaaactgacttaaaataaatctacatgtttattgaattaa

SEQ ID NO: 5005 - DNA, 964 bp, Homo sapiens
  source 1..964: mol_type = unassigned DNA
gctttctcccgaacgccagcgctgaggacacgatgtcgcggctctcccgctcactgctttgggccgccacctgcctgggcgtgctctgcgtgctgtccgcggacaagaacacgacccagcacccgaacgtgacgactttagcgcccatctccaacgtaacctcggcgccggtgacgtccctcccgctggtcaccactccggcaccagaaacctgtgaaggtcgaaacagctgcgtttcctgttttaatgttagcgttgttaatactacctgcttttggatagaatgtaaagatgagagctattgttcacataactcaacagttagtgattgtcaagtggggaacacgacagacttctgttccgtttccacggccactccagtgccaacagccaattctacagctaaacccacagttcagccctccccttctacaacttccaagacagttactacatcagaaataagatgccacacaaggaactacattccagatttaaagaaatgaaaggataccattagtgtgtataacagattattgttcatacttgtaaagcatcttatgtcattgagaatataaagaacagtgccttagaagacagtgaaaggtaagctctagcttaatgtctatgatttgttctttgacattaaggaaggtaaggattggtcagaggatgtaacttgatgtgagcagtagtaaacctgttttagatatcatactgttaatattttattgaaaatttatttcagagcggagaaacttaagctaaagtctgttatacagaattgaaagccttcgtatcttgaacctcccaacatttttcttatggctgttgaaaagtatagagctaaattgatttaattacactttcctttgtactttaaaaaaaagtatgctagcactattgtaccttgaaaggatttccaccagactgtcttgagtagtgacttctttggtgaggcaag

SEQ ID NO: 5006 - DNA, 2483 bp, Homo sapiens
  source 1..2483: mol_type = unassigned DNA
ctgctgaaaaagcagaaagagattaccagccacagacgggtcatgagcgcggtattactgctggccctcctggggttcatcctcccactgccaggagtgcaggcgctgctctgccagtttgggacagttcagcatgtgtggaaggtgtccgacctgccccggcaatggacccctaagaacaccagctgcgacagcggcttggggtgccaggacacgttgatgctcattgagagcggaccccaagtgagcctggtgctctccaagggctgcacggaggccaaggaccaggagccccgcgtcactgagcaccggatgggccccggcctctccctgatctcctacaccttcgtgtgccgccaggaggacttctgcaacaacctcgttaactccctcccgctttgggccccacagcccccagcagacccaggatccttgaggtgcccagtctgcttgtctatggaaggctgtctggaggggacaacagaagagatctgccccaaggggaccacacactgttatgatggcctcctcaggctcaggggaggaggcatcttctccaatctgagagtccagggatgcatgccccagccagtttgcaacctgctcaatgggacacaggaaattgggcccgtgggtatgactgagaactgcgatatgaaagattttctgcagctcaagccagtaggattacttgaggaacacaatgtgggagagaaagagcgtggtcaaggacaacaccaatgtgttcagctagactggcagaaacgagccgccacgggtattttctgacctgtcatcgggggaccaccattatgacacacggaaacttggctcaagaacccactgattggaccacatcgaataccgagatgtgcgaggtggggcaggtgtgtcaggagacgctgctgctcctagatgtaggactcacatcaaccctggtggcgacctaaagctgcagcgctgttggggctcaaaattcccagaagaccaccatccactcagcccctcctggggtgcttgtggcctcctatacccacttctgctcctcggacctgtgcaatagtgccagcagcagcagcgttctgctgaactccctccctcctcaagctgcccctgtcccaggagaccggcagtgtcctacctgtgtgcagccccttggaacctgttcaagtggctccccccgaatgacctgccccaggggcgccactcattgttatgatgggtacattcatctctcaggaggtgggctgtccaccaaaatgagcattcagggctgcgtggcccaaccttccagcttcttgttgaaccacaccagacaaatcgggatcttctctgcgcgtgagaagcgtgatgtgcagcctcctgcctctcagcatgagggaggtggggctgagggcctggagtctctcacttggggggtggggctggcactggccccagcgctgtggtggggagtggtttgcccttcctgctaactctattacccccacgattcttcaccgctgctgaccacccacactcaacctccctctgacctcataacctaatggccttggacaccagattctttcccattctgtccatgaatcatcttccccacacacaatcattcatatctactcacctaacagcaacactggggagagcctggagcatccggacttgccctatgggagaggggacgctggaggagtggctgcatgtatctgataatacagaccctgtcctttctcccagtgctgggatttctccatgtgagggggcagcaggacacccagggatctagcgtgggggaggagaggagcctaatgagaaaatgaccatctaaagcctgcccttcattggtctggttcacgtctccaaaccagcttggatggtagcagagacttcagggtgctccagccaaacgtatttgggcatcaccatgacctgggaggggaagatgcactgagacgtatgaggcttccagcctagcagccagggccctagcacaaacaggaggctcgccccatctgagcaactgcaggagaggttagtacagtcatgcattgcttaacgacagggacgtgtcgttagaaatgtgtcgttaggtgattttatgaccataggaacattgtagcgtgcacttacaccaacccagatggtacagcccaatacacacccaggatggacgctagagtcgactgctcctaggctacaagcctgcagtgcatgttatggtgtgaatactgcaggcaatcttaacaccacggcaagtatttgtgcatctacacacatctaaacatagaaaaggtacagcataaatacactattgtcatctcagcagaccaccgttctatacgcaattcgtcgctgacccaaacgttgctatgtagcatctgcgtatcgtgggataattgacatgagggcttgagagaactccagaaaaaaatgggttagcattttcccagagctgttatcattgggtctctcttaccaccata

SEQ ID NO: 5007 - DNA, 480 bp, Homo sapiens
  source 1..480: mol_type = unassigned DNA
ctgctgaaaaagcagaaagagattaccagccacagacgggtcatgagcgcggtattactgctggccctcctggggttcatcctcccactgccaggagtgcaggcgctgctctgccagtttgggacagttcagcatgtgtggaaggtgtccgacctgccccggcaatggacccctaagaacaccagctgcgacagcggcttggggtgccaggacacgttgatgctcattgagagcggaccccaagtgagcctggtgctctccaagggctgcacggaggccaaggaccaggagccccgcgtcactgagcaccggatgggccccggcctctccctgatctcctacaccttcgtgtgccgccaggaggacttctgcaacaacctcgttaactccctcccgctttgggccccacagcccccagcagatcccatgatgggagctgcagaaggcccctttgggaaggctgagcaggttgactcttga

SEQ ID NO: 5008 - DNA, 1512 bp, Homo sapiens
  source 1..1512: mol_type = unassigned DNA
atgagcgcggtattactgctggccctcctggggttcatcctcccactgccaggagtgcaggcgctgctctgccagtttgggacagttcagcatgtgtggaaggtgtccgacctgccccggcaatggacccctaagaacaccagctgcgacagcggcttggggtgccaggacacgttgatgctcattgagagcggaccccaagtgagcctggtgctctccaagggctgcacggaggccaaggaccaggagccccgcgtcactgagcaccggatgggccccggcctctccctgatctcctacaccttcgtgtgccgccaggaggacttctgcaacaacctcgttaactccctcccgctttgggccccacagcccccagcagatcccatgatgggagctgcagaaggcccctttgggaaggctgagcaggttgactcttgaggccagcaaaagtggggtgcagagaaggtatctgatcaaatccagtgccctctcagtgccccctcactctgtctgtcactttcctagacccaggatccttgaggtgcccagtctgcttgtctatggaaggctgtctggaggggacaacagaagagatctgccccaaggggaccacacactgttatgatggcctcctcaggctcaggggaggaggcatcttctccaatctgagagtccagggatgcatgccccagccagtttgcaacctgctcaatgggacacaggaaattgggcccgtgggtatgactgagaactgcgatatgaaagattttctgacctgtcatcgggggaccaccattatgacacacggaaacttggctcaagaacccactgattggaccacatcgaataccgagatgtgcgaggtggggcaggtgtgtcaggagacgctgctgctcctagatgtaggactcacatcaaccctggtggcgacctaaagctgcagcgctgttggggctcaaaattcccagaagaccaccatccactcagcccctcctggggtgcttgtggcctcctatacccacttctgctcctcggacctgtgcaatagtgccagcagcagcagcgttctgctgaactccctccctcctcaagctgcccctgtcccaggagaccggcagtgtcctacctgtgtgcagccccttggaacctgttcaagtggctccccccgaatgacctgccccaggggcgccactcattgttatgatgggtacattcatctctcaggaggtgggctgtccaccaaaatgagcattcagggctgcgtggcccaaccttccagcttcttgttgaaccacaccagacaaatcgggatcttctctgcgcgtgagaagcgtgatgtgcagcctcctgcctctcagcatgagggaggtggggctgagggcctggagtctctcacttggggggtggggctggcactggccccagcgctgtggtggggagtggtttgcccttcctgctaactctattacccccacgattcttcaccgctgctgaccacccacactcaacctc

SEQ ID NO: 5009 - DNA, 1932 bp, Homo sapiens
  source 1..1932: mol_type = unassigned DNA
gcatcccctgcgcgaagctgggtgccccggagagtctgaccaccatgccacctcctcgcctcctcttcttcctcctcttcctcacccccatggaagtcaggcccgaggaacctctagtggtgaaggtggaagagggagataacgctgtgctgcagtgcctcaaggggacctcagatggccccactcagcagctgacctggtctcgggagtccccgcttaaacccttcttaaaactcagcctggggctgccaggcctgggaatccacatgaggcccctggccatctggcttttcatcttcaacgtctctcaacagatggggggcttctacctgtgccagccggggcccccctctgagaaggcctggcagcctggctggacagtcaatgtggagggcagcggggagctgttccggtggaatgtttcggacctaggtggcctgggctgtggcctgaagaacaggtcctcagagggccccagctccccttccgggaagctcatgagccccaagctgtatgtgtgggccaaagaccgccctgagatctgggagggagagcctccgtgtctcccaccgagggacagcctgaaccagagcctcagccaggacctcaccatggcccctggctccacactctggctgtcctgtggggtaccccctgactctgtgtccaggggccccctctcctggacccatgtgcaccccaaggggcctaagtcattgctgagcctagagctgaaggacgatcgcccggccagagatatgtgggtaatggagacgggtctgttgttgccccgggccacagctcaagacgctggaaagtattattgtcaccgtggcaacctgaccatgtcattccacctggagatcactgctcggccagtactatggcactggctgctgaggactggtggctggaaggtctcagctgtgactttggcttatctgatcttctgcctgtgttcccttgtgggcattcttcatcttcaaagagccctggtcctgaggaggaaaagaaagcgaatgactgaccccaccaggagattcttcaaagtgacgcctcccccaggaagcgggccccagaaccagtacgggaacgtgctgtctctccccacacccacctcaggcctcggacgcgcccagcgttgggccgcaggcctggggggcactgccccgtcttatggaaacccgagcagcgacgtccaggcggatggagccttggggtcccggagcccgccgggagtgggcccagaagaagaggaaggggagggctatgaggaacctgacagtgaggaggactccgagttctatgagaacgactccaaccttgggcaggaccagctctcccaggatggcagcggctacgagaaccctgaggatgagcccctgggtcctgaggatgaagactccttctccaacgctgagtcttatgagaacgaggatgaagagctgacccagccggtcgccaggacaatggacttcctgagccctcatgggtcagcctgggaccccagccgggaagcaacctccctggggtcccagtcctatgaggatatgagaggaatcctgtatgcagccccccagctccgctccattcggggccagcctggacccaatcatgaggaagatgcagactcttatgagaacatggataatcccgatgggccagacccagcctggggaggagggggccgcatgggcacctggagcaccaggtgatcctcaggtggccagcctggatctcctcaagtccccaagattcacacctgactctgaaatctgaagacctcgagcagatgatgccaacctctggagcaatgttgcttaggatgtgtgcatgtgtgtaagtgtgtgtgtgtgtgtgtgtgtgtatacatgccagtgacacttccagtcccctttgtattccttaaataaactcaatgagctcttccaa

SEQ ID NO: 5010 - DNA, 1420 bp, Homo sapiens
  source 1..1420: mol_type = unassigned DNA
aggcccctgcctgccccagcatcccctgcgcgaagctgggtgccccggagagtctgaccaccatgccacctcctcgcctcctcttcttcctcctcttcctcacccccatggaagtcaggcccgaggaacctctagtggtgaaggtggaagagggagataacgctgtgctgcagtgcctcaaggggacctcagatggccccactcagcagctgacctggtctcgggagtccccgcttaaacccttcttaaaactcagcctggggctgccaggcctgggaatccacatgaggcccctgggaaagtattattgtcaccgtggcaacctgaccatgtcattccacctggagatcactgctcggccagtactatggcactggctgctgaggactggtggctggaaggtctcagctgtgactttggcttatctgatcttctgcctgtgttcccttgtgggcattcttcatcttcaaagagccctggtcctgaggaggaaaagaaagcgaatgactgaccccaccaggagattcttcaaagtgacgcctcccccaggaagcgggccccagaaccagtacgggaacgtgctgtctctccccacacccacctcaggcctcggacgcgcccagcgttgggccgcaggcctggggggcactgccccgtcttatggaaacccgagcagcgacgtccaggcggatggagccttggggtcccggagcccgccgggagtgggcccagaagaagaggaaggggagggctatgaggaacctgacagtgaggaggactccgagttctatgagaacgactccaaccttgggcaggaccagctctcccaggatggcagcggctacgagaaccctgaggatgagcccctgggtcctgaggatgaagactccttctccaacgctgagtcttatgagaacgaggatgaagagctgacccagccggtcgccaggacaatggacttcctgagccctcatgggtcagcctgggaccccagccgggaagcaacctccctggggtcccagtcctatgaggatatgagaggaatcctgtatgcagccccccagctccgctccattcggggccagcctggacccaatcatgaggaagatgcagactcttatgagaacatggataatcccgatgggccagacccagcctggggaggagggggccgcatgggcacctggagcaccaggtgatcctcaggtggccagcctggatctcctcaagtccccaagattcacacctgactctgaaatctgaagacctcgagcagatgatgccaacctctggagcaatgttgcttaggatgtgtgcatgtgtgtaagtgtgtgtgtgtgtgtgtgtgtgtatacatgccagtgacacttccagtcccctttgtattccttaaataaactcaatgagctcttccaatcct

SEQ ID NO: 5011 - DNA, 1732 bp, Homo sapiens
  source 1..1732: mol_type = unassigned DNA
ttcctcctcttcctcacccccatggaagtcaggcccgaggaacctctagtggtgaaggtggaagagggagataacgctgtgctgcagtgcctcaaggggacctcagatggccccactcagcagctgacctggtctcgggagtccccgcttaaacccttcttaaaactcagcctggctggacagtcaatgtggagggcagcggggagctgttccggtggaatgtttcggacctaggtggcctgggctgtggcctgaagaacaggtcctcagagggccccagctccccttccgggaagctcatgagccccaagctgtatgtgtgggccaaagaccgccctgagatctgggagggagagcctccgtgtctcccaccgagggacagcctgaaccagagcctcagccaggacctcaccatggcccctggctccacactctggctgtcctgtggggtaccccctgactctgtgtccaggggccccctctcctggacccatgtgcaccccaaggggcctaagtcattgctgagcctagagctgaaggacgatcgcccggccagagatatgtgggtaatggagacgggtctgttgttgccccgggccacagctcaagacgctggaaagtattattgtcaccgtggcaacctgaccatgtcattccacctggagatcactgctcggccagtactatggcactggctgctgaggactggtggctggaaggtctcagctgtgactttggcttatctgatcttctgcctgtgttcccttgtgggcattcttcatcttcaaagagccctggtcctgaggaggaaaagaaagcgaatgactgaccccaccaggagattcttcaaagtgacgcctcccccaggaagcgggccccagaaccagtacgggaacgtgctgtctctccccacacccacctcaggcctcggacgcgcccagcgttgggccgcaggcctggggggcactgccccgtcttatggaaacccgagcagcgacgtccaggcggatggagccttggggtcccggagcccgccgggagtgggcccagaagaagaggaaggggagggctatgaggaacctgacagtgaggaggactccgagttctatgagaacgactccaaccttgggcaggaccagctctcccaggatggcagcggctacgagaaccctgaggatgagcccctgggtcctgaggatgaagactccttctccaacgctgagtcttatgagaacgaggatgaagagctgacccagccggtcgccaggacaatggacttcctgagccctcatgggtcagcctgggaccccagccgggaagcaacctccctggggtcccagtcctatgaggatatgagaggaatcctgtatgcagccccccagctccgctccattcggggccagcctggacccaatcatgaggaagatgcagactcttatgagaacatggataatcccgatgggccagacccagcctggggaggagggggccgcatgggcacctggagcaccaggtgatcctcaggtggccagcctggatctcctcaagtccccaagattcacacctgactctgaaatctgaagacctcgagcagatgatgccaacctctggagcaatgttgcttaggatgtgtgcatgtgtgtaagtgtgtgtgtgtgtgtgtgtgtgtatacatgccagtgacacttccagtcccctttgtattccttaaataaactcaatgagctcttcc

SEQ ID NO: 5012 - DNA, 1957 bp, Homo sapiens
  source 1..1957: mol_type = unassigned DNA
aggcccctgcctgccccagcatcccctgcgcgaagctgggtgccccggagagtctgaccaccatgccacctcctcgcctcctcttcttcctcctcttcctcacccccatggaagtcaggcccgaggaacctctagtggtgaaggtggaagagggagataacgctgtgctgcagtgcctcaaggggacctcagatggccccactcagcagctgacctggtctcgggagtccccgcttaaacccttcttaaaactcagcctggggctgccaggcctgggaatccacatgaggcccctggccatctggcttttcatcttcaacgtctctcaacagatggggggcttctacctgtgccagccggggcccccctctgagaaggcctggcagcctggctggacagtcaatgtggagggcagcggggagctgttccggtggaatgtttcggacctaggtggcctgggctgtggcctgaagaacaggtcctcagagggccccagctccccttccgggaagctcatgagccccaagctgtatgtgtgggccaaagaccgccctgagatctgggagggagagcctccgtgtctcccaccgagggacagcctgaaccagagcctcagccaggacctcaccatggcccctggctccacactctggctgtcctgtggggtaccccctgactctgtgtccaggggccccctctcctggacccatgtgcaccccaaggggcctaagtcattgctgagcctagagctgaaggacgatcgcccggccagagatatgtgggtaatggagacgggtctgttgttgccccgggccacagctcaagacgctggaaagtattattgtcaccgtggcaacctgaccatgtcattccacctggagatcactgctcggccagtactatggcactggctgctgaggactggtggctggaaggtctcagctgtgactttggcttatctgatcttctgcctgtgttcccttgtgggcattcttcatcttcaaagagccctggtcctgaggaggaaaagaaagcgaatgactgaccccaccaggagattcttcaaagtgacgcctcccccaggaagcgggccccagaaccagtacgggaacgtgctgtctctccccacacccacctcaggcctcggacgcgcccagcgttgggccgcaggcctggggggcactgccccgtcttatggaaacccgagcagcgacgtccaggcggatggagccttggggtcccggagcccgccgggagtgggcccagaagaagaggaaggggagggctatgaggaacctgacagtgaggaggactccgagttctatgagaacgactccaaccttgggcaggaccagctctcccaggatggcagcggctacgagaaccctgaggatgagcccctgggtcctgaggatgaagactccttctccaacgctgagtcttatgagaacgaggatgaagagctgacccagccggtcgccaggacaatggacttcctgagccctcatgggtcagcctgggaccccagccgggaagcaacctccctggcagggtcccagtcctatgaggatatgagaggaatcctgtatgcagccccccagctccgctccattcggggccagcctggacccaatcatgaggaagatgcagactcttatgagaacatggataatcccgatgggccagacccagcctggggaggagggggccgcatgggcacctggagcaccaggtgatcctcaggtggccagcctggatctcctcaagtccccaagattcacacctgactctgaaatctgaagacctcgagcagatgatgccaacctctggagcaatgttgcttaggatgtgtgcatgtgtgtaagtgtgtgtgtgtgtgtgtgtgtgtatacatgccagtgacacttccagtcccctttgtattccttaaataaactcaatgagctcttccaatcct

SEQ ID NO: 5013 - DNA, 2096 bp, Homo sapiens
  source 1..2096: mol_type = unassigned DNA
gggcagtcgtaggagactctgaaaaagcaaataaatcaatgttaaatcagaaatgtgaatgtagtaaggggctgaagagacaggggaagagaatacatgggaaaatattgaaaaggacagagtgatcaaaaagagcagggacatgggagcattgggcagcacactgggagccatttcactttatgctcttattgtatgattgagaaaaaaatgtccttagtggttaagtggcttttcaatgccacatcagacttgttccatagcagttgaattaggggaaggtgaataagttggaggttggtgacaaggagagaagctggaacagagaggagagtcagaaccagagggaaatgagagactgagtaggcatctcagggtttttgaaggagtggattttctttgttgcagtcaggggaggtttgtctgttggctgcagaaagaagtcagaatagagatatcgtggggtaggtttgtttggaacagaaatcaaagaccaatttttctgagagaaggaaataacatctgcaaatgatatgctgtttttgctacttccattgttagctgttctcccaggtgatggcaatgcagacgggctcaaggagcctctctccttccatgtcacctggatcgcatccttttacaaccattcctggaaacaaaatctggtctcaggttggctgagtgatttgcagactcatacctgggacagcaattccagcaccatcgttttcctgtgcccctggtccaggggaaacttcagcaatgaggagtggaaggaactggaaacattattccgtatacgcaccattcggtcatttgagggaattcgtagatacgcccatgaattgcagtttgaatatccttttgagatacaggtgacaggaggctgtgagctgcactctggaaaggtctcaggaagcttcttgcagttagcttatcaaggatcagactttgtgagcttccagaacaattcatggttgccatatccagtggctgggaatatggccaagcatttctgcaaagtgctcaatcagaatcagcatgaaaatgacataacacacaatcttctcagtgacacctgcccacgtttcatcttgggtcttcttgatgcaggaaaggcacatctccagcggcaagtgaagcccgaggcctggctgtcccatggccccagtcctggccctggccatctgcagcttgtgtgccatgtctcaggattctacccaaagcccgtgtgggtgatgtggatgcggggtgagcaggagcagcagggcactcagcgaggggacatcttgcccagtgctgatgggacatggtatctccgcgcaaccctggaggtggccgctggggaggcagctgacctgtcctgtcgggtgaagcacagcagtctagagggccaggacatcgtcctctactgggagcatcacagttccgtgggcttcatcatcttggcggtgatagtgcctttacttcttctgataggtcttgcgctttggttcaggaaacgctgtttctgttaagacacaccatgagcctcctcgtcacccttctccttttggggtgagagaccagcagcccaagggctccagacacacctgaacacatcgtgatgatgacgtcctctcaactctctttgtaaaaattttgttatttttgcttgtttctgattaatgattgtttgtcaatataagctcaatttaattttgcaggatttgttgttctgacctgggttctgggacttttaaattcaaattttatctccagatggaatggggtcctagcaacctccacatgttcaactattaatggatcatcaggcctgttttagatatcccttactccagagggccttccctgacttacaagtgggaagcagtctcttcctggtctgaactcccgccacattttagccgtactttgctaactgtgctcctcacttcctcttcttcattgcagttatttagatcccccctttccttctaatttttcagctccttcaatgcaaagtacatgtatttttaatatatgcatccctggtgaaggatcttgcctgcatgaaacatgttctcaataaaactctgtgttgaatttatgccaaa

SEQ ID NO: 5014 - DNA, 1395 bp, Homo sapiens
  source 1..1395: mol_type = unassigned DNA
ggcagttggaagagagaagaagtcactacagggtactgaggaaaagctttgctgaaattggagatcaaataccagctctgccagtaagaagttgcatctcccagtgaaatgctgctgctgccatttcaactgttagctgttctctttcctggtggtaacagtgaacatgccttccaggggccgacctcctttcatgttatccagacctcgtcctttaccaatagtacctgggcacaaactcaaggctcaggctggttggatgatttgcagattcatggctgggatagcgactcaggcactgccatattcctgaagccttggtctaaaggtaactttagtgataaggaggttgctgagttagaggagatattccgagtctacatctttggattcgctcgagaagtacaagactttgccggtgatttccagatgaaatacccctttgagatccagggcatagcaggctgtgagctacattctggaggtgccatagtaagcttcctgaggggagctctaggaggattggatttcctgagtgtcaagaatgcttcatgtgtgccttccccagaaggtggcagcagggcacagaaattctgtgcactaatcatacaatatcaaggtatcatggaaactgtgagaattctcctctatgaaacctgcccccgatatctcttgggcgtcctcaatgcaggaaaagcagatctgcaaagacaagtgaagcctgaggcctggctgtccagtggccccagtcctggacctggccgtctgcagcttgtgtgccatgtctcaggattctacccaaagcccgtgtgggtgatgtggatgcggggtgagcaggagcagcagggcactcagctaggggacatcctgcccaatgctaactggacatggtatctccgagcaaccctggatgtggcagatggggaggcggctggcctgtcctgtcgggtgaagcacagcagtttagagggccaggacatcatcctctactggagaaaccccacctccattggctcaattgttttggcaataatagtgccttccttgctccttttgctatgccttgcattatggtatatgaggcgccggtcatatcagaatatcccatgagccatcatcatgtctcctctcccattcgcaataagtaccaagaagcccaagatatcagcccaaaagtcaatcttatcatatttcaaatgattttcaaatttgatgaaatcagagttttcatgtattttaaaataaattattatttaaacatcagcaaaaaagtacttaaaactgtaaatttattatgagactgtactaacagtgtgattcaccctgattttacacacattaaaatgttagaaaaaatgtgtctcaaaataaatgaaatataatacatatgactta

SEQ ID NO: 5015 - DNA, 1024 bp, Homo sapiens
  source 1..1024: mol_type = unassigned DNA
ctcgtcctttaccaatagtacctgggcacaaactcaaggctcaggctggttggatgatttgcagattcatggctgggatagcgactcaggcactgccatattcctgaagccttggtctaaaggtaactttagtgataaggaggttgctgagttagaggagatattccgagtctacatctttggattcgctcgagaagtacaagactttgccggtgatttccagatgaaatacccctttgagatccagggcatagcaggctgtgagctacattctggaggtgccatagtaagcttcctgaggggagctctaggaggattggatttcctgagtgtcaagaatgcttcatgtgtgccttccccagaaggtggcagcagggcacagaaattctgtgcactaatcatacaatatcaaggtatcatggaaactgtgagaattctcctctatgaaacctgcccccgatatctcttgggcgtcctcaatgcaggaaaagcagatctgcaaagacaagtgaagcctgaggcctggctgtccagtggccccagtcctggacctggccgtctgcagcttgtgtgccatgtctcaggattctacccaaagcccgtgtgggtgatgtggatgcggggaaaccccacctccattggctcaattgttttggcaataatagtgccttccttgctccttttgctatgccttgcattatggtatatgaggcgccggtcatatcagaatatcccatgagccatcatcatgtctcctctcccattcgcaataagtaccaagaagcccaagatatcagcccaaaagtcaatcttatcatatttcaaatgattttcaaatttgatgaaatcagagttttcatgtattttaaaataaattattatttaaacatcagcaaaaaagtacttaaaactgtaaatttattatgagactgtactaacagtgtgattcaccctgattttacacacattaaaatgttagaaaaaatgtgtctcaaaataaatgaaatataatacatatgactta

SEQ ID NO: 5016 - DNA, 2501 bp, Homo sapiens
  source 1..2501: mol_type = unassigned DNA
accactttgtctaaggcagttgaggaagggaagtagatataatggagcttagtggcagagcagctggaatcctgagagaagagaataactttagttcagagcaggtggggaaatgagagattgagtaggaggaccaaggttgagggaagcagatcttcttagttgctgtcagcggctgatggggaagattgttggtagaaggaagtcagaatataggtacagagggataagtttgctaagaacagagatcagcaaacagcttttctgagagaaagaaacatctgcaaatgacatgctgtttctgcagtttctgctgctagctcttcttctcccaggtggtgacaatgcagacgcatcccaggaacacgtctccttccatgtcatccagatcttctcatttgtcaaccaatcctgggcacgaggtcagggctcaggatggctggacgagttgcagactcatggctgggacagtgaatcaggcacaataattttcctgcataactggtccaagggcaacttcagcaatgaagagttgtcagacctagagttgttatttcgtttctacctctttggattaactcgggagattcaagaccatgcaagtcaagattactcgaaatatccctttgaagtacaggtgaaagcgggctgtgagctgcattctggaaagagcccagaaggcttctttcaggtagctttcaacggattagatttactgagtttccagaatacaacatgggtgccatctccaggctgtggaagtttggcccaaagtgtctgtcatctactcaatcatcagtatgaaggcgtcacagaaacagtgtataatctcataagaagcacttgcccccgatttctcttgggtctcctggatgcagggaagatgtatgtacacaggcaagtgaggccagaagcctggctgtccagtcgccccagccttgggtctggccagctgttgctggtttgtcatgcctccggcttctacccaaagcctgtttgggtgacatggatgcggaatgaacaggagcaactgggcactaaacatggtgatattcttcctaatgctgatgggacatggtatcttcaggtgatcctggaggtggcatctgaggagcctgctggcctgtcttgtcgagtgagacacagcagtctaggaggccaggacatcatcctctactgggctcatatcaggacatcctgtgagactcttccccctgactcccccattgtgttaagaacccagcaacccaggagcctagtacaatatagtgatgccatcccgtcgactctccatttaaattgtttctctttctgcataataaacatttgttaataaaaaccaaattctaatttggaatgtttttcttggaatctccactttttatatagcactcaaccttcaaagcccatttctgatgtcatttcctccaacgatcttccttgacccatactgaacccagagagcccctcaactgttatgtgcatgcaacacttcctaccctgtgttgcagctacttgagtctttcatttcacatttttaagcttttaggaggcaaggatcatgataaatgtgcctttcctgcatatgataggctcagtgaaacacaaaacaaaacatcatatctaagttggattaactgtcatgttgacaatttttctcattatattccttcccaatgttgttgtagcattggaaatattcatgcttctctttttgtttaaatgcttcatacctagcagataaattccactctcctttagctccctcattttctccttaaacatttaaggaaaagtgcagccttgtgccttgatacacttattttctaaacacagagaattacaaatgcaaatagacagagagtgtgcaagttacatgtgatgatcagtggtgcagatatgtcacagaatacttaagaaaaggaacaagagatttggtcctcagggttggagtgggatcaaggcaaccgttgtgctgtatatggaagacaaatttcctaaaggactgtgttatctgagatagccttggctaaactttagtccctttaggtttcattcactaattcaactaatattttttgggtactgagttgagacaggcacatacagcttctaaactggtggtggataaaacaaatgagattgtgtccactctcctgaagttgcaatgtttgcttcctcaatctgtccatgtttcttttctattgttttcatgtttttatttatttcaaaaaattttaaatagattttattgatgtataatttatagtaaaatttgaatctttaagtgtacagttctatttattttgataattatataagcccatgtaaacaaaatcacaatcaagatattaaatgtcataacccctcatacctgtttgtagtcaagcacaccaacaacctggcattcttgcaactactgatatactttatgtcacttaagcttaaacttgtattttctatgattttattaagatggaaataaacatatctacttggta

SEQ ID NO: 5017 - DNA, 1435 bp, Homo sapiens
  source 1..1435: mol_type = unassigned DNA
aggcagttgaggaagggaagtagatataatggagcttagtggcagagcagctggaatcctgagagaagagaataactttagttcagagcaggtggggaaatgagagattgagtaggaggaccaaggttgagggaagcagatcttcttagttgctgtcagcggctgatggggaagattgttggtagaaggaagtcagaatataggtacagagggataagtttgctaagaacagagatcagcaaacagcttttctgagagaaagaaacatctgcaaatgacatgctgtttctgcagtttctgctgctagctcttcttctcccaggtggtgacaatgcagacgcatcccaggaacacgtctccttccatgtcatccagatcttctcatttgtcaaccaatcctgggcacgaggtcagggctcaggatggctggacgagttgcagactcatggctgggacagtgaatcaggcacaataattttcctgcataactggtccaagggcaacttcagcaatgaagagttgtcagacctagagttgttatttcgtttctacctctttggattaactcgggagattcaagaccatgcaagtcaagattactcgaaatatccctttgaagtacaggtgaaagcgggctgtgagctgcattctggaaagagcccagaaggcttctttcaggtagctttcaacggattagatttactgagtttccagaatacaacatgggtgccatctccaggctgtggaagtttggcccaaagtgtctgtcatctactcaatcatcagtatgaaggcgtcacagaaacagtgtataatctcataagaagcacttgcccccgatttctcttgggtctcctggatgcagggaagatgtatgtacacaggcaagtgaggccagaagcctggctgtccagtcgccccagccttgggtctggccagctgttgctggtttgtcatgcctccggcttctacccaaagcctgtttgggtgacatggatgcggaatgaacaggagcaactgggcactaaacatggtgatattcttcctaatgctgatgggacatggtatcttcaggtgatcctggaggtggcatctgaggagcctgctggcctgtcttgtcgagtgagacacagcagtctaggaggccaggacatcatcctctactggggacaccacttttccatgaattggattgccttggtagtgatagtgcccttggtgattctaatagtccttgtgttatggtttaagaagcactgctcatatcaggacatcctgtgagactcttccccctgactcccccattgtgttaagaacccagcaacccaggagcctagtacaatatagtgatgccatcccgtcgactctccatttaaattgtttctctttctgcataataaacatttgttaataaaaaccaaattctaatttggaa

SEQ ID NO: 5018 - DNA, 855 bp, Homo sapiens
  source 1..855: mol_type = unassigned DNA
tttcctgcataactggtccaagggcaacttcagcaatgaagagttgtcagacctagagttgttatttcgtttctacctctttggattaactcgggagattcaagaccatgcaagtcaagattactcgaaatatccctttgaagtacaggtgaaagcgggctgtgagctgcattctggaaagagcccagaaggcttctttcaggtagctttcaacggattagatttactgagtttccagaatacaacatgggtgccatctccaggctgtggaagtttggcccaaagtgtctgtcatctactcaatcatcagtatgaaggcgtcacagaaacagtgtataatctcataagaagcacttgcccccgatttctcttgggtctcctggatgcagggaagatgtatgtacacaggcaagtgaggccagaagcctggctgtccagtcgccccagccttgggtctggccagctgttgctggtttgtcatgcctccggcttctacccaaagcctgtttgggtgacatggatgcggaatgaacaggagcaactgggcactaaacatggtgatattcttcctaatgctgatgggacatggtatcttcaggtgatcctggaggtggcatctgaggagcctgctggcctgtcttgtcgagtgagacacagcagtctaggaggccaggacatcatcctctactgggctcatatcaggacatcctgtgagactcttccccctgactcccccattgtgttaagaacccagcaacccaggagcctagtacaatatagtgatgccatcccgtcgactctccatttaaattgtttctctttctgcataataaacatttgttaataaaaaccaaa

SEQ ID NO: 5019 - DNA, 1425 bp, Homo sapiens
  source 1..1425: mol_type = unassigned DNA
gttgctgtcagtggctgatggggaagattgtctgttggtagaaggaagtcagaatatagatgtagagggataagtttgctaagaacagagatcagcaaatggcttttctgagagaaggaaacaactgcaaatgacatgctgtttctgtagtttccgctgctagttcttctcctccccggtggtgacaatgcagcatcccaggaacacgtctccttccatgtcatccagatcttctcatttgtcaaccaatcctgggcacgaggtcagggctcaggatggctggacgagttgcagactcatggctgggacagtgaatcaggcacaataattttcctgcataactggtccaagggcaacttcagcaatgaagagttgtcagacctagagttgttatttcgtttctacctctttggattaactcgggagattcaagaccatgcaagtcaagattactcgaaatatccctttgaagtacaggtgaaagcgggctgtgagctgcattctggaaagagcccagaaggcttctttcaggtagctttcaacggattagatttactgagtttccagaatacaacatgggtgccatctccaggctgtggaagtttggcccaaagtgtctgtcatctactcaatcatcagtatgaaggcgtcacagaaacagtgtataatctcataagaagcacttgcccccgatttctcttgggtctcctggatgcagggaagatgtatgtacacaggcaagtgaggccagaagcctggctgtccagtcgccccagccttgggtctggccagctgttgctggtttgtcatgcctccggcttctacccaaagcctgtttgggtgacatggatgcggaatgaacaggagcaactgggcactaaacatggtgatattcttcctaatgctgatgggacatggtatcttcaggtgatcctggaggtggcatctgaggagcctgctggcctgtcttgtcgagtgagacacagcagtctaggaggccaggacatcatcctctactggggacaccacttttccatgaattggattgccttggtagtgatagtgcccttggtgattctaatagtccttgtgttatggtttaagaagcactgctcatatcaggacatcctgtgagactcttccccctgactcccccattgtgttaagaacccagcaacccaggagcctagtacaatatagtgatgccatcccgtcgactctccatttaaattgtttctctttctgcataataaacatttgttaataaaaaccaaattctaatttggaatgtttttcttggaatctccactttttatatagcactcaaccttcaaagcccatttctgatgtcatttcctccaacgatcttccttgacccatactgaacccagagagcccctcaactgttatgtgcatgcaacactt

SEQ ID NO: 5020 - DNA, 2253 bp, Homo sapiens
  source 1..2253: mol_type = unassigned DNA
gttttctacccaagaatgctacttcaggagatcagtcaaaaggttagggtgatggtgacggtggaaatatagaaaaaggaatttattcaagaggtattcaaaaagaagtgaaatagagatgagttggagatagattggataaaaagagtgagggagagggaggtgtcaggctgcagcccaggttctgagttgccaaagaggagtcttttcctccaggaaattgagacacgccggttgtgaaacctactgaagtgagcggcggcgccaggattcctgggaccccgacctctttgcagctcgcacagctaagggcgagggcgcccttcggcagaagcagcaaaccgccggcaagcccagcgaggagggctgccggggtctgggcttgggaattggctggcacccagcggaaagggacgtgagctgagcggcgggggagaagagtgcgcaggtcagagggcggcgcgcagcggcgctccgcgaggtccccacgccgggcgatatggggtgcctgctgtttctgctgctctgggcgctcctccaggcttggggaagcgctgaagtcccgcaaaggcttttccccctccgctgcctccagatctcgtccttcgccaatagcagctggacgcgcaccgacggcttggcgtggctgggggagctgcagacgcacagctggagcaacgactcggacaccgtccgctctctgaagccttggtcccagggcacgttcagcgaccagcagtgggagacgctgcagcatatatttcgggtttatcgaagcagcttcaccagggacgtgaaggaattcgccaaaatgctacgcttatcctatcccttggagctccaggtgtccgctggctgtgaggtgcaccctgggaacgcctcaaataacttcttccatgtagcatttcaaggaaaagatatcctgagtttccaaggaacttcttgggagccaacccaagaggccccactttgggtaaacttggccattcaagtgctcaaccaggacaagtggacgagggaaacagtgcagtggctccttaatggcacctgcccccaatttgtcagtggcctccttgagtcagggaagtcggaactgaagaagcaagtgaagcccaaggcctggctgtcccgtggccccagtcctggccctggccgtctgctgctggtgtgccatgtctcaggattctacccaaagcctgtatgggtgaagtggatgcggggtgagcaggagcagcagggcactcagccaggggacatcctgcccaatgctgacgagacatggtatctccgagcaaccctggatgtggtggctggggaggcagctggcctgtcctgtcgggtgaagcacagcagtctagagggccaggacatcgtcctctactggggtgggagctacacctccatgggcttgattgccttggcagtcctggcgtgcttgctgttcctcctcattgtgggctttacctcccggtttaagaggcaaacttcctatcagggcgtcctgtgactcgccttgccacatctgtgtctctggaacccaggacctctggacctcaggttcctaagacttcagtcctggtctgctcaggaattgaagatgtaaggaattgaagataggagagataccttgaaaaagtagagaacagtcatgaggcagctttcatcacacccttttaacatttatctaaaagaatttaaattctttttcaaaaattacactacaagtttataagcccaaatggctctgtgaaatcagaagtgcaaaggtgtgcaaacttgtatctgaagacctaccagggacaagcaggtaagagctgatgtgagtgtgtgtgatgggatctgtaaggaactggaacacacatgtcctatccaaaggaatcagctgcagctgcttgttgtcaagtataaagtcaggacctggcttggctttaaccgtttttcaagaaaactggaaatctggattttcagcgaacatgcctgattttaaaaggttgactcaagtttttacaaaatactatgtgggacacctcaaatacatacctactgactgatgacaaacccaggagtttgtgtgtcttttataaaaagtttgccctggatgtcatattggcagttggaggacacagtttctattgtaaatttggatttacgactgaagaaggacattttctctttaaaagaaagttaggttataagaaacagaggcgtctcacatttttacttggtgtaattaataaacgaagataaatcata

SEQ ID NO: 5021 - DNA, 435 bp, Homo sapiens
  source 1..435: mol_type = unassigned DNA
atgctgctcctgttcctcctcttcgagggtctctgctgtcctggggaaaatacagcagtgaagccagaggcctggctgtcctgtggccccagtcctggccctggccgtctgcagcttgtgtgccatgtctcaggattctacccaaagcccgtgtgggtgatgtggatgcggggtggatattccatctttctcatcctgatctgtttgactgtgatagttaccctggtcatattggttgtagttgactcacggttaaaaaaacagagttcaaataagaacattctttctccccacacacccagccctgtctttctcatgggagccaacactcaggacaccaagaattcaagacatcagttctgcttggcacaagtatcgtggatcaaaaacagagtattgaagaagtggaagacacgcctaaaccaactctggtga

SEQ ID NO: 5022 - DNA, 696 bp, Homo sapiens
  source 1..696: mol_type = unassigned DNA
atgctgctcctgttcctcctcttcgagggtctctgctgtcctggggaaaatacagcagctccccaggctctacaatcctatcatctagcagcagaggagcagctgtccttccgcatgctccaaacttcctcctttgccaaccacagctgggcacacagtgagggctcaggatggctgggtgacctgcagactcatggctgggacactgtcttgggcaccatccgctttctgaagccctggtcccatggaaacttcagcaagcaggagctgaaaaacttacagtcactgttccagttatacttccatagttttatccagatagtgcaagcttctgctggtcaatttcagcttgaattgaagccagaggcctggctgtcctgtggccccagtcctggccctggccgtctgcagcttgtgtgccatgtctcaggattctacccaaagcccgtgtgggtgatgtggatgcggggtggatattccatctttctcatcctgatctgtttgactgtgatagttaccctggtcatattggttgtagttgactcacggttaaaaaaacagagccctgtctttctcatgggagccaacactcaggacaccaagaattcaagacatcagttctgcttggcacaagtatcgtggatcaaaaacagagtattgaagaagtggaagacacgcctaaaccaactctggtga

SEQ ID NO: 5023 - DNA, 861 bp, Homo sapiens
  source 1..861: mol_type = unassigned DNA
atgctgctcctgttcctcctcttcgagggtctctgctgtcctggggaaaatacagcagctccccaggctctacaatcctatcatctagcagcagaggagcagctgtccttccgcatgctccaaacttcctcctttgccaaccacagctgggcacacagtgagggctcaggatggctgggtgacctgcagactcatggctgggacactgtcttgggcaccatccgctttctgaagccctggtcccatggaaacttcagcaagcaggagctgaaaaacttacagtcactgttccagttatacttccatagttttatccagatagtgcaagcttctgctggtcaatttcagcttgaattgaagccagaggcctggctgtcctgtggccccagtcctggccctggccgtctgcagcttgtgtgccatgtctcaggattctacccaaagcccgtgtgggtgatgtggatgcggggtgagcaggagcagcggggcactcagcgaggggacgtcctgcctaatgctgacgagacatggtatctccgagcaaccctggatgtggcggctggggaggcagctggcctgtcctgtcgggtgaaacacagcagtctagggggccatgatctaatcatccattggggtggatattccatctttctcatcctgatctgtttgactgtgatagttaccctggtcatattggttgtagttgactcacggttaaaaaaacagagccctgtctttctcatgggagccaacactcaggacaccaagaattcaagacatcagttctgcttggcacaagtatcgtggatcaaaaacagagtattgaagaagtggaagacacgcctaaaccaactctggtga

SEQ ID NO: 5024 - DNA, 399 bp, Homo sapiens
  source 1..399: mol_type = unassigned DNA
atgctgctcctgttcctcctcttcgagggtctctgctgtcctggggaaaatacagcagtgaagccagaggcctggctgtcctgtggccccagtcctggccctggccgtctgcagcttgtgtgccatgtctcaggattctacccaaagcccgtgtgggtgatgtggatgcggggtggatattccatctttctcatcctgatctgtttgactgtgatagttaccctggtcatattggttgtagttgactcacggttaaaaaaacagagccctgtctttctcatgggagccaacactcaggacaccaagaattcaagacatcagttctgcttggcacaagtatcgtggatcaaaaacagagtattgaagaagtggaagacacgcctaaaccaactctggtga

SEQ ID NO: 5025 - DNA, 1727 bp, Homo sapiens
  source 1..1727: mol_type = unassigned DNA
atgctgctcctgttcctcctcttcgagggtctctgctgtcctggggaaaatacagcagctccccaggctctacaatcctatcatctagcagcagaggagcagctgtccttccgcatgctccaaacttcctcctttgccaaccacagctgggcacacagtgagggctcaggatggctgggtgacctgcagactcatggctgggacactgtcttgggcaccatccgctttctgaagccctggtcccatggaaacttcagcaagcaggagctgaaaaacttacagtcactgttccagttatacttccatagttttatccagatagtgcaagcttctgctggtcaatttcagcttgaataccccttcgagatccagatattagctggctgtagaatgaatgccccacaaatcttcttaaatatggcatatcaagggtcagatttcctgagtttccaaggaatttcctgggagccatctccaggagcagggatccgggcccagaacatctgtaaagtgctcaatcgctacctagatattaaggaaatactgcaaagccttcttggtcacacctgccctcgatttctagcggggctcatggaagcaggggagtcagaactgaaacggaaagtgaagccagaggcctggctgtcctgtggccccagtcctggccctggccgtctgcagcttgtgtgccatgtctcaggattctacccaaagcccgtgtgggtgatgtggatgcggggtgagcaggagcagcggggcactcagcgaggggacgtcctgcctaatgctgacgagacatggtatctccgagcaaccctggatgtggcggctggggaggcagctggcctgtcctgtcgggtgaaacacagcagtctagggggccatgatctaatcatccattggggtggatattccatctttctcatcctgatctgtttgactgtgatagttaccctggtcatattggttgtagttgactcacggttaaaaaaacagagccctgtctttctcatgggagccaacactcaggacaccaagaattcaagacatcagttctgcttggcacaagtatcgtggatcaaaaacagagtattgaagaagtggaagacacgcctaaaccaactctggtgacatttgctttaccttatacataaaatccttgtctgcatcttcttaaacaccgtccatgtcccataagggaagcatgcttttatttaaacagtttatactagcaaagatactgacccctttaggaatactttttccccatcttccagagattttttttttcctgctttggctacatatccatcattgtttatttttgaaactataatccagatacttctttttcatggattcccgagatcacccaattgatagctcttctgtactccccaaattgaactgatcttcacaagcacattcatctcttcctactctgaacagtagttatttaggtttttgctctttttttttttttaatctcagttgcttgaaagtaggatttaggtatttgtgtctgtattcatgaccaaaaatcttatctgaattcagggccagcttcataagcatgtgacctgtgcagacacatggaatcgtatgctctgcaagaacccatgctagatttaatgctctgctgttgtcatcttggaatccttagtcattttcaaacaagagatattgtattttcatttttcactgaccccacaaattatatagctgat

SEQ ID NO: 5026 - DNA, 1689 bp, Homo sapiens
  source 1..1689: mol_type = unassigned DNA
atgctgctcctgttcctcctcttcgagggtctctgctgtcctggggaaaatacagcagctccccaggctctacaatcctatcatctagcagcagaggagcagctgtccttccgcatgctccaaacttcctcctttgccaaccacagctgggcacacagtgagggctcaggatggctgggtgacctgcagactcatggctgggacactgtcttgggcaccatccgctttctgaagccctggtcccatggaaacttcagcaagcaggagctgaaaaacttacagtcactgttccagttatacttccatagttttatccagatagtgcaagcttctgctggtcaatttcagcttgaataccccttcgagatccagatattagctggctgtagaatgaatgccccacaaatcttcttaaatatggcatatcaagggtcagatttcctgagtttccaaggaatttcctgggagccatctccaggagcagggatccgggcccagaacatctgtaaagtgctcaatcgctacctagatattaaggaaatactgcaaagccttcttggtcacacctgccctcgatttctagcggggctcatggaagcaggggagtcagaactgaaacggaaagtgaagccagaggcctggctgtcctgtggccccagtcctggccctggccgtctgcagcttgtgtgccatgtctcaggattctacccaaagcccgtgtgggtgatgtggatgcggggtgagcaggagcagcggggcactcagcgaggggacgtcctgcctaatgctgacgagacatggtggatattccatctttctcatcctgatctgtttgactgtgatagttaccctggtcatattggttgtagttgactcacggttaaaaaaacagagttcaaataagaacattctttctccccacacacccagccctgtctttctcatgggagccaacactcaggacaccaagaattcaagacatcagttctgcttggcacaagtatcgtggatcaaaaacagagtattgaagaagtggaagacacgcctaaaccaactctggtgacatttgctttaccttatacataaaatccttgtctgcatcttcttaaacaccgtccatgtcccataagggaagcatgcttttatttaaacagtttatactagcaaagatactgacccctttaggaatactttttccccatcttccagagattttttttttcctgctttggctacatatccatcattgtttatttttgaaactataatccagatacttctttttcatggattcccgagatcacccaattgatagctcttctgtactccccaaattgaactgatcttcacaagcacattcatctcttcctactctgaacagtagttatttaggtttttgctctttttttttttttaatctcagttgcttgaaagtaggatttaggtatttgtgtctgtattcatgaccaaaaatcttatctgaattcagggccagcttcataagcatgtgacctgtgcagacacatggaatcgtatgctctgcaagaacccatgctagatttaatgctctgctgttgtcatcttggaatccttagtcattttcaaacaagagatattgtattttcatttttcactgaccccacaaattatatagctgattcagtgtgaatgtaatatttctcaataaat

SEQ ID NO: 5027 - DNA, 936 bp, Homo sapiens
  source 1..936: mol_type = unassigned DNA
tgtctcaggattctacccaaagcccgtgtgggtgatgtggatgcggggtgagcaggagcagcggggcactcagcgaggggacgtcctgcctaatgctgacgagacatggtggatattccatctttctcatcctgatctgtttgactgtgatagttaccctggtcatattggttgtagttgactcacggttaaaaaaacagagccctgtctttctcatgggagccaacactcaggacaccaagaattcaagacatcagttctgcttggcacaagtatcgtggatcaaaaacagagtattgaagaagtggaagacacgcctaaaccaactctggtgacatttgctttaccttatacataaaatccttgtctgcatcttcttaaacaccgtccatgtcccataagggaagcatgcttttatttaaacagtttatactagcaaagatactgacccctttaggaatactttttccccatcttccagagattttttttttcctgctttggctacatatccatcattgtttatttttgaaactataatccagatacttctttttcatggattcccgagatcacccaattgatagctcttctgtactccccaaattgaactgatcttcacaagcacattcatctcttcctactctgaacagtagttatttaggtttttgctctttttttttttttaatctcagttgcttgaaagtaggatttaggtatttgtgtctgtattcatgaccaaaaatcttatctgaattcagggccagcttcataagcatgtgacctgtgcagacacatggaatcgtatgctctgcaagaacccatgctagatttaatgctctgctgttgtcatcttggaatccttagtcattttcaaacaagagatattgtattttcatttttcactgaccccacaaattatatagctgattcagt

SEQ ID NO: 5028 - DNA, 1678 bp, Homo sapiens
  source 1..1678: mol_type = unassigned DNA
gggtgtggagaggggtactgatatctgaattattagggcaggtgtcctgccaaggaatccctcctttaacagagcttcaatgctgctcctgttcctcctcttcgagggtctctgctgtcctggggaaaatacagcagctccccaggctctacaatcctatcatctagcagcagaggagcagctgtccttccgcatgctccaaacttcctcctttgccaaccacagctgggcacacagtgagggctcaggatggctgggtgacctgcagactcatggctgggacactgtcttgggcaccatccgctttctgaagccctggtcccatggaaacttcagcaagcaggagctgaaaaacttacagtcactgttccagttatacttccatagttttatccagatagtgcaagcttctgctggtcaatttcagcttgaataccccttcgagatccagatattagctggctgtagaatgaatgccccacaaatcttcttaaatatggcatatcaagggtcagatttcctgagtttccaaggaatttcctgggagccatctccaggagcagggatccgggcccagaacatctgtaaagtgctcaatcgctacctagatattaaggaaatactgcaaagccttcttggtcacacctgccctcgatttctagcggggctcatggaagcaggggagtcagaactgaaacggaaagtgaagccagaggcctggctgtcctgtggccccagtcctggccctggccgtctgcagcttgtgtgccatgtctcaggattctacccaaagcccgtgtgggtgatgtggatgcggggtggatattccatctttctcatcctgatctgtttgactgtgatagttaccctggtcatattggttgtagttgactcacggttaaaaaaacagagccctgtctttctcatgggagccaacactcaggacaccaagaattcaagacatcagttctgcttggcacaagtatcgtggatcaaaaacagagtattgaagaagtggaagacacgcctaaaccaactctggtgacatttgctttaccttatacataaaatccttgtctgcatcttcttaaacaccgtccatgtcccataagggaagcatgcttttatttaaacagtttatactagcaaagatactgacccctttaggaatactttttccccatcttccagagattttttttttcctgctttggctacatatccatcattgtttatttttgaaactataatccagatacttctttttcatggattcccgagatcacccaattgatagctcttctgtactccccaaattgaactgatcttcacaagcacattcatctcttcctactctgaacagtagttatttaggtttttgctctttttttttttttaatctcagttgcttgaaagtaggatttaggtatttgtgtctgtattcatgaccaaaaatcttatctgaattcagggccagcttcataagcatgtgacctgtgcagacacatggaatcgtatgctctgcaagaacccatgctagatttaatgctctgctgttgtcatcttggaatccttagtcattttcaaacaagagatattgtattttcatttttcactgaccccacaaattatatagctgattcagtgtgaatgtaatatttctcaataaatgctgact

SEQ ID NO: 5029 - DNA, 869 bp, Homo sapiens
  source 1..869: mol_type = unassigned DNA
ggagaggggtactgatatctgaattattagggcaggtgtcctgccaaggaatccctcctttaacagagcttcaatgctgctcctgttcctcctcttcgagggtctctgctgtcctggggaaaatacagcagtgaagccagaggcctggctgtcctgtggccccagtcctggccctggccgtctgcagcttgtgtgccatgtctcaggattctacccaaagcccgtgtgggtgatgtggatgcggggtgagcaggagcagcggggcactcagcgaggggacgtcctgcctaatgctgacgagacatggtggatattccatctttctcatcctgatctgtttgactgtgatagttaccctggtcatattggttgtagttgactcacggttaaaaaaacagagttcaaataagaacattctttctccccacacacccagccctgtctttctcatgggagccaacactcaggacaccaagaattcaagacatcagttctgcttggcacaagtatcgtggatcaaaaacagagtattgaagaagtggaagacacgcctaaaccaactctggtgacatttgctttaccttatacataaaatccttgtctgcatcttcttaaacaccgtccatgtcccataagggaagcatgcttttatttaaacagtttatactagcaaagatactgacccctttaggaatactttttccccatcttccagagattttttttttcctgctttggctacatatccatcattgtttatttttgaaactataatccagatacttctttttcatggattcccgagatcacccaattgatagctcttctgtactccccaaattgaactgatcttcacaagcacattcatc

SEQ ID NO: 5030 - DNA, 1003 bp, Homo sapiens
  source 1..1003: mol_type = unassigned DNA
caagggaagtcagacgagagtgcaagagggtgtggagaggggtactgatatctgaattattagggcaggtgtcctgccaaggaatccctcctttaacagagcttcaatgctgctcctgttcctcctcttcgagggtctctgctgtcctggggaaaatacagcagctccccaggctctacaatcctatcatctagcagcagaggagcagctgtccttccgcatgctccaaacttcctcctttgccaaccacagctgggcacacagtgagggctcaggatggctgggtgacctgcagactcatggctgggacactgtcttgggcaccatccgctttctgaagccctggtcccatggaaacttcagcaagcaggagctgaaaaacttacagtcactgttccagttatacttccatagttttatccagatagtgcaagcttctgctggtcaatttcagcttgaattgaagccagaggcctggctgtcctgtggccccagtcctggccctggccgtctgcagcttgtgtgccatgtctcaggattctacccaaagcccgtgtgggtgatgtggatgcggggtgagcaggagcagcggggcactcagcgaggggacgtcctgcctaatgctgacgagacatggtatctccgagcaaccctggatgtggcggctggggaggcagctggcctgtcctgtcgggtgaaacacagcagtctagggggccatgatctaatcatccattggggtggatattccatctttctcatcctgatctgtttgactgtgatagttaccctggtcatattggttgtagttgactcacggttaaaaaaacagagttcaaataagaacattctttctccccacacacccagccctgtctttctcatgggagccaacactcaggacaccaagaattcaagacatcagttctgcttggcacaagtatcgtggatcaaaaacagagtattgaagaagtggaagacacgcctaaaccaactctggtga

SEQ ID NO: 5031 - DNA, 1271 bp, Homo sapiens
  source 1..1271: mol_type = unassigned DNA
agggaagtcagacgagagtgcaagagggtgtggagaggggtactgatatctgaattattagggcaggtgtcctgccaaggaatccctcctttaacagagcttcaatgctgctcctgttcctcctcttcgagggtctctgctgtcctggggaaaatacagcagtgaagccagaggcctggctgtcctgtggccccagtcctggccctggccgtctgcagcttgtgtgccatgtctcaggattctacccaaagcccgtgtgggtgatgtggatgcggggtgagcaggagcagcggggcactcagcgaggggacgtcctgcctaatgctgacgagacatggtatctccgagcaaccctggatgtggcggctggggaggcagctggcctgtcctgtcgggtgaaacacagcagtctagggggccatgatctaatcatccattggggtggatattccatctttctcatcctgatctgtttgactgtgatagttaccctggtcatattggttgtagttgactcacggttaaaaaaacagagccctgtctttctcatgggagccaacactcaggacaccaagaattcaagacatcagttctgcttggcacaagtatcgtggatcaaaaacagagtattgaagaagtggaagacacgcctaaaccaactctggtgacatttgctttaccttatacataaaatccttgtctgcatcttcttaaacaccgtccatgtcccataagggaagcatgcttttatttaaacagtttatactagcaaagatactgacccctttaggaatactttttccccatcttccagagattttttttttcctgctttggctacatatccatcattgtttatttttgaaactataatccagatacttctttttcatggattcccgagatcacccaattgatagctcttctgtactccccaaattgaactgatcttcacaagcacattcatctcttcctactctgaacagtagttatttaggtttttgctctttttttttttttaatctcagttgcttgaaagtaggatttaggtatttgtgtctgtattcatgaccaaaaatcttatctgaattcagggccagcttcataagcatgtgacctgtgcagacacatggaatcgtatgctctgcaagaacccatgctagatttaatgctctgctgttgtcatcttggaatccttagtcattttcaaacaagagatattgtattttcatttttcactgaccccacaaattatatagctgattcagtgt

SEQ ID NO: 5032 - DNA, 1458 bp, Homo sapiens
  source 1..1458: mol_type = unassigned DNA
gaaaatctggagccagacagtgagagaggcagaggggaaatgaaaaaccccgtgggaggctgcagcaaagcgaggcagtgtggcttctctgacagggaagtcagcagagggagaggtttgtctgtctgtacagcaagggaagtcagacgagagtgcaagagggtgtggagaggggtactgatatctgaattattagggcaggtgtcctgccaaggaatccctcctttaacagagcttcaatgctgctcctgttcctcctcttcgagggtctctgctgtcctggggaaaatacagcagctccccaggctctacaatcctatcatctagcagcagaggagcagctgtccttccgcatgctccaaacttcctcctttgccaaccacagctgggcacacagtgagggctcaggatggctgggtgacctgcagactcatggctgggacactgtcttgggcaccatccgctttctgaagccctggtcccatggaaacttcagcaagcaggagctgaaaaacttacagtcactgttccagttatacttccatagttttatccagatagtgcaagcttctgctggtcaatttcagcttgaataccccttcgagatccagatattagctggctgtagaatgaatgccccacaaatcttcttaaatatggcatatcaagggtcagatttcctgagtttccaaggaatttcctgggagccatctccaggagcagggatccgggcccagaacatctgtaaagtgctcaatcgctacctagatattaaggaaatactgcaaagccttcttggtcacacctgccctcgatttctagcggggctcatggaagcaggggagtcagaactgaaacggaaagtgaagccagaggcctggctgtcctgtggccccagtcctggccctggccgtctgcagcttgtgtgccatgtctcaggattctacccaaagcccgtgtgggtgatgtggatgcggggtgagcaggagcagcggggcactcagcgaggggacgtcctgcctaatgctgacgagacatggtatctccgagcaaccctggatgtggcggctggggaggcagctggcctgtcctgtcgggtgaaacacagcagtctagggggccatgatctaatcatccattggggtggatattccatctttctcatcctgatctgtttgactgtgatagttaccctggtcatattggttgtagttgactcacggttaaaaaaacagagttcaaataagaacattctttctccccacacacccagccctgtctttctcatgggagccaacactcaggacaccaagaattcaagacatcagttctgcttggcacaagtatcgtggatcaaaaacagagtattgaagaagtggaagacacgcctaaaccaactctggtgacatttgctttaccttatacataaaatccttgtctgcatcttcttaaacaccg

SEQ ID NO: 5033 - DNA, 1504 bp, Homo sapiens
  source 1..1504: mol_type = unassigned DNA
gtcttctgatcatgatcaagagcagagtgaagagatacaggcggaggagaggatcacagagagctccccaggctctacaatcctatcatctagcagcagaggagcagctgtccttccgcatgctccaaacttcctcctttgccaaccacagctgggcacacagtgagggctcaggatggctgggtgacctgcagactcatggctgggacactgtcttgggcaccatccgctttctgaagccctggtcccatggaaacttcagcaagcaggagctgaaaaacttacagtcactgttccagttatacttccatagttttatccagatagtgcaagcttctgctggtcaatttcagcttgaataccccttcgagatccagatattagctggctgtagaatgaatgccccacaaatcttcttaaatatggcatatcaagggtcagatttcctgagtttccaaggaatttcctgggagccatctccaggagcagggatccgggcccagaacatctgtaaagtgctcaatcgctacctagatattaaggaaatactgcaaagccttcttggtcacacctgccctcgatttctagcggggctcatggaagcaggggagtcagaactgaaacggaaagtgaagccagaggcctggctgtcctgtggccccagtcctggccctggccgtctgcagcttgtgtgccatgtctcaggattctacccaaagcccgtgtgggtgatgtggatgcggggtgagcaggagcagcggggcactcagcgaggggacgtcctgcctaatgctgacgagacatggtatctccgagcaaccctggatgtggcggctggggaggcagctggcctgtcctgtcgggtgaaacacagcagtctagggggccatgatctaatcatccattggggtgagaaacagctgaggctctgctgggaaataatgaaaatagccctggggcttttgagtgtggggctgaggaaatgggtaggaatgctaggtacaagaagggtaaaactgggacaatcaaaataaagaaggatagagtatgacagtagttaaattttaagaaaatggaagtagagaattagacatactaacagaaaaaggaggaggaactagtgatttagtgggagagggttgggaggagatcacagacaaaggatcaggaggaattgaaatgagggctttggaaaacccagatgaaaattctaggaaggtcccacccttgtgaaatgggaaatctcagcttggtggaatagagtattttagggttggtattcttattctatccccaaccaggtggatattccatctttctcatcctgatctgtttgactgtgatagttaccctggtcatattggttgtagttgactcacggttaaaaaaacagaggtgagctttttcttgttctttgtttcttcagcctgtaatcaattcattcctttttcctctatcttctttttttttttctctgcctttcccctttatttcctttctttga

SEQ ID NO: 5034 - DNA, 1820 bp, Homo sapiens
  source 1..1820: mol_type = unassigned DNA
ttccagcagttagtgcaattagggaggttgggaggatgtacacaagagcagggagaaaatctggagccagacagtgagagaggcagaggggaaatgaaaaaccccgtgggaggctgcagcaaagcgaggcagtgtggcttctctgacagggaagtcagcagagggagaggtttgtctgtctgtacagcaagggaagtcagacgagagtgcaagagggtgtggagaggggtactgatatctgaattattagggcaggtgtcctgccaaggaatccctcctttaacagagcttcaatgctgctcctgttcctcctcttcgagggtctctgctgtcctggggaaaatacagcagaccccttcgagatccagatattagctggctgtagaatgaatgccccacaaatcttcttaaatatggcatatcaagggtcagatttcctgagtttccaaggaatttcctgggagccatctccaggagcagggatccgggcccagaacatctgtaaagtgctcaatcgctacctagatattaaggaaatactgcaaagccttcttggtcacacctgccctcgatttctagcggggctcatggaagcaggggagtcagaactgaaacggaaagtgaagccagaggcctggctgtcctgtggccccagtcctggccctggccgtctgcagcttgtgtgccatgtctcaggattctacccaaagcccgtgtgggtgatgtggatgcggggtgagcaggagcagcggggcactcagcgaggggacgtcctgcctaatgctgacgagacatggtatctccgagcaaccctggatgtggcggctggggaggcagctggcctgtcctgtcgggtgaaacacagcagtctagggggccatgatctaatcatccattggggtggatattccatctttctcatcctgatctgtttgactgtgatagttaccctggtcatattggttgtagttgactcacggttaaaaaaacagagttcaaataagaacattctttctccccacacacccagccctgtctttctcatgggagccaacactcaggacaccaagaattcaagacatcagttctgcttggcacaagtatcgtggatcaaaaacagagtattgaagaagtggaagacacgcctaaaccaactctggtgacatttgctttaccttatacataaaatccttgtctgcatcttcttaaacaccgtccatgtcccataagggaagcatgcttttatttaaacagtttatactagcaaagatactgacccctttaggaatactttttccccatcttccagagattttttttttcctgctttggctacatatccatcattgtttatttttgaaactataatccagatacttctttttcatggattcccgagatcacccaattgatagctcttctgtactccccaaattgaactgatcttcacaagcacattcatctcttcctactctgaacagtagttatttaggtttttgctctttttttttttttaatctcagttgcttgaaagtaggatttaggtatttgtgtctgtattcatgaccaaaaatcttatctgaattcagggccagcttcataagcatgtgacctgtgcagacacatggaatcgtatgctctgcaagaacccatgctagatttaatgctctgctgttgtcatcttggaatccttagtcattttcaaacaagagatattgtattttcatttttcactgaccccacaaattatatagctgattcagtgtgaatgtaatatttctcaataaatgctgactgaaataaatttgttgttagatcaa

SEQ ID NO: 5035 - DNA, 745 bp, Homo sapiens
  source 1..745: mol_type = unassigned DNA
gggaagtcagcagagggagaggtttgtctgtctgtacagcaagggaagtcagacgagagtgcaagagggtgtggagaggggtactgatatctgaattattagggcaggtgtcctgccaaggaatccctcctttaacagagcttcaatgctgctcctgttcctcctcttcgagggtctctgctgtcctggggaaaatacagcagtgaagccagaggcctggctgtcctgtggccccagtcctggccctggccgtctgcagcttgtgtgccatgtctcaggattctacccaaagcccgtgtgggtgatgtggatgcggggtgagcaggagcagcggggcactcagcgaggggacgtcctgcctaatgctgacgagacatggtatctccgagcaaccctggatgtggcggctggggaggcagctggcctgtcctgtcgggtgaaacacagcagtctagggggccatgatctaatcatccattggggtggatattccatctttctcatcctgatctgtttgactgtgatagttaccctggtcatattggttgtagttgactcacggttaaaaaaacagagttcaaataagaacattctttctccccacacacccagccctgtctttctcatgggagccaacactcaggacaccaagaattcaagacatcagttctgcttggcacaagtatcgtggatcaaaaacagagtattgaagaagtggaagacacgcctaaaccaactctggtga

SEQ ID NO: 5036 - DNA, 2299 bp, Homo sapiens
  source 1..2299: mol_type = unassigned DNA
gtctttgcttcagggcttcatacaggaaatctattgctgtgtcaagttccagagaaaagcttctgttcgtccaagttactaaccaggctaaaccacatagacgtgaaggaaggggctagaaggaagggagtgccccactgttgatggggtaagaggatcctgtactgagaagttgaccagagagggtctcaccatgcgcacagttccttctgtacctgtgtggaggaaaagtactgagtgaagggcagaaaaagagaaaacagaaatgctctgcccttggagaactgctaacctagggctactgttgattttgactatcttcttagtggccgaagcggagggtgctgctcaaccaaacaactcattaatgctgcaaactagcaaggagaatcatgctttagcttcaagcagtttatgtatggatgaaaaacagattacacagaactactcgaaagtactcgcagaagttaacacttcatggcctgtaaagatggctacaaatgctgtgctttgttgccctcctatcgcattaagaaatttgatcataataacatgggaaataatcctgagaggccagccttcctgcacaaaagcctacaagaaagaaacaaatgagaccaaggaaaccaactgtactgatgagagaataacctgggtctccagacctgatcagaattcggaccttcagattcgtaccgtggccatcactcatgacgggtattacagatgcataatggtaacacctgatgggaatttccatcgtggatatcacctccaagtgttagttacacctgaagtgaccctgtttcaaaacaggaatagaactgcagtatgcaaggcagttgcagggaagccagctgcgcatatctcctggatcccagagggcgattgtgccactaagcaagaatactggagcaatggcacagtgactgttaagagtacatgccactgggaggtccacaatgtgtctaccgtgacctgccacgtctcccatttgactggcaacaagagtctgtacatagagctacttcctgttccaggtgccaaaaaatcagcaaaattatatattccatatatcatccttactattattattttgaccatcgtgggattcatttggttgttgaaagtcaatggctgcagaaaatataaattgaataaaacagaatctactccagttgttgaggaggatgaaatgcagccctatgccagctacacagagaagaacaatcctctctatgatactacaaacaaggtgaaggcatctgaggcattacaaagtgaagttgacacagacctccatactttataagttgttggactctagtaccaagaaacaacaacaaacgagatacattataattactgtctgattttcttacagttctagaatgaagacttatattgaaattaggttttccaaggttcttagaagacattttaatggattctcattcatacccttgtataattggaatttttgattcttagctgctaccagctagttctctgaagaactgatgttattacaaagaaaatacatgcccatgaccaaatattcaaattgtgcaggacagtaaataatgaaaaccaaatttcctcaagaaataactgaagaaggagcaagtgtgaacagtttcttgtgtatcctttcagaatattttaatgtacatatgacatgtgtatatgcctatggtatatgtgtcaatttatgtgtccccttacatatacatgcacatatctttgtcaaggcaccagtgggaacaatacactgcattactgttctatacatatgaaaacctaataatataagtcttagagatcattttatatcatgacaagtagagctacctcattctttttaatggttatataaaattccattgtatagttatatcattatttaattaaaaacaaccctaatgatggatatttagattcttttaagttttgtttatttcttttaagttttgtttgtggtataaacaataccacatagaatgtttcttgtgcatatatctctttgtttttgagtatatctgtaggataactttcttgagtggaattgtcaggtcaaagggtttgtgcattttactattgatatatatgttaaattgtgtcaaatatatatgtcaaattccctccaacattgtttaaatgtgcctttccctaaatttctattttaataactgtactattcctgcttctacagttgccactttctctttttaatcaaccagattaaatatgatgtgagattataataagaattatactatttaataaaaatggatttata

SEQ ID NO: 5037 - DNA, 847 bp, Homo sapiens
  source 1..847: mol_type = unassigned DNA
tgtacctgtgtggaggaaaagtactgagtgaagggcagaaaaagagaaaacagaaatgctctgcccttggagaactgctaacctagggctactgttgattttgactatcttcttagtggccgaagcggagggtgctgctcaaccaaacaactcattaatgctgcaaactagcaaggagaatcatgctttagcttcaagcagtttatgtatggatgaaaaacagattacacagaactactcgaaagtactcgcagaagttaacacttcatggcctgtaaagatggctacaaatgctgtgctttgttgccctcctatcgcattaagaaatttgatcataataacatgggaaataatcctgagaggccagccttcctgcacaaaagcctacaagaaagaaacaaatgagaccaaggaaaccaactgtactgatgagagaataacctgggtctccagacctgatcagaattcggaccttcagattcgtaccgtggccatcactcatgacgggtattacagatgcataatggtaacacctgatgggaatttccatcgtggatatcacctccaagtgttaggtaaggagcatcatatattgaggtatttcacatcaccagatttgtgacggaaacaaatgtctctctgaattccatatgctttatgtgaaaaccgaagcatttttttccctctttcctctctgcagttacacctgaagtgaccctgtttcaaaacaggaatagaactgcagtatgcaaggcagttgcagggaagccagctgcgcatatctcctggatcccagagggcgattgtgccactaagcaagaatactggagcaatggcacagtgactg

SEQ ID NO: 5038 - DNA, 3679 bp, Homo sapiens
  source 1..3679: mol_type = unassigned DNA
attgctgtgtcaagttccagagaaaagcttctgttcgtccaagttactaaccaggctaaaccacatagacgtgaaggaaggggctagaaggaagggagtgccccactgttgatggggtaagaggatcctgtactgagaagttgaccagagagggtctcaccatgcgcacagttccttctgtacctgtgtggaggaaaagtactgagtgaagggcagaaaaagagaaaacagaaatgctctgcccttggagaactgctaacctagggctactgttgattttgactatcttcttagtggccgcttcaagcagtttatgtatggatgaaaaacagattacacagaactactcgaaagtactcgcagaagttaacacttcatggcctgtaaagatggctacaaatgctgtgctttgttgccctcctatcgcattaagaaatttgatcataataacatgggaaataatcctgagaggccagccttcctgcacaaaagcctacaagaaagaaacaaatgagaccaaggaaaccaactgtactgatgagagaataacctgggtctccagacctgatcagaattcggaccttcagattcgtaccgtggccatcactcatgacgggtattacagatgcataatggtaacacctgatgggaatttccatcgtggatatcacctccaagtgttagttacacctgaagtgaccctgtttcaaaacaggaatagaactgcagtatgcaaggcagttgcagggaagccagctgcgcatatctcctggatcccagagggcgattgtgccactaagcaagaatactggagcaatggcacagtgactgttaagagtacatgccactgggaggtccacaatgtgtctaccgtgacctgccacgtctcccatttgactggcaacaagagtctgtacatagagctacttcctgttccaggtgccaaaaaatcagcaaaattatatattccatatatcatccttactattattattttgaccatcgtgggattcatttggttgttgaaagtcaatggctgcagaaaatataaattgaataaaacagaatctactccagttgttgaggaggatgaaatgcagccctatgccagctacacagagaagaacaatcctctctatgatactacaaacaaggtgaaggcatctgaggcattacaaagtgaagttgacacagacctccatactttataagttgttggactctagtaccaagaaacaacaacaaacgagatacattataattactgtctgattttcttacagttctagaatgaagacttatattgaaattaggttttccaaggttcttagaagacattttaatggattctcattcatacccttgtataattggaatttttgattcttagctgctaccagctagttctctgaagaactgatgttattacaaagaaaatacatgcccatgaccaaatattcaaattgtgcaggacagtaaataatgaaaaccaaatttcctcaagaaataactgaagaaggagcaagtgtgaacagtttcttgtgtatcctttcagaatattttaatgtacatatgacatgtgtatatgcctatggtatatgtgtcaatttatgtgtccccttacatatacatgcacatatctttgtcaaggcaccagtgggaacaatacactgcattactgttctatacatatgaaaacctaataatataagtcttagagatcattttatatcatgacaagtagagctacctcattctttttaatggttatataaaattccattgtatagttatatcattatttaattaaaaacaaccctaatgatggatatttagattcttttaagttttgtttatttcttttaagttttgtttgtggtataaacaataccacatagaatgtttcttgtgcatatatctctttgtttttgagtatatctgtaggataactttcttgagtggaattgtcaggtcaaagggtttgtgcattttactattgatatatatgttaaattgtgtcaaatatatatgtcaaattccctccaacattgtttaaatgtgcctttccctaaatttctattttaataactgtactattcctgcttctacagttgccactttctctttttaatcaaccagattaaatatgatgtgagattataataagaattatactatttaataaaaatggatttatatttttggtcatgtttgtaagagagtgaatgcacgtgtgagaacattagcttcttctgaactcattatatctccacagaggtgttgatacttgatgcctaacagttttgcagatgtgctacattggaattgtgtatttttatggtgtacattctattgtgatatatttattgaataattaatgtctattgaccatataagtggcgaaaaatgcaccatagaggacatggggtatttatttacaaactatgagctacataataagcaagtggccatgggatggcatgaccctcccctccatatttttgtggagcaaaatattggcaatgtttatgtaaatcattgttaatatcatgaaattatttttaattaaaaacataagtctatttgctccatagcagaaaaaacatgagaagttttttcatcatgatagaaattgaaacaaaatatattcattcttcaatcataccatctgagatttttaagacagctattttgtcttataagtatatttttctccctctagacatttcagttactatggattttgtcctcaaagggacttttagtctattttggatgtaaagctaatctaatgacacttggcacatgatattttgatcaagccattttgacttgaccaaaaagcagtgtccattaggtttctgcatataaatattaccaagcaatgttcacaatagacatcattacactgtccttgaaatttattaattcttcatccaaccctggttgagctgaggctcatagttaggttcaagactatctgtttaaatattactgaaaaacaaagtaagacagtactatgcttacctcttaacttgataatgtcaaaacaggcatgttaaatgacatcatagaaaagacttcaagataatttatagaagttaaattatattgtacagaaaataattgtatgaaaatctctactatggggctggaacatggttgaacattagaatgatataaaaaattatatatattctccaaatccacgctagacctgtcaaattagagaatctagagattagacctggcgtgtcagcaaggtcatccaggaagcagaggctgagacggagttaggtgtgattacttacatagtcgattacattttacaaataacattttatatgtctcatttactgtgctttctccccatcccattttgtatcttttcctttgctttgctagatttgtcaattttctctctctttctctgtctctctctctttcaatatctctaataatttgaaagtaattcatcataactaaatatctattggggttatgcttcacttacaaacttctgaaaacggctttactgagatataattgatatatttaagtgtacagtttgttaaattttgcacatatttaaaatgtggactttggtaaatgttgacatagttttacatctgtgaaaccatcagcataatcaagataataaacttgtccatcacccccc

SEQ ID NO: 5039 - DNA, 778 bp, Homo sapiens
  source 1..778: mol_type = unassigned DNA
tgtacctgtgtggaggaaaagtactgagtgaagggcagaaaaagagaaaacagaaatgctctgcccttggagaactgctaacctagggctactgttgattttgactatcttcttagtggccgcttcaagcagtttatgtatggatgaaaaacagattacacagaactactcgaaagtactcgcagaagttaacacttcatggcctgtaaagatggctacaaatgctgtgctttgttgccctcctatcgcattaagaaatttgatcataataacatgggaaataatcctgagaggccagccttcctgcacaaaagcctacaagaaagaaacaaatgagaccaaggaaaccaactgtactgatgagagaataacctgggtctccagacctgatcagaattcggaccttcagattcgtaccgtggccatcactcatgacgggtattacagatgcataatggtaacacctgatgggaatttccatcgtggatatcacctccaagtgttaggtaaggagcatcatatattgaggtatttcacatcaccagatttgtgacggaaacaaatgtctctctgaattccatatgctttatgtgaaaaccgaagcatttttttccctctttcctctctgcagttacacctgaagtgaccctgtttcaaaacaggaatagaactgcagtatgcaaggcagttgcagggaagccagctgcgcatatctcctggatcccagagggcgattgtgccactaagcaagaatactggagcaatggcacagtgactg

SEQ ID NO: 5040 - DNA, 1867 bp, Homo sapiens
  source 1..1867: mol_type = unassigned DNA
gcagccagaagcacctgtgctcccaggataagggtgagcactcaggatgactgtggagaaggaggcccctgatgcgcacttcactgtggacaaacagaacatctccctctggccccgagagcctcctcccaagtccggtccatctctggtcccggggaaaacacccacagtccgtgctgcattaatctgcctgacgctggtcctggtcgcctccgtcctgctgcaggccgtcctttatccccggtttatgggcaccatatcagatgtaaagaccaatgtccagttgctgaaaggtcgtgtggacaacatcagcaccctggattctgaaattaaaaagaatagtgacggcatggaggcagctggcgttcagatccagatggtgaatgagagcctgggttatgtgcgttctcagttcctgaagttaaaaaccagtgtggagaaggccaacgcacagatccagatcttaacaagaagttgggaagaagtcagtaccttaaatgcccaaatcccagagttaaaaagtgatttggagaaagccagtgctttaaatacaaagatccgggcactccagggcagcttggagaatatgagcaagttgctcaaacgacaaaatgatattctacaggtggtttctcaaggctggaagtacttcaaggggaacttctattacttttctctcattccaaagacctggtatagtgccgagcagttctgtgtgtccaggaattcacacctgacctcggtgacctcagagagtgagcaggagtttctgtataaaacagcggggggactcatctactggattggcctgactaaagcagggatggaaggggactggtcctgggtggatgacacgccattcaacaaggtccaaagtgtgaggttctggattccaggtgagcccaacaatgctgggaacaatgaacactgtggcaatataaaggctccctcacttcaggcctggaatgatgccccatgtgacaaaacgtttcttttcatttgtaagcgaccctatgtcccatcagaaccgtgacaggacaggctcccaagctcactctttgagctccaacgcttgttaaacatgaggaaatgcctctttcttccccagactccaggatgactttgcacgttaatttttcttgcttcaaaattgtcccacagtggcattctggagtccgtctgtcttggctggaaattctctgacgtcttggaggcagctggaatggaaaggagaattcaggttaaagtgggaggggtgggtagagaggatttagaagttccaattgccctgctaaggaggatcaagacccgtaatccggcataacaccctggggttttccactctttcagagaaacctcagcttcatcacatcaaagttactccagagcaaccaagcaattctcctgatattgtcatccagggcttttcttggccaaaccccctagaatttccatgtctctgcttagctgtgctggcagctagcagctggctgtgtttgcagtgcaaatagctctgttcttggaaatcctgctcatggtatgtccccagtggtttcttcatccacatcatctaaagcctgaacccgttcttctctggttcaagtcagtggctgacacggacttgtatctccttcagagctcggctggcacccagcctcccttctccttccactcccttagtacactggagtgccgagccctgccttccacccagcgtccatccagcccctgtcctcacctctccggcacctcctcctccttctgcatttcctatcttcctgtgtcttgtgcatgggaagcagccttcagtgccttcatgaattcaccttccagcttcctcagaataaaatgctgcctgggtcaagga

SEQ ID NO: 5041 - DNA, 4196 bp, Homo sapiens
  source 1..4196: mol_type = unassigned DNA
atcacagggtgggaaataaaagctgtggcccccaggagttctggacactgggggagagtggggtgacatgagtgactccaaggaaccaagactgcagcagctgggcctcctggtgtccaaggtccccagctccataagtcaggaacaatccaggcaagacgcgatctaccagaacctgacccagcttaaagctgcagtgggtgagctctcagagaaatccaagctgcaggagatctaccaggagctgacccagctgaaggctgcagtgggtgagcttccagagaaatctaagctgcaggagatctaccaggagctgacccggctgaaggctgcagtgggtgagcttccagagaaatctaagctgcaggagatctaccaggagctgacctggctgaaggctgcagtgggtgagcttccagagaaatctaagatgcaggagatctaccaggagctgactcggctgaaggctgcagtgggtgagcttccagagaaatctaagcagcaggagatctaccaggagctgacccggctgaaggctgcagtgggtgagcttccagagaaatctaagcagcaggagatctaccaggagctgacccggctgaaggctgcagtgggtgagcttccagagaaatctaagcagcaggagatctaccaggagctgacccagctgaaggctgcagtggaacgcctgtgccacccctgtccctgggaatggacattcttccaaggaaactgttacttcatgtctaactcccagcggaactggcacgactccatcaccgcctgcaaagaagtgggggcccagctcgtcgtaatcaaaagtgctgaggagcagaacttcctacagctgcagtcttccagaagtaaccgcttcacctggatgggactttcagatctaaatcaggaaggcacgtggcaatgggtggacggctcacctctgttgcccagcttcaagcagtattggaacagaggagagcccaacaacgttggggaggaagactgcgcggaatttagtggcaatggctggaacgacgacaaatgtaatcttgccaaattctggatctgcaaaaagtccgcagcctcctgctccagggatgaagaacagtttctttctccagcccctgccaccccaaacccccctcctgcgtagcagaacttcacccccttttaagctacagttccttctctccatccttcgaccttcacaaaatctctgggactgttctttgtcagattcttcctcctttagaaggctgggtcccattctgtccttcttgtcatgcctccaatttcccctggtgtagagcttgtttttctggcccatccttggagctttatgagtgagctggtgtgggatgcctttgggggtggacttgtgttccaagaatccactctctcttccttttggagattaggatatttgggttgccatgtgtagctgctatgtcccctggggcgttatcttatacatgcaaacctaccatctgttcaacttccacctaccacctcctgcacccctttgatcggggacttactggttgcaagagctcattttgcaggctggaagcaccagggaattaattcccccagtcaaccaatggcacccagagagggcatggaggctccacgcaaccccttccacccccacatcttcctttgtcttatacatggcttccatttggctgtttctaagttgtattctttattttattattattattactatttttcgagatggagtttcactcttgtcgctcaggctggagtgccatggcgcgatcttggctcactgcaacctctgcctcccgggttcaagtgattctcctgcctcagcctcacgagtagctggaattacaggcaggcgccaccagacccggctaattttttgtatttttagtacagatggggtttctccgtgttggtcaggctggtcttgaactcccgacctcagatgatctgcccgcctcggcctcccaaaattgctgggattacaggtgtgagccaccgcgcctggcctattattttttgtaagaataaaacaggtttattgggatttgggactctgaacagttctgtctctactacctgatctcctcctaccacgactttgggatctagaggagctttggctccggctgtgacggctccggccgttctcactgcggctgcaccggcccccgctgcggtcactatttcttcctctgctaggtgaattgtgcctctcctggctctttgacatgtgctagtgagatttcttccttttcctttcggattccccatttcttttgtaggaatggtctggactagggttctccttccccgcagcctgtagtattcatcgtggtggcccaccctctctctccccttggagctcttgccaaaggaggagacaagcagaggtctctattggatttctcaacacctgaagaaagttgcagtgttttcctcttggacattgttgtatttcaaataaaccacaaatcatcattttccaccgagccactgggcagaattcacactgaagctgtcgtcctgcgtacataccatcgtccgttaaacagagaaagagctgcttggcattcttcttccgactggtactgaacatatatacttgcccctcaggtgaggttccaagttgcaactgaccttgaactgaatcactctccccacgttattttttaattactatttttttttaaagatggggtcttgctctgtcgccaggctggagtgcagtggcgcgatctaggctcactgcaacttccgcctcccgggttcaagcgattctcctgcctcagcctcccgagtagctgggactccactaaaagtacaaaaattagctgggcgtgcaccactgcgcccagctaattcttgtatttttggtagagacggggtttcaacatgttgaccaggatggtctcgatctcttgacctcgtgattcgcccgccgcgtcctcccaaagtgctgggattacaggcctgagccaccgcgcccagtctctccccacgttcttgaactcgggcagcacatcctcacagaaatctaggaactgttggtaggtttcttcctcgctgtactccaggcttgcttcggagtcatagtcatccctcctgcactgctcctttccaaacactgtaaacatgcttttaataagaagggtaggactggatgttgggaaatcatgtgaacatctatctccaaatctgcaagctcctgttttactgtagaagggacaattaactccatccttctccatgactctgaaatccaagggggggttccgggttttgccatgtggcgccattttccaactcattttcagcctgatccagcatcttctggacagcttccggtttttgtttcttctgtcgtttctgttcctcctcctctctctctttcctctgctgttcttcccattgttcctttaactttcgctcttgttcttgccgttttctagccacctcttccttttccttctttattctgaattcttcttgtgccttctgctctctcagcaaccactcctcatgtaatctttgcctctctcttccccatagcttttctagttgttgtttttcaataaaagtgtcctcctctttctgtgagagtcctgagtccctcagtggagcaagttcctgctggcgtttctttcgtttctccttcttcagggcggccctgtactttttgtggcttggtttctctggaaatgtcaccttttcgggcgcagccatcttgccggcaccgccccgcccctctagttgtatcctttataataaactggtaaacattgtaaccgcagattcagcccaatctggttcaactttgtgtaataaaatggcgagttgtttttcagttgtcgtggacccccaggttgcaagttacataccctgggcatgtccagatgaacgaagcgtgcaaatccacgtggaacctaagtgctcagaccgaggaacagggactgagttaagaagtggacaccacgtggcatgatccttgatccaatcagattgagccctggcgtgatccagtcagatcaagcctcctgaatcccctcattacaagatccaatcatatcatgcctcactaccctctgtatataaaatctgccccagcctccaacttggagagacagatttgggccagactcctgtgtccttgcttggctgccttgcaataaatttttctctctacaaaa

SEQ ID NO: 5042 - DNA, 3920 bp, Homo sapiens
  source 1..3920: mol_type = unassigned DNA
atcacagggtgggaaataaaagctgtggcccccaggagttctggacactgggggagagtggggtgacatgagtgactccaaggaaccaagactgcagcagctgggcctcctggtgtccaaggtccccagctccataagtcaggaacaatccaggcaagacgcgatctaccagaacctgacccagcttaaagctgcagtgggtgagctctcagagaaatccaagctgcaggagatctaccaggagctgacccagctgaaggctgcagtgggtgagcttccagagaaatctaagctgcaggagatctaccaggagctgacccggctgaaggctgcagtgggtgagcttccagagaaatctaagcagcaggagatctaccaggagctgacccagctgaaggctgcagtggaacgcctgtgccacccctgtccctgggaatggacattcttccaaggaaactgttacttcatgtctaactcccagcggaactggcacgactccatcaccgcctgcaaagaagtgggggcccagctcgtcgtaatcaaaagtgctgaggagcagaacttcctacagctgcagtcttccagaagtaaccgcttcacctggatgggactttcagatctaaatcaggaaggcacgtggcaatgggtggacggctcacctctgttgcccagcttcaagcagtattggaacagaggagagcccaacaacgttggggaggaagactgcgcggaatttagtggcaatggctggaacgacgacaaatgtaatcttgccaaattctggatctgcaaaaagtccgcagcctcctgctccagggatgaagaacagtttctttctccagcccctgccaccccaaacccccctcctgcgtagcagaacttcacccccttttaagctacagttccttctctccatccttcgaccttcacaaaatctctgggactgttctttgtcagattcttcctcctttagaaggctgggtcccattctgtccttcttgtcatgcctccaatttcccctggtgtagagcttgtttttctggcccatccttggagctttatgagtgagctggtgtgggatgcctttgggggtggacttgtgttccaagaatccactctctcttccttttggagattaggatatttgggttgccatgtgtagctgctatgtcccctggggcgttatcttatacatgcaaacctaccatctgttcaacttccacctaccacctcctgcacccctttgatcggggacttactggttgcaagagctcattttgcaggctggaagcaccagggaattaattcccccagtcaaccaatggcacccagagagggcatggaggctccacgcaaccccttccacccccacatcttcctttgtcttatacatggcttccatttggctgtttctaagttgtattctttattttattattattattactatttttcgagatggagtttcactcttgtcgctcaggctggagtgccatggcgcgatcttggctcactgcaacctctgcctcccgggttcaagtgattctcctgcctcagcctcacgagtagctggaattacaggcaggcgccaccagacccggctaattttttgtatttttagtacagatggggtttctccgtgttggtcaggctggtcttgaactcccgacctcagatgatctgcccgcctcggcctcccaaaattgctgggattacaggtgtgagccaccgcgcctggcctattattttttgtaagaataaaacaggtttattgggatttgggactctgaacagttctgtctctactacctgatctcctcctaccacgactttgggatctagaggagctttggctccggctgtgacggctccggccgttctcactgcggctgcaccggcccccgctgcggtcactatttcttcctctgctaggtgaattgtgcctctcctggctctttgacatgtgctagtgagatttcttccttttcctttcggattccccatttcttttgtaggaatggtctggactagggttctccttccccgcagcctgtagtattcatcgtggtggcccaccctctctctccccttggagctcttgccaaaggaggagacaagcagaggtctctattggatttctcaacacctgaagaaagttgcagtgttttcctcttggacattgttgtatttcaaataaaccacaaatcatcattttccaccgagccactgggcagaattcacactgaagctgtcgtcctgcgtacataccatcgtccgttaaacagagaaagagctgcttggcattcttcttccgactggtactgaacatatatacttgcccctcaggtgaggttccaagttgcaactgaccttgaactgaatcactctccccacgttattttttaattactatttttttttaaagatggggtcttgctctgtcgccaggctggagtgcagtggcgcgatctaggctcactgcaacttccgcctcccgggttcaagcgattctcctgcctcagcctcccgagtagctgggactccactaaaagtacaaaaattagctgggcgtgcaccactgcgcccagctaattcttgtatttttggtagagacggggtttcaacatgttgaccaggatggtctcgatctcttgacctcgtgattcgcccgccgcgtcctcccaaagtgctgggattacaggcctgagccaccgcgcccagtctctccccacgttcttgaactcgggcagcacatcctcacagaaatctaggaactgttggtaggtttcttcctcgctgtactccaggcttgcttcggagtcatagtcatccctcctgcactgctcctttccaaacactgtaaacatgcttttaataagaagggtaggactggatgttgggaaatcatgtgaacatctatctccaaatctgcaagctcctgttttactgtagaagggacaattaactccatccttctccatgactctgaaatccaagggggggttccgggttttgccatgtggcgccattttccaactcattttcagcctgatccagcatcttctggacagcttccggtttttgtttcttctgtcgtttctgttcctcctcctctctctctttcctctgctgttcttcccattgttcctttaactttcgctcttgttcttgccgttttctagccacctcttccttttccttctttattctgaattcttcttgtgccttctgctctctcagcaaccactcctcatgtaatctttgcctctctcttccccatagcttttctagttgttgtttttcaataaaagtgtcctcctctttctgtgagagtcctgagtccctcagtggagcaagttcctgctggcgtttctttcgtttctccttcttcagggcggccctgtactttttgtggcttggtttctctggaaatgtcaccttttcgggcgcagccatcttgccggcaccgccccgcccctctagttgtatcctttataataaactggtaaacattgtaaccgcagattcagcccaatctggttcaactttgtgtaataaaatggcgagttgtttttcagttgtcgtggacccccaggttgcaagttacataccctgggcatgtccagatgaacgaagcgtgcaaatccacgtggaacctaagtgctcagaccgaggaacagggactgagttaagaagtggacaccacgtggcatgatccttgatccaatcagattgagccctggcgtgatccagtcagatcaagcctcctgaatcccctcattacaagatccaatcatatcatgcctcactaccctctgtatataaaatctgccccagcctccaacttggagagacagatttgggccagactcctgtgtccttgcttggctgccttgcaataaatttttctctctacaaaa

SEQ ID NO: 5043 - DNA, 4256 bp, Homo sapiens
  source 1..4256: mol_type = unassigned DNA
atcacagggtgggaaataaaagctgtggcccccaggagttctggacactgggggagagtggggtgacatgagtgactccaaggaaccaagactgcagcagctgggcctcctggaggaggaacagctgagaggccttggattccgacagactcgaggatacaagagcttagcagtgtccaaggtccccagctccataagtcaggaacaatccaggcaagacgcgatctaccagaacctgacccagcttaaagctgcagtgggtgagctctcagagaaatccaagctgcaggagatctaccaggagctgacccagctgaaggctgcagtgggtgagcttccagagaaatctaagctgcaggagatctaccaggagctgacccggctgaaggctgcagtgggtgagcttccagagaaatctaagctgcaggagatctaccaggagctgacctggctgaaggctgcagtgggtgagcttccagagaaatctaagatgcaggagatctaccaggagctgactcggctgaaggctgcagtgggtgagcttccagagaaatctaagcagcaggagatctaccaggagctgacccggctgaaggctgcagtgggtgagcttccagagaaatctaagcagcaggagatctaccaggagctgacccggctgaaggctgcagtgggtgagcttccagagaaatctaagcagcaggagatctaccaggagctgacccagctgaaggctgcagtggaacgcctgtgccacccctgtccctgggaatggacattcttccaaggaaactgttacttcatgtctaactcccagcggaactggcacgactccatcaccgcctgcaaagaagtgggggcccagctcgtcgtaatcaaaagtgctgaggagcagaacttcctacagctgcagtcttccagaagtaaccgcttcacctggatgggactttcagatctaaatcaggaaggcacgtggcaatgggtggacggctcacctctgttgcccagcttcaagcagtattggaacagaggagagcccaacaacgttggggaggaagactgcgcggaatttagtggcaatggctggaacgacgacaaatgtaatcttgccaaattctggatctgcaaaaagtccgcagcctcctgctccagggatgaagaacagtttctttctccagcccctgccaccccaaacccccctcctgcgtagcagaacttcacccccttttaagctacagttccttctctccatccttcgaccttcacaaaatctctgggactgttctttgtcagattcttcctcctttagaaggctgggtcccattctgtccttcttgtcatgcctccaatttcccctggtgtagagcttgtttttctggcccatccttggagctttatgagtgagctggtgtgggatgcctttgggggtggacttgtgttccaagaatccactctctcttccttttggagattaggatatttgggttgccatgtgtagctgctatgtcccctggggcgttatcttatacatgcaaacctaccatctgttcaacttccacctaccacctcctgcacccctttgatcggggacttactggttgcaagagctcattttgcaggctggaagcaccagggaattaattcccccagtcaaccaatggcacccagagagggcatggaggctccacgcaaccccttccacccccacatcttcctttgtcttatacatggcttccatttggctgtttctaagttgtattctttattttattattattattactatttttcgagatggagtttcactcttgtcgctcaggctggagtgccatggcgcgatcttggctcactgcaacctctgcctcccgggttcaagtgattctcctgcctcagcctcacgagtagctggaattacaggcaggcgccaccagacccggctaattttttgtatttttagtacagatggggtttctccgtgttggtcaggctggtcttgaactcccgacctcagatgatctgcccgcctcggcctcccaaaattgctgggattacaggtgtgagccaccgcgcctggcctattattttttgtaagaataaaacaggtttattgggatttgggactctgaacagttctgtctctactacctgatctcctcctaccacgactttgggatctagaggagctttggctccggctgtgacggctccggccgttctcactgcggctgcaccggcccccgctgcggtcactatttcttcctctgctaggtgaattgtgcctctcctggctctttgacatgtgctagtgagatttcttccttttcctttcggattccccatttcttttgtaggaatggtctggactagggttctccttccccgcagcctgtagtattcatcgtggtggcccaccctctctctccccttggagctcttgccaaaggaggagacaagcagaggtctctattggatttctcaacacctgaagaaagttgcagtgttttcctcttggacattgttgtatttcaaataaaccacaaatcatcattttccaccgagccactgggcagaattcacactgaagctgtcgtcctgcgtacataccatcgtccgttaaacagagaaagagctgcttggcattcttcttccgactggtactgaacatatatacttgcccctcaggtgaggttccaagttgcaactgaccttgaactgaatcactctccccacgttattttttaattactatttttttttaaagatggggtcttgctctgtcgccaggctggagtgcagtggcgcgatctaggctcactgcaacttccgcctcccgggttcaagcgattctcctgcctcagcctcccgagtagctgggactccactaaaagtacaaaaattagctgggcgtgcaccactgcgcccagctaattcttgtatttttggtagagacggggtttcaacatgttgaccaggatggtctcgatctcttgacctcgtgattcgcccgccgcgtcctcccaaagtgctgggattacaggcctgagccaccgcgcccagtctctccccacgttcttgaactcgggcagcacatcctcacagaaatctaggaactgttggtaggtttcttcctcgctgtactccaggcttgcttcggagtcatagtcatccctcctgcactgctcctttccaaacactgtaaacatgcttttaataagaagggtaggactggatgttgggaaatcatgtgaacatctatctccaaatctgcaagctcctgttttactgtagaagggacaattaactccatccttctccatgactctgaaatccaagggggggttccgggttttgccatgtggcgccattttccaactcattttcagcctgatccagcatcttctggacagcttccggtttttgtttcttctgtcgtttctgttcctcctcctctctctctttcctctgctgttcttcccattgttcctttaactttcgctcttgttcttgccgttttctagccacctcttccttttccttctttattctgaattcttcttgtgccttctgctctctcagcaaccactcctcatgtaatctttgcctctctcttccccatagcttttctagttgttgtttttcaataaaagtgtcctcctctttctgtgagagtcctgagtccctcagtggagcaagttcctgctggcgtttctttcgtttctccttcttcagggcggccctgtactttttgtggcttggtttctctggaaatgtcaccttttcgggcgcagccatcttgccggcaccgccccgcccctctagttgtatcctttataataaactggtaaacattgtaaccgcagattcagcccaatctggttcaactttgtgtaataaaatggcgagttgtttttcagttgtcgtggacccccaggttgcaagttacataccctgggcatgtccagatgaacgaagcgtgcaaatccacgtggaacctaagtgctcagaccgaggaacagggactgagttaagaagtggacaccacgtggcatgatccttgatccaatcagattgagccctggcgtgatccagtcagatcaagcctcctgaatcccctcattacaagatccaatcatatcatgcctcactaccctctgtatataaaatctgccccagcctccaacttggagagacagatttgggccagactcctgtgtccttgcttggctgccttgcaataaatttttctctctacaaaa

SEQ ID NO: 5044 - DNA, 4328 bp, Homo sapiens
  source 1..4328: mol_type = unassigned DNA
atcacagggtgggaaataaaagctgtggcccccaggagttctggacactgggggagagtggggtgacatgagtgactccaaggaaccaagactgcagcagctgggcctcctggaggaggaacagctgagaggccttggattccgacagactcgaggatacaagagcttagcagggtgtcttggccatggtcccctggtgctgcaactcctctccttcacgctcttggctgggctccttgtccaagtgtccaaggtccccagctccataagtcaggaacaatccaggcaagacgcgatctaccagaacctgacccagcttaaagctgcagtgggtgagctctcagagaaatccaagctgcaggagatctaccaggagctgacccagctgaaggctgcagtgggtgagcttccagagaaatctaagctgcaggagatctaccaggagctgacccggctgaaggctgcagtgggtgagcttccagagaaatctaagctgcaggagatctaccaggagctgacctggctgaaggctgcagtgggtgagcttccagagaaatctaagatgcaggagatctaccaggagctgactcggctgaaggctgcagtgggtgagcttccagagaaatctaagcagcaggagatctaccaggagctgacccggctgaaggctgcagtgggtgagcttccagagaaatctaagcagcaggagatctaccaggagctgacccggctgaaggctgcagtgggtgagcttccagagaaatctaagcagcaggagatctaccaggagctgacccagctgaaggctgcagtggaacgcctgtgccacccctgtccctgggaatggacattcttccaaggaaactgttacttcatgtctaactcccagcggaactggcacgactccatcaccgcctgcaaagaagtgggggcccagctcgtcgtaatcaaaagtgctgaggagcagaacttcctacagctgcagtcttccagaagtaaccgcttcacctggatgggactttcagatctaaatcaggaaggcacgtggcaatgggtggacggctcacctctgttgcccagcttcaagcagtattggaacagaggagagcccaacaacgttggggaggaagactgcgcggaatttagtggcaatggctggaacgacgacaaatgtaatcttgccaaattctggatctgcaaaaagtccgcagcctcctgctccagggatgaagaacagtttctttctccagcccctgccaccccaaacccccctcctgcgtagcagaacttcacccccttttaagctacagttccttctctccatccttcgaccttcacaaaatctctgggactgttctttgtcagattcttcctcctttagaaggctgggtcccattctgtccttcttgtcatgcctccaatttcccctggtgtagagcttgtttttctggcccatccttggagctttatgagtgagctggtgtgggatgcctttgggggtggacttgtgttccaagaatccactctctcttccttttggagattaggatatttgggttgccatgtgtagctgctatgtcccctggggcgttatcttatacatgcaaacctaccatctgttcaacttccacctaccacctcctgcacccctttgatcggggacttactggttgcaagagctcattttgcaggctggaagcaccagggaattaattcccccagtcaaccaatggcacccagagagggcatggaggctccacgcaaccccttccacccccacatcttcctttgtcttatacatggcttccatttggctgtttctaagttgtattctttattttattattattattactatttttcgagatggagtttcactcttgtcgctcaggctggagtgccatggcgcgatcttggctcactgcaacctctgcctcccgggttcaagtgattctcctgcctcagcctcacgagtagctggaattacaggcaggcgccaccagacccggctaattttttgtatttttagtacagatggggtttctccgtgttggtcaggctggtcttgaactcccgacctcagatgatctgcccgcctcggcctcccaaaattgctgggattacaggtgtgagccaccgcgcctggcctattattttttgtaagaataaaacaggtttattgggatttgggactctgaacagttctgtctctactacctgatctcctcctaccacgactttgggatctagaggagctttggctccggctgtgacggctccggccgttctcactgcggctgcaccggcccccgctgcggtcactatttcttcctctgctaggtgaattgtgcctctcctggctctttgacatgtgctagtgagatttcttccttttcctttcggattccccatttcttttgtaggaatggtctggactagggttctccttccccgcagcctgtagtattcatcgtggtggcccaccctctctctccccttggagctcttgccaaaggaggagacaagcagaggtctctattggatttctcaacacctgaagaaagttgcagtgttttcctcttggacattgttgtatttcaaataaaccacaaatcatcattttccaccgagccactgggcagaattcacactgaagctgtcgtcctgcgtacataccatcgtccgttaaacagagaaagagctgcttggcattcttcttccgactggtactgaacatatatacttgcccctcaggtgaggttccaagttgcaactgaccttgaactgaatcactctccccacgttattttttaattactatttttttttaaagatggggtcttgctctgtcgccaggctggagtgcagtggcgcgatctaggctcactgcaacttccgcctcccgggttcaagcgattctcctgcctcagcctcccgagtagctgggactccactaaaagtacaaaaattagctgggcgtgcaccactgcgcccagctaattcttgtatttttggtagagacggggtttcaacatgttgaccaggatggtctcgatctcttgacctcgtgattcgcccgccgcgtcctcccaaagtgctgggattacaggcctgagccaccgcgcccagtctctccccacgttcttgaactcgggcagcacatcctcacagaaatctaggaactgttggtaggtttcttcctcgctgtactccaggcttgcttcggagtcatagtcatccctcctgcactgctcctttccaaacactgtaaacatgcttttaataagaagggtaggactggatgttgggaaatcatgtgaacatctatctccaaatctgcaagctcctgttttactgtagaagggacaattaactccatccttctccatgactctgaaatccaagggggggttccgggttttgccatgtggcgccattttccaactcattttcagcctgatccagcatcttctggacagcttccggtttttgtttcttctgtcgtttctgttcctcctcctctctctctttcctctgctgttcttcccattgttcctttaactttcgctcttgttcttgccgttttctagccacctcttccttttccttctttattctgaattcttcttgtgccttctgctctctcagcaaccactcctcatgtaatctttgcctctctcttccccatagcttttctagttgttgtttttcaataaaagtgtcctcctctttctgtgagagtcctgagtccctcagtggagcaagttcctgctggcgtttctttcgtttctccttcttcagggcggccctgtactttttgtggcttggtttctctggaaatgtcaccttttcgggcgcagccatcttgccggcaccgccccgcccctctagttgtatcctttataataaactggtaaacattgtaaccgcagattcagcccaatctggttcaactttgtgtaataaaatggcgagttgtttttcagttgtcgtggacccccaggttgcaagttacataccctgggcatgtccagatgaacgaagcgtgcaaatccacgtggaacctaagtgctcagaccgaggaacagggactgagttaagaagtggacaccacgtggcatgatccttgatccaatcagattgagccctggcgtgatccagtcagatcaagcctcctgaatcccctcattacaagatccaatcatatcatgcctcactaccctctgtatataaaatctgccccagcctccaacttggagagacagatttgggccagactcctgtgtccttgcttggctgccttgcaataaatttttctctctacaaaa

SEQ ID NO: 5045 - DNA, 4310 bp, Homo sapiens
  source 1..4310: mol_type = unassigned DNA
atcacagggtgggaaataaaagctgtggcccccaggagttctggacactgggggagagtggggtgacatgagtgactccaaggaaccaagactgcagcagctgggcctcctggaggaggaacagctgagaggccttggattccgacagactcgaggatacaagagcttagcagggtgtcttggccatggtcccctggtgctgcaactcctctccttcacgctcttggctgggctccttgtccaagtgtccaaggtccccagctccataagtcaggaacaatccaggcaagacgcgatctaccagaacctgacccagcttaaagctgcagtgggtgagctctcagagaaatccaagctgcaggagatctaccaggagctgacccagctgaaggctgcagtgggtgagcttccagagaaatctaagctgcaggagatctaccaggagctgacccggctgaaggctgcagtgggtgagcttccagagaaatctaagctgcaggagatctaccaggagctgacctggctgaaggctgcagtgggtgagcttccagagaaatctaagatgcaggagatctaccaggagctgactcggctgaaggctgcagtgggtgagcttccagagaaatctaagcagcaggagatctaccaggagctgacccggctgaaggctgcagtgggtgagcttccagagaaatctaagcagcaggagatctaccaggagctgacccggctgaaggctgcagtgggtgagcttccagagaaatctaagcagcaggagatctaccaggagctgacccagctgaaggctgcagtggaacgcctgtgccacccctgtccctgggaatggacattcttccaaggaaactgttacttcatgtctaactcccagcggaactggcacgactccatcaccgcctgcaaagaagtgggggcccagctcgtcgtaatcaaaagtgctgaggagcagtcttccagaagtaaccgcttcacctggatgggactttcagatctaaatcaggaaggcacgtggcaatgggtggacggctcacctctgttgcccagcttcaagcagtattggaacagaggagagcccaacaacgttggggaggaagactgcgcggaatttagtggcaatggctggaacgacgacaaatgtaatcttgccaaattctggatctgcaaaaagtccgcagcctcctgctccagggatgaagaacagtttctttctccagcccctgccaccccaaacccccctcctgcgtagcagaacttcacccccttttaagctacagttccttctctccatccttcgaccttcacaaaatctctgggactgttctttgtcagattcttcctcctttagaaggctgggtcccattctgtccttcttgtcatgcctccaatttcccctggtgtagagcttgtttttctggcccatccttggagctttatgagtgagctggtgtgggatgcctttgggggtggacttgtgttccaagaatccactctctcttccttttggagattaggatatttgggttgccatgtgtagctgctatgtcccctggggcgttatcttatacatgcaaacctaccatctgttcaacttccacctaccacctcctgcacccctttgatcggggacttactggttgcaagagctcattttgcaggctggaagcaccagggaattaattcccccagtcaaccaatggcacccagagagggcatggaggctccacgcaaccccttccacccccacatcttcctttgtcttatacatggcttccatttggctgtttctaagttgtattctttattttattattattattactatttttcgagatggagtttcactcttgtcgctcaggctggagtgccatggcgcgatcttggctcactgcaacctctgcctcccgggttcaagtgattctcctgcctcagcctcacgagtagctggaattacaggcaggcgccaccagacccggctaattttttgtatttttagtacagatggggtttctccgtgttggtcaggctggtcttgaactcccgacctcagatgatctgcccgcctcggcctcccaaaattgctgggattacaggtgtgagccaccgcgcctggcctattattttttgtaagaataaaacaggtttattgggatttgggactctgaacagttctgtctctactacctgatctcctcctaccacgactttgggatctagaggagctttggctccggctgtgacggctccggccgttctcactgcggctgcaccggcccccgctgcggtcactatttcttcctctgctaggtgaattgtgcctctcctggctctttgacatgtgctagtgagatttcttccttttcctttcggattccccatttcttttgtaggaatggtctggactagggttctccttccccgcagcctgtagtattcatcgtggtggcccaccctctctctccccttggagctcttgccaaaggaggagacaagcagaggtctctattggatttctcaacacctgaagaaagttgcagtgttttcctcttggacattgttgtatttcaaataaaccacaaatcatcattttccaccgagccactgggcagaattcacactgaagctgtcgtcctgcgtacataccatcgtccgttaaacagagaaagagctgcttggcattcttcttccgactggtactgaacatatatacttgcccctcaggtgaggttccaagttgcaactgaccttgaactgaatcactctccccacgttattttttaattactatttttttttaaagatggggtcttgctctgtcgccaggctggagtgcagtggcgcgatctaggctcactgcaacttccgcctcccgggttcaagcgattctcctgcctcagcctcccgagtagctgggactccactaaaagtacaaaaattagctgggcgtgcaccactgcgcccagctaattcttgtatttttggtagagacggggtttcaacatgttgaccaggatggtctcgatctcttgacctcgtgattcgcccgccgcgtcctcccaaagtgctgggattacaggcctgagccaccgcgcccagtctctccccacgttcttgaactcgggcagcacatcctcacagaaatctaggaactgttggtaggtttcttcctcgctgtactccaggcttgcttcggagtcatagtcatccctcctgcactgctcctttccaaacactgtaaacatgcttttaataagaagggtaggactggatgttgggaaatcatgtgaacatctatctccaaatctgcaagctcctgttttactgtagaagggacaattaactccatccttctccatgactctgaaatccaagggggggttccgggttttgccatgtggcgccattttccaactcattttcagcctgatccagcatcttctggacagcttccggtttttgtttcttctgtcgtttctgttcctcctcctctctctctttcctctgctgttcttcccattgttcctttaactttcgctcttgttcttgccgttttctagccacctcttccttttccttctttattctgaattcttcttgtgccttctgctctctcagcaaccactcctcatgtaatctttgcctctctcttccccatagcttttctagttgttgtttttcaataaaagtgtcctcctctttctgtgagagtcctgagtccctcagtggagcaagttcctgctggcgtttctttcgtttctccttcttcagggcggccctgtactttttgtggcttggtttctctggaaatgtcaccttttcgggcgcagccatcttgccggcaccgccccgcccctctagttgtatcctttataataaactggtaaacattgtaaccgcagattcagcccaatctggttcaactttgtgtaataaaatggcgagttgtttttcagttgtcgtggacccccaggttgcaagttacataccctgggcatgtccagatgaacgaagcgtgcaaatccacgtggaacctaagtgctcagaccgaggaacagggactgagttaagaagtggacaccacgtggcatgatccttgatccaatcagattgagccctggcgtgatccagtcagatcaagcctcctgaatcccctcattacaagatccaatcatatcatgcctcactaccctctgtatataaaatctgccccagcctccaacttggagagacagatttgggccagactcctgtgtccttgcttggctgccttgcaataaatttttctctctacaaaa

SEQ ID NO: 5046 - DNA, 3620 bp, Homo sapiens
  source 1..3620: mol_type = unassigned DNA
atcacagggtgggaaataaaagctgtggcccccaggagttctggacactgggggagagtggggtgacatgagtgactccaaggaaccaagactgcagcagctgggcctcctggaggaggaacagctgagaggccttggattccgacagactcgaggatacaagagcttagcagggtgtcttggccatggtcccctggtgctgcaactcctctccttcacgctcttggctgggctccttgtccaagtgtccaaggtccccagctccataagtcaggaacaatccagaagtaaccgcttcacctggatgggactttcagatctaaatcaggaaggcacgtggcaatgggtggacggctcacctctgttgcccagcttcaagcagtattggaacagaggagagcccaacaacgttggggaggaagactgcgcggaatttagtggcaatggctggaacgacgacaaatgtaatcttgccaaattctggatctgcaaaaagtccgcagcctcctgctccagggatgaagaacagtttctttctccagcccctgccaccccaaacccccctcctgcgtagcagaacttcacccccttttaagctacagttccttctctccatccttcgaccttcacaaaatctctgggactgttctttgtcagattcttcctcctttagaaggctgggtcccattctgtccttcttgtcatgcctccaatttcccctggtgtagagcttgtttttctggcccatccttggagctttatgagtgagctggtgtgggatgcctttgggggtggacttgtgttccaagaatccactctctcttccttttggagattaggatatttgggttgccatgtgtagctgctatgtcccctggggcgttatcttatacatgcaaacctaccatctgttcaacttccacctaccacctcctgcacccctttgatcggggacttactggttgcaagagctcattttgcaggctggaagcaccagggaattaattcccccagtcaaccaatggcacccagagagggcatggaggctccacgcaaccccttccacccccacatcttcctttgtcttatacatggcttccatttggctgtttctaagttgtattctttattttattattattattactatttttcgagatggagtttcactcttgtcgctcaggctggagtgccatggcgcgatcttggctcactgcaacctctgcctcccgggttcaagtgattctcctgcctcagcctcacgagtagctggaattacaggcaggcgccaccagacccggctaattttttgtatttttagtacagatggggtttctccgtgttggtcaggctggtcttgaactcccgacctcagatgatctgcccgcctcggcctcccaaaattgctgggattacaggtgtgagccaccgcgcctggcctattattttttgtaagaataaaacaggtttattgggatttgggactctgaacagttctgtctctactacctgatctcctcctaccacgactttgggatctagaggagctttggctccggctgtgacggctccggccgttctcactgcggctgcaccggcccccgctgcggtcactatttcttcctctgctaggtgaattgtgcctctcctggctctttgacatgtgctagtgagatttcttccttttcctttcggattccccatttcttttgtaggaatggtctggactagggttctccttccccgcagcctgtagtattcatcgtggtggcccaccctctctctccccttggagctcttgccaaaggaggagacaagcagaggtctctattggatttctcaacacctgaagaaagttgcagtgttttcctcttggacattgttgtatttcaaataaaccacaaatcatcattttccaccgagccactgggcagaattcacactgaagctgtcgtcctgcgtacataccatcgtccgttaaacagagaaagagctgcttggcattcttcttccgactggtactgaacatatatacttgcccctcaggtgaggttccaagttgcaactgaccttgaactgaatcactctccccacgttattttttaattactatttttttttaaagatggggtcttgctctgtcgccaggctggagtgcagtggcgcgatctaggctcactgcaacttccgcctcccgggttcaagcgattctcctgcctcagcctcccgagtagctgggactccactaaaagtacaaaaattagctgggcgtgcaccactgcgcccagctaattcttgtatttttggtagagacggggtttcaacatgttgaccaggatggtctcgatctcttgacctcgtgattcgcccgccgcgtcctcccaaagtgctgggattacaggcctgagccaccgcgcccagtctctccccacgttcttgaactcgggcagcacatcctcacagaaatctaggaactgttggtaggtttcttcctcgctgtactccaggcttgcttcggagtcatagtcatccctcctgcactgctcctttccaaacactgtaaacatgcttttaataagaagggtaggactggatgttgggaaatcatgtgaacatctatctccaaatctgcaagctcctgttttactgtagaagggacaattaactccatccttctccatgactctgaaatccaagggggggttccgggttttgccatgtggcgccattttccaactcattttcagcctgatccagcatcttctggacagcttccggtttttgtttcttctgtcgtttctgttcctcctcctctctctctttcctctgctgttcttcccattgttcctttaactttcgctcttgttcttgccgttttctagccacctcttccttttccttctttattctgaattcttcttgtgccttctgctctctcagcaaccactcctcatgtaatctttgcctctctcttccccatagcttttctagttgttgtttttcaataaaagtgtcctcctctttctgtgagagtcctgagtccctcagtggagcaagttcctgctggcgtttctttcgtttctccttcttcagggcggccctgtactttttgtggcttggtttctctggaaatgtcaccttttcgggcgcagccatcttgccggcaccgccccgcccctctagttgtatcctttataataaactggtaaacattgtaaccgcagattcagcccaatctggttcaactttgtgtaataaaatggcgagttgtttttcagttgtcgtggacccccaggttgcaagttacataccctgggcatgtccagatgaacgaagcgtgcaaatccacgtggaacctaagtgctcagaccgaggaacagggactgagttaagaagtggacaccacgtggcatgatccttgatccaatcagattgagccctggcgtgatccagtcagatcaagcctcctgaatcccctcattacaagatccaatcatatcatgcctcactaccctctgtatataaaatctgccccagcctccaacttggagagacagatttgggccagactcctgtgtccttgcttggctgccttgcaataaatttttctctctacaaaa

SEQ ID NO: 5047 - DNA, 4052 bp, Homo sapiens
  source 1..4052: mol_type = unassigned DNA
atcacagggtgggaaataaaagctgtggcccccaggagttctggacactgggggagagtggggtgacatgagtgactccaaggaaccaagactgcagcagctgggcctcctggaggaggaacagctgagaggccttggattccgacagactcgaggatacaagagcttagcagggtgtcttggccatggtcccctggtgctgcaactcctctccttcacgctcttggctgggctccttgtccaagtgtccaaggtccccagctccataagtcaggaacaatccaggcaagacgcgatctaccagaacctgacccagcttaaagctgcagtgggtgagctctcagagaaatccaagctgcaggagatctaccaggagctgacccagctgaaggctgcagtgggtgagcttccagagaaatctaagctgcaggagatctaccaggagctgacccggctgaaggctgcagtgggtgagcttccagagaaatctaagctgcaggagatctaccaggagctgacctggctgaaggctgcagtggaacgcctgtgccacccctgtccctgggaatggacattcttccaaggaaactgttacttcatgtctaactcccagcggaactggcacgactccatcaccgcctgcaaagaagtgggggcccagctcgtcgtaatcaaaagtgctgaggagcagaacttcctacagctgcagtcttccagaagtaaccgcttcacctggatgggactttcagatctaaatcaggaaggcacgtggcaatgggtggacggctcacctctgttgcccagcttcaagcagtattggaacagaggagagcccaacaacgttggggaggaagactgcgcggaatttagtggcaatggctggaacgacgacaaatgtaatcttgccaaattctggatctgcaaaaagtccgcagcctcctgctccagggatgaagaacagtttctttctccagcccctgccaccccaaacccccctcctgcgtagcagaacttcacccccttttaagctacagttccttctctccatccttcgaccttcacaaaatctctgggactgttctttgtcagattcttcctcctttagaaggctgggtcccattctgtccttcttgtcatgcctccaatttcccctggtgtagagcttgtttttctggcccatccttggagctttatgagtgagctggtgtgggatgcctttgggggtggacttgtgttccaagaatccactctctcttccttttggagattaggatatttgggttgccatgtgtagctgctatgtcccctggggcgttatcttatacatgcaaacctaccatctgttcaacttccacctaccacctcctgcacccctttgatcggggacttactggttgcaagagctcattttgcaggctggaagcaccagggaattaattcccccagtcaaccaatggcacccagagagggcatggaggctccacgcaaccccttccacccccacatcttcctttgtcttatacatggcttccatttggctgtttctaagttgtattctttattttattattattattactatttttcgagatggagtttcactcttgtcgctcaggctggagtgccatggcgcgatcttggctcactgcaacctctgcctcccgggttcaagtgattctcctgcctcagcctcacgagtagctggaattacaggcaggcgccaccagacccggctaattttttgtatttttagtacagatggggtttctccgtgttggtcaggctggtcttgaactcccgacctcagatgatctgcccgcctcggcctcccaaaattgctgggattacaggtgtgagccaccgcgcctggcctattattttttgtaagaataaaacaggtttattgggatttgggactctgaacagttctgtctctactacctgatctcctcctaccacgactttgggatctagaggagctttggctccggctgtgacggctccggccgttctcactgcggctgcaccggcccccgctgcggtcactatttcttcctctgctaggtgaattgtgcctctcctggctctttgacatgtgctagtgagatttcttccttttcctttcggattccccatttcttttgtaggaatggtctggactagggttctccttccccgcagcctgtagtattcatcgtggtggcccaccctctctctccccttggagctcttgccaaaggaggagacaagcagaggtctctattggatttctcaacacctgaagaaagttgcagtgttttcctcttggacattgttgtatttcaaataaaccacaaatcatcattttccaccgagccactgggcagaattcacactgaagctgtcgtcctgcgtacataccatcgtccgttaaacagagaaagagctgcttggcattcttcttccgactggtactgaacatatatacttgcccctcaggtgaggttccaagttgcaactgaccttgaactgaatcactctccccacgttattttttaattactatttttttttaaagatggggtcttgctctgtcgccaggctggagtgcagtggcgcgatctaggctcactgcaacttccgcctcccgggttcaagcgattctcctgcctcagcctcccgagtagctgggactccactaaaagtacaaaaattagctgggcgtgcaccactgcgcccagctaattcttgtatttttggtagagacggggtttcaacatgttgaccaggatggtctcgatctcttgacctcgtgattcgcccgccgcgtcctcccaaagtgctgggattacaggcctgagccaccgcgcccagtctctccccacgttcttgaactcgggcagcacatcctcacagaaatctaggaactgttggtaggtttcttcctcgctgtactccaggcttgcttcggagtcatagtcatccctcctgcactgctcctttccaaacactgtaaacatgcttttaataagaagggtaggactggatgttgggaaatcatgtgaacatctatctccaaatctgcaagctcctgttttactgtagaagggacaattaactccatccttctccatgactctgaaatccaagggggggttccgggttttgccatgtggcgccattttccaactcattttcagcctgatccagcatcttctggacagcttccggtttttgtttcttctgtcgtttctgttcctcctcctctctctctttcctctgctgttcttcccattgttcctttaactttcgctcttgttcttgccgttttctagccacctcttccttttccttctttattctgaattcttcttgtgccttctgctctctcagcaaccactcctcatgtaatctttgcctctctcttccccatagcttttctagttgttgtttttcaataaaagtgtcctcctctttctgtgagagtcctgagtccctcagtggagcaagttcctgctggcgtttctttcgtttctccttcttcagggcggccctgtactttttgtggcttggtttctctggaaatgtcaccttttcgggcgcagccatcttgccggcaccgccccgcccctctagttgtatcctttataataaactggtaaacattgtaaccgcagattcagcccaatctggttcaactttgtgtaataaaatggcgagttgtttttcagttgtcgtggacccccaggttgcaagttacataccctgggcatgtccagatgaacgaagcgtgcaaatccacgtggaacctaagtgctcagaccgaggaacagggactgagttaagaagtggacaccacgtggcatgatccttgatccaatcagattgagccctggcgtgatccagtcagatcaagcctcctgaatcccctcattacaagatccaatcatatcatgcctcactaccctctgtatataaaatctgccccagcctccaacttggagagacagatttgggccagactcctgtgtccttgcttggctgccttgcaataaatttttctctctacaaaa

SEQ ID NO: 5048 - DNA, 105 bp, Homo sapiens
  source 1..105: mol_type = unassigned DNA
atgagtgactccaaggaaccaagactgcagcagctgggcctcctggaggaggaacagctgagaggccttggattccgacagactcgacgtaatcaaaagtgctga

SEQ ID NO: 5049 - DNA, 4280 bp, Homo sapiens
  source 1..4280: mol_type = unassigned DNA
atcacagggtgggaaataaaagctgtggcccccaggagttctggacactgggggagagtggggtgacatgagtgactccaaggaaccaagactgcagcagctgggcctcctggggtgtcttggccatggtcccctggtgctgcaactcctctccttcacgctcttggctgggctccttgtccaagttcttggcccagtgtccaaggtccccagctccataagtcaggaacaatccaggcaagacgcgatctaccagaacctgacccagcttaaagctgcagtgggtgagctctcagagaaatccaagctgcaggagatctaccaggagctgacccagctgaaggctgcagtgggtgagcttccagagaaatctaagctgcaggagatctaccaggagctgacccggctgaaggctgcagtgggtgagcttccagagaaatctaagctgcaggagatctaccaggagctgacctggctgaaggctgcagtgggtgagcttccagagaaatctaagatgcaggagatctaccaggagctgactcggctgaaggctgcagtgggtgagcttccagagaaatctaagcagcaggagatctaccaggagctgacccggctgaaggctgcagtgggtgagcttccagagaaatctaagcagcaggagatctaccaggagctgacccggctgaaggctgcagtgggtgagcttccagagaaatctaagcagcaggagatctaccaggagctgacccagctgaaggctgcagtggaacgcctgtgccacccctgtccctgggaatggacattcttccaaggaaactgttacttcatgtctaactcccagcggaactggcacgactccatcaccgcctgcaaagaagtgggggcccagctcgtcgtaatcaaaagtgctgaggagcagaacttcctacagctgcagtcttccagaagtaaccgcttcacctggatgggactttcagatctaaatcaggaaggcacgtggcaatgggtggacggctcacctctgttgcccagcttcaagcagtattggaacagaggagagcccaacaacgttggggaggaagactgcgcggaatttagtggcaatggctggaacgacgacaaatgtaatcttgccaaattctggatctgcaaaaagtccgcagcctcctgctccagggatgaagaacagtttctttctccagcccctgccaccccaaacccccctcctgcgtagcagaacttcacccccttttaagctacagttccttctctccatccttcgaccttcacaaaatctctgggactgttctttgtcagattcttcctcctttagaaggctgggtcccattctgtccttcttgtcatgcctccaatttcccctggtgtagagcttgtttttctggcccatccttggagctttatgagtgagctggtgtgggatgcctttgggggtggacttgtgttccaagaatccactctctcttccttttggagattaggatatttgggttgccatgtgtagctgctatgtcccctggggcgttatcttatacatgcaaacctaccatctgttcaacttccacctaccacctcctgcacccctttgatcggggacttactggttgcaagagctcattttgcaggctggaagcaccagggaattaattcccccagtcaaccaatggcacccagagagggcatggaggctccacgcaaccccttccacccccacatcttcctttgtcttatacatggcttccatttggctgtttctaagttgtattctttattttattattattattactatttttcgagatggagtttcactcttgtcgctcaggctggagtgccatggcgcgatcttggctcactgcaacctctgcctcccgggttcaagtgattctcctgcctcagcctcacgagtagctggaattacaggcaggcgccaccagacccggctaattttttgtatttttagtacagatggggtttctccgtgttggtcaggctggtcttgaactcccgacctcagatgatctgcccgcctcggcctcccaaaattgctgggattacaggtgtgagccaccgcgcctggcctattattttttgtaagaataaaacaggtttattgggatttgggactctgaacagttctgtctctactacctgatctcctcctaccacgactttgggatctagaggagctttggctccggctgtgacggctccggccgttctcactgcggctgcaccggcccccgctgcggtcactatttcttcctctgctaggtgaattgtgcctctcctggctctttgacatgtgctagtgagatttcttccttttcctttcggattccccatttcttttgtaggaatggtctggactagggttctccttccccgcagcctgtagtattcatcgtggtggcccaccctctctctccccttggagctcttgccaaaggaggagacaagcagaggtctctattggatttctcaacacctgaagaaagttgcagtgttttcctcttggacattgttgtatttcaaataaaccacaaatcatcattttccaccgagccactgggcagaattcacactgaagctgtcgtcctgcgtacataccatcgtccgttaaacagagaaagagctgcttggcattcttcttccgactggtactgaacatatatacttgcccctcaggtgaggttccaagttgcaactgaccttgaactgaatcactctccccacgttattttttaattactatttttttttaaagatggggtcttgctctgtcgccaggctggagtgcagtggcgcgatctaggctcactgcaacttccgcctcccgggttcaagcgattctcctgcctcagcctcccgagtagctgggactccactaaaagtacaaaaattagctgggcgtgcaccactgcgcccagctaattcttgtatttttggtagagacggggtttcaacatgttgaccaggatggtctcgatctcttgacctcgtgattcgcccgccgcgtcctcccaaagtgctgggattacaggcctgagccaccgcgcccagtctctccccacgttcttgaactcgggcagcacatcctcacagaaatctaggaactgttggtaggtttcttcctcgctgtactccaggcttgcttcggagtcatagtcatccctcctgcactgctcctttccaaacactgtaaacatgcttttaataagaagggtaggactggatgttgggaaatcatgtgaacatctatctccaaatctgcaagctcctgttttactgtagaagggacaattaactccatccttctccatgactctgaaatccaagggggggttccgggttttgccatgtggcgccattttccaactcattttcagcctgatccagcatcttctggacagcttccggtttttgtttcttctgtcgtttctgttcctcctcctctctctctttcctctgctgttcttcccattgttcctttaactttcgctcttgttcttgccgttttctagccacctcttccttttccttctttattctgaattcttcttgtgccttctgctctctcagcaaccactcctcatgtaatctttgcctctctcttccccatagcttttctagttgttgtttttcaataaaagtgtcctcctctttctgtgagagtcctgagtccctcagtggagcaagttcctgctggcgtttctttcgtttctccttcttcagggcggccctgtactttttgtggcttggtttctctggaaatgtcaccttttcgggcgcagccatcttgccggcaccgccccgcccctctagttgtatcctttataataaactggtaaacattgtaaccgcagattcagcccaatctggttcaactttgtgtaataaaatggcgagttgtttttcagttgtcgtggacccccaggttgcaagttacataccctgggcatgtccagatgaacgaagcgtgcaaatccacgtggaacctaagtgctcagaccgaggaacagggactgagttaagaagtggacaccacgtggcatgatccttgatccaatcagattgagccctggcgtgatccagtcagatcaagcctcctgaatcccctcattacaagatccaatcatatcatgcctcactaccctctgtatataaaatctgccccagcctccaacttggagagacagatttgggccagactcctgtgtccttgcttggctgccttgcaataaatttttctctctacaaaa

SEQ ID NO: 5050 - DNA, 939 bp, Homo sapiens
  source 1..939: mol_type = unassigned DNA
atgagtgactccaaggaaccaagactgcagcagctgggcctcctggaggaggaacagctgagaggccttggattccgacagactcgaggatacaagagcttagcagggtgtcttggccatggtcccctggtgctgcaactcctctccttcacgctcttggctgggctccttgtccaagtgtccaaggtccccagctccataagtcaggaacaatccaggcaagacgcgatctaccagaacctgacccagcttaaagctgcagtgggtgagctctcagagaaatccaagctgcaggagatctaccaggagctgacccagctgaaggctgcagtgggtgagcttccagagaaatctaagctgcaggagatctaccaggagctgacccggctgaaggctgcagtgggtgagcttccagagaaatctaagctgcaggagatctaccaggagctgacctggctgaaggctgcagtggaacgcctgtgccacccctgtccctgggaatggacattcttccaaggaaactgttacttcatgtctaactcccagcggaactggcacgactccatcaccgcctgcaaagaagtgggggcccagctcgtcgtaatcaaaagtgctgaggagcagaacttcctacagctgcagtcttccagaagtaaccgcttcacctggatgggactttcagatctaaatcaggaaggcacgtggcaatgggtggacggctcacctctgttgcccagcttcaagcagtattggaacagaggagagcccaacaacgttggggaggaagactgcgcggaatttagtggcaatggctggaacgacgacaaatgtaatcttgccaaattctggatctgcaaaaagtccgcagcctcctgctccagggatgaagaacagtttctttctccagcccctgccaccccaaacccccctcctgcgtag

SEQ ID NO: 5051 - DNA, 4661 bp, Homo sapiens
  source 1..4661: mol_type = unassigned DNA
cgctcccctcagctcctgcagtgctaattaagggagggagcagcggggagcttgcagtgaccaagagggtgttgaggctaggaggccacgataaacaggatacgataaaagtccttaaccaagacgcagatgggaagaagcgttagagcgagcagcactcacatctcaagaaccagcctttcaaacagtttccagagatggattatcctactttacttttggctcttcttcatgtatacagagctctatgtgaagaggtgctttggcatacatcagttccctttgccgagaacatgtctctagaatgtgtgtatccatcaatgggcatcttaacacaggtggagtggttcaagatcgggacccagcaggattccatagccattttcagccctactcatggcatggtcataaggaagccctatgctgagagggtttactttttgaattcaacgatggcttccaataacatgactcttttctttcggaatgcctctgaagatgatgttggctactattcctgctctctttacacttacccacagggaacttggcagaaggtgatacaggtggttcagtcagatagttttgaggcagctgtgccatcaaatagccacattgtttcggaacctggaaagaatgtcacactcacttgtcagcctcagatgacgtggcctgtgcaggcagtgaggtgggaaaagatccagccccgtcagatcgacctcttaacttactgcaacttggtccatggcagaaatttcacctccaagttcccaagacaaatagtgagcaactgcagccacggaaggtggagcgtcatcgtcatccccgatgtcacagtctcagactcggggctttaccgctgctacttgcaggccagcgcaggagaaaacgaaaccttcgtgatgagattgactgtagccgagggtaaaaccgataaccaatataccctctttgtggctggagggacagttttattgttgttgtttgttatctcaattaccaccatcattgtcattttccttaacagaaggagaaggagagagagaagagatctatttacagagtcctgggatacacagaaggcacccaataactatagaagtcccatctctaccagtcaacctaccaatcaatccatggatgatacaagagaggatatttatgtcaactatccaaccttctctcgcagaccaaagactagagtttaagcttattcttgacatgagtgcattagtaatgactcttatgtactcatgcatggatctttatgcaatttttttccactacccaaggtctaccttagatactagttgtctgaattgagttactttgataggaaaaatacttcattacctaaaatcatttttcatagaactgtttcagaaaacctgactctaactggtttatatacaaaagaaaacttactgtatcatataacagaatgatccaggggagattaagctttgggcaagggctatttaccagggcttaaatgttgtgtctagaattaagtatgggcataaactggcttctgaatccctttccagagtgttggatccatttccctggtcttggcctcactctcatgcaggctttcctcttgtgttggcaagatggctgccaactcttggcaattcatacatccttgtttctgtctggtagagagtttgcttctcaaatggagcaaacaaatttgattattttttcattgttaaataggcaacatgaccagaaaggatggaatggcttaagtaaactaagggttcacttctagagctgagaagcagggtcaaagcacaatactgggcaattcagagcatggttagaagaggaaaggggagtctcaaagctggagagtttaccaacaaatattgactgcagtgattaaccaagacatttttgttaactaaaaagtgaaatatgggatggattctagaaatggggtatctctgtccatacttctagaatccactctatcagcatagtccagaagaatacctggcagtagaagaaatgaatattcaagaggaagataaatgcgagagggcaatcctttactattctcatatttatttatctctcattctgtatagaattcttgccgccatcccaggtctagccttaggagcaaatgtagtagatagtcgaataataaataacttaatgttttggacatattttgtctacttttgagaattatttttaatatgtaaattctctcaaaagggtcaggcacctagttattattttttaatgattatgtgaaagttgaatataatataccactaaaagtgacagttgaaagtggtggcataggacggtagggtagaaatttgggagggaaaaaagaaattgggagggtacaggcaacaggagaaaggaatcaaaccacagaaaaatacaaagggaaacttctgcttcactattcagacaaagacagccctaatgacatcaccaacagtcaaagcaattagagaccatacctaatattgtttaaattctagatgtaggctaacaatgaaaagtatttgccaaactgaataaaactgtcatggttaccttgaaaggacaatggttattgttaaatatagtgatcattcatgtctaaaagattcattatttatctctaaagatttctaaagaccaccatctagaaaagattcattatgaaggctgtatttaaatatcaaagttgtggacttcatgataatcttaaataaagcaaatccaaattctcctgttgcctagacagattctaagatgtaatttacacttttaagctaattagtgagtattttatgattttagccttaaacaccatgtatgccaaataatgcacttgttttgtgaattacagaaatggtaagtgcccacatttctgtgaattataaaatttgtgagtttcttttaacccttttcaggagtgaaaaaataaaaacgaccatttcctggttgtgcttaagtatatgcaagaagggtaaactctcatttttattatgtttgcttaaagatctttttatacctggattcatgaaatgtttccacaaatatattagtgtaacaaacttgaaaggcagtttacaagaaagcactctactatcagatcaatcaaagattctgtgagtgaatttattggtttgcatggtgaagcaagcttagcatcaattaaaaggtaaataatttcttttctgaatggtaaagacaatcaaaatattactttctggaaaactccaataaccaaattctcaatgattagtgtatgtgagcaggaaaacatttttacagttgtagtatggggaaatataaatccaattttaagagagaaaattatgactgggtgtggaagggacagtatagtcagataccattgtcatggtggtttttactgggaacttcatgaaagacttttgtagcaaaccactgcagtattgcaaagcctccagaacatttggaacttgtctctttttccttgtgtgtgtttgtgtttttggtctctcattcaaaatattgatgagaactatttactctgtcctttcttctctatatattcttcctctacagagtgtagggttttttcaggaatttggagccatctgaagtcctcccaaaaattctctgacgtcttctgatgctcctgttataccctcaggggtaatgcttgtgaaattccattcattcattttctttctctggacatctttacttaccaaagcactttcattgtcatctttttaacatcattcttaattcgtgatagttttgggactctccctagtgtatgtttctccccctctactcttttgcacctatgattctgattgttactaagaaagcagatgaaaaacagatccacagaataaacgatcagaattccagtaaattctattttaaatacagatactttttacaagttgctgctttggaagcaaaatgcttcttaagttttacatatatatatatatatatacatatatatatacacatataatttatatcgatggataatacattaagaatctatgcttcctttgaatgccattaatatttatgttaaagtaaccaatgaaaggaaattactttgttataataagataggaagacttgttaatggagtacacagttttgtcagggaaagaacacatcttattgaactatgatgactatgcattgactatattattataagagataccttcaaactttatttaaagaactttaggtataatatgttgagaaaataaaatagaaatttcatttacttgtaatcatgcttaaaatgggaggcaggtaggtgaagatataatttttagtaaaaactccaatttatgttttaagtaattcagtgtattactaaaatactatatatataaacttaaaatacatgggttatcaatttaaaagacaaagtaagtaaaaatacttttagtaggcattcgtggattgtgaacatccaagttatattggtttgtatagaatggcattaagtaaaaattacagctgtataacagtagttttctaaattgagagagtccacattgtaattagagatcactgtgaccaaaatgcttctccttgatttataatgatgtactgtattttgtactgcttatatgaaatttcagcaagattgacgatattataaagatgcttataaagtgtaa

SEQ ID NO: 5052 - DNA, 921 bp, Homo sapiens
  source 1..921: mol_type = unassigned DNA
cctggcccctctgtcctgtggaaatgctggggcaagtggtcaccctcatactcctcctgctcctcaaggtgtatcagggcaaaggatgccagggatcagctgaccatgtggttagcatctcgggagtgcctcttcagttacaaccaaacagcatacagacgaaggttgacagcattgcatggaagaagttgctgccctcacaaaatggatttcatcacatattgaagtgggagaatggctctttgccttccaatacttccaatgatagattcagttttatagtcaagaacttgagtcttctcatcaaggcagctcagcagcaggacagtggcctctactgcctggaggtcaccagtatatctggaaaagttcagacagccacgttccaggtttttgtatttgaattcagattttggccgtttttggtgatcatcgtgattctaagcgcactgttccttggcacccttgcctgcttctgtgtgtggaggagaaagaggaaggagaagcagtcagagaccagtcccaaggaatttttgacaatttacgaagatgtcaaggatctgaaaaccaggagaaatcacgagcaggagcagacttttcctggaggggggagcaccatctactctatgatccagtcccagtcttctgctcccacgtcacaagaacctgcatatacattatattcattaattcagccttccaggaagtctggatccaggaagaggaaccacagcccttccttcaatagcactatctatgaagtgattggaaagagtcaacctaaagcccagaaccctgctcgattgagccgcaaagagctggagaactttgatgtttattcctagttgctgcagcaattctcacctttcttgcacatcagcatctgctttgggaattggcacagtggatgacggcacagga

SEQ ID NO: 5053 - DNA, 1215 bp, Homo sapiens
  source 1..1215: mol_type = unassigned DNA
cttgtgggaactgtcagaccagctccaggcgctggggctttctcagtggccttgtcagctcacagcaggcgttaacagcctctaattgaggaaactgtggctggacaggttgcaaggcagttctgctccccatcgtcctcttgctgactggggactgctgagcccgtgcacggcagagagtctggtggggtggaggggctggcctggcccctctgtcctgtggaaatgctggggcaagtggtcaccctcatactcctcctgctcctcaaggtgtatcagggcaaaggatgccagggatcagctgaccatgtggttagcatctcgggagtgcctcttcagttacaaccaaacagcatacagacgaaggttgacagcattgcatggaagaagttgctgccctcacaaaatggatttcatcacatattgaagtgggagaatggctctttgccttccaatacttccaatgatagattcagttttatagtcaagaacttgagtcttctcatcaaggcagctcagcagcaggacagtggcctctactgcctggaggtcaccagtatatctggaaaagttcagacagccacgttccaggtttttgtatttgataaagttgagaaaccccgcctacaggggcaggggaagatcctggacagagggagatgccaagtggctctgtcttgcttggtctccagggatggcaatgtgtcctatgcttggtacagagggagcaagctgatccagacagcagggaacctcacctacctggacgaggaggttgacattaatggcactcacacatatacctgcaatgtcagcaatcctgttagctgggaaagccacaccctgaatctcactcaggactgtcagaatgcccatcaggaattcagattttggccgtttttggtgatcatcgtgattctaagcgcactgttccttggcacccttgcctgcttctgtgtgtggaggagaaagaggaaggagaagcagtcagagaccagtcccaaggaatttttgacaatttacgaagatgtcaaggatctgaaaaccaggagaaatcacgagcaggagcagacttttcctggaggggggagcaccatctactctatgatccagtcccagtcttctgctcccacgtcacaagaacctgcatatacattatattcattaattcagccttccaggaagggtgacagattctattcattttctggctga

SEQ ID NO: 5054 - DNA, 1360 bp, Homo sapiens
  source 1..1360: mol_type = unassigned DNA
gctgactggggactgctgagcccgtgcacggcagagagtctggtggggtggaggggctggcctggcccctctgtcctgtggaaatgctggggcaagtggtcaccctcatactcctcctgctcctcaaggtgtatcagggcaaaggatgccagggatcagctgaccatgtggttagcatctcgggagtgcctcttcagttacaaccaaacagcatacagacgaaggttgacagcattgcatggaagaagttgctgccctcacaaaatggatttcatcacatattgaagtgggagaatggctctttgccttccaatacttccaatgatagattcagttttatagtcaagaacttgagtcttctcatcaaggcagctcagcagcaggacagtggcctctactgcctggaggtcaccagtatatctggaaaagttcagacagccacgttccaggtttttgtatttgaatctctgcttccagataaagttgagaaaccccgcctacaggggcaggggaagatcctggacagagggagatgccaagtggctctgtcttgcttggtctccagggatggcaatgtgtcctatgcttggtacagagggagcaagctgatccagacagcagggaacctcacctacctggacgaggaggttgacattaatggcactcacacatatacctgcaatgtcagcaatcctgttagctgggaaagccacaccctgaatctcactcaggactgtcagaatgcccatcaggaattcagattttggccgtttttggtgatcatcgtgattctaagcgcactgttccttggcacccttgcctgcttctgtgtgtggaggagaaagaggaaggagaagcagtcagagaccagtcccaaggaatttttgacaatttacgaagatgtcaaggatctgaaaaccaggagaaatcacgagcaggagcagacttttcctggaggggggagcaccatctactctatgatccagtcccagtcttctgctcccacgtcacaagaacctgcatatacattatattcattaattcagccttccaggaagtctggatccaggaagaggaaccacagcccttccttcaatagcactatctatgaagtgattggaaagagtcaacctaaagcccagaaccctgctcgattgagccgcaaagagctggagaactttgatgtttattcctagttgctgcagcaattctcacctttcttgcacatcagcatctgctttgggaattggcacagtggatgacggcacaggagtctctatagaacagttcctagtctggagaggatatggaaatttgttcttgttctatattttgttttgaaaatgatgtctaacaacca

SEQ ID NO: 5055 - DNA, 2463 bp, Homo sapiens
  source 1..2463: mol_type = unassigned DNA
ggccttgtcagctcacagcaggcgttaacagcctctaattgaggaaactgtggctggacaggttgcaaggcagttctgctccccatcgtcctcttgctgactggggactgctgagcccgtgcacggcagagagtctggtggggtggaggggctggcctggcccctctgtcctgtggaaatgctggggcaagtggtcaccctcatactcctcctgctcctcaaggtgtatcagggcaaaggatgccagggatcagctgaccatgtggttagcatctcgggagtgcctcttcagttacaaccaaacagcatacagacgaaggttgacagcattgcatggaagaagttgctgccctcacaaaatggatttcatcacatattgaagtgggagaatggctctttgccttccaatacttccaatgatagattcagttttatagtcaagaacttgagtcttctcatcaaggcagctcagcagcaggacagtggcctctactgcctggaggtcaccagtatatctggaaaagttcagacagccacgttccaggtttttgtatttgataaagttgagaaaccccgcctacaggggcaggggaagatcctggacagagggagatgccaagtggctctgtcttgcttggtctccagggatggcaatgtgtcctatgcttggtacagagggagcaagctgatccagacagcagggaacctcacctacctggacgaggaggttgacattaatggcactcacacatatacctgcaatgtcagcaatcctgttagctgggaaagccacaccctgaatctcactcaggactgtcagaatgcccatcaggaattcagattttggccgtttttggtgatcatcgtgattctaagcgcactgttccttggcacccttgcctgcttctgtgtgtggaggagaaagaggaaggagaagcagtcagagaccagtcccaaggaatttttgacaatttacgaagatgtcaaggatctgaaaaccaggagaaatcacgagcaggagcagacttttcctggaggggggagcaccatctactctatgatccagtcccagtcttctgctcccacgtcacaagaacctgcatatacattatattcattaattcagccttccaggaagtctggatccaggaagaggaaccacagcccttccttcaatagcactatctatgaagtgattggaaagagtcaacctaaagcccagaaccctgctcgattgagccgcaaagagctggagaactttgatgtttattcctagttgctgcagcaattctcacctttcttgcacatcagcatctgctttgggaattggcacagtggatgacggcacaggagtctctatagaacagttcctagtctggagaggatatggaaatttgttcttgttctatattttgttttgaaaatgatgtctaacaaccatgataagagcaaggctgttaaataatatcttccaatttacagatcagacatgaatgggtggaggggttaggttgttcacaaaaggccacattccaagtatttgtaatctagaaagtgttatgtaagtgatgttattagcatcgagattccctccacctgattttcaagctgtcacttgtttccttttctcccctctctgggttgactgcatttctagactctcgccggcccaggcccatcttccaaagcaagaggaaggaatgataatggtgactcaggggaagaagaaacagccctcctctgaaagcctggactgtccggctgtgaactggctggcaggttctgcacgtgggtgggggccagggcctgggctttactcaattgcagagaaaaaactttctccctgcatctcatacctttacctctggccagttggccaccagggggagtgggctgaagggagagtagatggtgcaaagcaagcccatctctaagtagaaaaatcacccagagcacatgctgacctgataactggggtgttgagaccagctttgtccatggtatgatgtttgatttatgaagacgcattgttagaaatccatttggcttcttcatagaagtggcttcccagaggaagaggcctctcagaaaccatgttctatttaagttctgagtcctgatgagtgttccccaggatgcacattgaagggagggctcaggcagctgagggctgagaatgaggcagttggaatctagacactatgctgggttccctgagtcgtcaggccagacatttcaacaaggctgtggggagcagggctgtgactctggctgagcccaggaaagcgacaagggtgaactgggagaggacttactcagagaccccaacaggtgatactgcacaaagcctggttcttcaattttcctaccctgtatctaacataggagtttcatataaaacggtgatatcatgcagatgcagtctgaattccttgcctgaattaaatttatgtatcctctcca

SEQ ID NO: 5056 - DNA, 1609 bp, Homo sapiens
  source 1..1609: mol_type = unassigned DNA
ttttctcctaaccgtcccggccaccgctgcctcagcctctgcctcccagcctctttctgagggaaaggacaagatgaagtggaaggcgcttttcaccgcggccatcctgcaggcacagttgccgattacagaggcacagagctttggcctgctggatcccaaactctgctacctgctggatggaatcctcttcatctatggtgtcattctcactgccttgttcctgagagtgaagttcagcaggagcgcagacgcccccgcgtaccagcagggccagaaccagctctataacgagctcaatctaggacgaagagaggagtacgatgttttggacaagagacgtggccgggaccctgagatggggggaaagccgcagagaaggaagaaccctcaggaaggcctgtacaatgaactgcagaaagataagatggcggaggcctacagtgagattgggatgaaaggcgagcgccggaggggcaaggggcacgatggcctttaccagggtctcagtacagccaccaaggacacctacgacgcccttcacatgcaggccctgccccctcgctaacagccaggggatttcaccactcaaaggccagacctgcagacgcccagattatgagacacaggatgaagcatttacaacccggttcactcttctcagccactgaagtattcccctttatgtacaggatgctttggttatatttagctccaaaccttcacacacagactgttgtccctgcactctttaagggagtgtactcccagggcttacggccctggccttgggccctctggtttgccggtggtgcaggtagacctgtctcctggcggttcctcgttctccctgggaggcgggcgcactgcctctcacagctgagttgttgagtctgttttgtaaagtccccagagaaagcgcagatgctagcacatgccctaatgtctgtatcactctgtgtctgagtggcttcactcctgctgtaaatttggcttctgttgtcaccttcacctcctttcaaggtaactgtactgggccatgttgtgcctccctggtgagagggccgggcagaggggcagatggaaaggagcctaggccaggtgcaaccagggagctgcaggggcatgggaaggtgggcgggcaggggagggtcagccagggcctgcgagggcagcgggagcctccctgcctcaggcctctgtgccgcaccattgaactgtaccatgtgctacaggggccagaagatgaacagactgaccttgatgagctgtgcacaaagtggcataaaaaacatgtggttacacagtgtgaataaagtgctgcggagcaagaggaggccgttgattcacttcacgctttcagcgaatgacaaaatcatctttgtgaaggcctcgcaggaagacccaacacatgggacctataactgcccagcggacagtggcaggacaggaaaaacccgtcaatgtactaggatactgctgcgtcattacagggcacaggccatggatggaaaacgctctctactctgctttttttctactgttttaatttatactggcatgctaaagccttcctattttgcataataaatgcttcagtgaaaatgca

SEQ ID NO: 5057 - DNA, 1678 bp, Homo sapiens
  source 1..1678: mol_type = unassigned DNA
tgctttctcaaaggccccacagtcctccacttcctggggaggtagctgcagaataaaaccagcagagactccttttctcctaaccgtcccggccaccgctgcctcagcctctgcctcccagcctctttctgagggaaaggacaagatgaagtggaaggcgcttttcaccgcggccatcctgcaggcacagttgccgattacagaggcacagagctttggcctgctggatcccaaactctgctacctgctggatggaatcctcttcatctatggtgtcattctcactgccttgttcctgagagtgaagttcagcaggagcgcagacgcccccgcgtaccagcagggccagaaccagctctataacgagctcaatctaggacgaagagaggagtacgatgttttggacaagagacgtggccgggaccctgagatggggggaaagccgagaaggaagaaccctcaggaaggcctgtacaatgaactgcagaaagataagatggcggaggcctacagtgagattgggatgaaaggcgagcgccggaggggcaaggggcacgatggcctttaccagggtctcagtacagccaccaaggacacctacgacgcccttcacatgcaggccctgccccctcgctaacagccaggggatttcaccactcaaaggccagacctgcagacgcccagattatgagacacaggatgaagcatttacaacccggttcactcttctcagccactgaagtattcccctttatgtacaggatgctttggttatatttagctccaaaccttcacacacagactgttgtccctgcactctttaagggagtgtactcccagggcttacggccctggccttgggccctctggtttgccggtggtgcaggtagacctgtctcctggcggttcctcgttctccctgggaggcgggcgcactgcctctcacagctgagttgttgagtctgttttgtaaagtccccagagaaagcgcagatgctagcacatgccctaatgtctgtatcactctgtgtctgagtggcttcactcctgctgtaaatttggcttctgttgtcaccttcacctcctttcaaggtaactgtactgggccatgttgtgcctccctggtgagagggccgggcagaggggcagatggaaaggagcctaggccaggtgcaaccagggagctgcaggggcatgggaaggtgggcgggcaggggagggtcagccagggcctgcgagggcagcgggagcctccctgcctcaggcctctgtgccgcaccattgaactgtaccatgtgctacaggggccagaagatgaacagactgaccttgatgagctgtgcacaaagtggcataaaaaacatgtggttacacagtgtgaataaagtgctgcggagcaagaggaggccgttgattcacttcacgctttcagcgaatgacaaaatcatctttgtgaaggcctcgcaggaagacccaacacatgggacctataactgcccagcggacagtggcaggacaggaaaaacccgtcaatgtactaggatactgctgcgtcattacagggcacaggccatggatggaaaacgctctctactctgctttttttctactgttttaatttatactggcatgctaaagccttcctattttgcataataaatgcttcagtgaaaatgca

SEQ ID NO: 5058 - DNA, 2558 bp, Homo sapiens
  source 1..2558: mol_type = unassigned DNA
agtccgggggcatcgcgatgctgctgcgcctgttgctggcctgggcggccgcagggcccacactgggccaggacccctgggctgctgagccccgtgccgcctgcggccccagcagctgctacgctctcttcccacggcgccgcaccttcctggaggcctggcgggcctgccgcgagctggggggcgacctggccactcctcggacccccgaggaggcccagcgtgtggacagcctggtgggtgcgggcccagccagccggctgctgtggatcgggctgcagcggcaggcccggcaatgccagctgcagcgcccactgcgcggcttcacgtggaccacaggggaccaggacacggctttcaccaactgggcccagccagcctctggaggcccctgcccggcccagcgctgtgtggccctggaggcaagtggcgagcaccgctggctggagggctcgtgcacgctggctgtcgacggctacctgtgccagtttggcttcgagggcgcctgcccggcgctgcaagatgaggcgggccaggccggcccagccgtgtataccacgcccttccacctggtctccacagagtttgagtggctgcccttcggctctgtggccgctgtgcagtgccaggctggcaggggagcctctctgctctgcgtgaagcagcctgagggaggtgtgggctggtcacgggctgggcccctgtgcctggggactggctgcagccctgacaacgggggctgcgaacacgaatgtgtggaggaggtggatggtcacgtgtcctgccgctgcactgagggcttccggctggcagcagacgggcgcagttgcgaggacccctgtgcccaggctccgtgcgagcagcagtgtgagcccggtgggccacaaggctacagctgccactgtcgcctgggtttccggccagcggaggatgatccgcaccgctgtgtggacacagatgagtgccagattgccggtgtgtgccagcagatgtgtgtcaactacgttggtggcttcgagtgttattgtagcgagggacatgagctggaggctgatggcatcagctgcagccctgcaggggccatgggtgcccaggcttcccaggacctcggagatgagttgctggatgacggggaggatgaggaagatgaagacgaggcctggaaggccttcaacggtggctggacggagatgcctgggatcctgtggatggagcctacgcagccgcctgactttgccctggcctatagaccgagcttcccagaggacagagagccacagataccctacccggagcccacctggccacccccgctcagtgcccccagggtcccctaccactcctcagtgctctccgtcacccggcctgtggtggtctctgccacgcatcccacactgccttctgcccaccagcctcctgtgatccctgccacacacccagctttgtcccgtgaccaccagatccccgtgatcgcagccaactatccagatctgccttctgcctaccaacccggtattctctctgtctctcattcagcacagcctcctgcccaccagccccctatgatctcaaccaaatatccggagctcttccctgcccaccagtcccccatgtttccagacacccgggtcgctggcacccagaccaccactcatttgcctggaatcccacctaaccatgcccctctggtcaccaccctcggtgcccagctaccccctcaagccccagatgcccttgtcctcagaacccaggccacccagcttcccattatcccaactgcccagccctctctgaccaccacctccaggtcccctgtgtctcctgcccatcaaatctctgtgcctgctgccacccagcccgcagccctccccaccctcctgccctctcagagccccactaaccagacctcacccatcagccctacacatccccattccaaagccccccaaatcccaagggaagatggccccagtcccaagttggccctgtggctgccctcaccagctcccacagcagccccaacagccctgggggaggctggtcttgccgagcacagccagagggatgaccggtggctgctggtggcactcctggtgccaacgtgtgtctttttggtggtcctgcttgcactgggcatcgtgtactgcacccgctgtggcccccatgcacccaacaagcgcatcactgactgctatcgctgggtcatccatgctgggagcaagagcccaacagaacccatgccccccaggggcagcctcacaggggtgcagacctgcagaaccagcgtgtgatggggtgcagacccccctcatggagtatggggcgctggacacatggccggggctgcaccagggacccatgggggctgcccagctggacagatggcttcctgctccccaggcccagccagggtcctctctcaaccactagacttggctctcaggaactctgcttcctggcccagcgctcgtgaccaaggatacaccaaagcccttaagacctcagggggcgggtgctggggtcttctccaataaatggggtgtcaaccttacccaagg

SEQ ID NO: 5059 - DNA, 2815 bp, Homo sapiens
  source 1..2815: mol_type = unassigned DNA
ccaggccgtgtgctctgcccagcgggctggctcaggcctcggtcagcagccgccaccgcggggccaatccggcctcagggacgcaccggagccgcctttccgggcctcaggcggattctccggcgcggcccgccccgcccctcggactccccgggccgcccccggcccccattcgggccgggcctcgctgcggcggcgactgagccaggctgggccgcgtccctgagtcccagagtcggcgcggcgcggcaggggcagccttccaccacggggagcccagctgtcagccgcctcacaggaagatgctgcgtcggcggggcagccctggcatgggtgtgcatgtgggtgcagccctgggagcactgtggttctgcctcacaggagccctggaggtccaggtccctgaagacccagtggtggcactggtgggcaccgatgccaccctgtgctgctccttctcccctgagcctggcttcagcctggcacagctcaacctcatctggcagctgacagataccaaacagctggtgcacagctttgctgagggccaggaccagggcagcgcctatgccaaccgcacggccctcttcccggacctgctggcacagggcaacgcatccctgaggctgcagcgcgtgcgtgtggcggacgagggcagcttcacctgcttcgtgagcatccgggatttcggcagcgctgccgtcagcctgcaggtggccgctccctactcgaagcccagcatgaccctggagcccaacaaggacctgcggccaggggacacggtgaccatcacgtgctccagctaccggggctaccctgaggctgaggtgttctggcaggatgggcagggtgtgcccctgactggcaacgtgaccacgtcgcagatggccaacgagcagggcttgtttgatgtgcacagcgtcctgcgggtggtgctgggtgcgaatggcacctacagctgcctggtgcgcaaccccgtgctgcagcaggatgcgcacggctctgtcaccatcacagggcagcctatgacattccccccagaggccctgtgggtgaccgtggggctgtctgtctgtctcattgcactgctggtggccctggctttcgtgtgctggagaaagatcaaacagagctgtgaggaggagaatgcaggagctgaggaccaggatggggagggagaaggctccaagacagccctgcagcctctgaaacactctgacagcaaagaagatgatggacaagaaatagcctgaccatgaggaccagggagctgctacccctccctacagctcctaccctctggctgcaatggggctgcactgtgagccctgcccccaacagatgcatcctgctctgacaggtgggctccttctccaaaggatgcgatacacagaccactgtgcagccttatttctccaatggacatgattcccaagtcatcctgctgccttttttcttatagacacaatgaacagaccacccacaaccttagttctctaagtcatcctgcctgctgccttatttcacagtacatacatttcttagggacacagtacactgaccacatcaccaccctcttcttccagtgctgcgtggaccatctggctgccttttttctccaaaagatgcaatattcagactgactgaccccctgccttatttcaccaaagacacgatgcatagtcaccccggccttgtttctccaatggccgtgatacactagtgatcatgttcagccctgcttccacctgcatagaatcttttcttctcagacagggacagtgcggcctcaacatctcctggagtctagaagctgtttcctttcccctccttcctcctcttgctctagccttaatactggccttttccctccctgccccaagtgaagacagggcactctgcgcccaccacatgcacagctgtgcatggagacctgcaggtgcacgtgctggaacacgtgtggttcccccctggcccagcctcctctgcagtgcccctctcccctgcccatcctccccacggaagcatgtgctggtcacactggttctccaggggtctgtgatggggcccctgggggtcagcttctgtccctctgccttctcacctctttgttcctttcttttcatgtatccattcagttgatgtttattgagcaactacagatgtcagcactgtgttaggtgctgggggccctgcgtgggaagataaagttcctccctcaaggactccccatccagctgggagacagacaactaactacactgcaccctgcggtttgcagggggctcctgcctggctccctgctccacacctcctctgtggctcaaggcttcctggatacctcacccccatcccacccataattcttacccagagcatggggttggggcggaaacctggagagagggacatagcccctcgccacggctagagaatctggtggtgtccaaaatgtctgtccaggtgtgggcaggtgggcaggcaccaaggccctctggacctttcatagcagcagaaaaggcagagcctggggcagggcagggccaggaatgctttggggacaccgaggggactgccccccacccccaccatggtgctattctggggctggggcagtcttttcctggcttgcctctggccagctcctggcctctggtagagtgagacttcagacgttctgatgccttccggatgtcatctctccctgccccaggaatggaagatgtgaggacttctaatttaaatgtgggactcggagggattttgtaaactgggggtatattttggggaaaataaatgtctttgtaaaaagctt

SEQ ID NO: 5060 - DNA, 3469 bp, Homo sapiens
  source 1..3469: mol_type = unassigned DNA
ccaggccgtgtgctctgcccagcgggctggctcaggcctcggtcagcagccgccaccgcggggccaatccggcctcagggacgcaccggagccgcctttccgggcctcaggcggattctccggcgcggcccgccccgcccctcggactccccgggccgcccccggcccccattcgggccgggcctcgctgcggcggcgactgagccaggctgggccgcgtccctgagtcccagagtcggcgcggcgcggcaggggcagccttccaccacggggagcccagctgtcagccgcctcacaggaagatgctgcgtcggcggggcagccctggcatgggtgtgcatgtgggtgcagccctgggagcactgtggttctgcctcacaggagccctggaggtccaggtccctgaagacccagtggtggcactggtgggcaccgatgccaccctgtgctgctccttctcccctgagcctggcttcagcctggcacagctcaacctcatctggcagctgacagataccaaacagctggtgcacagctttgctgagggccaggaccagggcagcgcctatgccaaccgcacggccctcttcccggacctgctggcacagggcaacgcatccctgaggctgcagcgcgtgcgtgtggcggacgagggcagcttcacctgcttcgtgagcatccgggatttcggcagcgctgccgtcagcctgcaggtggccgctccctactcgaagcccagcatgaccctggagcccaacaaggacctgcggccaggggacacggtgaccatcacgtgctccagctaccagggctaccctgaggctgaggtgttctggcaggatgggcagggtgtgcccctgactggcaacgtgaccacgtcgcagatggccaacgagcagggcttgtttgatgtgcacagcatcctgcgggtggtgctgggtgcaaatggcacctacagctgcctggtgcgcaaccccgtgctgcagcaggatgcgcacagctctgtcaccatcacaccccagagaagccccacaggagccgtggaggtccaggtccctgaggacccggtggtggccctagtgggcaccgatgccaccctgcgctgctccttctcccccgagcctggcttcagcctggcacagctcaacctcatctggcagctgacagacaccaaacagctggtgcacagtttcaccgaaggccgggaccagggcagcgcctatgccaaccgcacggccctcttcccggacctgctggcacaaggcaatgcatccctgaggctgcagcgcgtgcgtgtggcggacgagggcagcttcacctgcttcgtgagcatccgggatttcggcagcgctgccgtcagcctgcaggtggccgctccctactcgaagcccagcatgaccctggagcccaacaaggacctgcggccaggggacacggtgaccatcacgtgctccagctaccggggctaccctgaggctgaggtgttctggcaggatgggcagggtgtgcccctgactggcaacgtgaccacgtcgcagatggccaacgagcagggcttgtttgatgtgcacagcgtcctgcgggtggtgctgggtgcgaatggcacctacagctgcctggtgcgcaaccccgtgctgcagcaggatgcgcacggctctgtcaccatcacagggcagcctatgacattccccccagaggccctgtgggtgaccgtggggctgtctgtctgtctcattgcactgctggtggccctggctttcgtgtgctggagaaagatcaaacagagctgtgaggaggagaatgcaggagctgaggaccaggatggggagggagaaggctccaagacagccctgcagcctctgaaacactctgacagcaaagaagatgatggacaagaaatagcctgaccatgaggaccagggagctgctacccctccctacagctcctaccctctggctgcaatggggctgcactgtgagccctgcccccaacagatgcatcctgctctgacaggtgggctccttctccaaaggatgcgatacacagaccactgtgcagccttatttctccaatggacatgattcccaagtcatcctgctgccttttttcttatagacacaatgaacagaccacccacaaccttagttctctaagtcatcctgcctgctgccttatttcacagtacatacatttcttagggacacagtacactgaccacatcaccaccctcttcttccagtgctgcgtggaccatctggctgccttttttctccaaaagatgcaatattcagactgactgaccccctgccttatttcaccaaagacacgatgcatagtcaccccggccttgtttctccaatggccgtgatacactagtgatcatgttcagccctgcttccacctgcatagaatcttttcttctcagacagggacagtgcggcctcaacatctcctggagtctagaagctgtttcctttcccctccttcctcctcttgctctagccttaatactggccttttccctccctgccccaagtgaagacagggcactctgcgcccaccacatgcacagctgtgcatggagacctgcaggtgcacgtgctggaacacgtgtggttcccccctggcccagcctcctctgcagtgcccctctcccctgcccatcctccccacggaagcatgtgctggtcacactggttctccaggggtctgtgatggggcccctgggggtcagcttctgtccctctgccttctcacctctttgttcctttcttttcatgtatccattcagttgatgtttattgagcaactacagatgtcagcactgtgttaggtgctgggggccctgcgtgggaagataaagttcctccctcaaggactccccatccagctgggagacagacaactaactacactgcaccctgcggtttgcagggggctcctgcctggctccctgctccacacctcctctgtggctcaaggcttcctggatacctcacccccatcccacccataattcttacccagagcatggggttggggcggaaacctggagagagggacatagcccctcgccacggctagagaatctggtggtgtccaaaatgtctgtccaggtgtgggcaggtgggcaggcaccaaggccctctggacctttcatagcagcagaaaaggcagagcctggggcagggcagggccaggaatgctttggggacaccgaggggactgccccccacccccaccatggtgctattctggggctggggcagtcttttcctggcttgcctctggccagctcctggcctctggtagagtgagacttcagacgttctgatgccttccggatgtcatctctccctgccccaggaatggaagatgtgaggacttctaatttaaatgtgggactcggagggattttgtaaactgggggtatattttggggaaaataaatgtctttgtaaaaagctt

SEQ ID NO: 5061 - DNA, 1614 bp, Homo sapiens
  source 1..1614: mol_type = unassigned DNA
attcgggccgggcctcgctgcggcggcgactgagccaggctgggccgcgtccctgagtcccagagtcggcgcggcgcggcaggggcagccttccaccacggggagcccagctgtcagccgcctcacaggaagatgctgcgtcggcggggcagccctggcatgggtgtgcatgtgggtgcagccctgggagcactgtggttctgcctcacaggagccctggaggtccaggtccctgaagacccagtggtggcactggtgggcaccgatgccaccctgtgctgctccttctcccctgagcctggcttcagcctggcacagctcaacctcatctggcagctgacagataccaaacagctggtgcacagctttgctgagggccaggaccagggcagcgcctatgccaaccgcacggccctcttcccggacctgctggcacagggcaacgcatccctgaggctgcagcgcgtgcgtgtggcggacgagggcagcttcacctgcttcgtgagcatccgggatttcggcagcgctgccgtcagcctgcaggtggccgctccctactcgaagcccagcatgaccctggagcccaacaaggacctgcggccaggggacacggtgaccatcacgtgctccagctaccagggctaccctgaggctgaggtgttctggcaggatgggcagggtgtgcccctgactggcaacgtgaccacgtcgcagatggccaacgagcagggcttgtttgatgtgcacagcatcctgcgggtggtgctgggtgcaaatggcacctacagctgcctggtgcgcaaccccgtgctgcagcaggatgcgcacagctctgtcaccatcacaccccagagaagccccacaggagccgtggaggtccaggtccctgaggacccggtggtggccctagtgggcaccgatgccaccctgcgctgctccttctcccccgagcctggcttcagcctggcacagctcaacctcatctggcagctgacagacaccaaacagctggtgcacagtttcaccgaaggccgggaccagggcagcgcctatgccaaccgcacggccctcttcccggacctgctggcacaaggcaatgcatccctgaggctgcagcgcgtgcgtgtggcggacgagggcagcttcacctgcttcgtgagcatccgggatttcggcagcgctgccgtcagcctgcaggtggccgctccctactcgaagcccagcatgaccctggagcccaacaaggacctgcggccaggggacacggtgaccatcacgtgctccagctaccggggctaccctgaggctgaggtgttctggcaggatgggcagggtgtgcccctgactggcaacgtgaccacgtcgcagatggccaacgagcagggcttgtttgatgtgcacagcgtcctgcgggtggtgctgggtgcgaatggcacctacagctgcctggtgcgcaaccccgtgctgcagcaggatgcgcacggctctgtcaccatcacagggcagcctatgacattccccccaggcccagcctcctctgcagtgcccctctcccctgcccatcctccccacggaagcatgtgctggtcacactggttctccaggggtctgtga

SEQ ID NO: 5062 - DNA, 1162 bp, Homo sapiens
  source 1..1162: mol_type = unassigned DNA
attcgggccgggcctcgctgcggcggcgactgagccaggctgggccgcgtccctgagtcccagagtcggcgcggcgcggcaggggcagccttccaccacggggagcccagctgtcagccgcctcacaggaagatgctgcgtcggcggggcagccctggcatgggtgtgcatgtgggtgcagccctgggagcactgtggttctgcctcacaggagccctggaggtccaggtccctgaagacccagtggtggcactggtgggcaccgatgccaccctgtgctgctccttctcccctgagcctggcttcagcctggcacagctcaacctcatctggcagctgacagataccaaacagctggtgcacagctttgctgagggccaggaccagggcagcgcctatgccaaccgcacggccctcttcccggacctgcacagggcagcctatgacattccccccagaggccctgtgggtgaccgtggggctgtctgtctgtctcattgcactgctggtggccctggctttcgtgtgctggagaaagatcaaacagagctgtgaggaggagaatgcaggagctgaggaccaggatggggagggagaaggctccaagacagccctgcagcctctgaaacactctgacagcaaagaagatgatggacaagaaatagcctgaccatgaggaccagggagctgctacccctccctacagctcctaccctctggctgcaatggggctgcactgtgagccctgcccccaacagatgcatcctgctctgacaggtgggctccttctccaaaggatgcgatacacagaccactgtgcagccttatttctccaatggacatgattcccaagtcatcctgctgccttttttcttatagacacaatgaacagaccacccacaaccttagttctctaagtcatcctgcctgctgccttatttcacagtacatacatttcttagggacacagtacactgaccacatcaccaccctcttcttccagtgctgcgtggaccatctggctgccttttttctccaaaagatgcaatattcagactgactgaccccctgccttatttcaccaaagacacgatgcatagtcaccccggccttgtttctccaatggccgtgatacactagtgatcatgttcagccctgcttc

SEQ ID NO: 5063 - DNA, 649 bp, Homo sapiens
  source 1..649: mol_type = unassigned DNA
attcgggccgggcctcgctgcggcggcgactgagccaggctgggccgcgtccctgagtcccagagtcggcgcggcgcgtcttgcagtatcgcccagactggagtacagtggcgcgatttccactcactacaacctccgcctcctgggttcaagcaattctcctgcctcagcctcctgagtagctggcaggggcagccttccaccacggggagcccagctgtcagccgcctcacaggaagatgctgcgtcggcggggcagccctggcatgggtgtgcatgtgggtgcagccctgggagcactgtggttctgcctcacaggagccctggaggtccaggtccctgaagacccagtggtggcactggtgggcaccgatgccaccctgtgctgctccttctcccctgagcctggcttcagcctggcacagctcaacctcatctggcagctgacagataccaaacagctggtgcacagctttgctgagggccaggaccagggcagcgcctatgccaaccgcacggccctcttcccggacctgctggcacagggcaacgcatccctgaggctgcagcgcgtgcgtgtggcggacgagggcagcttcacctgcttcgtgagcatccgggatttcggcagcgctgccgtcagcctgca

SEQ ID NO: 5064 - DNA, 621 bp, Homo sapiens
  source 1..621: mol_type = unassigned DNA
tttcctcgggttgagaggggcccgggcgccgtcggacctgcagaccccggaagctgcggaccgggccgggtgggtgaatgcgcttttgcaggccccgggtctggagcgggcatgggggcagatctgtcccgtgttgaagcttaacgaagccaccggccggcgctgggaggcaggggcagccttccaccacggggagcccagctgtcagccgcctcacaggaagatgctgcgtcggcggggcagccctggcatgggtgtgcatgtgggtgcagccctgggagcactgtggttctgcctcacaggagccctggaggtccaggtccctgaagacccagtggtggcactggtgggcaccgatgccaccctgtgctgctccttctcccctgagcctggcttcagcctggcacagctcaacctcatctggcagctgacagataccaaacagctggtgcacagctttgctgagggccaggaccagggcagcgcctatgccaaccgcacggccctcttcccggacctgctggcacagggcaacgcatccctgaggctgcagcgcgtgcgtgtggcggacgagggcagcttcacctgcttcgtgagcatccgggatttcggcagcgctgc

SEQ ID NO: 5065 - DNA, 2690 bp, Homo sapiens
  source 1..2690: mol_type = unassigned DNA
cgggcctcgctgcggcggcgactgagccaggctgggccgcgtccctgagtcccagagtcggcgcggcgcggcaggggcagccttccaccacggggagcccagctgtcagccgcctcacaggaagatgctgcgtcggcggggcagccctggcatgggtgtgcatgtgggtgcagccctgggagcactgtggttctgcctcacaggagccctggaggtccaggtccctgaagacccagtggtggcactggtgggcaccgatgccaccctgtgctgctccttctcccctgagcctggcttcagcctggcacagctcaacctcatctggcagctgacagataccaaacagctggtgcacagctttgctgagggccaggaccagggcagcgcctatgccaaccgcacggccctcttcccggacctgctggcacagggcaacgcatccctgaggctgcagcgcgtgcgtgtggcggacgagggcagcttcacctgcttcgtgagcatccgggatttcggcagcgctgccgtcagcctgcaggtggccgctccctactcgaagcccagcatgaccctggagcccaacaaggacctgcggccaggggacacggtgaccatcacgtgctccagctaccagggctaccctgaggctgaggtgttctggcaggatgggcagggtgtgcccctgactggcaacgtgaccacgtcgcagatggccaacgagcagggcttgtttgatgtgcacagcatcctgcgggtggtgctgggtgcaaatggcacctacagctgcctggtgcgcaaccccgtgctgcagcaggatgcgcacagctctgtcaccatcacaccccagagaagccccacaggagccgtggaggtccaggtccctgaggacccggtggtggccctagtgggcaccgatgccaccctgcgctgctccttctcccccgagcctggcttcagcctggcacagctcaacctcatctggcagctgacagacaccaaacagctggtgcacagtttcaccgaaggccgggaccagggcagcgcctatgccaaccgcacggccctcttcccggacctgctggcacaaggcaatgcatccctgaggctgcagcgcgtgcgtgtggcggacgagggcagcttcacctgcttcgtgagcatccgggatttcggcagcgctgccgtcagcctgcaggtggccgctccctactcgaagcccagcatgaccctggagcccaacaaggacctgcggccaggggacacggtgaccatcacgtgctccagctaccggggctaccctgaggctgaggtgttctggcaggatgggcagggtgtgcccctgactggcaacgtgaccacgtcgcagatggccaacgagcagggcttgtttgatgtgcacagcgtcctgcgggtggtgctgggtgcgaatggcacctacagctgcctggtgcgcaaccccgtgctgcagcaggatgcgcacggctctgtcaccatcacagggcagcctatgacattccccccagaggccctgtgggtgaccgtggggctgtctgtctgtctcattgcactgctggtggccctggctttcgtgtgctggagaaagatcaaacagagctgtgaggaggagaatgcaggagctgaggaccaggatggggagggagaaggctccaagacagccctgcagcctctgaaacactctgacagcaaagaaggtaaagacacctgggcttgaggttgtgtctgtgtatgcacacatctgtgtgtgagaggctgagagggtgggtaggcatcatcctttcactagtgacctgaggccccctctgcagaagagcagcctcaacttccccctggtgagatggcagagggctgagtaaccaaggtcccagctgctctgatgggacccaaatacgacagaggcttaagcaggacaggagtttattcctccttcctgtgatagtgtgagcataggtaatcgtaaaaccactgatgacctggagccaggttccacttacctggattctgccctcttcaacttcaagctttcactcctaggtctaagaggctgtttgtgctcccacgccccctccagagccaagagggagagaaaggaaggatatgtttccttctagagcttgagtggaagtagcctgcatcacttccgcttacattccattggtcagaacccaggcatatgagccctaactcaggggaggctagaaaagtgttcagctgggtagccatgtccctggcgcacagtgggtggttagtaaatgtccatagtcattattgggcctattgttataatgtcagtgatgacatttggaaatacaggagataggtcatttccttcctgtttttcagaatcaaataaccatagaagagctgggcagatggagataaaaagtgtcagcttaggccaggcatggtacttcacacctgtaatctcagcactttgggaggccgaggtgggtggatcacttgaggtcaggagtttgagaccagcctggccaacatggtgaaaccctgtctctactaaaaatacaaaacttagccgggcgtggtggtgcatgcctgtaatcccagctacttgggaagctgaggcgggagaatcacttgaacctgggaggcagaggttgcagtgaactgagattgcacctgtgcactccagcctgggcaacagagcaagattccatctc

SEQ ID NO: 5066 - DNA, 628 bp, Homo sapiens
  source 1..628: mol_type = unassigned DNA
gggcgaaggtgtgggcgactggtgcacttccacaggcagccgtgggcagcatgaggggtcagattccgggaaggacaggcaggggcagccttccaccacggggagcccagctgtcagccgcctcacaggaagatgctgcgtcggcggggcagccctggcatgggtgtgcatgtgggtgcagccctgggagcactgtggttctgcctcacaggagccctggaggtccaggtccctgaagacccagtggtggcactggtgggcaccgatgccaccctgtgctgctccttctcccctgagcctggcttcagcctggcacagctcaacctcatctggcagctgacagataccaaacagctggtgcacagctttgctgagggccaggaccagggcagcgcctatgccaaccgcacggccctcttcccggacctgctggcacagggcaacgcatccctgaggctgcagcgcgtgcgtgtggcggacgagggcagcttcacctgcttcgtgagcatccgggatttcggcagcgctgccgtcagcctgcaggtggccgctccctactcgaagcccagcatgaccctggagcccaacaaggacctgcggccaggggacacggtgaccatcacgtgct

SEQ ID NO: 5067 - DNA, 507 bp, Homo sapiens
  source 1..507: mol_type = unassigned DNA
ctttgtctgctgcgggccgggcctggatcccgcggaggtccgcacgttcccgctcagggctgcaggagctgagcagggcgccttccctccgggctcctgctcccctgccctcccccaggtccgggcggcccccctcgcacaggagtcccgggaaccgcgggcgcccctcctgccctgggctgtggggcccgcggagagctgggggctcccggatcctaccccgcccccctttcctcgggttgagaggggcccgggcgccgtcggacctgcagaccccggaagctgcggaccgggccgggcaggggcagccttccaccacggggagcccagctgtcagccgcctcacaggaagatgctgcgtcggcggggcagccctggcatgggtgtgcatgtgggtgcagccctgggagcactgtggttctgcctcacaggagccctggaggtccaggtccctgaagacccagtggtggcactggtgggcaccgatgccaccctgtgctgctcctt

SEQ ID NO: 5068 - DNA, 1598 bp, Homo sapiens
  source 1..1598: mol_type = unassigned DNA
atcatgtgccctaaggggatggtggcggtggtggtggccgtggatgacggagactctcaggccttggcaggtgcgtctttcagttcccctcacacttcgggttcctcggggaggaggggctggaaccctagcccatcgtcaggacaaagatgctcaggctgctcttggctctcaacttattcccttcaattcaagtaacaggaaacaagattttggtgaagcagtcgcccatgcttgtagcgtacgacaatgcggtcaaccttagctgcaagtattcctacaatctcttctcaagggagttccgggcatcccttcacaaaggactggatagtgctgtggaagtctgtgttgtatatgggaattactcccagcagcttcaggtttactcaaaaacggggttcaactgtgatgggaaattgggcaatgaatcagtgacattctacctccagaatttgtatgttaaccaaacagatatttacttctgcaaaattgaagttatgtatcctcctccttacctagacaatgagaagagcaatggaaccattatccatgtgaaagggaaacacctttgtccaagtcccctatttcccggaccttctaagcccttttgggtgctggtggtggttggtggagtcctggcttgctatagcttgctagtaacagtggcctttattattttctgggtgaggagtaagaggagcaggctcctgcacagtgactacatgaacatgactccccgccgccccgggcccacccgcaagcattaccagccctatgccccaccacgcgacttcgcagcctatcgctcctgacacggacgcctatccagaagccagccggctggcagcccccatctgctcaatatcactgctctggataggaaatgaccgccatctccagccggccacctcaggcccctgttgggccaccaatgccaatttttctcgagtgactagaccaaatatcaagatcattttgagactctgaaatgaagtaaaagagatttcctgtgacaggccaagtcttacagtgccatggcccacattccaacttaccatgtacttagtgacttgactgagaagttagggtagaaaacaaaaagggagtggattctgggagcctcttccctttctcactcacctgcacatctcagtcaagcaaagtgtggtatccacagacattttagttgcagaagaaaggctaggaaatcattccttttggttaaatgggtgtttaatcttttggttagtgggttaaacggggtaagttagagtagggggagggataggaagacatatttaaaaaccattaaaacactgtctcccactcatgaaatgagccacgtagttcctatttaatgctgttttcctttagtttagaaatacatagacattgtcttttatgaattctgatcatatttagtcattttgaccaaatgagggatttggtcaaatgagggattccctcaaagcaatatcaggtaaaccaagttgctttcctcactccctgtcatgagacttcagtgttaatgttcacaatatactttcgaaagaataaaatagttctcctacatgaagaaagaatatgtcaggaaataa

SEQ ID NO: 5069 - DNA, 653 bp, Homo sapiens
  source 1..653: mol_type = unassigned DNA
aaagatgctcaggctgctcttggctctcaacttattcccttcaattcaagtaacagggaaacacctttgtccaagtcccctatttcccggaccttctaagcccttttgggtgctggtggtggttggtggagtcctggcttgctatagcttgctagtaacagtggcctttattattttctgggtgaggagtaagaggagcaggctcctgcacagtgactacatgaacatgactccccgccgccccgggcccacccgcaagcattaccagccctatgccccaccacgcgacttcgcagcctatcgctcctgacacggacgcctatccagaagccagccggctggcagcccccatctgctcaatatcactgctctggataggaaatgaccgccatctccagccggccacctcaggcccctgttgggccaccaatgccaatttttctcgagtgactagaccaaatatcaagatcattttgagactctgaaatgaagtaaaagagatttcctgtgacaggccaagtcttacagtgccatggcccacattccaacttaccatgtacttagtgacttgactgagaagttagggtagaaaacaaaaagggagtggattctgggagcctcttccctttctcactcacctgcacatctcagtc

SEQ ID NO: 5070 - DNA, 3555 bp, Homo sapiens
  source 1..3555: mol_type = unassigned DNA
taaagtcatcaaaacaacgttatatcctgtgtgaaatgctgcagtcaggatgccttgtggtttgagtgccttgatcatgtgccctaaggggatggtggcggtggtggtggccgtggatgacggagactctcaggccttggcaggtgcgtctttcagttcccctcacacttcgggttcctcggggaggaggggctggaaccctagcccatcgtcaggacaaagatgctcaggctgctcttggctctcaacttattcccttcaattcaagtaacaggaaacaagattttggtgaagcagtcgcccatgcttgtagcgtacgacaatgcggtcaaccttagctacaatgagaagagcaatggaaccattatccatgtgaaagggaaacacctttgtccaagtcccctatttcccggaccttctaagcccttttgggtgctggtggtggttggtggagtcctggcttgctatagcttgctagtaacagtggcctttattattttctgggtgaggagtaagaggagcaggctcctgcacagtgactacatgaacatgactccccgccgccccgggcccacccgcaagcattaccagccctatgccccaccacgcgacttcgcagcctatcgctcctgacacggacgcctatccagaagccagccggctggcagcccccatctgctcaatatcactgctctggataggaaatgaccgccatctccagccggccacctcaggcccctgttgggccaccaatgccaatttttctcgagtgactagaccaaatatcaagatcattttgagactctgaaatgaagtaaaagagatttcctgtgacaggccaagtcttacagtgccatggcccacattccaacttaccatgtacttagtgacttgactgagaagttagggtagaaaacaaaaagggagtggattctgggagcctcttccctttctcactcacctgcacatctcagtcaagcaaagtgtggtatccacagacattttagttgcagaagaaaggctaggaaatcattccttttggttaaatgggtgtttaatcttttggttagtgggttaaacggggtaagttagagtagggggagggataggaagacatatttaaaaaccattaaaacactgtctcccactcatgaaatgagccacgtagttcctatttaatgctgttttcctttagtttagaaatacatagacattgtcttttatgaattctgatcatatttagtcattttgaccaaatgagggatttggtcaaatgagggattccctcaaagcaatatcaggtaaaccaagttgctttcctcactccctgtcatgagacttcagtgttaatgttcacaatatactttcgaaagaataaaatagttctcctacatgaagaaagaatatgtcaggaaataaggtcactttatgtcaaaattatttgagtactatgggacctggcgcagtggctcatgcttgtaatcccagcactttgggaggccgaggtgggcagatcacttgagatcaggaccagcctggtcaagatggtgaaactccgtctgtactaaaaatacaaaatttagcttggcctggtggcaggcacctgtaatcccagctgcccaagaggctgaggcatgagaatcgcttgaacctggcaggcggaggttgcagtgagccgagatagtgccacagctctccagcctgggcgacagagtgagactccatctcaaacaacaacaacaacaacaacaacaacaacaaaccacaaaattatttgagtactgtgaaggattatttgtctaacagttcattccaatcagaccaggtaggagctttcctgtttcatatgtttcagggttgcacagttggtctctttaatgtcggtgtggagatccaaagtgggttgtggaaagagcgtccataggagaagtgagaatactgtgaaaaagggatgttagcattcattagagtatgaggatgagtcccaagaaggttctttggaaggaggacgaatagaatggagtaatgaaattcttgccatgtgctgaggagatagccagcattaggtgacaatcttccagaagtggtcaggcagaaggtgccctggtgagagctcctttacagggactttatgtggtttagggctcagagctccaaaactctgggctcagctgctcctgtaccttggaggtccattcacatgggaaagtattttggaatgtgtcttttgaagagagcatcagagttcttaagggactgggtaaggcctgaccctgaaatgaccatggatatttttctacctacagtttgagtcaactagaatatgcctggggaccttgaagaatggcccttcagtggccctcaccatttgttcatgcttcagttaattcaggtgttgaaggagcttaggttttagaggcacgtagacttggttcaagtctcgttagtagttgaatagcctcaggcaagtcactgcccacctaagatgatggttcttcaactataaaatggagataatggttacaaatgtctcttcctatagtataatctccataagggcatggcccaagtctgtctttgactctgcctatccctgacatttagtagcatgcccgacatacaatgttagctattggtattattgccatatagataaattatgtataaaaattaaactgggcaatagcctaagaaggggggaatattgtaacacaaatttaaacccactacgcagggatgaggtgctataatatgaggaccttttaacttccatcattttcctgtttcttgaaatagtttatcttgtaatgaaatataaggcacctcccacttttatgtatagaaagaggtcttttaatttttttttaatgtgagaaggaagggaggagtaggaatcttgagattccagatcgaaaatactgtactttggttgatttttaagtgggcttccattccatggatttaatcagtcccaagaagatcaaactcagcagtacttgggtgctgaagaactgttggatttaccctggcacgtgtgccacttgccagcttcttgggcacacagagttcttcaatccaagttatcagattgtatttgaaaatgacagagctggagagttttttgaaatggcagtggcaaataaataaatacttttttttaaatggaaagacttgatctatggtaataaatgattttgttttctgactggaaaaataggcctactaaagatgaatcacacttgagatgtttcttactcactctgcacagaaacaaagaagaaatgttatacagggaagtccgttttcactattagtatgaaccaagaaatggttcaaaaacagtggtaggagcaatgctttcatagtttcagatatggtagttatgaagaaaacaatgtcatttgctgctattattgtaagagtcttataattaatggtactcctataatttttgattgtgagctcacctatttgggttaagcatgccaatttaaagagaccaagtgtatgtacattatgttctacatattcagtgataaaattactaaactacta

SEQ ID NO: 5071 - DNA, 705 bp, Homo sapiens
  source 1..705: mol_type = unassigned DNA
atgccttgtggtttgagtgccttgatcatgtgccctaaggggatggtggcggtggtggtggccgtggatgacggagactctcaggccttggcaggaaacaagattttggtgaagcagtcgcccatgcttgtagcgtacgacaatgcggtcaaccttagctgcaagtattcctacaatctcttctcaagggagttccgggcatcccttcacaaaggactggatagtgctgtggaagtctgtgttgtatatgggaattactcccagcagcttcaggtttactcaaaaacggggttcaactgtgatgggaaattgggcaatgaatcagtgacattctacctccagaatttgtatgttaaccaaacagatatttacttctgcaaaattgaagttatgtatcctcctccttacctagacaatgagaagagcaatggaaccattatccatgtgaaagggaaacacctttgtccaagtcccctatttcccggaccttctaagcccttttgggtgctggtggtggttggtggagtcctggcttgctatagcttgctagtaacagtggcctttattattttctgggtgaggagtaagaggagcaggctcctgcacagtgactacatgaacatgactccccgccgccccgggcccacccgcaagcattaccagccctatgccccaccacgcgacttcgcagcctatcgctcctga

SEQ ID NO: 5072 - DNA, 5412 bp, Homo sapiens
  source 1..5412: mol_type = unassigned DNA
ctctgtctgggtccccaccttagtctacggtgtcgccttttctaactgcgagtgctaaggaagaggcgaggggcgggctccgaggctaggcgggcgctcggggttggagccgagggtctgggcaaaccggtgggtccctccccactgcgggagcggccagggtgggaaaaccgcggtcgggcgggcggggtagggccctcccgccgccgtggctcctggggaggccaggggtgaggagctgtcgccgcctttgcctctgcctcgagggccgcgctgaagagactggtaggagagcgccgcgggcggatggaggcgactcttcgccccgcctgagctcaggaggggctagcgcggagcgcgggtcccgcctccagccgcgggagcggccgcgcgagccaccactggaggaggaggaggaggagcggacgtcggcttctccccgcgggagcccccagcatggttgactatattgtggagtatgactatgatgctgtacatgatgatgaattaactattcgagttggagaaatcatcaggaatgtgaaaaagctacaggaggaagggtggctggaaggagaactaaatgggagaagaggaatgttccctgacaatttcgttaaggaaattaaaagagagacggaattcaaggatgacagtttgcccatcaaacgggaaaggcatgggaatgtagcaagtcttgtacaacgaataagcacctatggacttccagctggaggaattcagccacatccacaaaccaaaaacattaagaagaagaccaagaagcgtcagtgtaaagttctttttgagtacattccacaaaatgaggatgaactggagctgaaagtgggagatattattgatattaatgaagaggtagaagaaggctggtggagtggaaccctgaataacaagttgggactgtttccctcaaattttgtgaaagaattagaggtaacagatgatggtgaaactcatgaagcccaggacgattcagaaactgttttggctgggcctacttcacctataccttctctgggaaatgtgagtgaaactgcatctggatcagttacacagccaaagaaaattcgaggaattggatttggagacatttttaaagaaggctctgtgaaacttcggacaagaacatccagtagtgaaacagaagagaaaaaaccagaaaagcccttaatcctacagtcactgggacccaaaactcagagtgtggagataacaaaaacagataccgaaggtaaaattaaagctaaagaatattgtagaacattatttgcctatgaaggtactaatgaagatgaacttacttttaaagagggggagataatccatttgataagtaaggagactggagaagctggctggtggaggggcgaacttaatggtaaagaaggagtatttccagacaattttgctgtccagataaatgaacttgataaagactttccaaaaccaaagaaaccaccacctcctgctaaggctccagctccaaagcctgaactgatagctgcagagaagaaatatttttctttaaagcctgaagaaaaggatgaaaaatcaacactggaacagaaaccttctaaaccagcagctccacaagtcccacccaagaaacctactccacctaccaaagccagtaatttactgagatcttctggaacagtgtacccaaagcgacctgaaaaaccagttcctccaccacctcctatagccaagattaatggggaagtttctagcatttcatcaaaatttgaaactgagccagtatcaaaactaaagctagattctgaacagctgccccttagaccaaaatcagtagactttgattcacttacagtaaggacctccaaagaaacagatgttgtaaattttgatgacatagcttcctcagaaaacttgcttcatctcactgcaaatagaccaaagatgcctggaagaaggttgccgggccgtttcaatggtggacattctccaactcacagccccgaaaaaatcttgaagttaccaaaagaagaagacagtgccaacctgaagccatctgaattaaaaaaagatacatgctactctccaaagccatctgtgtacctttcaacaccttccagtgcttctaaagcaaatacaactgctttcctgactccattagaaatcaaagctaaagtggaaacagatgatgtgaaaaaaaattccctggatgaacttagagcccagattattgaattgttgtgcattgtagaagcactgaaaaaggatcacgggaaagaactggaaaaactgcgaaaagatttggaagaagagaagacaatgagaagtaatctagagatggaaatagagaagctgaaaaaagctgtcctgtcttcttgagtggtgtggacctggtgttcataatgttccagggattcagaagcaacgctatgaacttcagctgacttgttacttaaaaattgtgaattctgttgttgtgataaatatgagcaaatgaagtgtaatatctatagaaaagtagagtgagggtgaatttatatatatattttgttttgccaatatgaagaaaaagaggccttatttcttaactgtgctgggattgcaaacactttttaaaaaattgtttgcttgaaaatactactgaatataaataagaatgtgcacagtagtttttttattgaaacttgtattatttttaaagagatctatactataaatatggtgatatatttacaagtaatctgttaagatatactatttgagagggacagattagccttttagtaactatagtcactactttttccataatgcataagggatataaactctgtgtgtgtgtgtgtgtgtgtgtgtgtgtgtgtgtgtgtgtgtatatatatatatatatttttacttttatcctcttaccgaaggttacactgttgtgcctgtttgtctgcaatgctgtttatattttgggtgatgaaataggagtttcctagctatataaaccagattactcacccatgcatatagtaagaactaatgaataatcaaaataatttcatcaacttttagaatattttatgttgcttgcactataggagtcataaaaggaacttagttaaaatatgttggattgttaaacatttggggaaatatgaactgtattttaaatttgttaggtctgaagaatctaaaactgttaatttaacccttaacttgtgcctagaaactacagcacatataaaatatgtaaacaccagcctgttgctgtacttttctgcttattttacagcctcaaatatttctcattatcttgtcacttagttcttcatgtttctccttctgacttttaataatggtaataggaaaacaaaacccaaagcttttcagaacttcagtgtgaggtttcctattttgacaagttaacttgtaaatactcaggttttacgatgtataatttacctaatagaccaaactaactcatggagatattttgaactattatttaggtacaaactttataaagaatgttagtatgtcataaaatataacattacagcttatttaaaaccaaatatagttgaacatatttaaaatacattttcacagaatggatgaattagttgtttcttcagagttacttatgaacagttgaatgctttaaaatgttctgtctgtaggtaacatctaaaacacaagtgggtttatttaaatttttaaaatttgaaattttttatttgcaaaaaattgttttatgctttattatatcgcaaatgagtgtcagatttttgagtaccaatgatcatgcttccattttttttagttttaaaccaccaaaccaatatttttcctttaaattttaatcttataatatagaaatcttatgtaaatgaaattttgtcatgtttcaaataaagagaactgaagtagaaaatagaaatgccagtaaacaacataatgtttaatttacaacttacattaggggtttgggggaatgctaattatatattgagaatatacattagaactcttcaaaatgggctcttctaatgaggtcactactgaacaaaattgttccctcttctgttaaatagaataggtttaaatgactagtcaaatgaattattttcttcttgttaaataaattaaatcttactttcttttaatgaccaaccttaggtaaaacaaaaatattgtaatcctagaaattatcctccagctttctcacctgaaaatctattgaagtgatccctggtcatcctaataatgggatgagggaagtttccagcagatttcaggctgttcttaaagtttttgttggtcattttctcaatagtacatgaaatcaagatgcttatgagcatggaaatgtatttaaagtttttgcttgtgtcctcctcagtcagaatagaaaagtaactgaaatacttttacctttctgtccttgataaaatagtaaagaaaaccaaacaaacccaggcctgatgggaaaaatgattcctttattctagcaacttactttctgttggtatgggaaatgttattaatttctattactaaagttcatatcacaaaatgatatttaataataaccttggggtaaatcatgaattttttttctacgtgtgagtataaaagacaaaagttgaacagcatggaatctcattgccaaattattagtgaatgtatagttcaggtattctttgagacacacagtatcattaatttctgaattgtatttcagtgttattttttgtttgtgaccactaagcttctgtcttaatacaaagctgttaccttctacagaatttaagtctgaagatgtaaagagagaacaggccttgtgtaacagaagatactcttttttatgctccttactgtgatcacagaaaaattaaaaatccaagtgctctctagatttgttgataaacattttatgcttgcatttaaacttgaaatgtatgagcagaatgagacaatcagttaaatcagaaatgagaagtattataatgtaaaggccttgttttgctgtagcaataaaatgaccaagtgcaatgacttgatttaataaaatcatattttaaaagttgctgctatgaatatttttggctataaaattttaccctgacttgctttcaataactgttacgtaatgcagttgatgttgtaacctaacattccaaaaaaaaaattgagagggggaatctcaaaatagtatatacttcactaacttgtttacaggtgctgtatttaaaagcatgcttctctctcaaaaagaaaaattaaaggattttattgccagtcgtgtcagtctttattggttattttttgttaactttagcatttgtgtatttcagagtatgatgaaaattatattacttcaatttccaaatacaagaataaatagtaaaccaaaaacattaaaaa

SEQ ID NO: 5073 - DNA, 2293 bp, Homo sapiens
  source 1..2293: mol_type = unassigned DNA
aaaggcggtctagatgtgcagaaggtgcaagccagagctcaggcagaacttccagagtgcatctgggatctgcatttgccactggttgcagatcaggcggacgaggagccgggaaggcagagccatgtggctgccccctgctctgctccttctcagcctctcaggctgtttctccatccaaggcccagagtctgtgagagccccagagcaggggtccctgacggttcaatgccactataagcaaggatgggagacctacattaagtggtggtgccgaggggtgcgctgggatacatgcaagatcctcattgaaaccagagggtcggagcaaggagagaagagtgaccgtgtgtccatcaaggacaatcagaaagaccgcacgttcactgtgaccatggaggggctcaggcgagatgacgcagatgtttactggtgtgggattgaaagaagaggacctgaccttgggactcaagtgaaagtgatcgttgacccagagggagcggcttccacaacagcaagctcacctaccaacagcaatatggcagtgttcatcggctcccacaagaggaaccactacatgctcctggtatttgtgaaggtgcccatcttgctcatcttggtcactgccatcctctggttgaaggggtctcagagggtccctgaggagccaggggaacagcctatctacatgaacttctccgaacctctgactaaagacatggccacttagagagatggatctgcagagccttcctgccctggccacgtttccagaagagactcgggctgtggaaggaacatctacgagtcctcgggatgcagtgactgagataggggccctgggcctccgccctggccttggagctggtgggcacctccctgttctgcacagctcagggacttagccaggtcctctcctgagccaccatcacctcctggggtgccagcacctgttctcttggtcaggagctgtagagatggagctcaagcactggacgactctgtccccactgctggaataactcgggcacagagcatgggaccaaagtacagaaagaggttgggggagacccccccagccctagacttccatcattccggagaccaactcaacaccgtctttgcctgagaacctgatatatccgtgtttttaaatttttttttttctagcaaagttgggttttaatgacttatgttcataggaaacctctctgatcccacacacaaggagggtgattctgggatgagttcctggttctagggcatgaggggctggatggaccctgtccccagggaggacatggctctgagtccacagggctgaggaggcaatgggaacctccctggcccggcccggtgcttgtcctccccctcccacctcttcctcctcctagctccccaagctccctgcctattcccccacctccgaggggctgcagcttgggagcctcctcagcatgacagcttgggtctcctccccaaaagagcctgtcaggcctcaagaaccacctccaggtggggagggcagtaacgaaaaccatcgcaggaaatggcaccctcccttttcggtgatgttgaaatcatgttactaatgaaaactgtcctagggaagtggttctgtctcctcacaggcttcacccacggcgatgaggcccttgaatgtggtcactttgtgctgtatggttgagggaccctcacaccaaagggaccttcccatgtgagatgtgctcccgcccccacctgcccacaagcaaacacaccacacatgttcggcatgttgccctttgaacacccatgaggacgcctccaacctgctcttggttctaatagggagtactgactgtcagcagtggataaaggagaggggaccctctggtccctagcatggcacccagagcctcccctcttcttgtccttcagccaaagagaaactttctctgactttgaactgaatttaggtctctggccaatgatgggcctgaaaattccataatggccagagaggagagttcgagcccggctaagatcccctgagtcattctgtgagggaccaagacccacagtccaccagccccagggccctacctcctggaatgctttcctggatccagcttcccgaagatccgaccagacccagggaggacggcaccgctccgcgggagggaaagccaaagcatggtgcttcaccagctggactcaggggcgaggggacatgggcgcttgtcaacgtgatgtcattcttttcccaccgtttcttcctgttgatattcaatgaatccgtcaatctctctgg

SEQ ID NO: 5074 - DNA, 2286 bp, Homo sapiens
  source 1..2286: mol_type = unassigned DNA
tctagatgtgcagaaggtgcaagccagagctcaggcagaacttccagagtgcatctgggatctgcatttgccactggttgcagatcaggcggacgaggagccgggaaggcagagccatgtggctgccccctgctctgctccttctcagcctctcaggctgtttctccatccaaggcccagagtctgtgagagccccagagcaggggtccctgacggttcaatgccactataagcaaggatgggagacctacattaagtggtggtgccgaggggtgcgctgggatacatgcaagatcctcattgaaaccagagggtcggagcaaggagagaagagtgaccgtgtgtccatcaaggacaatcagaaagaccgcacgttcactgtgaccatggaggggctcaggcgagatgacgcagatgtttactggtgtgggattgaaagaagaggacctgaccttgggactcaagtgaaagtgatcgttgacccagagggagcggcttccacaacagcaagctcacctaccaacagcaatatggcagtgttcatcggctcccacaagaggaaccactacatgctcctggtatttgtgaaggtgcccatcttgctcatcttggtcactgccatcctctggttgaaggggtctcagagggtccctgaggagccaggggaacagcctatctacatgaacttctccgaacctctgactaaagacatggccacttagagagatggatctgcagagccttcctgccctggccacgtttccagaagagactcgggctgtggaaggaacatctacgagtcctcgggatgcagtgactgagataggggccctgggcctccgccctggccttggagctggtgggcacctccctgttctgcacagctcagggacttagccaggtcctctcctgagccaccatcacctcctggggtgccagcacctgttctcttggtcaggagctgtagagatggagctcaagcactggacgactctgtccccactgctggaataactcgggcacagagcatgggaccaaagtacagaaagaggttgggggagacccccccagccctagacttccatcattccggagaccaactcaacaccgtctttgcctgagaacctgatatatccgtgtttttaaatttttttttttctagcaaagttgggttttaatgacttatgttcataggaaacctctctgatcccacacacaaggagggtgattctgggatgagttcctggttctagggcatgaggggctggatggaccctgtccccagggaggacatggctctgagtccacagggctgaggaggcaatgggaacctccctggcccggcccggtgcttgtcctccccctcccacctcttcctcctcctagctccccaagctccctgcctattcccccacctccgaggggctgcagcttgggagcctcctcagcatgacagcttgggtctcctccccaaaagagcctgtcaggcctcaagaaccacctccaggtggggagggcagtaacgaaaaccatcgcaggaaatggcaccctcccttttcggtgatgttgaaatcatgttactaatgaaaactgtcctagggaagtggttctgtctcctcacaggcttcacccacggcgatgaggcccttgaatgtggtcactttgtgctgtatggttgagggaccctcacaccaaagggaccttcccatgtgagatgtgctcccgcccccacctgcccacaagcaaacacaccacacatgttcggcatgttgccctttgaacacccatgaggacgcctccaacctgctcttggttctaatagggagtactgactgtcagcagtggataaaggagaggggaccctctggtccctagcatggcacccagagcctcccctcttcttgtccttcagccaaagagaaactttctctgactttgaactgaatttaggtctctggccaatgatgggcctgaaaattccataatggccagagaggagagttcgagcccggctaagatcccctgagtcattctgtgagggaccaagacccacagtccaccagccccagggccctacctcctggaatgctttcctggatccagcttcccgaagatccgaccagacccagggaggacggcaccgctccgcgggagggaaagccaaagcatggtgcttcaccagctggactcaggggcgaggggacatgggcgcttgtcaacgtgatgtcattcttttcccaccgtttcttcctgttgatattcaatgaatccgtcaatctctctgga

SEQ ID NO: 5075 - DNA, 1805 bp, Homo sapiens
  source 1..1805: mol_type = unassigned DNA
aagttcaagggcgagagtgagtaccagcagaaggctgggagtctgtagtttgttcctgctgccaggctccactgaggggaacggggacctgtctgaagagaagatgcccctgctgacactctacctgctcctcttctggctctcaggctactccattgtcactcaaatcaccggtccaacaacagtgaatggcttggagcggggctccttgaccgtgcagtgtgtttacagatcaggctgggagacctacttgaagtggtggtgtcgaggagctatttggcgtgactgcaagatccttgttaaaaccagtgggtcagagcaggaggtgaagagggaccgggtgtccatcaaggacaatcagaaaaaccgcacgttcactgtgaccatggaggatctcatgaaaactgatgctgacacttactggtgtggaattgagaaaactggaaatgaccttggggtcacagttcaagtgaccattgacccagcaccagtcacccaagaagaaactagcagctccccaactctgaccggccaccacttggacaacaggagtgagggttcccaggctgcaaactacagacctgcagctcatcaggcacaagctcctgaagctcagtgtcctcctgcccctcatcttcaccatattgctgctgcttttggtggccgcctcactcttggcttggaggatgatgaagtaccagcagaaagcagccgggatgtccccagagcaggtactgcagcccctggagggcgacctctgctatgcagacctgaccctgcagctggccggaacctccccgcaaaaggctaccacgaagctttcctctgcccaggttgaccaggtggaagtggaatatgtcaccatggcttccttgccgaaggaggacatttcctatgcatctctgaccttgggtgctgaggatcaggaaccgacctactgcaacatgggccacctcagtagccacctccccggcaggggccctgaggagcccacggaatacagcaccatcagcaggccttagcctgcactccaggctccttcttggaccccaggctgtgagcacactcctgcctcatcgaccgtctgccccctgctcccctcatcaggaccaacccggggactggtgcctctgcctgatcagccagcattgcccctagctctgggttgggcttggggccaagtctcagggggcttctaggagttggggttttctaaacgtcccctcctctcctacatagttgaggagggggctagggatatgctctggggctttcatgggaatgatgaagatgataatgagaaaaatgttatcattattatcatgaagtaccattatcgtaatacaatgaacctttatttattgcctaccacatgttatgggctgaataatggcccccaaagatatctgtgtcctaatcctcagaacctgtgactgttaccttctgtggcagaaagggacagtgcagatgtatgtaagttaaggactttgagatagagaggttattcttgctgattcaggtgggcccaaaatatcaccacaagggtcctcataagaaagaggccagaaggtcaaagaggtagagacaaagtgatgatggaagtggacgtgggtgtgacgtgagcaggggccatgaatgccgcagccttcagatgccagaaagggaaaggaatggattcccctgcctggagcctccaaaagaaaccagccctgcccacgccttgacttgagcccattgaaactgatcttgagctcctggcctccagaattgcaggagaataaatttgtgttgtttttaatgagcca

SEQ ID NO: 5076 - DNA, 1764 bp, Homo sapiens
  source 1..1764: mol_type = unassigned DNA
tgaaggaggaagttcaagggcgagagtgagtaccagcagaaggctgggagtctgtagtttgttcctgctgccaggctccactgaggggaacggggacctgtctgaagagaagatgcccctgctgacactctacctgctcctcttctggctctcaggctactccattgtcactcaaatcaccggtccaacaacagtgaatggcttggagcggggctccttgaccgtgcagtgtgtttacagatcaggctgggagacctacttgaagtggtggtgtcgaggagctatttggcgtgactgcaagatccttgttaaaaccagtgggtcagagcaggaggtgaagagggaccgggtgtccatcaaggacaatcagaaaaaccgcacgttcactgtgaccatggaggatctcatgaaaactgatgctgacacttactggtgtggaattgagaaaactggaaatgaccttggggtcacagttcaagtgaccattgacccagcaccagtcacccaagaagaaactagcagctccccaactctgaccggccaccacttggacaacaggcacaagctcctgaagctcagtgtcctcctgcccctcatcttcaccatattgctgctgcttttggtggccgcctcactcttggcttggaggatgatgaagtaccagcagaaagcagccgggatgtccccagagcaggtactgcagcccctggagggcgacctctgctatgcagacctgaccctgcagctggccggaacctccccgcaaaaggctaccacgaagctttcctctgcccaggttgaccaggtggaagtggaatatgtcaccatggcttccttgccgaaggaggacatttcctatgcatctctgaccttgggtgctgaggatcaggaaccgacctactgcaacatgggccacctcagtagccacctccccggcaggggccctgaggagcccacggaatacagcaccatcagcaggccttagcctgcactccaggctccttcttggaccccaggctgtgagcacactcctgcctcatcgaccgtctgccccctgctcccctcatcaggaccaacccggggactggtgcctctgcctgatcagccagcattgcccctagctctgggttgggcttggggccaagtctcagggggcttctaggagttggggttttctaaacgtcccctcctctcctacatagttgaggagggggctagggatatgctctggggctttcatgggaatgatgaagatgataatgagaaaaatgttatcattattatcatgaagtaccattatcgtaatacaatgaacctttatttattgcctaccacatgttatgggctgaataatggcccccaaagatatctgtgtcctaatcctcagaacctgtgactgttaccttctgtggcagaaagggacagtgcagatgtatgtaagttaaggactttgagatagagaggttattcttgctgattcaggtgggcccaaaatatcaccacaagggtcctcataagaaagaggccagaaggtcaaagaggtagagacaaagtgatgatggaagtggacgtgggtgtgacgtgagcaggggccatgaatgccgcagccttcagatgccagaaagggaaaggaatggattcccctgcctggagcctccaaaagaaaccagccctgcccacgccttgacttgagcccattgaaactgatcttgagctcctggcctccagaattgcaggagaataaatttgtgttgtttttaatga

SEQ ID NO: 5077 - DNA, 1552 bp, Homo sapiens
  source 1..1552: mol_type = unassigned DNA
atgtggctgcctcagctcgacctcatgagggtcatcagtgctaagagtcaaggctactccattgtcactcaaatcaccggtccaacaacagtgaatggcttggagcggggctccttgaccgtgcagtgtgtttacagatcaggctgggagacctacttgaagtggtggtgtcgaggagctatttggcgtgactgcaagatccttgttaaaaccagtgggtcagagcaggaggtgaagagggaccgggtgtccatcaaggacaatcagaaaaaccgcacgttcactgtgaccatggaggatctcatgaaaactgatgctgacacttactggtgtggaattgagaaaactggaaatgaccttggggtcacagttcaagtgaccattgacccagcaccagtcacccaagaagaaactagcagctccccaactctgaccggccaccacttggacaacagcagccgggatgtccccagagcaggtactgcagcccctggagggcgacctctgctatgcagacctgaccctgcagctggccggaacctccccgcaaaaggctaccacgaagctttcctctgcccaggttgaccaggtggaagtggaatatgtcaccatggcttccttgccgaaggaggacatttcctatgcatctctgaccttgggtgctgaggatcaggaaccgacctactgcaacatgggccacctcagtagccacctccccggcaggggccctgaggagcccacggaatacagcaccatcagcaggccttagcctgcactccaggctccttcttggaccccaggctgtgagcacactcctgcctcatcgaccgtctgccccctgctcccctcatcaggaccaacccggggactggtgcctctgcctgatcagccagcattgcccctagctctgggttgggcttggggccaagtctcagggggcttctaggagttggggttttctaaacgtcccctcctctcctacatagttgaggagggggctagggatatgctctggggctttcatgggaatgatgaagatgataatgagaaaaatgttatcattattatcatgaagtaccattatcgtaatacaatgaacctttatttattgcctaccacatgttatgggctgaataatggcccccaaagatatctgtgtcctaatcctcagaacctgtgactgttaccttctgtggcagaaagggacagtgcagatgtatgtaagttaaggactttgagatagagaggttattcttgctgattcaggtgggcccaaaatatcaccacaagggtcctcataagaaagaggccagaaggtcaaagaggtagagacaaagtgatgatggaagtggacgtgggtgtgacgtgagcaggggccatgaatgccgcagccttcagatgccagaaagggaaaggaatggattcccctgcctggagcctccaaaagaaaccagccctgcccacgccttgacttgagcccattgaaactgatcttgagctcctggcctccagaattgcaggagaataaatttgtgttgtttttaatgagcca

SEQ ID NO: 5078 - DNA, 1687 bp, Homo sapiens
  source 1..1687: mol_type = unassigned DNA
atgtggctgcctcagctcgacctcatgagggtcatcagtgctaagagtcaaggctactccattgtcactcaaatcaccggtccaacaacagtgaatggcttggagcggggctccttgaccgtgcagtgtgtttacagatcaggctgggagacctacttgaagtggtggtgtcgaggagctatttggcgtgactgcaagatccttgttaaaaccagtgggtcagagcaggaggtgaagagggaccgggtgtccatcaaggacaatcagaaaaaccgcacgttcactgtgaccatggaggatctcatgaaaactgatgctgacacttactggtgtggaattgagaaaactggaaatgaccttggggtcacagttcaagtgaccattgacccagcgtcgactcctgcccccaccacgcctacctccactacgtttacagcaccagtcacccaagaagaaactagcagctccccaactctgaccggccaccacttggacaacaggcacaagctcctgaagctcagtgtcctcctgcccctcatcttcaccatattgctgctgcttttggtggccgcctcactcttggcttggaggatgatgaagtaccagcagaaaggtactgcagcccctggagggcgacctctgctatgcagacctgaccctgcagctggccggaacctccccgcaaaaggctaccacgaagctttcctctgcccaggttgaccaggtggaagtggaatatgtcaccatggcttccttgccgaaggaggacatttcctatgcatctctgaccttgggtgctgaggatcaggaaccgacctactgcaacatgggccacctcagtagccacctccccggcaggggccctgaggagcccacggaatacagcaccatcagcaggccttagcctgcactccaggctccttcttggaccccaggctgtgagcacactcctgcctcatcgaccgtctgccccctgctcccctcatcaggaccaacccggggactggtgcctctgcctgatcagccagcattgcccctagctctgggttgggcttggggccaagtctcagggggcttctaggagttggggttttctaaacgtcccctcctctcctacatagttgaggagggggctagggatatgctctggggctttcatgggaatgatgaagatgataatgagaaaaatgttatcattattatcatgaagtaccattatcgtaatacaatgaacctttatttattgcctaccacatgttatgggctgaataatggcccccaaagatatctgtgtcctaatcctcagaacctgtgactgttaccttctgtggcagaaagggacagtgcagatgtatgtaagttaaggactttgagatagagaggttattcttgctgattcaggtgggcccaaaatatcaccacaagggtcctcataagaaagaggccagaaggtcaaagaggtagagacaaagtgatgatggaagtggacgtgggtgtgacgtgagcaggggccatgaatgccgcagccttcagatgccagaaagggaaaggaatggattcccctgcctggagcctccaaaagaaaccagccctgcccacgccttgacttgagcccattgaaactgatcttgagctcctggcctccagaattgcaggagaataaatttgtgttgtttttaatgagcca

SEQ ID NO: 5079 - DNA, 3741 bp, Homo sapiens
  source 1..3741: mol_type = unassigned DNA
ctctccggccgcgcagccgctgccgcccacccgcacccgccgtcatgctccgggccgcgctgcccgcgctcctgctgccgttgctgggcctcgccgctgctgccgtcgcggactgtccttcatctacttggattcagttccaagacagttgttacatttttctccaagaagccatcaaagtagaaagcatagaggatgtcagaaatcagtgtactgaccatggagcggacatgataagcatacataatgaagaagaaaatgcttttatactggatactttgaaaaagcaatggaaaggcccagatgatatcctactaggcatgttttatgacacagatgatgcgagtttcaagtggtttgataattcaaatatgacatttgataagtggacagaccaagatgatgatgaggatttagttgacacctgtgcttttctgcacatcaagacaggtgaatggaaaaaaggaaattgtgaagtttcttctgtggaaggaacactatgcaaaacagctatcccatacaaaaggaaatatttatcagataaccacattttaatatcagcattggtgattgctagcacggtaattttgacagttttgggagcaatcatttggttcctgtacaaaaaacattctgattctcgtttcaccacagttttttcaaccgcaccccaatcaccttataatgaagactgtgttttggtagttggagaagaaaatgaatatcctgttcaatttgactaagtttttggtaatcttgcactaagacatcaacaaaatgccctggcagagataacttgggaaagattttaatataaaacttgacattggatattagagctttaatggtattccttattccagtaacatttttatgtactcatctgctgtgaaaagtctttaggttcattaaaaaaacaggttttagaaatgatcttagatctaatatagtgattttaagcatcccgtcaaaggcagaatctgtcacttgaatgaaggaaagcttaaagcccaagcagataaaaataaaagcccagcctatttgtcttgcctgctgtatcttccctatttagttgacccactttagtttatatgtttattagtaaacatgaaatggggaataagtgattttaagtacatcccatacatttaaatatctttgataattgttatttttttggcagataattcctctagaatgtgtatctttttatgatttagatgaagaaaattttacaacttttaacaccccacaccaattttagtttcattacttttacacacaccattttatcacaaatgactcaagttttaatgaatgtttataaattatttgaaacaaaatatgatcgctgtgtccaggatggcatagagaaagctggcaattaggttaacacttacatattatagtgcccctttaaggatttctctcttgccaccataccttttgtactttcccctatacaagatgtatctcattctcctcaagcatttataaatttttccttcaatgacatgaaaactgtgcaagcaaaaaccgaagaaaaacacttaagtacaactgtagtgacagtgatcaaagttttcagtgcatttattgtacattttaagaaaaaggtgaaaatcatttggggagtaaaaaaatgaaaaagctgaaacgagtaattttcctcaccatcaataaaccaaaaacaggaaagataaagaatgtataaatttcacgtaaattagtcacgtatcacttatcaatggggatacgttctaagaaatgcatagttagggaatcttgtgtgaaaatcagcttgtatttacacaaacccagatggtagagcctattttgtcccaaacctacacagcatgttactgtgctgaatactgcagacaattgtaacacaatatttgtgtatctaaatatagaaaaggtacagtaaaaatatggtctactaaggaaacactgttctatatgtggtccattactgactgaagtatactgtctagaagtctgaggctcaaagaaaagtaatccctcttctgaatccacaccccatcaattatcttactttcttctggggagatagatagatatactatctcactagcttgactaatggcaacaaagttccagcttgtgtagtctctttttattgaccacatgaatcgaaaacactcatcacaattaatggcactatcattaatgagacatgagtaactaaaaagtgatagaaaactattaacagtgcggctacatggtactgaaaatgcaggcattacaccagctgttacacaagcacaagcatgctctgtaagagctttacatttctgagattttgtatagtgattgagatgtctattttattattgatagactattactaatgtcaatattgaacactaccctggaattcctgcctggttttcctacccaaattgtaccactccttgaagaactacaggcacagtaaaaaaaatatggcgtattatgtgaactaaaagagttctaaaggagttcttaaaggagtggtagaatttgggtaggaaagtgattaagtccaacttaaaaccaacagtctcaaacgtctacaactacaatgtccaatgagccactagccacatgaggctatttaagtaaatttagtttaaaatccagttttcgaattacattagccacattgtcaagtgttcaaatcacaggtggttagtggctactgtactgggcaacatacattatagaacattttcattataggaagttttattgggcagtgctgctcttaaatcctaccttccactcaactcccatacaactttcttttgtacattttgatactttctacctaatggcagctcttccaaaatagctgctttaaactctgatttaattttcaatatttggtttcatttttcaacaggccaagaggcctctggtaatgaagtgctatatatatatatatgatggagtctcactgtgctgcccaggctacagtgcagtggctcgatcttggctctctccaatctccgccttgcaggttttcaagcaattctcctgcctcagcctccttagtagctgggaccacagacatctgtcaccacacccagctaactttttgtatttttggtagagacggggtttcgccatattgactgggctggtctcaaactcctgacctcaagtgatccacccaccttggtctcccaaagtgctgggattacatgcgtgagccaccacacttggcctacattttttctttatataccagaacatctataacaggcaccttatctactcattagtgaagagataattggattacacaggcaggcttgtttactacatccagaatgtagaaactgctttcttcaacatcttggttctagctagtaataacaatataattctttggcagatattcagaataacattttaaactacattttcttagaaaattgcattcttgtagtgagcagtgtatggtctcttttgttcagaatttaaaactgataaccaatgaaagccttttctcttattcctctaccgtcatttacatgataatctgaagctaatatgacaatatttaaatactaagtggtactagggaactacaagaatactgtaaagcttaagccattgttatcactgtcatttagcatttaataacaaaactatacagaattatgtgcataccaatgaatgttttgtaccatctagttaaattttttaaataaagttttatgggttaagcag

SEQ ID NO: 5080 - DNA, 831 bp, Homo sapiens
  source 1..831: mol_type = unassigned DNA
ctctccggccgcgcagccgctgccgcccacccgcacccgccgtcatgctccgggccgcgctgcccgcgctcctgctgccgttgctgggcctcgccgctgctgccgtcgcggactgtccttcatctacttggattcagttccaagacagttgttacatttttctccaagaagccatcaaagtagaaagcatagaggatgtcagaaatcagtgtactgaccatggagcggacatgataagcatacataatgaagaagaaaatgcttttatactggatactttgaaaaagcaatggaaaggcccagatgatatcctactaggcatgttttatgacacagatgtcccatacaaaaggaaatatttatcagataaccacattttaatatcagcattggtgattgctagcacggtaattttgacagttttgggagcaatcatttggttcctgtacaaaaaacattctgattctcgtttcaccacagttttttcaaccgcaccccaatcaccttataatgaagactgtgttttggtagttggagaagaaaatgaatatcctgttcaatttgactaagtttttggtaatcttgcactaagacatcaacaaaatgccctggcagagataacttgggaaagattttaatataaaacttgacattggatattagagctttaatggtattccttattccagtaacatttttatgtactcatctgctgtgaaaagtctttaggttcattaaaaaaacaggttttagaaatgatcttagatctaatatagtgattttaagcatcccgtcaaaggcagaatctgtcacttgaatgaaggaaagctt

SEQ ID NO: 5081 - DNA, 1251 bp, Homo sapiens
  source 1..1251: mol_type = unassigned DNA
gtgcgcgtgcgcagggataagagagcggtctggacagcgcgtggccggcgccgctgtggggacagcatgagcggcggttggatggcgcaggttggagcgtggcgaacaggggctctgggcctggcgctgctgctgctgctcggcctcggactaggcctggaggccgccgcgagcccgctttccaccccgacctctgcccaggccgcaggccccagctcaggctcgtgcccacccaccaagttccagtgccgcaccagtggcttatgcgtgcccctcacctggcgctgcgacagggacttggactgcagcgatggcagcgatgaggaggagtgcaggattgagccatgtacccagaaagggcaatgcccaccgccccctggcctcccctgcccctgcaccggcgtcagtgactgctctgggggaactgacaagaaactgcgcaactgcagccgcctggcctgcctagcaggcgagctccgttgcacgctgagcgatgactgcattccactcacgtggcgctgcgacggccacccagactgtcccgactccagcgacgagctcggctgtggaaccaatgagatcctcccggaaggggatgccacaaccatggggccccctgtgaccctggagagtgtcacctctctcaggaatgccacaaccatggggccccctgtgaccctggagagtgtcccctctgtcgggaatgccacatcctcctctgccggagaccagtctggaagcccaactgcctatggggttattgcagctgctgcggtgctcagtgcaagcctggtcaccgccaccctcctccttttgtcctggctccgagcccaggagcgcctccgcccactggggttactggtggccatgaaggagtccctgctgctgtcagaacagaagacctcgctgccctgaggacaagcacttgccaccaccgtcactcagccctgggcgtagccggacaggaggagagcagtgatgcggatgggtacccgggcacaccagccctcagagacctgagctcttctggccacgtggaacctcgaacccgagctcctgcagaagtggccctggagattgagggtccctggacactccctatggagatccggggagctaggatggggaacctgccacagccagaactgaggggctggccccaggcagctcccagggggtagaacggccctgtgcttaagacactcctgctgccccgtctgagggtggcaattaaagttgcttcacatcctc

SEQ ID NO: 5082 - DNA, 676 bp, Homo sapiens
  source 1..676: mol_type = unassigned DNA
aatgagatcctcccggaaggggatgccacaaccatggggccccctgtgaccctggagagtgtcacctctctcaggaatgccacaaccatggggccccctgtgaccctggagagtgtcccctctgtcgggaatgccatcctcctctgccggagaccagtctggaagcccaactgcctatggggttattgcagctgctgcggtgctcagtgcaagcctggtcaccgccaccctcctccttttgtcctggctccgagcccaggagcgcctccgcccactggggttactggtggccatgaaggagtccctgctgctgtcagaacagaagacctcgctgccctgaggacaagcacttgccaccaccgtcactcagccctgggcgtagccggacaggaggagagcagtgatgcggatgggtacccgggcacaccagccctcagagacctgagctcttctggccacgtggaacctcgaacccgagctcctgcagaagtggccctggagattgagggtccctggacactccctatggagatccggggagctaggatggggaacctgccacagccagaactgaggggctggccccaggcagctcccagggggtagaacggccctgtgcttaagacactcctgctgccccgtctgagggtggcaattaaagttgcttcacatcctc

SEQ ID NO: 5083 - DNA, 1125 bp, Homo sapiens
  source 1..1125: mol_type = unassigned DNA
gtgcgcgtgcgcagggataagagagcggtctggacagcgcgtggccggcgccgctgtggggacagcatgagcggcggttggatggcgcaggttggagcgtggcgaacaggggctctgggcctggcgctgctgctgctgctcggcctcggactaggcctggaggccgccgcgagcccgctttccaccccgacctctgcccaggccgcagggattgagccatgtacccagaaagggcaatgcccaccgccccctggcctcccctgcccctgcaccggcgtcagtgactgctctgggggaactgacaagaaactgcgcaactgcagccgcctggcctgcctagcaggcgagctccgttgcacgctgagcgatgactgcattccactcacgtggcgctgcgacggccacccagactgtcccgactccagcgacgagctcggctgtggaaccaatgagatcctcccggaaggggatgccacaaccatggggccccctgtgaccctggagagtgtcacctctctcaggaatgccacaaccatggggccccctgtgaccctggagagtgtcccctctgtcgggaatgccacatcctcctctgccggagaccagtctggaagcccaactgcctatggggttattgcagctgctgcggtgctcagtgcaagcctggtcaccgccaccctcctccttttgtcctggctccgagcccaggagcgcctccgcccactggggttactggtggccatgaaggagtccctgctgctgtcagaacagaagacctcgctgccctgaggacaagcacttgccaccaccgtcactcagccctgggcgtagccggacaggaggagagcagtgatgcggatgggtacccgggcacaccagccctcagagacctgagctcttctggccacgtggaacctcgaacccgagctcctgcagaagtggccctggagattgagggtccctggacactccctatggagatccggggagctaggatggggaacctgccacagccagaactgaggggctggccccaggcagctcccagggggtagaacggccctgtgcttaagacactcctgctgccccgtctgagggtggcaattaaagttgcttcacatcctc

SEQ ID NO: 5084 - DNA, 1466 bp, Homo sapiens
  source 1..1466: mol_type = unassigned DNA
tctgctcacacaggaagccctggaagctgcttcctcagacatgccgctgctgctactgctgcccctgctgtgggcaggggccctggctatggatccaaatttctggctgcaagtgcaggagtcagtgacggtacaggagggtttgtgcgtcctcgtgccctgcactttcttccatcccataccctactacgacaagaactccccagttcatggttactggttccgggaaggagccattatatccagggactctccagtggccacaaacaagctagatcaagaagtacaggaggagactcagggcagattccgcctccttggggatcccagtaggaacaactgctccctgagcatcgtagacgccaggaggagggataatggttcatacttctttcggatggagagaggaagtaccaaatacagttacaaatctccccagctctctgtgcatgtgacagacttgacccacaggcccaaaatcctcatccctggcactctagaacccggccactccaaaaacctgacctgctctgtgtcctgggcctgtgagcagggaacacccccgatcttctcctggttgtcagctgcccccacctccctgggccccaggactactcactcctcggtgctcataatcaccccacggccccaggaccacggcaccaacctgacctgtcaggtgaagttcgctggagctggtgtgactacggagagaaccatccagctcaacgtcacctatgttccacagaacccaacaactggtatctttccaggagatggctcagggaaacaagagaccagagcaggagtggttcatggggccattggaggagctggtgttacagccctgctcgctctttgtctctgcctcatcttcttcatagtgaagacccacaggaggaaagcagccaggacagcagtgggcaggaatgacacccaccctaccacagggtcagcctccccgaaacaccagaagaagtccaagttacatggccccactgaaacctcaagctgttcaggtgccgcccctactgtggagatggatgaggagctgcattatgcttccctcaactttcatgggatgaatccttccaaggacacctccaccgaatactcagaggtcaggacccagtgaggaacccacaagagcatcaggctcagctagaagatccacatcctctacaggtcggggaccaaaggctgattcttggagatttaacaccccacaggcaatgggtttatagacattatgtgagtttcctgctatattaacatcatcttagactttgcaagcagagagtcgtggaatcaaatctgtgctctttcatttgctaagtgtatgatgtcacacaagctccttaaccttccatgtctccattttcttctctgtgaagtaggtataagaagtcctatctcatagggatgctgtgagcattaaataaaggtacacatggaaaacaccagtc

SEQ ID NO: 5085 - DNA, 1108 bp, Homo sapiens
  source 1..1108: mol_type = unassigned DNA
tctgctcacacaggaagccctggaagctgcttcctcagacatgccgctgctgctactgctgcccctgctgtgggcaggggccctggctatggatccaaatttctggctgcaagtgcaggagtcagtgacggtacaggagggtttgtgcgtcctcgtgccctgcactttcttccatcccataccctactacgacaagaactccccagttcatggttactggttccgggaaggagccattatatccagggactctccagtggccacaaacaagctagatcaagaagtacaggaggagactcagggcagattccgcctccttggggatcccagtaggaacaactgctccctgagcatcgtagacgccaggaggagggataatggttcatacttctttcggatggagagaggaagtaccaaatacagttacaaatctccccagctctctgtgcatgtgacagacttgacccacaggcccaaaatcctcatccctggcactctagaacccggccactccaaaaacctgacctgctctgtgtcctgggcctgtgagcagggaacacccccgatcttctcctggttgtcagctgcccccacctccctgggccccaggactactcactcctcggtgctcataatcaccccacggccccaggaccacggcaccaacctgacctgtcaggtgaagttcgctggagctggtgtgactacggagagaaccatccagctcaacgtcacctatgttccacagaacccaacaactggtatctttccaggagatggctcagggaaacaagagaccagagcaggagtggttcatggggccattggaggagctggtgttacagccctgctcgctctttgtctctgcctcatcttcttcatagtgaagacccacaggaggaaagcagccaggacagcagtgggcaggaatgacacccaccctaccacagggtcagcctccccggtacgttgaggccaacagatcaggagatgatggccattgaaaagatagtttcttggccgggcacagtgtttcacacctgcaatcccagcacctttggaggccaaggcgggcggatcacgaggtcaggagattgagactatcctg

SEQ ID NO: 5086 - DNA, 1085 bp, Homo sapiens
  source 1..1085: mol_type = unassigned DNA
tctgctcacacaggaagccctggaagctgcttcctcagacatgccgctgctgctactgctgcccctgctgtgggcagacttgacccacaggcccaaaatcctcatccctggcactctagaacccggccactccaaaaacctgacctgctctgtgtcctgggcctgtgagcagggaacacccccgatcttctcctggttgtcagctgcccccacctccctgggccccaggactactcactcctcggtgctcataatcaccccacggccccaggaccacggcaccaacctgacctgtcaggtgaagttcgctggagctggtgtgactacggagagaaccatccagctcaacgtcacctatgttccacagaacccaacaactggtatctttccaggagatggctcagggaaacaagagaccagagcaggagtggttcatggggccattggaggagctggtgttacagccctgctcgctctttgtctctgcctcatcttcttcatagtgaagacccacaggaggaaagcagccaggacagcagtgggcaggaatgacacccaccctaccacagggtcagcctccccgaaacaccagaagaagtccaagttacatggccccactgaaacctcaagctgttcaggtgccgcccctactgtggagatggatgaggagctgcattatgcttccctcaactttcatgggatgaatccttccaaggacacctccaccgaatactcagaggtcaggacccagtgaggaacccacaagagcatcaggctcagctagaagatccacatcctctacaggtcggggaccaaaggctgattcttggagatttaacaccccacaggcaatgggtttatagacattatgtgagtttcctgctatattaacatcatcttagactttgcaagcagagagtcgtggaatcaaatctgtgctctttcatttgctaagtgtatgatgtcacacaagctccttaaccttccatgtctccattttcttctctgtgaagtaggtataagaagtcctatctcatagggatgctgtgagcattaaataaaggtacacatggaaaacaccagtc

SEQ ID NO: 5087 - DNA, 1494 bp, Homo sapiens
  source 1..1494: mol_type = unassigned DNA
actcccttcctcttttctgctcacacaggaagccctggaagctgcttcctcagacatgccgctgctgctactgctgcccctgctgtgggcagacttgacccacaggcccaaaatcctcatccctggcactctagaacccggccactccaaaaacctgacctgctctgtgtcctgggcctgtgagcagggaacacccccgatcttctcctggttgtcagctgcccccacctccctgggccccaggactactcactcctcggtgctcataatcaccccacggccccaggaccacggcaccaacctgacctgtcaggtgaagttcgctggagctggtgtgactacggagagaaccatccagctcaacgtcacctatgttccacagaacccaacaactggtatctttccaggagatggctcagggaaacaagagaccagagcaggagtggttcatggggccattggaggagctggtgttacagccctgctcgctctttgtctctgcctcatcttcttcatagtgaagacccacaggaggaaagcagccaggacagcagtgggcaggaatgacacccaccctaccacagggtcagcctccccggtgagtgatggggcatcctggcatccagtctgtcctgcagacacctcctcccaatgtggcccaccgtcatgccccattcagcatttccagaactgagcttattgtctttcctcctgtttaacagtgtaggttttaatatttttcaggtacgttgaggccaacagatcaggagatgatggccattgaaaagatagtttcttggccgggcacagtgtttcacacctgcaatcccagcacctttggaggccaaggcgggcggatcacgaggtcaggagattgagactatcctggctaacatggtgaaaccccgtctctactaaaaatacaaaaaattagccagatgtggtggctggcgcctgtagtcccagctacttgggaggctgaggcaggagaatggtatgaacccgggaggcagagcttgtagtgagccgacatagcaccactgcactccagcctgggtgacagagagagactctgtcccaaaaagaaaaaaaaaatagtttcttattcaccgttcccgagagggcacaccacaccatgcaaggccatatggagaagcaccagggtcagtcaggaagcagagggagcaaggagaaaatgggacaagagccttcactgtggctttcatggaaaagaatgggcaagacagggtaagcaagctaggcaggtttaggattggctacttagaacaatttcagcagactctggggtataggagttgtctctagttgtctggtacatggccctgggtttattaaggaggattgtggtctggagtgtaagagctcaataaaggatccagctggtagtgtgggctttagattgactggtttgcacatgaaaggtgcacttgtatgcaagtcctttattagctctagaaatctactatccttggg

SEQ ID NO: 5088 - DNA, 2094 bp, Homo sapiens
  source 1..2094: mol_type = unassigned DNA
aacttgtgttaggcatgcgtccgaagagctggaaggctgaggatgtcaatggctttcagatgtcaggataaccttaaggatagatgaagggttgagagcctgtgcctcatttctgagttctcagctgctatgccgtggaaatcctgtttactttctgcatctgctcctgcaagactctggagccagtcttgaggtcctacatctccgaaagcaagctcttctagaagttgatagctttccaatgattagacgaattgattctttctgtgactcatcagttcatttcctgtaaaattcatgtcttgctgttgatttgtgaataagaaccagagcttgtagaaaccactttaatcatatccaggagtttgcaagaaacaggtgcttaacactaattcacctcctgaacaagaaaaatgggctgtgaccggaactgtgggctcatcgctggggctgtcattggtgctgtcctggctgtgtttggaggtattctaatgccagttggagacctgcttatccagaagacaattaaaaagcaagttgtcctcgaagaaggtacaattgcttttaaaaattgggttaaaacaggcacagaagtttacagacagttttggatctttgatgtgcaaaatccacaggaagtgatgatgaacagcagcaacattcaagttaagcaaagaggtccttatacgtacagagttcgttttctagccaaggaaaatgtaacccaggacgctgaggacaacacagtctctttcctgcagcccaatggtgccatcttcgaaccttcactatcagttggaacagaggctgacaacttcacagttctcaatctggctgtggcagctgcatcccatatctatcaaaatcaatttgttcaaatgatcctcaattcacttattaacaagtcaaaatcttctatgttccaagtcagaactttgagagaactgttatggggctatagggatccatttttgagtttggttccgtaccctgttactaccacagttggtctgttttatccttacaacaatactgcagatggagtttataaagttttcaatggaaaagataacataagtaaagttgccataatcgacacatataaaggtaaaaggaatctgtcctattgggaaagtcactgcgacatgattaatggtacagatgcagcctcatttccaccttttgttgagaaaagccaggtattgcagttcttttcttctgatatttgcaggtcaatctatgctgtatttgaatccgacgttaatctgaaaggaatccctgtgtatagatttgttcttccatccaaggcctttgcctctccagttgaaaacccagacaactattgtttctgcacagaaaaaattatctcaaaaaattgtacatcatatggtgtgctagacatcagcaaatgcaaagaagggagacctgtgtacatttcacttcctcattttctgtatgcaagtcctgatgtttcagaacctattgatggattaaacccaaatgaagaagaacataggacatacttggatattgaacctataactggattcactttacaatttgcaaaacggctgcaggtcaacctattggtcaagccatcagaaaaaattcaagtattaaagaatctgaagaggaactatattgtgcctattctttggcttaatgagactgggaccattggtgatgagaaggcaaacatgttcagaagtcaagtaactggaaaaataaacctccttggcctgatagaaatgatcttactcagtgttggtgtggtgatgtttgttgcttttatgatttcatattgtgcatgcagatcgaaaacaataaaataagtaagtatgtaccaaaaaatattgcttcaataatattagcttatatattacttgttttcactttatcaaagagaagttacatattaggccatatatatttctagacatgtctagccactgatcatttttaaatataggtaaataaacctataaatattatcacgcagatcactaaagtatatctttaattctgggagaaatgagataaaagatgtacttgtgaccattgtaacaatagcacaaataaagcacttgtgccaaa

SEQ ID NO: 5089 - DNA, 1942 bp, Homo sapiens
  source 1..1942: mol_type = unassigned DNA
atttgatcctattaagaattgtccaaatgttggagcatttgattgaaaaatccttcttagccattttaaagatagctttccaatgattagacgaattgattctttctgtgactcatcagttcatttcctgtaaaattcatgtcttgctgttgatttgtgaataagaaccagagcttgtagaaaccactttaatcatatccaggagtttgcaagaaacaggtgcttaacactaattcacctcctgaacaagaaaaatgggctgtgaccggaactgtgggctcatcgctggggctgtcattggtgctgtcctggctgtgtttggaggtattctaatgccagttggagacctgcttatccagaagacaattaaaaagcaagttgtcctcgaagaaggtacaattgcttttaaaaattgggttaaaacaggcacagaagtttacagacagttttggatctttgatgtgcaaaatccacaggaagtgatgatgaacagcagcaacattcaagttaagcaaagaggtccttatacgtacagagttcgttttctagccaaggaaaatgtaacccaggacgctgaggacaacacagtctctttcctgcagcccaatggtgccatcttcgaaccttcactatcagttggaacagaggctgacaacttcacagttctcaatctggctgtggcagctgcatcccatatctatcaaaatcaatttgttcaaatgatcctcaattcacttattaacaagtcaaaatcttctatgttccaagtcagaactttgagagaactgttatggggctatagggatccatttttgagtttggttccgtaccctgttactaccacagttggtctgttttatccttacaacaatactgcagatggagtttataaagttttcaatggaaaagataacataagtaaagttgccataatcgacacatataaaggtaaaaggaatctgtcctattgggaaagtcactgcgacatgattaatggtacagatgcagcctcatttccaccttttgttgagaaaagccaggtattgcagttcttttcttctgatatttgcaggtcaatctatgctgtatttgaatccgacgttaatctgaaaggaatccctgtgtatagatttgttcttccatccaaggcctttgcctctccagttgaaaacccagacaactattgtttctgcacagaaaaaattatctcaaaaaattgtacatcatatggtgtgctagacatcagcaaatgcaaagaagggagacctgtgtacatttcacttcctcattttctgtatgcaagtcctgatgtttcagaacctattgatggattaaacccaaatgaagaagaacataggacatacttggatattgaacctataactggattcactttacaatttgcaaaacggctgcaggtcaacctattggtcaagccatcagaaaaaattcaagtattaaagaatctgaagaggaactatattgtgcctattctttggcttaatgagactgggaccattggtgatgagaaggcaaacatgttcagaagtcaagtaactggaaaaataaacctccttggcctgatagaaatgatcttactcagtgttggtgtggtgatgtttgttgcttttatgatttcatattgtgcatgcagatcgaaaacaataaaataagtaagtatgtaccaaaaaatattgcttcaataatattagcttatatattacttgttttcactttatcaaagagaagttacatattaggccatatatatttctagacatgtctagccactgatcatttttaaatataggtaaataaacctataaatattatcacgcagatcactaaagtatatctttaattctgggagaaatgagataaaagatgtacttgtgaccattgtaacaatagcacaaataaagcacttgtgccaaagttgtcc

SEQ ID NO: 5090 - DNA, 855 bp, Homo sapiens
  source 1..855: mol_type = unassigned DNA
gagagttctccttagataagatttcaatatgttaatcatgtgtagaaagaaaattaaaaaggaggaatatgaagaaattcagatatgacattattagttctgccactggtaggcattagaagcaagaaaagggagacggaccgaggaagccactttgaaccagagcttgtagaaaccactttaatcatatccaggagtttgcaagaaacaggtgcttaacactaattcacctcctgaacaagaaaaatgggctgtgaccggaactgtgggctcatcgctggggctgtcattggtgctgtcctggctgtgtttggaggtattctaatgccagttggagacctgcttatccagaagacaattaaaaagcaagttgtcctcgaagaaggtacaattgcttttaaaaattgggttaaaacaggcacagaagtttacagacagttttggatctttgatgtgcaaaatccacaggaagtgatgatgaacagcagcaacattcaagttaagcaaagaggtccttatacgtacagagttcgttttctagccaaggaaaatgtaacccaggacgctgaggacaacacagtctctttcctgcagcccaatggtgccatcttcgaaccttcactatcagttggaacagaggctgacaacttcacagttctcaatctggctgtggcagctgcatcccatatctatcaaaatcaatttgttcaaatgatcctcaattcacttattaacaagtcaaaatcttctatgttccaagtcagaactttgagagaactgttatggggctatagggatccatttttgagtttggttccgtaccctgttactaccacagttggtctgttttatcct

SEQ ID NO: 5091 - DNA, 1686 bp, Homo sapiens
  source 1..1686: mol_type = unassigned DNA
atgacattattagttctgccactggtaggcattagaagcaagaaaagggagacggaccgaggaagccactttggtgaaacaaaaagaaaagcatttgtttatttagaacgggcaaaatgatacgtttcagtgggtgttttctttgtactttgatctttttgtactgatatttaagcttctgttttatgatctctttctaatgatagaaccagagcttgtagaaaccactttaatcatatccaggagtttgcaagaaacaggtgcttaacactaattcacctcctgaacaagaaaaatgggctgtgaccggaactgtgggctcatcgctggggctgtcattggtgctgtcctggctgtgtttggaggtattctaatgccagttggagacctgcttatccagaagacaattaaaaagcaagttgtcctcgaagaaggtacaattgcttttaaaaattgggttaaaacaggcacagaagtttacagacagttttggatctttgatgtgcaaaatccacaggaagtgatgatgaacagcagcaacattcaagttaagcaaagaggtccttatacgtacagagttcgttttctagccaaggaaaatgtaacccaggacgctgaggacaacacagtctctttcctgcagcccaatggtgccatcttcgaaccttcactatcagttggaacagaggctgacaacttcacagttctcaatctggctgtggcagctgcatcccatatctatcaaaatcaatttgttcaaatgatcctcaattcacttattaacaagtcaaaatcttctatgttccaagtcagaactttgagagaactgttatggggctatagggatccatttttgagtttggttccgtaccctgttactaccacagttggtctgttttatccttacaacaatactgcagatggagtttataaagttttcaatggaaaagataacataagtaaagttgccataatcgacacatataaaggtaaaaggaatctgtcctattgggaaagtcactgcgacatgattaatggtacagatgcagcctcatttccaccttttgttgagaaaagccaggtattgcagttcttttcttctgatatttgcaggtcaatctatgctgtatttgaatccgacgttaatctgaaaggaatccctgtgtatagatttgttcttccatccaaggcctttgcctctccagttgaaaacccagacaactattgtttctgcacagaaaaaattatctcaaaaaattgtacatcatatggtgtgctagacatcagcaaatgcaaagaagggagacctgtgtacatttcacttcctcattttctgtatgcaagtcctgatgtttcagaacctattgatggattaaacccaaatgaagaagaacataggacatacttggatattgaacctataactggattcactttacaatttgcaaaacggctgcaggtcaacctattggtcaagccatcagaaaaaattcaagtattaaagaatctgaagaggaactatattgtgcctattctttggcttaatgagactgggaccattggtgatgagaaggcaaacatgttcagaagtcaagtaactggaaaaataaacctccttggcctgatagaaatgatcttactcagtgttggtgtggtgatgtttgttgcttttatgatttcatattg

SEQ ID NO: 5092 - DNA, 565 bp, Homo sapiens
  source 1..565: mol_type = unassigned DNA
aagttgctgagacaagggaagagagatgaggaaccagagcttgtagaaaccactttaatcatatccaggagtttgcaagaaacaggtgcttaacactaattcacctcctgaacaagaaaaatgggctgtgaccggaactgtgggctcatcgctggggctgtcattggtgctgtcctggctgtgtttggaggtattctaatgccagttggagacctgcttatccagaagacaattaaaaagcaagttgtcctcgaagaaggtacaattgcttttaaaaattgggttaaaacaggcacagaagtttacagacagttttggatctttgatgtgcaaaatccacaggaagtgatgatgaacagcagcaacattcaagttaagcaaagaggtccttatacgtacagagttcgttttctagccaaggaaaatgtaacccaggacgctgaggacaacacagtctctttcctgcagcccaatggtgccatcttcgaaccttcactatcagttggaacagaggctgacaacttcacagttctcaatctggctgtggcagctgcatcccatatct

SEQ ID NO: 5093 - DNA, 541 bp, Homo sapiens
  source 1..541: mol_type = unassigned DNA
ttgctatggcaacccaatttattagtgactgcaaaactaacttagctggcattgtggcaaatctccatattttgctgatagctttccaatgattagacgaattgattctttctgtgactcatcagttcatttcctgtaaaattcatgtcttgctgttgatttgtgaataagaaccagagcttgtagaaaccactttaatcatatccaggagtttgcaagaaacaggtgcttaacactaattcacctcctgaacaagaaaaatgggctgtgaccggaactgtgggctcatcgctggggctgtcattggtgctgtcctggctgtgtttggaggtattctaatgccagttggagacctgcttatccagaagacaattaaaaagcaagttgtcctcgaagaaggtacaattgcttttaaaaattgggttaaaacaggcacagaagtttacagacagttttggatctttgatgtgcaaaatccacaggaagtgatgatgaacagcagcaacattcaagttaagcaaagaggtccttatacgtacag

SEQ ID NO: 5094 - DNA, 1808 bp, Homo sapiens
  source 1..1808: mol_type = unassigned DNA
aagttgctgagacaagggaagagagatgaggaaccagagcttgtagaaaccactttaatcatatccaggagtttgcaagaaacaggtgcttaacactaattcacctcctgaacaagaaaaatgggctgtgaccggaactgtgggctcatcgctggggctgtcattggtgctgtcctggctgtgtttggaggtattctaatgccagttggagacctgcttatccagaagacaattaaaaagcaagttgtcctcgaagaaggtacaattgcttttaaaaattgggttaaaacaggcacagaagtttacagacagttttggatctttgatgtgcaaaatccacaggaagtgatgatgaacagcagcaacattcaagttaagcaaagaggtccttatacgtacagagttcgttttctagccaaggaaaatgtaacccaggacgctgaggacaacacagtctctttcctgcagcccaatggtgccatcttcgaaccttcactatcagttggaacagaggctgacaacttcacagttctcaatctggctgtggcagctgcatcccatatctatcaaaatcaatttgttcaaatgatcctcaattcacttattaacaagtcaaaatcttctatgttccaagtcagaactttgagagaactgttatggggctatagggatccatttttgagtttggttccgtaccctgttactaccacagttggtctgttttatccttacaacaatactgcagatggagtttataaagttttcaatggaaaagataacataagtaaagttgccataatcgacacatataaaggtaaaaggaatctgtcctattgggaaagtcactgcgacatgattaatggtacagatgcagcctcatttccaccttttgttgagaaaagccaggtattgcagttcttttcttctgatatttgcaggtcaatctatgctgtatttgaatccgacgttaatctgaaaggaatccctgtgtatagatttgttcttccatccaaggcctttgcctctccagttgaaaacccagacaactattgtttctgcacagaaaaaattatctcaaaaaattgtacatcatatggtgtgctagacatcagcaaatgcaaagaagggagacctgtgtacatttcacttcctcattttctgtatgcaagtcctgatgtttcagaacctattgatggattaaacccaaatgaagaagaacataggacatacttggatattgaacctataactggattcactttacaatttgcaaaacggctgcaggtcaacctattggtcaagccatcagaaaaaattcaagtattaaagaatctgaagaggaactatattgtgcctattctttggcttaatgagactgggaccattggtgatgagaaggcaaacatgttcagaagtcaagtaactggaaaaataaacctccttggcctgatagaaatgatcttactcagtgttggtgtggtgatgtttgttgcttttatgatttcatattgtgcatgcagatcgaaaacaataaaataagtaagtatgtaccaaaaaatattgcttcaataatattagcttatatattacttgttttcactttatcaaagagaagttacatattaggccatatatatttctagacatgtctagccactgatcatttttaaatataggtaaataaacctataaatattatcacgcagatcactaaagtatatctttaattctgggagaaatgagataaaagatgtacttgtgaccattgtaacaatagcacaaataaagcacttgtgccaaagttgtcc

SEQ ID NO: 5095 - DNA, 1421 bp, Homo sapiens
  source 1..1421: mol_type = unassigned DNA
accagagcttgtagaaaccactttaatcatatccaggagtttgcaagaaacaggtgcttaacactaattcacctcctgaacaagaaaaatgggctgtgaccggaactgtgggctcatcgctggggctgtcattggtgctgtcctggctgtgtttggaggtattctaatgccagttggagacctgcttatccagaagacaattaaaaagcaagttgtcctcgaagaaggtacaattgcttttaaaaattgggttaaaacaggcacagaagtttacagacagttttggatctttgatgtgcaaaatccacaggaagtgatgatgaacagcagcaacattcaagttaagcaaagaggtccttatacgtacagagttcgttttctagccaaggaaaatgtaacccaggacgctgaggacaacacagtctctttcctgcagcccaatggtgccatcttcgaaccttcactatcagttggaacagaggctgacaacttcacagttctcaatctggctgtggcagctgcatcccatatctatcaaaatcaatttgttcaaatgatcctcaattcacttattaacaagtcaaaatcttctatgttccaagtcagaactttgagagaactgttatggggctatagggatccatttttgagtttggttccgtaccctgttactaccacagttggtctgttttatccttacaacaatactgcagatggagtttataaagttttcaatggaaaagataacataagtaaagttgccataatcgacacatataaaggtaaaaggtcaatctatgctgtatttgaatccgacgttaatctgaaaggaatccctgtgtatagatttgttcttccatccaaggcctttgcctctccagttgaaaacccagacaactattgtttctgcacagaaaaaattatctcaaaaaattgtacatcatatggtgtgctagacatcagcaaatgcaaagaagggagacctgtgtacatttcacttcctcattttctgtatgcaagtcctgatgtttcagaacctattgatggattaaacccaaatgaagaagaacataggacatacttggatattgaacctataactggattcactttacaatttgcaaaacggctgcaggtcaacctattggtcaagccatcagaaaaaattcaagtattaaagaatctgaagaggaactatattgtgcctattctttggcttaatgagactgggaccattggtgatgagaaggcaaacatgttcagaagtcaagtaactggaaaaataaacctccttggcctgatagaaatgatcttactcagtgttggtgtggtgatgtttgttgcttttatgatttcatattgtgcatgcagatcgaaaacaataaaataagtaagtatgtaccaaaaaatattgcttcaat

SEQ ID NO: 5096 - DNA, 2365 bp, Homo sapiens
  source 1..2365: mol_type = unassigned DNA
gattgcatggagacactcaggagcacaaattgcaccacggggttagtccatcacggggttagtccatccaaaagcaaggaggcagcctttggtacccctgtgccagtcaatattcattaaagggcagttttttcaaggaagtcggagctagctgctggacactaacagtcaaatctcaaaggagctgggagagaaatgcacaagcagacagggtcttgctctgttgcccaggctggagtgcagtggcgccatcacagctgctgcaacctcaacctcccaagctcaagtgaatctcccacctcagcctcccaagtagctgggactacagcaaggtttccaagaattacgttggtaggcattcaactggcatcctctggaggtaaccagatgcccagctgctcctggaggggacatatggaagtgggctcataggcggaagggacttgccttgtctcatatgaaactttggactgtggacttttgagttaacgctgaaatgagatagctttccaatgattagacgaattgattctttctgtgactcatcagttcatttcctgtaaaattcatgtcttgctgttgatttgtgaataagaaccagagcttgtagaaaccactttaatcatatccaggagtttgcaagaaacaggtgcttaacactaattcacctcctgaacaagaaaaatgggctgtgaccggaactgtgggctcatcgctggggctgtcattggtgctgtcctggctgtgtttggaggtattctaatgccagttggagacctgcttatccagaagacaattaaaaagcaagttgtcctcgaagaaggtacaattgcttttaaaaattgggttaaaacaggcacagaagtttacagacagttttggatctttgatgtgcaaaatccacaggaagtgatgatgaacagcagcaacattcaagttaagcaaagaggtccttatacgtacagagttcgttttctagccaaggaaaatgtaacccaggacgctgaggacaacacagtctctttcctgcagcccaatggtgccatcttcgaaccttcactatcagttggaacagaggctgacaacttcacagttctcaatctggctgtggcagctgcatcccatatctatcaaaatcaatttgttcaaatgatcctcaattcacttattaacaagtcaaaatcttctatgttccaagtcagaactttgagagaactgttatggggctatagggatccatttttgagtttggttccgtaccctgttactaccacagttggtctgttttatccttacaacaatactgcagatggagtttataaagttttcaatggaaaagataacataagtaaagttgccataatcgacacatataaaggtaaaaggaatctgtcctattgggaaagtcactgcgacatgattaatggtacagatgcagcctcatttccaccttttgttgagaaaagccaggtattgcagttcttttcttctgatatttgcaggtcaatctatgctgtatttgaatccgacgttaatctgaaaggaatccctgtgtatagatttgttcttccatccaaggcctttgcctctccagttgaaaacccagacaactattgtttctgcacagaaaaaattatctcaaaaaattgtacatcatatggtgtgctagacatcagcaaatgcaaagaagggagacctgtgtacatttcacttcctcattttctgtatgcaagtcctgatgtttcagaacctattgatggattaaacccaaatgaagaagaacataggacatacttggatattgaacctataactggattcactttacaatttgcaaaacggctgcaggtcaacctattggtcaagccatcagaaaaaattcaagtattaaagaatctgaagaggaactatattgtgcctattctttggcttaatgagactgggaccattggtgatgagaaggcaaacatgttcagaagtcaagtaactggaaaaataaacctccttggcctgatagaaatgatcttactcagtgttggtgtggtgatgtttgttgcttttatgatttcatattgtgcatgcagatcgaaaacaataaaataagtaagtatgtaccaaaaaatattgcttcaataatattagcttatatattacttgttttcactttatcaaagagaagttacatattaggccatatatatttctagacatgtctagccactgatcatttttaaatataggtaaataaacctataaatattatcacgcagatcactaaagtatatctttaattctgggagaaatgagataaaagatgtacttgtgaccattgtaacaatagcacaaataaagcacttgtgccaaa

SEQ ID NO: 5097 - DNA, 536 bp, Homo sapiens
  source 1..536: mol_type = unassigned DNA
attcctggcatggtcacagtgactactgtgacttgtttgagaggtgactttgaacatttattttactttcagatagctttccaatgattagacgaattgattctttctgtgactcatcagttcatttcctgtaaaattcatgtcttgctgttgatttgtgaataagaaccagagcttgtagaaaccactttaatcatatccaggagtttgcaagaaacaggtgcttaacactaattcacctcctgaacaagaaaaatgggctgtgaccggaactgtgggctcatcgctggggctgtcattggtgctgtcctggctgtgtttggaggtattctaatgccagttggagacctgcttatccagaagacaattaaaaagcaagttgtcctcgaagaaggtacaattgcttttaaaaattgggttaaaacaggcacagaagtttacagacagttttggatctttgatgtgcaaaatccacaggaagtgatgatgaacagcagcaacattcaagttaagcaaagaggtccttatacgtacag

SEQ ID NO: 5098 - DNA, 720 bp, Homo sapiens
  source 1..720: mol_type = unassigned DNA
ggcaaacacaaccagagtcttcggtgttaattccctggtcttcccaactagcattctgaaagtgcattaacatttgtggccttgtgctctttcatcggacttctaatgatagctttccaatgattagacgaattgattctttctgtgactcatcagttcatttcctgtaaaattcatgtcttgctgttgatttgtgaataagaaccagagcttgtagaaaccactttaatcatatccaggagtttgcaagaaacaggtgcttaacactaattcacctcctgaacaagaaaaatgggctgtgaccggaactgtgggctcatcgctggggctgtcattggtgctgtcctggctgtgtttggaggtattctaatgccagttggagacctgcttatccagaagacaattaaaaagcaagttgtcctcgaagaaggtacaattgcttttaaaaattgggttaaaacaggcacagaagtttacagacagttttggatctttgatgtgcaaaatccacaggaagtgatgatgaacagcagcaacattcaagttaagcaaagaggtccttatacgtacagagttcgttttctagccaaggaaaatgtaacccaggacgctgaggacaacacagtctctttcctgcagcccaatggtgccatcttcgaaccttcactatcagttggaacagaggctgacaacttcacagttctcaatctggctgtggca

SEQ ID NO: 5099 - DNA, 2298 bp, Homo sapiens
  source 1..2298: mol_type = unassigned DNA
atttgatcctattaagaattgtccaaatgttggagcatttgattgaaaaatccttcttagccattttaaagatagctttccaatgattagacgaattgattctttctgtgactcatcagttcatttcctgtaaaattcatgtcttgctgttgatttgtgaataagaaccagagcttgtagaaaccactttaatcatatccaggagtttgcaagaaacaggtgcttaacactaattcacctcctgaacaagaaaaatgggctgtgaccggaactgtgggctcatcgctggggctgtcattggtgctgtcctggctgtgtttggaggtattctaatgccagttggagacctgcttatccagaagacaattaaaaagcaagttgtcctcgaagaaggtacaattgcttttaaaaattgggttaaaacaggcacagaagtttacagacagttttggatctttgatgtgcaaaatccacaggaagtgatgatgaacagcagcaacattcaagttaagcaaagaggtccttatacgtacagagttcgttttctagccaaggaaaatgtaacccaggacgctgaggacaacacagtctctttcctgcagcccaatggtgccatcttcgaaccttcactatcagttggaacagaggctgacaacttcacagttctcaatctggctgtggcagctgcatcccatatctatcaaaatcaatttgttcaaatgatcctcaattcacttattaacaagtcaaaatcttctatgttccaagtcagaactttgagagaactgttatggggctatagggatccatttttgagtttggttccgtaccctgttactaccacagttggtctgttttatccttacaacaatactgcagatggagtttataaagttttcaatggaaaagataacataagtaaagttgccataatcgacacatataaaggtaaaaggaatctgtcctattgggaaagtcactgcgacatgattaatggtacagatgcagcctcatttccaccttttgttgagaaaagccaggtattgcagttcttttcttctgatatttgcaggtcaatctatgctgtatttgaatccgacgttaatctgaaaggaatccctgtgtatagatttgttcttccatccaaggcctttgcctctccagttgaaaacccagacaactattgtttctgcacagaaaaaattatctcaaaaaattgtacatcatatggtgtgctagacatcagcaaatgcaaagaagggagacctgtgtacatttcacttcctcattttctgtatgcaagtcctgatgtttcagaacctattgatggattaaacccaaatgaagaagaacataggacatacttggatattgaacctataactggattcactttacaatttgcaaaacggctgcaggtcaacctattggtcaagccatcagaaaaaattcaagtattaaagaatctgaagaggaactatattgtgcctattctttggcttaatgagactgggaccattggtgatgagaaggcaaacatgttcagaagtcaagtaactggaaaaataaacctccttggcctgatagaaatgatcttactcagtgttggtgtggtgatgtttgttgcttttatgatttcatattgtgcatgcagatcgaaaacaataaaataaacctggctcaagcacaaaccaatttgtgttgttctgattcaataattggtttctgggtggccaattcagaagaagagtgtacatgctcaacaaatcctaggccctgcattcctgtcatcctcatccgggggaaacaccatcatcccagtagctgccctattcaactgcaacagtctccaggaccatcagtatactgcatttcatgtgcaccaaatattttgaaagacatttataaataattggcttatgactcatatttctctatgaataccttcatacagcaggtataactcttttctttatgggcttaaatattttgtcactgatcctgcaaatggacatcattttagcacactagcggtttatattttaaggaccttcattctctgttctgcacctcttctggaaattgagtaaattttgcttttttttttttactcagttgcaacttacgcttggcatcttcagaatgcttttctagcattaagagatgtaaatgataaaggaattattgtatgaaatattacaaagcgtagactatgcattgttattcattataatattttttgctgtcataatcgcctcataaagacaggtttcaaccattaaaatatgttcttcctta

SEQ ID NO: 5100 - DNA, 569 bp, Homo sapiens
  source 1..569: mol_type = unassigned DNA
gactgcagtgtaggactttcctgcagaataccatttgatcctattaagaattgtccaaatgttggagcatttgattgaaaaatccttcttagccattttaaagactcattagtgaaccagaacaataaaccaaacagagaaccatcagataatgggttagcctgggaagaatattaattacaactggagatagctttccaatgattagacgaattgattctttctgtgactcatcagttcatttcctgtaaaattcatgtcttgctgttgatttgtgaataagaaccagagcttgtagaaaccactttaatcatatccaggagtttgcaagaaacaggtgcttaacactaattcacctcctgaacaagaaaaatgggctgtgaccggaactgtgggctcatcgctggggctgtcattggtgctgtcctggctgtgtttggaggtattctaatgccagttggagacctgcttatccagaagacaattaaaaagcaagttgtcctcgaagaaggtacaattgcttttaaaaattgggttaaaacaggcacagaagtttacagacagttttg

SEQ ID NO: 5101 - DNA, 1741 bp, Homo sapiens
  source 1..1741: mol_type = unassigned DNA
agatgtcaggataaccttaaggatagatgaagggttgagagcctgtgcctcatttctgagttctcagctgctatgccgtggaaatcctgtttactttctgcatctgctcctgcaagactctggagccagtcttgaggtcctacatctccgaaagcaagctcttctagaagttgcaagttgtcctcgaagaaggtacaattgcttttaaaaattgggttaaaacaggcacagaagtttacagacagttttggatctttgatgtgcaaaatccacaggaagtgatgatgaacagcagcaacattcaagttaagcaaagaggtccttatacgtacagagttcgttttctagccaaggaaaatgtaacccaggacgctgaggacaacacagtctctttcctgcagcccaatggtgccatcttcgaaccttcactatcagttggaacagaggctgacaacttcacagttctcaatctggctgtggcagctgcatcccatatctatcaaaatcaatttgttcaaatgatcctcaattcacttattaacaagtcaaaatcttctatgttccaagtcagaactttgagagaactgttatggggctatagggatccatttttgagtttggttccgtaccctgttactaccacagttggtctgttttatccttacaacaatactgcagatggagtttataaagttttcaatggaaaagataacataagtaaagttgccataatcgacacatataaaggtaaaaggaatctgtcctattgggaaagtcactgcgacatgattaatggtacagatgcagcctcatttccaccttttgttgagaaaagccaggtattgcagttcttttcttctgatatttgcaggtcaatctatgctgtatttgaatccgacgttaatctgaaaggaatccctgtgtatagatttgttcttccatccaaggcctttgcctctccagttgaaaacccagacaactattgtttctgcacagaaaaaattatctcaaaaaattgtacatcatatggtgtgctagacatcagcaaatgcaaagaagggagacctgtgtacatttcacttcctcattttctgtatgcaagtcctgatgtttcagaacctattgatggattaaacccaaatgaagaagaacataggacatacttggatattgaacctataactggattcactttacaatttgcaaaacggctgcaggtcaacctattggtcaagccatcagaaaaaattcaagtattaaagaatctgaagaggaactatattgtgcctattctttggcttaatgagactgggaccattggtgatgagaaggcaaacatgttcagaagtcaagtaactggaaaaataaacctccttggcctgatagaaatgatcttactcagtgttggtgtggtgatgtttgttgcttttatgatttcatattgtgcatgcagatcgaaaacaataaaataagtaagtatgtaccaaaaaatattgcttcaataatattagcttatatattacttgttttcactttatcaaagagaagttacatattaggccatatatatttctagacatgtctagccactgatcatttttaaatataggtaaataaacctataaatattatcacgcagatcactaaagtatatctttaattctgggagaaatgagataaaagatgtacttgtgaccattgtaacaatagcacaaataaagcacttgtgccaaagttgtcc

SEQ ID NO: 5102 - DNA, 1364 bp, Homo sapiens
  source 1..1364: mol_type = unassigned DNA
agaaccagagcttgtagaaaccactttaatcatatccaggagtttgcaagaaacaggtgcttaacactaattcacctcctgaacaagaaaaatgggctgtgaccggaactgtgggctcatcgctggggctgtcattggtgctgtcctggctgtgtttggaggtattctaatgccagttggagacctgcttatccagaagacaattaaaaagcaagttgtcctcgaagaaggtacaattgcttttaaaaattgggttaaaacaggcacagaagtttacagacagttttggatctttgatgtgcaaaatccacaggaagtgatgatgaacagcagcaacattcaagttaagcaaagaggtccttatacgtacagagttcgttttctagccaaggaaaatgtaacccaggacgctgaggacaacacagtctctttcctgcagcccaatggtgccatcttcgaaccttcactatcagttggaacagaggctgacaacttcacagttctcaatctggctgtggcatacaacaatactgcagatggagtttataaagttttcaatggaaaagataacataagtaaagttgccataatcgacacatataaaggtaaaaggaatctgtcctattgggaaagtcactgcgacatgattaatggtacagatgcagcctcatttccaccttttgttgagaaaagccaggtattgcagttcttttcttctgatatttgcaggtcaatctatgctgtatttgaatccgacgttaatctgaaaggaatccctgtgtatagatttgttcttccatccaaggcctttgcctctccagttgaaaacccagacaactattgtttctgcacagaaaaaattatctcaaaaaattgtacatcatatggtgtgctagacatcagcaaatgcaaagaagggagacctgtgtacatttcacttcctcattttctgtatgcaagtcctgatgtttcagaacctattgatggattaaacccaaatgaagaagaacataggacatacttggatattgaacctataactggattcactttacaatttgcaaaacggctgcaggtcaacctattggtcaagccatcagaaaaaattcaagtattaaagaatctgaagaggaactatattgtgcctattctttggcttaatgagactgggaccattggtgatgagaaggcaaacatgttcagaagtcaagtaactggaaaaataaacctccttggcctgatagaaatgatcttactcagtgttggtgtggtgatgtttgttgcttttatgatttcatattgtgcatgcagatcgaaaacaataaaataagtaagtatgtaccaaaaaatattgcttcaataat

SEQ ID NO: 5103 - DNA, 1353 bp, Homo sapiens
  source 1..1353: mol_type = unassigned DNA
agaaccagagcttgtagaaaccactttaatcatatccaggagtttgcaagaaacaggtgcttaacactaattcacctcctgaacaagaaaaatgggctgtgaccggaactgtgggctcatcgctggggctgtcattggtgctgtcctggctgtgtttggaggtattctaatgccagttggagacctgcttatccagaagacaattaaaaagcaagttgtcctcgaagaaggtacaattgcttttaaaaattgggttaaaacaggcacagaagtttacagacagttttggatctttgatgtgcaaaatccacaggaagtgatgatgaacagcagcaacattcaagttaagcaaagaggtccttatacgtacagagttcgttttctagccaaggaaaatgtaacccaggacgctgaggacaacacagtctctttcctgcagcccaatggtgccatcttcgaaccttcactatcagttggaacagaggctgacaacttcacagttctcaatctggctgtggcagctgcatcccatatctatcaaaatcaatttgttcaaatgatcctcaattcacttattaacaagtcaaaatcttctatgttccaagtcagaactttgagagaactgttatggggctatagggatccatttttgagtttggttccgtaccctgttactaccacagttggtctgttttatccttacaacaatactgcagatggagtttataaagttttcaatggaaaagataacataagtaaagttgccataatcgacacatataaaggtaaaaggaatctgtcctattgggaaagtcactgcgacatgattaatggtacagatgcagcctcatttccaccttttgttgagaaaagccaggtattgcagttcttttcttctgatatttgcagggagacctgtgtacatttcacttcctcattttctgtatgcaagtcctgatgtttcagaacctattgatggattaaacccaaatgaagaagaacataggacatacttggatattgaacctataactggattcactttacaatttgcaaaacggctgcaggtcaacctattggtcaagccatcagaaaaaattcaagtattaaagaatctgaagaggaactatattgtgcctattctttggcttaatgagactgggaccattggtgatgagaaggcaaacatgttcagaagtcaagtaactggaaaaataaacctccttggcctgatagaaatgatcttactcagtgttggtgtggtgatgtttgttgcttttatgatttcatattgtgcatgcagatcgaaaacaataaaataagtaagtatgtaccaaaaaatattgcttcaat

SEQ ID NO: 5104 - DNA, 1241 bp, Homo sapiens
  source 1..1241: mol_type = unassigned DNA
ttcctttctctctcagctctccgtctctctttctctctcagcctctttctttctccctgtctcccccactgtcagcacctcttctgtgtggtgagtggaccgcttaccccactaggtgaagatgtcagcccaggagagctgcctcagcctcatcaagtacttcctcttcgttttcaacctcttcttcttcgtcctcggcagcctgatcttctgcttcggcatctggatcctcattgacaagaccagcttcgtgtcctttgtgggcttggccttcgtgcctctgcagatctggtccaaagtcctggccatctcaggaatcttcaccatgggcatcgccctcctgggttgtgtgggggccctcaaggagctccgctgcctcctgggcctgtattttgggatgctgctgctcctgtttgccacacagatcaccctgggaatcctcatctccactcagcgggcccagctggagcgaagcttgcgggacgtcgtagagaaaaccatccaaaagtacggcaccaaccccgaggagaccgcggccgaggagagctgggactatgtgcagttccagctgcgctgctgcggctggcactacccgcaggactggttccaagtcctcatcctgagaggtaacgggtcggaggcgcaccgcgtgccctgctcctgctacaacttgtcggcgaccaacgactccacaatcctagataaggtgatcttgccccagctcagcaggcttggacacctggcgcggtccagacacagtgcagacatctgcgctgtccctgcagagagccacatctaccgcgagggctgcgcgcagggcctccagaagtggctgcacaacaaccttatttccatagtgggcatttgcctgggcgtcggcctactcgagctcgggttcatgacgctctcgatattcctgtgcagaaacctggaccacgtctacaaccggctcgctcgataccgttaggccccgccctccccaaagtcccgccccgcccccgtcacgtgcgctgggcacttccctgctgcctgtaaatatttgtttaatccccagttcgcctggagccctccgccttcacattcccctggggacccacgtggctgcgtgcccctgctgctgtcacctctcccacgggacctggggctttcgtccacagcttcctgtccccatctgtcggcctaccaccacccacaagattatttttcacccaaacctcaaataaatcccctgcgtttttggt

SEQ ID NO: 5105 - DNA, 1588 bp, Homo sapiens
  source 1..1588: mol_type = unassigned DNA
atgcccagaggtgggttccagtagatcaggggtccctttagatcccccagcgcctgagacatggagacctgggagggactgccccatgagtccttggtgcccacaaattccaaggcccctcagcacctcttctgtgtggtgagtggaccgcttaccccactaggtgaagatgtcagcccaggagagctgcctcagcctcatcaagtacttcctcttcgttttcaacctcttcttcttcgtcctcggcagcctgatcttctgcttcggcatctggatcctcattgacaagaccagcttcgtgtcctttgtgggcttggccttcgtgcctctgcagatctggtccaaagtcctggccatctcaggaatcttcaccatgggcatcgccctcctgggttgtgtgggggccctcaaggagctccgctgcctcctgggcctgtattttgggatgctgctgctcctgtttgccacacagatcaccctgggaatcctcatctccactcagcgggcccagaaagacacaccgacctggaccaagggagacaggcataaacagctccaaagggaaacacacgggaaaaagagagaacaagagaaagaaatagacgccctgaaagaagagacagagacttatgagccgtagaaatagtggaagaaacagaaagacagacctgaagtacacagagctagccattcagtaaggatttgagactggcccagagatgcacagggcccgcctgaggctggcacagcctgagagggggaggggtggggcggggaagataaggcccagcctcactggtggcctctcagctggagcgaagcttgcgggacgtcgtagagaaaaccatccaaaagtacggcaccaaccccgaggagaccgcggccgaggagagctgggactatgtgcagttccagctgcgctgctgcggctggcactacccgcaggactggttccaagtcctcatcctgagaggtaacgggtcggaggcgcaccgcgtgccctgctcctgctacaacttgtcggcgaccaacgactccacaatcctagataaggtgatcttgccccagctcagcaggcttggacacctggcgcggtccagacacagtgcagacatctgcgctgtccctgcagagagccacatctaccgcgagggctgcgcgcagggcctccagaagtggctgcacaacaaccttatttccatagtgggcatttgcctgggcgtcggcctactcgagctcgggttcatgacgctctcgatattcctgtgcagaaacctggaccacgtctacaaccggctcgctcgataccgttaggccccgccctccccaaagtcccgccccgcccccgtcacgtgcgctgggcacttccctgctgcctgtaaatatttgtttaatccccagttcgcctggagccctccgccttcacattcccctggggacccacgtggctgcgtgcccctgctgctgtcacctctcccacgggacctggggctttcgtccacagcttcctgtccccatctgtcggcctaccaccacccacaagattatttttcacccaaacctcaaataaatcccctgcgtttttggt

SEQ ID NO: 5106 - DNA, 1207 bp, Homo sapiens
  source 1..1207: mol_type = unassigned DNA
ttcctttctctctcagctctccgtctctctttctctctcagcctctttctttctccctgtctcccccactgtcagcacctcttctgtgtggtgagtggaccgcttaccccactaggtgaagatgtcagcccaggagagctgcctcagcctcatcaagtcctcggcagcctgatcttctgcttcggcatctggatcctcattgacaagaccagcttcgtgtcctttgtgggcttggccttcgtgcctctgcagatctggtccaaagtcctggccatctcaggaatcttcaccatgggcatcgccctcctgggttgtgtgggggccctcaaggagctccgctgcctcctgggcctgtattttgggatgctgctgctcctgtttgccacacagatcaccctgggaatcctcatctccactcagcgggcccagctggagcgaagcttgcgggacgtcgtagagaaaaccatccaaaagtacggcaccaaccccgaggagaccgcggccgaggagagctgggactatgtgcagttccagctgcgctgctgcggctggcactacccgcaggactggttccaagtcctcatcctgagaggtaacgggtcggaggcgcaccgcgtgccctgctcctgctacaacttgtcggcgaccaacgactccacaatcctagataaggtgatcttgccccagctcagcaggcttggacacctggcgcggtccagacacagtgcagacatctgcgctgtccctgcagagagccacatctaccgcgagggctgcgcgcagggcctccagaagtggctgcacaacaaccttatttccatagtgggcatttgcctgggcgtcggcctactcgagctcgggttcatgacgctctcgatattcctgtgcagaaacctggaccacgtctacaaccggctcgctcgataccgttaggccccgccctccccaaagtcccgccccgcccccgtcacgtgcgctgggcacttccctgctgcctgtaaatatttgtttaatccccagttcgcctggagccctccgccttcacattcccctggggacccacgtggctgcgtgcccctgctgctgtcacctctcccacgggacctggggctttcgtccacagcttcctgtccccatctgtcggcctaccaccacccacaagattatttttcacccaaacctcaaataaatcccctgcgtttttggt

SEQ ID NO: 5107 - DNA, 1571 bp, Homo sapiens
  source 1..1571: mol_type = unassigned DNA
actaggtgaagatgtcagcccaggagagctgcctcagcctcatcaagtacttcctcttcgttttcaacctcttcttcttcgtcctcggcagcctgatcttctgcttcggcatctggatcctcattgacaagaccagcttcgtgtcctttgtgggcttggccttcgtgcctctgcagatctggtccaaagtcctggccatctcaggaatcttcaccatgggcatcgccctcctgggttgtgtgggggccctcaaggagctccgctgcctcctgggcctgtattttgggatgctgctgctcctgtttgccacacagatcaccctgggaatcctcatctccactcagcgggcccagctggagcgaagcttgcgggacgtcgtagagaaaaccatccaaaagtacggcaccaaccccgaggagaccgcggccgaggagagctgggactatgtgcagttccagctgcgctgctgcggctggcactacccgcaggactggttccaagtcctcatcctgagaggtaacgggtcggaggcgcaccgcgtgccctgctcctgctacaacttgtcggcgaccaacgactccacaatcctagataaggtgatcttgccccagctcagcaggcttggacacctggcgcggtccagacacagtgcagacatctgcgctgtccctgcagagagccacatctaccgcgagggctgcgcgcagggcctccagaagtggctgcacaacaaccttatttccatagtgggcatttgcctgggcgtcggcctactcgaggtgatctggccccgcccccacccgcgatcggccctaaatccctagatggccctgcccttcatttcgcgtccttcggttgcctgggaaggacgagctcagggcggagcgcagcccaccccggccctcccgccgctccacccagcaccggagggtgggggcggcccagcttcagggagccctgattgggtgtacgcagggaaagcctcctgctattggctgcgatctccctcccctttctccgcagatgactgtcatggtgctgagcgtacagctacagcgcagggcactccgccggaaatgcgagccgcacgtgccgggcgctggggattcgagccccgggcccagcctgatcgctgacggcggcggcgggcacagcggcagtctgtggggtggctggggcatggcgggtgcctgccccaactggggagacaaggcaccgcagggcaagctgcccatggccctggggctctggccgctgtgggttcaagacgaggaccagcctgacactggaagtgcgggcgcagaattagaggaggcacaattagaggctgaggcagagggggaagacagatgagcctccaaaataaaggaccctgggcttgcttccgaccttactccttctcagcctctacccccacttgtagcagctattcccgcctcatcagccagccctgcggcagttcccgtcgagccccgcccttttctacctatccccttctccagccccttcccgcccaattcacggccccacccctgacctttctcgcccgggtgggcatcacccccgtctcg

SEQ ID NO: 5108 - DNA, 1884 bp, Homo sapiens
  source 1..1884: mol_type = unassigned DNA
gggggtgggaagggaaacagagaaaaggcaagtgaaacagaaggggaggtgcagtttcagaacccagccagcctctctcttgctgcctagcctcctgccggcctcatcttcgcccagccaaccccgcctggagccctatggccaactgcgagttcagcccggtgtccggggacaaaccctgctgccggctctctaggagagcccaactctgtcttggcgtcagtatcctggtcctgatcctcgtcgtggtgctcgcggtggtcgtcccgaggtggcgccagcagtggagcggtccgggcaccaccaagcgctttcccgagaccgtcctggcgcgatgcgtcaagtacactgaaattcatcctgagatgagacatgtagactgccaaagtgtatgggatgctttcaagggtgcatttatttcaaaacatccttgcaacattactgaagaagactatcagccactaatgaagttgggaactcagaccgtaccttgcaacaagattcttctttggagcagaataaaagatctggcccatcagttcacacaggtccagcgggacatgttcaccctggaggacacgctgctaggctaccttgctgatgacctcacatggtgtggtgaattcaacacttccaaaataaactatcaatcttgcccagactggagaaaggactgcagcaacaaccctgtttcagtattctggaaaacggtttcccgcaggtttgcagaagctgcctgtgatgtggtccatgtgatgctcaatggatcccgcagtaaaatctttgacaaaaacagcacttttgggagtgtggaagtccataatttgcaaccagagaaggttcagacactagaggcctgggtgatacatggtggaagagaagattccagagacttatgccaggatcccaccataaaagagctggaatcgattataagcaaaaggaatattcaattttcctgcaagaatatctacagacctgacaagtttcttcagtgtgtgaaaaatcctgaggattcatcttgcacatctgagatctgagccagtcgctgtggttgttttagctccttgactccttgtggtttatgtcatcatacatgactcagcatacctgctggtgcagagctgaagattttggagggtcctccacaataaggtcaatgccagagacggaagcctttttccccaaagtcttaaaataacttatatcatcagcatacctttattgtgatctatcaatagtcaagaaaaattattgtataagattagaatgaaaattgtatgttaagttacttcactttaattctcatgtgatccttttatgttatttatatattggtaacatcctttctattgaaaaatcaccacaccaaacctctcttattagaacaggcaagtgaagaaaagtgaatgctcaagtttttcagaaagcattacatttccaaatgaatgaccttgttgcatgatgtatttttgtacccttcctacagatagtcaaaccataaacttcatggtcatgggtcatgttggtgaaaattattctgtaggatataagctacccacgtacttggtgctttaccccaacccttccaacagtgctgtgaggttggtattatttcattttttagatgagaaaatgggagctcagagaggttatatatttaagttggtgcaaaagtaattgcaagttttgccaccgaaaggaatggcaaaaccacaattatttttgaaccaacctaataatttaccgtaagtcctacatttagtatcaagctagagactgaatttgaactcaactctgtccaactccaaaattcatgtgctttttccttctaggcctttcataccaaactaatagtagtttatattctcttccaacaaatgc

SEQ ID NO: 5109 - DNA, 1357 bp, Homo sapiens
  source 1..1357: mol_type = unassigned DNA
agtgaaacagaaggggaggtgcagtttcagaacccagccagcctctctcttgctgcctagcctcctgccggcctcatcttcgcccagccaaccccgcctggagccctatggccaactgcgagttcagcccggtgtccggggacaaaccctgctgccggctctctaggagagcccaactctgtcttggcgtcagtatcctggtcctgatcctcgtcgtggtgctcgcggtggtcgtcccgaggtggcgccagcagtggagcggtccgggcaccaccaagcgctttcccgagaccgtcctggcgcgatgcgtcaagtacactgaaattcatcctgagatgagacatgtagactgccaaagtgtatgggatgctttcaagggtgcatttatttcaaaacatccttgcaacattactgaagaagactatcagccactaatgaagttgggaactcagaccgtaccttgcaacaagaatgaaactatcaatcttgcccagactggagaaaggactgcagcaacaaccctgtttcagtattctggaaaacggtttcccgcaggtttgcagaagctgcctgtgatgtggtccatgtgatgctcaatggatcccgcagtaaaatctttgacaaaaacagcacttttgggagtgtggaagtccataatttgcaaccagagaaggttcagacactagaggcctgggtgatacatggtggaagagaagattccagagacttatgccaggatcccaccataaaagagctggaatcgattataagcaaaaggaatattcaattttcctgcaagaatatctacagacctgacaagtttcttcagtgtgtgaaaaatcctgaggattcatcttgcacatctgagatctgagccagtcgctgtggttgttttagctccttgactccttgtggtttatgtcatcatacatgactcagcatacctgctggtgcagagctgaagattttggagggtcctccacaataaggtcaatgccagagacggaagcctttttccccaaagtcttaaaataacttatatcatcagcatacctttattgtgatctatcaatagtcaagaaaaattattgtataagattagaatgaaaattgtatgttaagttacttcactttaattctcatgtgatccttttatgttatttatatattggtaacatcctttctattgaaaaatcaccacaccaaacctctcttattagaacaggcaagtgaagaaaagtgaatgctcaagtttttcagaaagcattacatttccaaatgaatgaccttgttgcatgatgtatttttgtacccttcctacagatagtcaaaccataaacttcatggtcatgggtca

SEQ ID NO: 5110 - DNA, 1548 bp, Homo sapiens
  source 1..1548: mol_type = unassigned DNA
gctaaatgtcatgtatttttcatggcccctccaggtattgtcagagtcctcttgtttggccttctaggaaggctgtgggacccagctttcttcaaccagtccaggtggaggcctctgccttgaacgtttccaagtgaggtaaaacccgcaggcccagaggcctctctacttcctgtgtggggttcagaaaccctcctcccctcccagcctcaggtgcctgcttcagaaaatgaagtagtaagtctgctggcctccgccatcttagtaaagtaacagtcccatgaaacaaagatgcagtcgggcactcactggagagttctgggcctctgcctcttatcagttggcgtttgggggcaagatggtaatgaagaaatgggtggtattacacagacaccatataaagtctccatctctggaaccacagtaatattgacatgccctcagtatcctggatctgaaatactatggcaacacaatgataaaaacataggcggtgatgaggatgataaaaacataggcagtgatgaggatcacctgtcactgaaggaattttcagaattggagcaaagtggttattatgtctgctaccccagaggaagcaaaccagaagatgcgaacttttatctctacctgagggcaagagtgtgtgagaactgcatggagatggatgtgatgtcggtggccacaattgtcatagtggacatctgcatcactgggggcttgctgctgctggtttactactggagcaagaatagaaaggccaaggccaagcctgtgacacgaggagcgggtgctggcggcaggcaaaggggacaaaacaaggagaggccaccacctgttcccaacccagactatgagcccatccggaaaggccagcgggacctgtattctggcctgaatcagagacgcatctgaccctctggagaacactgcctcccgctggcccaggtctcctctccagtccccctgcgactccctgtttcctgggctagtcttggaccccacgagagagaatcgttcctcagcctcatggtgaactcgcgccctccagcctgatcccccgctccctcctccctgccttctctgctggtacccagtcctaaaatattgctgcttcctcttcctttgaagcatcatcagtagtcacaccctcacagctggcctgccctcttgccaggatatttatttgtgctattcactcccttccctttggatgtaacttctccgttcagttccctccttttcttgcatgtaagttgtcccccatcccaaagtattccatctacttttctatcgccgtccccttttgcagccctctctggggatggactgggtaaatgttgacagaggccctgccccgttcacagatcctggccctgagccagccctgtgctcctccctcccccaacactccctaccaaccccctaatcccctactccctccaccccccctccactgtaggccactggatggtcatttgcatctccgtaaatgtgctctgctcctcagctgagagagaaaaaaataaactgtatttggctgcaaga

SEQ ID NO: 5111 - DNA, 1289 bp, Homo sapiens
  source 1..1289: mol_type = unassigned DNA
gtaagtctgctggcctccgccatcttagtaaagtaacagtcccatgaaacaaagatgcagtcgggcactcactggagagttctgggcctctgcctcttatcagttggcgtttgggggcaagatggtaatgaagaaatggcatataaagtctccatctctggaaccacagtaatattgacatgccctcagtatcctggatctgaaatactatggcaacacaatgataaaaacataggcggtgatgaggatgataaaaacataggcagtgatgaggatcacctgtcactgaaggaattttcagaattggagcaaagtggttattatgtctgctaccccagaggaagcaaaccagaagatgcgaacttttatctctacctgagggcaagagtgtgtgagaactgcatggagatggatgtgatgtcggtggccacaattgtcatagtggacatctgcatcactgggggcttgctgctgctggtttactactggagcaagaatagaaaggccaaggccaagcctgtgacacgaggagcgggtgctggcggcaggcaaaggggacaaaacaaggagaggccaccacctgttcccaacccagactatgagcccatccggaaaggccagcgggacctgtattctggcctgaatcagagacgcatctgaccctctggagaacactgcctcccgctggcccaggtctcctctccagtccccctgcgactccctgtttcctgggctagtcttggaccccacgagagagaatcgttcctcagcctcatggtgaactcgcgccctccagcctgatcccccgctccctcctccctgccttctctgctggtacccagtcctaaaatattgctgcttcctcttcctttgaagcatcatcagtagtcacaccctcacagctggcctgccctcttgccaggatatttatttgtgctattcactcccttccctttggatgtaacttctccgttcagttccctccttttcttgcatgtaagttgtcccccatcccaaagtattccatctacttttctatcgccgtccccttttgcagccctctctggggatggactgggtaaatgttgacagaggccctgccccgttcacagatcctggccctgagccagccctgtgctcctccctcccccaacactccctaccaaccccctaatcccctactccctccaccccccctccactgtaggccactggatggtcatttgcatctccgtaaatgtgctctgctcctcagctgagagagaaaaaaataaactgtatttggctgc

SEQ ID NO: 5112 - DNA, 1179 bp, Homo sapiens
  source 1..1179: mol_type = unassigned DNA
agtctagctgctgcacaggctggctggctggctggctgctaagggctgctccacgcttttgccggaggacagagactgacatggaacaggggaagggcctggctgtcctcatcctggctatcattcttcttcaaggtactttggcccagtcaatcaaaggaaaccacttggttaaggtgtatgactatcaagaagatggttcggtacttctgacttgtgatgcagaagccaaaaatatcacatggtttaaagatgggaagatgatcggcttcctaactgaagataaaaaaaaatggaatctgggaagtaatgccaaggaccctcgagggatgtatcagtgtaaaggatcacagaacaagtcaaaaccactccaagtgtattacagaacttcagacaagcagactctgttgcccaatgaccagctctaccagcccctcaaggatcgagaagatgaccagtacagccaccttcaaggaaaccagttgaggaggaattgaactcaggactcagagtagtccaggtgttctcctcctattcagttcccagaatcaaagcaatgcattttggaaagctcctagcagagagactttcagccctaaatctagactcaaggttcccagagatgacaaatggagaagaaaggccatcagagcaaatttgggggtttctcaaataaaataaaaataaaaacaaatactgtgtttcagaagcgccacctattggggaaaattgtaaaagaaaaatgaaaagatcaaataaccccctggatttgaatataattttttgtgttgtaatttttatttcgtttttgtataggttataattcacatggctcaaatattcagtgaaagctctccctccaccgccatcccctgctacccagtgaccctgttgccctcttcagagacaaattagtttctcttttttttttttttttttttttttttgagacagtctggctctgtcacccaggctgaaatgcagtggcaccatctcggctcactgcaacctctgcctcctgggttcaagcgattctcctgcctcagcctcccgggcagctgggattacaggcacacactaccacacctggctaatttttgtatttttagtagagacagggttttgctctgttggccaagctggtctcgaactcctgacctcaagtgatccgcccgcctc

SEQ ID NO: 5113 - DNA, 2678 bp, Homo sapiens
  source 1..2678: mol_type = unassigned DNA
gcacaggctggctggctggctggctgctaagggctgctccacgcttttgccggaggacagagactgacatggaacaggggaagggcctggctgtcctcatcctggctatcattcttcttcaaggtactttggcccagtcaatcaaaggaaaccacttggttaaggtgtatgactatcaagaagatggttcggtacttctgacttgtgatgcagaagccaaaaatatcacatggtttaaagatgggaagatgatcggcttcctaactgaagataaaaaaaaatggaatctgggaagtaatgccaaggaccctcgagggatgtatcagtgtaaaggatcacagaacaagtcaaaaccactccaagtgtattacagaatgtgtcagaactgcattgaactaaatgcagccaccatatctggctttctctttgctgaaatcgtcagcattttcgtccttgctgttggggtctacttcattgctggacaggatggagttcgccagtcgagagcttcagacaagcagactctgttgcccaatgaccagctctaccagcccctcaaggatcgagaagatgaccagtacagccaccttcaaggaaaccagttgaggaggaattgaactcaggactcagagtagtccaggtgttctcctcctattcagttcccagaatcaaagcaatgcattttggaaagctcctagcagagagactttcagccctaaatctagactcaaggttcccagagatgacaaatggagaagaaaggccatcagagcaaatttgggggtttctcaaataaaataaaaataaaaacaaatactgtgtttcagaagcgccacctattggggaaaattgtaaaagaaaaatgaaaagatcaaataaccccctggatttgaatataattttttgtgttgtaatttttatttcgtttttgtataggttataattcacatggctcaaatattcagtgaaagctctccctccaccgccatcccctgctacccagtgaccctgttgccctcttcagagacaaattagtttctcttttttttttttttttttttttttttgagacagtctggctctgtcacccaggctgaaatgcagtggcaccatctcggctcactgcaacctctgcctcctgggttcaagcgattctcctgcctcagcctcccgggcagctgggattacaggcacacactaccacacctggctaatttttgtatttttagtagagacagggttttgctctgttggccaagctggtctcgaactcctgacctcaagtgatccgcccgcctcagcctcccaaagtgctgggattacaggtgtgagccaccatgcctggtcttaaaaccagtttcttatatatctctctggaggtattctaggcatatatgagcacattctcaagtacatattatcctcccttcccctatcttttagacaaatgatatcaaactatacatcttgtgagattattgcataccattatatgaagataccattatatcctttttaatgcaaccatattgtacaaatagactatgatttatttaacctgttatctatcagtggatatttaagttggtagttggttccaatcttttgctcttacaacaattctgcaatgactaacattgtataaatatcatttttaaaaataattgcattgaagcataatgtacatgccataaaatccacccatcttaagtgatttcacctgttctcagaaatttttagtaaatttaactaattgtacagccattaccataatccagctttaggacattttcttttttttcttttcttttcttttttttcttttttttttttttttgaagtggaatcttgctctgtggcccaggctggagtgcagtggcgcgatctcagctcactgcaacctccacctcctgggttcaagcgattctcttgccttggcctcccgagtagctgagactacaggcacatgccaccacgcccagctcattttttgtgtatttagtatttgtgtatctagtatttgtgtacttagtagagacagggtttcaccatgttggccaggctggtctccaattcctgacctcaggcgatccacccgccttgacctcccaaagtgctgggattacaggtgtgagccaccgcgccaggcccgtaactgtattttaatatagccattctatggatttaatatggtattttattatggccttaatttgcatttccctagatactaaccatgctgagtgtcctgtcttgtgtttattaaccattcatatatttttagtgaaatgtgtatcaaatcttttgcccatttttaagttgacttatttgtttgtcttcttactattgggttgcatatgtttttgatataagtcctttatcagatatatgatttggaaatattttctaccaatctgtggtttgtttttcttaatggtgtcttttgaagtgcaaaaggtttgaattttgaagtacattttattgattttttcttctatatattgtgcttttggtatcatgtctaataaatctttaccaaacccacagttacaaagattttctcctgtcttctttttatactttttacagctttatggttttagctctaacaataaatgtgattttgaacatacataagactatttgtaacaaacacaaataaattgaattgttgggca

SEQ ID NO: 5114 - DNA, 3278 bp, Homo sapiens
  source 1..3278: mol_type = unassigned DNA
gctcgggccacgcccacctgtcctgcagcactggatgctttgtgagttggggattgttgcgtcccatatctggacccagaagggacttccctgctcggctggctctcggtttctctgctttcctccggagaaataacagcgtcttccgcgccgcgcatggagcctcccggccgccgcgagtgtccctttccttcctggcgctttcctgggttgcttctggcggccatggtgttgctgctgtactccttctccgatgcctgtgaggagccaccaacatttgaagctatggagctcattggtaaaccaaaaccctactatgagattggtgaacgagtagattataagtgtaaaaaaggatacttctatatacctcctcttgccacccatactatttgtgatcggaatcatacatggctacctgtctcagatgacgcctgttatagagaaacatgtccatatatacgggatcctttaaatggccaagcagtccctgcaaatgggacttacgagtttggttatcagatgcactttatttgtaatgagggttattacttaattggtgaagaaattctatattgtgaacttaaaggatcagtagcaatttggagcggtaagcccccaatatgtgaaaaggttttgtgtacaccacctccaaaaataaaaaatggaaaacacacctttagtgaagtagaagtatttgagtatcttgatgcagtaacttatagttgtgatcctgcacctggaccagatccattttcacttattggagagagcacgatttattgtggtgacaattcagtgtggagtcgtgctgctccagagtgtaaagtggtcaaatgtcgatttccagtagtcgaaaatggaaaacagatatcaggatttggaaaaaaattttactacaaagcaacagttatgtttgaatgcgataagggtttttacctcgatggcagcgacacaattgtctgtgacagtaacagtacttgggatcccccagttccaaagtgtcttaaagtgctgcctccatctagtacaaaacctccagctttgagtcattcagtgtcgacttcttccactacaaaatctccagcgtccagtgcctcaggtcctaggcctacttacaagcctccagtctcaaattatccaggatatcctaaacctgaggaaggaatacttgacagtttggatgtttgggtcattgctgtgattgttattgccatagttgttggagttgcagtaatttgtgttgtcccgtacagatatcttcaaaggaggaagaagaaagggaaagcagatggtggagctgaatatgccacttaccagactaaatcaaccactccagcagagcagagaggctgaatagattccacaacctggtttgccagttcatcttttgactctattaaaatcttcaatagttgttattctgtagtttcactctcatgagtgcaactgtggcttagctaatattgcaatgtggcttgaatgtaggtagcatcctttgatgcttctttgaaacttgtatgaatttgggtatgaacagattgcctgctttcccttaaataacacttagatttattggaccagtcagcacagcatgcctggttgtattaaagcagggatatgctgtattttataaaattggcaaaattagagaaatatagttcacaatgaaattatattttctttgtaaagaaagtggcttgaaatcttttttgttcaaagattaatgccaactcttaagattattctttcaccaactatagaatgtattttatatatcgttcattgtaaaaagcccttaaaaatatgtgtatactactttggctcttgtgcataaaaacaagaacactgaaaattgggaatatgcacaaacttggcttctttaaccaagaatattattggaaaattctctaaaagttaatagggtaaattctctattttttgtaatgtgttcggtgatttcagaaagctagaaagtgtatgtgtggcatttgttttcactttttaaaacatccctaactgatcgaatatatcagtaatttcagaatcagatgcatcctttcataagaagtgagaggactctgacagccataacaggagtgccacttcatggtgcgaagtgaacactgtagtcttgttgttttcccaaagagaactccgtatgttctcttaggttgagtaacccactctgaattctggttacatgtgtttttctctccctccttaaataaagagaggggttaaacatgccctctaaaagtaggtggttttgaagagaataaattcatcagataacctcaagtcacatgagaatcttagtccatttacattgccttggctagtaaaagccatctatgtatatgtcttacctcatctcctaaaaggcagagtacaaagtaagccatgtatctcaggaaggtaacttcattttgtctatttgctgttgattgtaccaagggatggaagaagtaaatatagctcaggtagcactttatactcaggcagatctcagccctctactgagtcccttagccaagcagtttctttcaaagaagccagcaggcgaaaagcagggactgccactgcatttcatatcacactgttaaaagttgtgttttgaaattttatgtttagttgcacaaattgggccaaagaaacattgccttgaggaagatatgattggaaaatcaagagtgtagaagaataaatactgttttactgtccaaagacatgtttatagtgctctgtaaatgttcctttcctttgtagtctctggcaagatgctttaggaagataaaagtttgaggagaacaaacaggaattctgaattaagcacagagttgaagtttatacccgtttcacatgcttttcaagaatgtcgcaattactaagaagcagataatggtgttttttagaaacctaattgaagtatattcaaccaaatactttaatgtataaaataaatattatacaatatacttgtatagcagtttctgcttcacatttgattttttcaaatttaatatttatattagagatctatatatgtataaatatgtattttgtcaaatttgttacttaaatatatagagaccagttttctctggaagtttgtttaaatgacagaagcgtatatgaattcaagaaaatttaagctgcaaaaatgtatttgctataaaatgagaagtctcactgatagaggttctttattgctcattttttaaaaaatggactcttgaaatctgttaaaataaaattgtacatttggagatgtttca

SEQ ID NO: 5115 - DNA, 3124 bp, Homo sapiens
  source 1..3124: mol_type = unassigned DNA
gctcgggccacgcccacctgtcctgcagcactggatgctttgtgagttggggattgttgcgtcccatatctggacccagaagggacttccctgctcggctggctctcggtttctctgctttcctccggagaaataacagcgtcttccgcgccgcgcatggagcctcccggccgccgcgagtgtccctttccttcctggcgctttcctgggttgcttctggcggccatggtgttgctgctgtactccttctccgatgcctgtgaggagccaccaacatttgaagctatggagctcattggtaaaccaaaaccctactatgagattggtgaacgagtagattataagtgtaaaaaaggatacttctatatacctcctcttgccacccatactatttgtgatcggaatcatacatggctacctgtctcagatgacgcctgttatagagaaacatgtccatatatacgggatcctttaaatggccaagcagtccctgcaaatgggacttacgagtttggttatcagatgcactttatttgtaatgagggttattacttaattggtgaagaaattctatattgtgaacttaaaggatcagtagcaatttggagcggtaagcccccaatatgtgaaaaggttttgtgtacaccacctccaaaaataaaaaatggaaaacacacctttagtgaagtagaagtatttgagtatcttgatgcagtaacttatagttgtgatcctgcacctggaccagatccattttcacttattggagagagcacgatttattgtggtgacaattcagtgtggagtcgtgctgctccagagtgtaaagtggtcaaatgtcgatttccagtagtcgaaaatggaaaacagatatcaggatttggaaaaaaattttactacaaagcaacagttatgtttgaatgcgataagggtttttacctcgatggcagcgacacaattgtctgtgacagtaacagtacttgggatcccccagttccaaagtgtcttaaaggtcctaggcctacttacaagcctccagtctcaaattatccaggatatcctaaacctgaggaaggaatacttgacagtttggatgtttgggtcattgctgtgattgttattgccataggaaagcagatggtggagctgaatatgccacttaccagactaaatcaaccactccagcagagcagagaggctgaatagattccacaacctggtttgccagttcatcttttgactctattaaaatcttcaatagttgttattctgtagtttcactctcatgagtgcaactgtggcttagctaatattgcaatgtggcttgaatgtaggtagcatcctttgatgcttctttgaaacttgtatgaatttgggtatgaacagattgcctgctttcccttaaataacacttagatttattggaccagtcagcacagcatgcctggttgtattaaagcagggatatgctgtattttataaaattggcaaaattagagaaatatagttcacaatgaaattatattttctttgtaaagaaagtggcttgaaatcttttttgttcaaagattaatgccaactcttaagattattctttcaccaactatagaatgtattttatatatcgttcattgtaaaaagcccttaaaaatatgtgtatactactttggctcttgtgcataaaaacaagaacactgaaaattgggaatatgcacaaacttggcttctttaaccaagaatattattggaaaattctctaaaagttaatagggtaaattctctattttttgtaatgtgttcggtgatttcagaaagctagaaagtgtatgtgtggcatttgttttcactttttaaaacatccctaactgatcgaatatatcagtaatttcagaatcagatgcatcctttcataagaagtgagaggactctgacagccataacaggagtgccacttcatggtgcgaagtgaacactgtagtcttgttgttttcccaaagagaactccgtatgttctcttaggttgagtaacccactctgaattctggttacatgtgtttttctctccctccttaaataaagagaggggttaaacatgccctctaaaagtaggtggttttgaagagaataaattcatcagataacctcaagtcacatgagaatcttagtccatttacattgccttggctagtaaaagccatctatgtatatgtcttacctcatctcctaaaaggcagagtacaaagtaagccatgtatctcaggaaggtaacttcattttgtctatttgctgttgattgtaccaagggatggaagaagtaaatatagctcaggtagcactttatactcaggcagatctcagccctctactgagtcccttagccaagcagtttctttcaaagaagccagcaggcgaaaagcagggactgccactgcatttcatatcacactgttaaaagttgtgttttgaaattttatgtttagttgcacaaattgggccaaagaaacattgccttgaggaagatatgattggaaaatcaagagtgtagaagaataaatactgttttactgtccaaagacatgtttatagtgctctgtaaatgttcctttcctttgtagtctctggcaagatgctttaggaagataaaagtttgaggagaacaaacaggaattctgaattaagcacagagttgaagtttatacccgtttcacatgcttttcaagaatgtcgcaattactaagaagcagataatggtgttttttagaaacctaattgaagtatattcaaccaaatactttaatgtataaaataaatattatacaatatacttgtatagcagtttctgcttcacatttgattttttcaaatttaatatttatattagagatctatatatgtataaatatgtattttgtcaaatttgttacttaaatatatagagaccagttttctctggaagtttgtttaaatgacagaagcgtatatgaattcaagaaaatttaagctgcaaaaatgtatttgctataaaatgagaagtctcactgatagaggttctttattgctcattttttaaaaaatggactcttgaaatctgttaaaataaaattgtacatttggagatgtttca

SEQ ID NO: 5116 - DNA, 3233 bp, Homo sapiens
  source 1..3233: mol_type = unassigned DNA
gctcgggccacgcccacctgtcctgcagcactggatgctttgtgagttggggattgttgcgtcccatatctggacccagaagggacttccctgctcggctggctctcggtttctctgctttcctccggagaaataacagcgtcttccgcgccgcgcatggagcctcccggccgccgcgagtgtccctttccttcctggcgctttcctgggttgcttctggcggccatggtgttgctgctgtactccttctccgatgcctgtgaggagccaccaacatttgaagctatggagctcattggtaaaccaaaaccctactatgagattggtgaacgagtagattataagtgtaaaaaaggatacttctatatacctcctcttgccacccatactatttgtgatcggaatcatacatggctacctgtctcagatgacgcctgttatagagaaacatgtccatatatacgggatcctttaaatggccaagcagtccctgcaaatgggacttacgagtttggttatcagatgcactttatttgtaatgagggttattacttaattggtgaagaaattctatattgtgaacttaaaggatcagtagcaatttggagcggtaagcccccaatatgtgaaaaggttttgtgtacaccacctccaaaaataaaaaatggaaaacacacctttagtgaagtagaagtatttgagtatcttgatgcagtaacttatagttgtgatcctgcacctggaccagatccattttcacttattggagagagcacgatttattgtggtgacaattcagtgtggagtcgtgctgctccagagtgtaaagtggtcaaatgtcgatttccagtagtcgaaaatggaaaacagatatcaggatttggaaaaaaattttactacaaagcaacagttatgtttgaatgcgataagggtttttacctcgatggcagcgacacaattgtctgtgacagtaacagtacttgggatcccccagttccaaagtgtcttaaagtgtcgacttcttccactacaaaatctccagcgtccagtgcctcaggtcctaggcctacttacaagcctccagtctcaaattatccaggatatcctaaacctgaggaaggaatacttgacagtttggatgtttgggtcattgctgtgattgttattgccatagttgttggagttgcagtaatttgtgttgtcccgtacagatatcttcaaaggaggaagaagaaagggaaagcagatggtggagctgaatatgccacttaccagactaaatcaaccactccagcagagcagagaggctgaatagattccacaacctggtttgccagttcatcttttgactctattaaaatcttcaatagttgttattctgtagtttcactctcatgagtgcaactgtggcttagctaatattgcaatgtggcttgaatgtaggtagcatcctttgatgcttctttgaaacttgtatgaatttgggtatgaacagattgcctgctttcccttaaataacacttagatttattggaccagtcagcacagcatgcctggttgtattaaagcagggatatgctgtattttataaaattggcaaaattagagaaatatagttcacaatgaaattatattttctttgtaaagaaagtggcttgaaatcttttttgttcaaagattaatgccaactcttaagattattctttcaccaactatagaatgtattttatatatcgttcattgtaaaaagcccttaaaaatatgtgtatactactttggctcttgtgcataaaaacaagaacactgaaaattgggaatatgcacaaacttggcttctttaaccaagaatattattggaaaattctctaaaagttaatagggtaaattctctattttttgtaatgtgttcggtgatttcagaaagctagaaagtgtatgtgtggcatttgttttcactttttaaaacatccctaactgatcgaatatatcagtaatttcagaatcagatgcatcctttcataagaagtgagaggactctgacagccataacaggagtgccacttcatggtgcgaagtgaacactgtagtcttgttgttttcccaaagagaactccgtatgttctcttaggttgagtaacccactctgaattctggttacatgtgtttttctctccctccttaaataaagagaggggttaaacatgccctctaaaagtaggtggttttgaagagaataaattcatcagataacctcaagtcacatgagaatcttagtccatttacattgccttggctagtaaaagccatctatgtatatgtcttacctcatctcctaaaaggcagagtacaaagtaagccatgtatctcaggaaggtaacttcattttgtctatttgctgttgattgtaccaagggatggaagaagtaaatatagctcaggtagcactttatactcaggcagatctcagccctctactgagtcccttagccaagcagtttctttcaaagaagccagcaggcgaaaagcagggactgccactgcatttcatatcacactgttaaaagttgtgttttgaaattttatgtttagttgcacaaattgggccaaagaaacattgccttgaggaagatatgattggaaaatcaagagtgtagaagaataaatactgttttactgtccaaagacatgtttatagtgctctgtaaatgttcctttcctttgtagtctctggcaagatgctttaggaagataaaagtttgaggagaacaaacaggaattctgaattaagcacagagttgaagtttatacccgtttcacatgcttttcaagaatgtcgcaattactaagaagcagataatggtgttttttagaaacctaattgaagtatattcaaccaaatactttaatgtataaaataaatattatacaatatacttgtatagcagtttctgcttcacatttgattttttcaaatttaatatttatattagagatctatatatgtataaatatgtattttgtcaaatttgttacttaaatatatagagaccagttttctctggaagtttgtttaaatgacagaagcgtatatgaattcaagaaaatttaagctgcaaaaatgtatttgctataaaatgagaagtctcactgatagaggttctttattgctcattttttaaaaaatggactcttgaaatctgttaaaataaaattgtacatttggagatgtttca

SEQ ID NO: 5117 - DNA, 3188 bp, Homo sapiens
  source 1..3188: mol_type = unassigned DNA
gctcgggccacgcccacctgtcctgcagcactggatgctttgtgagttggggattgttgcgtcccatatctggacccagaagggacttccctgctcggctggctctcggtttctctgctttcctccggagaaataacagcgtcttccgcgccgcgcatggagcctcccggccgccgcgagtgtccctttccttcctggcgctttcctgggttgcttctggcggccatggtgttgctgctgtactccttctccgatgcctgtgaggagccaccaacatttgaagctatggagctcattggtaaaccaaaaccctactatgagattggtgaacgagtagattataagtgtaaaaaaggatacttctatatacctcctcttgccacccatactatttgtgatcggaatcatacatggctacctgtctcagatgacgcctgttatagagaaacatgtccatatatacgggatcctttaaatggccaagcagtccctgcaaatgggacttacgagtttggttatcagatgcactttatttgtaatgagggttattacttaattggtgaagaaattctatattgtgaacttaaaggatcagtagcaatttggagcggtaagcccccaatatgtgaaaaggttttgtgtacaccacctccaaaaataaaaaatggaaaacacacctttagtgaagtagaagtatttgagtatcttgatgcagtaacttatagttgtgatcctgcacctggaccagatccattttcacttattggagagagcacgatttattgtggtgacaattcagtgtggagtcgtgctgctccagagtgtaaagtggtcaaatgtcgatttccagtagtcgaaaatggaaaacagatatcaggatttggaaaaaaattttactacaaagcaacagttatgtttgaatgcgataagggtttttacctcgatggcagcgacacaattgtctgtgacagtaacagtacttgggatcccccagttccaaagtgtcttaaaggtcctaggcctacttacaagcctccagtctcaaattatccaggatatcctaaacctgaggaaggaatacttgacagtttggatgtttgggtcattgctgtgattgttattgccatagttgttggagttgcagtaatttgtgttgtcccgtacagatatcttcaaaggaggaagaagaaagggaaagcagatggtggagctgaatatgccacttaccagactaaatcaaccactccagcagagcagagaggctgaatagattccacaacctggtttgccagttcatcttttgactctattaaaatcttcaatagttgttattctgtagtttcactctcatgagtgcaactgtggcttagctaatattgcaatgtggcttgaatgtaggtagcatcctttgatgcttctttgaaacttgtatgaatttgggtatgaacagattgcctgctttcccttaaataacacttagatttattggaccagtcagcacagcatgcctggttgtattaaagcagggatatgctgtattttataaaattggcaaaattagagaaatatagttcacaatgaaattatattttctttgtaaagaaagtggcttgaaatcttttttgttcaaagattaatgccaactcttaagattattctttcaccaactatagaatgtattttatatatcgttcattgtaaaaagcccttaaaaatatgtgtatactactttggctcttgtgcataaaaacaagaacactgaaaattgggaatatgcacaaacttggcttctttaaccaagaatattattggaaaattctctaaaagttaatagggtaaattctctattttttgtaatgtgttcggtgatttcagaaagctagaaagtgtatgtgtggcatttgttttcactttttaaaacatccctaactgatcgaatatatcagtaatttcagaatcagatgcatcctttcataagaagtgagaggactctgacagccataacaggagtgccacttcatggtgcgaagtgaacactgtagtcttgttgttttcccaaagagaactccgtatgttctcttaggttgagtaacccactctgaattctggttacatgtgtttttctctccctccttaaataaagagaggggttaaacatgccctctaaaagtaggtggttttgaagagaataaattcatcagataacctcaagtcacatgagaatcttagtccatttacattgccttggctagtaaaagccatctatgtatatgtcttacctcatctcctaaaaggcagagtacaaagtaagccatgtatctcaggaaggtaacttcattttgtctatttgctgttgattgtaccaagggatggaagaagtaaatatagctcaggtagcactttatactcaggcagatctcagccctctactgagtcccttagccaagcagtttctttcaaagaagccagcaggcgaaaagcagggactgccactgcatttcatatcacactgttaaaagttgtgttttgaaattttatgtttagttgcacaaattgggccaaagaaacattgccttgaggaagatatgattggaaaatcaagagtgtagaagaataaatactgttttactgtccaaagacatgtttatagtgctctgtaaatgttcctttcctttgtagtctctggcaagatgctttaggaagataaaagtttgaggagaacaaacaggaattctgaattaagcacagagttgaagtttatacccgtttcacatgcttttcaagaatgtcgcaattactaagaagcagataatggtgttttttagaaacctaattgaagtatattcaaccaaatactttaatgtataaaataaatattatacaatatacttgtatagcagtttctgcttcacatttgattttttcaaatttaatatttatattagagatctatatatgtataaatatgtattttgtcaaatttgttacttaaatatatagagaccagttttctctggaagtttgtttaaatgacagaagcgtatatgaattcaagaaaatttaagctgcaaaaatgtatttgctataaaatgagaagtctcactgatagaggttctttattgctcattttttaaaaaatggactcttgaaatctgttaaaataaaattgtacatttggagatgtttca

SEQ ID NO: 5118 - DNA, 3371 bp, Homo sapiens
  source 1..3371: mol_type = unassigned DNA
gctcgggccacgcccacctgtcctgcagcactggatgctttgtgagttggggattgttgcgtcccatatctggacccagaagggacttccctgctcggctggctctcggtttctctgctttcctccggagaaataacagcgtcttccgcgccgcgcatggagcctcccggccgccgcgagtgtccctttccttcctggcgctttcctgggttgcttctggcggccatggtgttgctgctgtactccttctccgatgcctgtgaggagccaccaacatttgaagctatggagctcattggtaaaccaaaaccctactatgagattggtgaacgagtagattataagtgtaaaaaaggatacttctatatacctcctcttgccacccatactatttgtgatcggaatcatacatggctacctgtctcagatgacgcctgttatagagaaacatgtccatatatacgggatcctttaaatggccaagcagtccctgcaaatgggacttacgagtttggttatcagatgcactttatttgtaatgagggttattacttaattggtgaagaaattctatattgtgaacttaaaggatcagtagcaatttggagcggtaagcccccaatatgtgaaaaggttttgtgtacaccacctccaaaaataaaaaatggaaaacacacctttagtgaagtagaagtatttgagtatcttgatgcagtaacttatagttgtgatcctgcacctggaccagatccattttcacttattggagagagcacgatttattgtggtgacaattcagtgtggagtcgtgctgctccagagtgtaaagtggtcaaatgtcgatttccagtagtcgaaaatggaaaacagatatcaggatttggaaaaaaattttactacaaagcaacagttatgtttgaatgcgataagggtttttacctcgatggcagcgacacaattgtctgtgacagtaacagtacttgggatcccccagttccaaagtgtcttaaagtgctgcctccatctagtacaaaacctccagctttgagtcattcagtgtcgacttcttccactacaaaatctccagcgtccagtgcctcaggtcctaggcctacttacaagcctccagtctcaaattatccaggatatcctaaacctgaggaaggaatacttgacagtttggatgtttgggtcattgctgtgattgttattgccatagttgttggagttgcagtaatttgtgttgtcccgtacagatatcttcaaaggaggaagaagaaaggcacatacctaactgatgagacccacagagaagtaaaatttacttctctctgagaaggagagatgagagaaaggtttgcttttatcattaaaaggaaagcagatggtggagctgaatatgccacttaccagactaaatcaaccactccagcagagcagagaggctgaatagattccacaacctggtttgccagttcatcttttgactctattaaaatcttcaatagttgttattctgtagtttcactctcatgagtgcaactgtggcttagctaatattgcaatgtggcttgaatgtaggtagcatcctttgatgcttctttgaaacttgtatgaatttgggtatgaacagattgcctgctttcccttaaataacacttagatttattggaccagtcagcacagcatgcctggttgtattaaagcagggatatgctgtattttataaaattggcaaaattagagaaatatagttcacaatgaaattatattttctttgtaaagaaagtggcttgaaatcttttttgttcaaagattaatgccaactcttaagattattctttcaccaactatagaatgtattttatatatcgttcattgtaaaaagcccttaaaaatatgtgtatactactttggctcttgtgcataaaaacaagaacactgaaaattgggaatatgcacaaacttggcttctttaaccaagaatattattggaaaattctctaaaagttaatagggtaaattctctattttttgtaatgtgttcggtgatttcagaaagctagaaagtgtatgtgtggcatttgttttcactttttaaaacatccctaactgatcgaatatatcagtaatttcagaatcagatgcatcctttcataagaagtgagaggactctgacagccataacaggagtgccacttcatggtgcgaagtgaacactgtagtcttgttgttttcccaaagagaactccgtatgttctcttaggttgagtaacccactctgaattctggttacatgtgtttttctctccctccttaaataaagagaggggttaaacatgccctctaaaagtaggtggttttgaagagaataaattcatcagataacctcaagtcacatgagaatcttagtccatttacattgccttggctagtaaaagccatctatgtatatgtcttacctcatctcctaaaaggcagagtacaaagtaagccatgtatctcaggaaggtaacttcattttgtctatttgctgttgattgtaccaagggatggaagaagtaaatatagctcaggtagcactttatactcaggcagatctcagccctctactgagtcccttagccaagcagtttctttcaaagaagccagcaggcgaaaagcagggactgccactgcatttcatatcacactgttaaaagttgtgttttgaaattttatgtttagttgcacaaattgggccaaagaaacattgccttgaggaagatatgattggaaaatcaagagtgtagaagaataaatactgttttactgtccaaagacatgtttatagtgctctgtaaatgttcctttcctttgtagtctctggcaagatgctttaggaagataaaagtttgaggagaacaaacaggaattctgaattaagcacagagttgaagtttatacccgtttcacatgcttttcaagaatgtcgcaattactaagaagcagataatggtgttttttagaaacctaattgaagtatattcaaccaaatactttaatgtataaaataaatattatacaatatacttgtatagcagtttctgcttcacatttgattttttcaaatttaatatttatattagagatctatatatgtataaatatgtattttgtcaaatttgttacttaaatatatagagaccagttttctctggaagtttgtttaaatgacagaagcgtatatgaattcaagaaaatttaagctgcaaaaatgtatttgctataaaatgagaagtctcactgatagaggttctttattgctcattttttaaaaaatggactcttgaaatctgttaaaataaaattgtacatttggagatgtttca

SEQ ID NO: 5119 - DNA, 3081 bp, Homo sapiens
  source 1..3081: mol_type = unassigned DNA
gcgtcccatatctggacccagaagggacttccctgctcggctggctctcggtttctctgctttcctccggagaaataacagcgtcttccgcgccgcgcatggagcctcccggccgccgcgagtgtccctttccttcctggcgctttcctgggttgcttctggcggccatggtgttgctgctgtactccttctccgatgcctgtgaggagccaccaacatttgaagctatggagctcattggtaaaccaaaaccctactatgagattggtgaacgagtagattataagtgtaaaaaaggatacttctatatacctcctcttgccacccatactatttgtgatcggaatcatacatggctacctgtctcagatgacgcctgttatagagaaacatgtccatatatacgggatcctttaaatggccaagcagtccctgcaaatgggacttacgagtttggttatcagatgcactttatttgtaatgagggttattacttaattggtgaagaaattctatattgtgaacttaaaggatcagtagcaatttggagcggtaagcccccaatatgtgaaaaggttttgtgtacaccacctccaaaaataaaaaatggaaaacacacctttagtgaagtagaagtatttgagtatcttgatgcagtaacttatagttgtgatcctgcacctggaccagatccattttcacttattggagagagcacgatttattgtggtgacaattcagtgtggagtcgtgctgctccagagtgtaaagtggtcaaatgtcgatttccagtagtcgaaaatggaaaacagatatcaggatttggaaaaaaattttactacaaagcaacagttatgtttgaatgcgataagggtttttacctcgatggcagcgacacaattgtctgtgacagtaacagtacttgggatcccccagttccaaagtgtcttaaaggatatcctaaacctgaggaaggaatacttgacagtttggatgtttgggtcattgctgtgattgttattgccatagttgttggagttgcagtaatttgtgttgtcccgtacagatatcttcaaaggaggaagaagaaagggaaagcagatggtggagctgaatatgccacttaccagactaaatcaaccactccagcagagcagagaggctgaatagattccacaacctggtttgccagttcatcttttgactctattaaaatcttcaatagttgttattctgtagtttcactctcatgagtgcaactgtggcttagctaatattgcaatgtggcttgaatgtaggtagcatcctttgatgcttctttgaaacttgtatgaatttgggtatgaacagattgcctgctttcccttaaataacacttagatttattggaccagtcagcacagcatgcctggttgtattaaagcagggatatgctgtattttataaaattggcaaaattagagaaatatagttcacaatgaaattatattttctttgtaaagaaagtggcttgaaatcttttttgttcaaagattaatgccaactcttaagattattctttcaccaactatagaatgtattttatatatcgttcattgtaaaaagcccttaaaaatatgtgtatactactttggctcttgtgcataaaaacaagaacactgaaaattgggaatatgcacaaacttggcttctttaaccaagaatattattggaaaattctctaaaagttaatagggtaaattctctattttttgtaatgtgttcggtgatttcagaaagctagaaagtgtatgtgtggcatttgttttcactttttaaaacatccctaactgatcgaatatatcagtaatttcagaatcagatgcatcctttcataagaagtgagaggactctgacagccataacaggagtgccacttcatggtgcgaagtgaacactgtagtcttgttgttttcccaaagagaactccgtatgttctcttaggttgagtaacccactctgaattctggttacatgtgtttttctctccctccttaaataaagagaggggttaaacatgccctctaaaagtaggtggttttgaagagaataaattcatcagataacctcaagtcacatgagaatcttagtccatttacattgccttggctagtaaaagccatctatgtatatgtcttacctcatctcctaaaaggcagagtacaaagtaagccatgtatctcaggaaggtaacttcattttgtctatttgctgttgattgtaccaagggatggaagaagtaaatatagctcaggtagcactttatactcaggcagatctcagccctctactgagtcccttagccaagcagtttctttcaaagaagccagcaggcgaaaagcagggactgccactgcatttcatatcacactgttaaaagttgtgttttgaaattttatgtttagttgcacaaattgggccaaagaaacattgccttgaggaagatatgattggaaaatcaagagtgtagaagaataaatactgttttactgtccaaagacatgtttatagtgctctgtaaatgttcctttcctttgtagtctctggcaagatgctttaggaagataaaagtttgaggagaacaaacaggaattctgaattaagcacagagttgaagtttatacccgtttcacatgcttttcaagaatgtcgcaattactaagaagcagataatggtgttttttagaaacctaattgaagtatattcaaccaaatactttaatgtataaaataaatattatacaatatacttgtatagcagtttctgcttcacatttgattttttcaaatttaatatttatattagagatctatatatgtataaatatgtattttgtcaaatttgttacttaaatatatagagaccagttttctctggaagtttgtttaaatgacagaagcgtatatgaattcaagaaaatttaagctgcaaaaatgtatttgctataaaatgagaagtctcactgatagaggttctttattgctcattttttaaaaaatggactcttgaaatctgttaaaataaaattgtacatttggaga

SEQ ID NO: 5120 - DNA, 3236 bp, Homo sapiens
  source 1..3236: mol_type = unassigned DNA
gctcgggccacgcccacctgtcctgcagcactggatgctttgtgagttggggattgttgcgtcccatatctggacccagaagggacttccctgctcggctggctctcggtttctctgctttcctccggagaaataacagcgtcttccgcgccgcgcatggagcctcccggccgccgcgagtgtccctttccttcctggcgctttcctgggttgcttctggcggccatggtgttgctgctgtactccttctccgatgcctgtgaggagccaccaacatttgaagctatggagctcattggtaaaccaaaaccctactatgagattggtgaacgagtagattataagtgtaaaaaaggatacttctatatacctcctcttgccacccatactatttgtgatcggaatcatacatggctacctgtctcagatgacgcctgttatagagaaacatgtccatatatacgggatcctttaaatggccaagcagtccctgcaaatgggacttacgagtttggttatcagatgcactttatttgtaatgagggttattacttaattggtgaagaaattctatattgtgaacttaaaggatcagtagcaatttggagcggtaagcccccaatatgtgaaaaggttttgtgtacaccacctccaaaaataaaaaatggaaaacacacctttagtgaagtagaagtatttgagtatcttgatgcagtaacttatagttgtgatcctgcacctggaccagatccattttcacttattggagagagcacgatttattgtggtgacaattcagtgtggagtcgtgctgctccagagtgtaaagtggtcaaatgtcgatttccagtagtcgaaaatggaaaacagatatcaggatttggaaaaaaattttactacaaagcaacagttatgtttgaatgcgataagggtttttacctcgatggcagcgacacaattgtctgtgacagtaacagtacttgggatcccccagttccaaagtgtcttaaagtgctgcctccatctagtacaaaacctccagctttgagtcattcagtgtcgacttcttccactacaaaatctccagcgtccagtgcctcaggatatcctaaacctgaggaaggaatacttgacagtttggatgtttgggtcattgctgtgattgttattgccatagttgttggagttgcagtaatttgtgttgtcccgtacagatatcttcaaaggaggaagaagaaagggaaagcagatggtggagctgaatatgccacttaccagactaaatcaaccactccagcagagcagagaggctgaatagattccacaacctggtttgccagttcatcttttgactctattaaaatcttcaatagttgttattctgtagtttcactctcatgagtgcaactgtggcttagctaatattgcaatgtggcttgaatgtaggtagcatcctttgatgcttctttgaaacttgtatgaatttgggtatgaacagattgcctgctttcccttaaataacacttagatttattggaccagtcagcacagcatgcctggttgtattaaagcagggatatgctgtattttataaaattggcaaaattagagaaatatagttcacaatgaaattatattttctttgtaaagaaagtggcttgaaatcttttttgttcaaagattaatgccaactcttaagattattctttcaccaactatagaatgtattttatatatcgttcattgtaaaaagcccttaaaaatatgtgtatactactttggctcttgtgcataaaaacaagaacactgaaaattgggaatatgcacaaacttggcttctttaaccaagaatattattggaaaattctctaaaagttaatagggtaaattctctattttttgtaatgtgttcggtgatttcagaaagctagaaagtgtatgtgtggcatttgttttcactttttaaaacatccctaactgatcgaatatatcagtaatttcagaatcagatgcatcctttcataagaagtgagaggactctgacagccataacaggagtgccacttcatggtgcgaagtgaacactgtagtcttgttgttttcccaaagagaactccgtatgttctcttaggttgagtaacccactctgaattctggttacatgtgtttttctctccctccttaaataaagagaggggttaaacatgccctctaaaagtaggtggttttgaagagaataaattcatcagataacctcaagtcacatgagaatcttagtccatttacattgccttggctagtaaaagccatctatgtatatgtcttacctcatctcctaaaaggcagagtacaaagtaagccatgtatctcaggaaggtaacttcattttgtctatttgctgttgattgtaccaagggatggaagaagtaaatatagctcaggtagcactttatactcaggcagatctcagccctctactgagtcccttagccaagcagtttctttcaaagaagccagcaggcgaaaagcagggactgccactgcatttcatatcacactgttaaaagttgtgttttgaaattttatgtttagttgcacaaattgggccaaagaaacattgccttgaggaagatatgattggaaaatcaagagtgtagaagaataaatactgttttactgtccaaagacatgtttatagtgctctgtaaatgttcctttcctttgtagtctctggcaagatgctttaggaagataaaagtttgaggagaacaaacaggaattctgaattaagcacagagttgaagtttatacccgtttcacatgcttttcaagaatgtcgcaattactaagaagcagataatggtgttttttagaaacctaattgaagtatattcaaccaaatactttaatgtataaaataaatattatacaatatacttgtatagcagtttctgcttcacatttgattttttcaaatttaatatttatattagagatctatatatgtataaatatgtattttgtcaaatttgttacttaaatatatagagaccagttttctctggaagtttgtttaaatgacagaagcgtatatgaattcaagaaaatttaagctgcaaaaatgtatttgctataaaatgagaagtctcactgatagaggttctttattgctcattttttaaaaaatggactcttgaaatctgttaaaataaaattgtacatttggagatgtttca

SEQ ID NO: 5121 - DNA, 3281 bp, Homo sapiens
  source 1..3281: mol_type = unassigned DNA
gctcgggccacgcccacctgtcctgcagcactggatgctttgtgagttggggattgttgcgtcccatatctggacccagaagggacttccctgctcggctggctctcggtttctctgctttcctccggagaaataacagcgtcttccgcgccgcgcatggagcctcccggccgccgcgagtgtccctttccttcctggcgctttcctgggttgcttctggcggccatggtgttgctgctgtactccttctccgatgcctgtgaggagccaccaacatttgaagctatggagctcattggtaaaccaaaaccctactatgagattggtgaacgagtagattataagtgtaaaaaaggatacttctatatacctcctcttgccacccatactatttgtgatcggaatcatacatggctacctgtctcagatgacgcctgttatagagaaacatgtccatatatacgggatcctttaaatggccaagcagtccctgcaaatgggacttacgagtttggttatcagatgcactttatttgtaatgagggttattacttaattggtgaagaaattctatattgtgaacttaaaggatcagtagcaatttggagcggtaagcccccaatatgtgaaaaggttttgtgtacaccacctccaaaaataaaaaatggaaaacacacctttagtgaagtagaagtatttgagtatcttgatgcagtaacttatagttgtgatcctgcacctggaccagatccattttcacttattggagagagcacgatttattgtggtgacaattcagtgtggagtcgtgctgctccagagtgtaaagtggtcaaatgtcgatttccagtagtcgaaaatggaaaacagatatcaggatttggaaaaaaattttactacaaagcaacagttatgtttgaatgcgataagggtttttacctcgatggcagcgacacaattgtctgtgacagtaacagtacttgggatcccccagttccaaagtgtcttaaaggtcctaggcctacttacaagcctccagtctcaaattatccaggatatcctaaacctgaggaaggaatacttgacagtttggatgtttgggtcattgctgtgattgttattgccatagttgttggagttgcagtaatttgtgttgtcccgtacagatatcttcaaaggaggaagaagaaaggcacatacctaactgatgagacccacagagaagtaaaatttacttctctctgagaaggagagatgagagaaaggtttgcttttatcattaaaaggaaagcagatggtggagctgaatatgccacttaccagactaaatcaaccactccagcagagcagagaggctgaatagattccacaacctggtttgccagttcatcttttgactctattaaaatcttcaatagttgttattctgtagtttcactctcatgagtgcaactgtggcttagctaatattgcaatgtggcttgaatgtaggtagcatcctttgatgcttctttgaaacttgtatgaatttgggtatgaacagattgcctgctttcccttaaataacacttagatttattggaccagtcagcacagcatgcctggttgtattaaagcagggatatgctgtattttataaaattggcaaaattagagaaatatagttcacaatgaaattatattttctttgtaaagaaagtggcttgaaatcttttttgttcaaagattaatgccaactcttaagattattctttcaccaactatagaatgtattttatatatcgttcattgtaaaaagcccttaaaaatatgtgtatactactttggctcttgtgcataaaaacaagaacactgaaaattgggaatatgcacaaacttggcttctttaaccaagaatattattggaaaattctctaaaagttaatagggtaaattctctattttttgtaatgtgttcggtgatttcagaaagctagaaagtgtatgtgtggcatttgttttcactttttaaaacatccctaactgatcgaatatatcagtaatttcagaatcagatgcatcctttcataagaagtgagaggactctgacagccataacaggagtgccacttcatggtgcgaagtgaacactgtagtcttgttgttttcccaaagagaactccgtatgttctcttaggttgagtaacccactctgaattctggttacatgtgtttttctctccctccttaaataaagagaggggttaaacatgccctctaaaagtaggtggttttgaagagaataaattcatcagataacctcaagtcacatgagaatcttagtccatttacattgccttggctagtaaaagccatctatgtatatgtcttacctcatctcctaaaaggcagagtacaaagtaagccatgtatctcaggaaggtaacttcattttgtctatttgctgttgattgtaccaagggatggaagaagtaaatatagctcaggtagcactttatactcaggcagatctcagccctctactgagtcccttagccaagcagtttctttcaaagaagccagcaggcgaaaagcagggactgccactgcatttcatatcacactgttaaaagttgtgttttgaaattttatgtttagttgcacaaattgggccaaagaaacattgccttgaggaagatatgattggaaaatcaagagtgtagaagaataaatactgttttactgtccaaagacatgtttatagtgctctgtaaatgttcctttcctttgtagtctctggcaagatgctttaggaagataaaagtttgaggagaacaaacaggaattctgaattaagcacagagttgaagtttatacccgtttcacatgcttttcaagaatgtcgcaattactaagaagcagataatggtgttttttagaaacctaattgaagtatattcaaccaaatactttaatgtataaaataaatattatacaatatacttgtatagcagtttctgcttcacatttgattttttcaaatttaatatttatattagagatctatatatgtataaatatgtattttgtcaaatttgttacttaaatatatagagaccagttttctctggaagtttgtttaaatgacagaagcgtatatgaattcaagaaaatttaagctgcaaaaatgtatttgctataaaatgagaagtctcactgatagaggttctttattgctcattttttaaaaaatggactcttgaaatctgttaaaataaaattgtacatttggagatgtttca

SEQ ID NO: 5122 - DNA, 3326 bp, Homo sapiens
  source 1..3326: mol_type = unassigned DNA
gctcgggccacgcccacctgtcctgcagcactggatgctttgtgagttggggattgttgcgtcccatatctggacccagaagggacttccctgctcggctggctctcggtttctctgctttcctccggagaaataacagcgtcttccgcgccgcgcatggagcctcccggccgccgcgagtgtccctttccttcctggcgctttcctgggttgcttctggcggccatggtgttgctgctgtactccttctccgatgcctgtgaggagccaccaacatttgaagctatggagctcattggtaaaccaaaaccctactatgagattggtgaacgagtagattataagtgtaaaaaaggatacttctatatacctcctcttgccacccatactatttgtgatcggaatcatacatggctacctgtctcagatgacgcctgttatagagaaacatgtccatatatacgggatcctttaaatggccaagcagtccctgcaaatgggacttacgagtttggttatcagatgcactttatttgtaatgagggttattacttaattggtgaagaaattctatattgtgaacttaaaggatcagtagcaatttggagcggtaagcccccaatatgtgaaaaggttttgtgtacaccacctccaaaaataaaaaatggaaaacacacctttagtgaagtagaagtatttgagtatcttgatgcagtaacttatagttgtgatcctgcacctggaccagatccattttcacttattggagagagcacgatttattgtggtgacaattcagtgtggagtcgtgctgctccagagtgtaaagtggtcaaatgtcgatttccagtagtcgaaaatggaaaacagatatcaggatttggaaaaaaattttactacaaagcaacagttatgtttgaatgcgataagggtttttacctcgatggcagcgacacaattgtctgtgacagtaacagtacttgggatcccccagttccaaagtgtcttaaagtgtcgacttcttccactacaaaatctccagcgtccagtgcctcaggtcctaggcctacttacaagcctccagtctcaaattatccaggatatcctaaacctgaggaaggaatacttgacagtttggatgtttgggtcattgctgtgattgttattgccatagttgttggagttgcagtaatttgtgttgtcccgtacagatatcttcaaaggaggaagaagaaaggcacatacctaactgatgagacccacagagaagtaaaatttacttctctctgagaaggagagatgagagaaaggtttgcttttatcattaaaaggaaagcagatggtggagctgaatatgccacttaccagactaaatcaaccactccagcagagcagagaggctgaatagattccacaacctggtttgccagttcatcttttgactctattaaaatcttcaatagttgttattctgtagtttcactctcatgagtgcaactgtggcttagctaatattgcaatgtggcttgaatgtaggtagcatcctttgatgcttctttgaaacttgtatgaatttgggtatgaacagattgcctgctttcccttaaataacacttagatttattggaccagtcagcacagcatgcctggttgtattaaagcagggatatgctgtattttataaaattggcaaaattagagaaatatagttcacaatgaaattatattttctttgtaaagaaagtggcttgaaatcttttttgttcaaagattaatgccaactcttaagattattctttcaccaactatagaatgtattttatatatcgttcattgtaaaaagcccttaaaaatatgtgtatactactttggctcttgtgcataaaaacaagaacactgaaaattgggaatatgcacaaacttggcttctttaaccaagaatattattggaaaattctctaaaagttaatagggtaaattctctattttttgtaatgtgttcggtgatttcagaaagctagaaagtgtatgtgtggcatttgttttcactttttaaaacatccctaactgatcgaatatatcagtaatttcagaatcagatgcatcctttcataagaagtgagaggactctgacagccataacaggagtgccacttcatggtgcgaagtgaacactgtagtcttgttgttttcccaaagagaactccgtatgttctcttaggttgagtaacccactctgaattctggttacatgtgtttttctctccctccttaaataaagagaggggttaaacatgccctctaaaagtaggtggttttgaagagaataaattcatcagataacctcaagtcacatgagaatcttagtccatttacattgccttggctagtaaaagccatctatgtatatgtcttacctcatctcctaaaaggcagagtacaaagtaagccatgtatctcaggaaggtaacttcattttgtctatttgctgttgattgtaccaagggatggaagaagtaaatatagctcaggtagcactttatactcaggcagatctcagccctctactgagtcccttagccaagcagtttctttcaaagaagccagcaggcgaaaagcagggactgccactgcatttcatatcacactgttaaaagttgtgttttgaaattttatgtttagttgcacaaattgggccaaagaaacattgccttgaggaagatatgattggaaaatcaagagtgtagaagaataaatactgttttactgtccaaagacatgtttatagtgctctgtaaatgttcctttcctttgtagtctctggcaagatgctttaggaagataaaagtttgaggagaacaaacaggaattctgaattaagcacagagttgaagtttatacccgtttcacatgcttttcaagaatgtcgcaattactaagaagcagataatggtgttttttagaaacctaattgaagtatattcaaccaaatactttaatgtataaaataaatattatacaatatacttgtatagcagtttctgcttcacatttgattttttcaaatttaatatttatattagagatctatatatgtataaatatgtattttgtcaaatttgttacttaaatatatagagaccagttttctctggaagtttgtttaaatgacagaagcgtatatgaattcaagaaaatttaagctgcaaaaatgtatttgctataaaatgagaagtctcactgatagaggttctttattgctcattttttaaaaaatggactcttgaaatctgttaaaataaaattgtacatttggagatgtttca

SEQ ID NO: 5123 - DNA, 3089 bp, Homo sapiens
  source 1..3089: mol_type = unassigned DNA
gctcgggccacgcccacctgtcctgcagcactggatgctttgtgagttggggattgttgcgtcccatatctggacccagaagggacttccctgctcggctggctctcggtttctctgctttcctccggagaaataacagcgtcttccgcgccgcgcatggagcctcccggccgccgcgagtgtccctttccttcctggcgctttcctgggttgcttctggcggccatggtgttgctgctgtactccttctccggagaaacatgtccatatatacgggatcctttaaatggccaagcagtccctgcaaatgggacttacgagtttggttatcagatgcactttatttgtaatgagggttattacttaattggtgaagaaattctatattgtgaacttaaaggatcagtagcaatttggagcggtaagcccccaatatgtgaaaaggttttgtgtacaccacctccaaaaataaaaaatggaaaacacacctttagtgaagtagaagtatttgagtatcttgatgcagtaacttatagttgtgatcctgcacctggaccagatccattttcacttattggagagagcacgatttattgtggtgacaattcagtgtggagtcgtgctgctccagagtgtaaagtggtcaaatgtcgatttccagtagtcgaaaatggaaaacagatatcaggatttggaaaaaaattttactacaaagcaacagttatgtttgaatgcgataagggtttttacctcgatggcagcgacacaattgtctgtgacagtaacagtacttgggatcccccagttccaaagtgtcttaaagtgctgcctccatctagtacaaaacctccagctttgagtcattcagtgtcgacttcttccactacaaaatctccagcgtccagtgcctcaggtcctaggcctacttacaagcctccagtctcaaattatccaggatatcctaaacctgaggaaggaatacttgacagtttggatgtttgggtcattgctgtgattgttattgccatagttgttggagttgcagtaatttgtgttgtcccgtacagatatcttcaaaggaggaagaagaaagggaaagcagatggtggagctgaatatgccacttaccagactaaatcaaccactccagcagagcagagaggctgaatagattccacaacctggtttgccagttcatcttttgactctattaaaatcttcaatagttgttattctgtagtttcactctcatgagtgcaactgtggcttagctaatattgcaatgtggcttgaatgtaggtagcatcctttgatgcttctttgaaacttgtatgaatttgggtatgaacagattgcctgctttcccttaaataacacttagatttattggaccagtcagcacagcatgcctggttgtattaaagcagggatatgctgtattttataaaattggcaaaattagagaaatatagttcacaatgaaattatattttctttgtaaagaaagtggcttgaaatcttttttgttcaaagattaatgccaactcttaagattattctttcaccaactatagaatgtattttatatatcgttcattgtaaaaagcccttaaaaatatgtgtatactactttggctcttgtgcataaaaacaagaacactgaaaattgggaatatgcacaaacttggcttctttaaccaagaatattattggaaaattctctaaaagttaatagggtaaattctctattttttgtaatgtgttcggtgatttcagaaagctagaaagtgtatgtgtggcatttgttttcactttttaaaacatccctaactgatcgaatatatcagtaatttcagaatcagatgcatcctttcataagaagtgagaggactctgacagccataacaggagtgccacttcatggtgcgaagtgaacactgtagtcttgttgttttcccaaagagaactccgtatgttctcttaggttgagtaacccactctgaattctggttacatgtgtttttctctccctccttaaataaagagaggggttaaacatgccctctaaaagtaggtggttttgaagagaataaattcatcagataacctcaagtcacatgagaatcttagtccatttacattgccttggctagtaaaagccatctatgtatatgtcttacctcatctcctaaaaggcagagtacaaagtaagccatgtatctcaggaaggtaacttcattttgtctatttgctgttgattgtaccaagggatggaagaagtaaatatagctcaggtagcactttatactcaggcagatctcagccctctactgagtcccttagccaagcagtttctttcaaagaagccagcaggcgaaaagcagggactgccactgcatttcatatcacactgttaaaagttgtgttttgaaattttatgtttagttgcacaaattgggccaaagaaacattgccttgaggaagatatgattggaaaatcaagagtgtagaagaataaatactgttttactgtccaaagacatgtttatagtgctctgtaaatgttcctttcctttgtagtctctggcaagatgctttaggaagataaaagtttgaggagaacaaacaggaattctgaattaagcacagagttgaagtttatacccgtttcacatgcttttcaagaatgtcgcaattactaagaagcagataatggtgttttttagaaacctaattgaagtatattcaaccaaatactttaatgtataaaataaatattatacaatatacttgtatagcagtttctgcttcacatttgattttttcaaatttaatatttatattagagatctatatatgtataaatatgtattttgtcaaatttgttacttaaatatatagagaccagttttctctggaagtttgtttaaatgacagaagcgtatatgaattcaagaaaatttaagctgcaaaaatgtatttgctataaaatgagaagtctcactgatagaggttctttattgctcattttttaaaaaatggactcttgaaatctgttaaaataaaattgtacatttggagatgtttca

SEQ ID NO: 5124 - DNA, 3169 bp, Homo sapiens
  source 1..3169: mol_type = unassigned DNA
gctcgggccacgcccacctgtcctgcagcactggatgctttgtgagttggggattgttgcgtcccatatctggacccagaagggacttccctgctcggctggctctcggtttctctgctttcctccggagaaataacagcgtcttccgcgccgcgcatggagcctcccggccgccgcgagtgtccctttccttcctggcgctttcctgggttgcttctggcggccatggtgttgctgctgtactccttctccgatgcctgtgaggagccaccaacatttgaagctatggagctcattggtaaaccaaaaccctactatgagattggtgaacgagtagattataagtgtaaaaaaggatacttctatatacctcctcttgccacccatactatttgtgatcggaatcatacatggctacctgtctcagatgacgcctgttatagagaaacatgtccatatatacgggatcctttaaatggccaagcagtccctgcaaatgggacttacgagtttggttatcagatgcactttatttgtaatgagggttattacttaattggtgaagaaattctatattgtgaacttaaaggatcagtagcaatttggagcggtaagcccccaatatgtgaaaaggttttgtgtacaccacctccaaaaataaaaaatggaaaacacacctttagtgaagtagaagtatttgagtatcttgatgcagtaacttatagttgtgatcctgcacctggaccagatccattttcacttattggagagagcacgatttattgtggtgacaattcagtgtggagtcgtgctgctccagagtgtaaagtggtcaaatgtcgatttccagtagtcgaaaatggaaaacagatatcaggatttggaaaaaaattttactacaaagcaacagttatgtttgaatgcgataagggtttttacctcgatggcagcgacacaattgtctgtgacagtaacagtacttgggatcccccagttccaaagtgtcttaaagtgtcgacttcttccactacaaaatctccagcgtccagtgcctcaggtcctaggcctacttacaagcctccagtctcaaattatccaggatatcctaaacctgaggaaggaatacttgacagtttggatgtttgggtcattgctgtgattgttattgccataggaaagcagatggtggagctgaatatgccacttaccagactaaatcaaccactccagcagagcagagaggctgaatagattccacaacctggtttgccagttcatcttttgactctattaaaatcttcaatagttgttattctgtagtttcactctcatgagtgcaactgtggcttagctaatattgcaatgtggcttgaatgtaggtagcatcctttgatgcttctttgaaacttgtatgaatttgggtatgaacagattgcctgctttcccttaaataacacttagatttattggaccagtcagcacagcatgcctggttgtattaaagcagggatatgctgtattttataaaattggcaaaattagagaaatatagttcacaatgaaattatattttctttgtaaagaaagtggcttgaaatcttttttgttcaaagattaatgccaactcttaagattattctttcaccaactatagaatgtattttatatatcgttcattgtaaaaagcccttaaaaatatgtgtatactactttggctcttgtgcataaaaacaagaacactgaaaattgggaatatgcacaaacttggcttctttaaccaagaatattattggaaaattctctaaaagttaatagggtaaattctctattttttgtaatgtgttcggtgatttcagaaagctagaaagtgtatgtgtggcatttgttttcactttttaaaacatccctaactgatcgaatatatcagtaatttcagaatcagatgcatcctttcataagaagtgagaggactctgacagccataacaggagtgccacttcatggtgcgaagtgaacactgtagtcttgttgttttcccaaagagaactccgtatgttctcttaggttgagtaacccactctgaattctggttacatgtgtttttctctccctccttaaataaagagaggggttaaacatgccctctaaaagtaggtggttttgaagagaataaattcatcagataacctcaagtcacatgagaatcttagtccatttacattgccttggctagtaaaagccatctatgtatatgtcttacctcatctcctaaaaggcagagtacaaagtaagccatgtatctcaggaaggtaacttcattttgtctatttgctgttgattgtaccaagggatggaagaagtaaatatagctcaggtagcactttatactcaggcagatctcagccctctactgagtcccttagccaagcagtttctttcaaagaagccagcaggcgaaaagcagggactgccactgcatttcatatcacactgttaaaagttgtgttttgaaattttatgtttagttgcacaaattgggccaaagaaacattgccttgaggaagatatgattggaaaatcaagagtgtagaagaataaatactgttttactgtccaaagacatgtttatagtgctctgtaaatgttcctttcctttgtagtctctggcaagatgctttaggaagataaaagtttgaggagaacaaacaggaattctgaattaagcacagagttgaagtttatacccgtttcacatgcttttcaagaatgtcgcaattactaagaagcagataatggtgttttttagaaacctaattgaagtatattcaaccaaatactttaatgtataaaataaatattatacaatatacttgtatagcagtttctgcttcacatttgattttttcaaatttaatatttatattagagatctatatatgtataaatatgtattttgtcaaatttgttacttaaatatatagagaccagttttctctggaagtttgtttaaatgacagaagcgtatatgaattcaagaaaatttaagctgcaaaaatgtatttgctataaaatgagaagtctcactgatagaggttctttattgctcattttttaaaaaatggactcttgaaatctgttaaaataaaattgtacatttggagatgtttca

SEQ ID NO: 5125 - DNA, 1258 bp, Homo sapiens
  source 1..1258: mol_type = unassigned DNA
tatctggacccagaagggacttccctgctcggctggctctcggtttctctgctttcctccggagaaataacagcgtcttccgcgccgcgcatggagcctcccggccgccgcgagtgtccctttccttcctggcgctttcctgggttgcttctggcggccatggtgttgctgctgtactccttctccgatgcctgtgaggagccaccaacatttgaagctatggagctcattggtaaaccaaaaccctactatgagattggtgaacgagtagattataagtgtaaaaaaggatacttctatatacctcctcttgccacccatactatttgtgatcggaatcatacatggctacctgtctcagatgacgcctgttatagagaaacatgtccatatatacgggatcctttaaatggccaagcagtccctgcaaatgggacttacgagtttggttatcagatgcactttatttgtaatgagggttattacttaattggtgaagaaattctatattgtgaacttaaaggatcagtagcaatttggagcggtaagcccccaatatgtgaaaaggttttgtgtacaccacctccaaaaataaaaaatggaaaacacacctttagtgaagtagaagtatttgagtatcttgatgcagtaacttatagttgtgatcctgcacctggaccagatccattttcacttattggagagagcacgatttattgtggtgacaattcagtgtggagtcgtgctgctccagagtgtaaagtggtcaaatgtcgatttccagtagtcgaaaatggaaaacagatatcaggatttggaaaaaaattttactacaaagcaacagttatgtttgaatgcgataagggtttttacctcgatggcagcgacacaattgtctgtgacagtaacagtacttgggatcccccagttccaaagtgtcttaaagtgtcgacttcttccactacaaaatctccagcgtccagtgcctcaggatatcctaaacctgaggaaggaatacttgacagtttggatgtttgggtcattgctgtgattgttattgccatagttgttggagttgcagtaatttgtgttgtcccgtacagatatcttcaaaggaggaagaagaaagggaaagcagatggtggagctgaatatgccacttaccagactaaatcaaccactccagcagagcagagaggctgaatagattccacaacctggtttgccagttcatcttttgactctattaaaatcttca

SEQ ID NO: 5126 - DNA, 1793 bp, Homo sapiens
  source 1..1793: mol_type = unassigned DNA
caactgtctcctgcgttgctgggaagttctggaaggaagcatgtgctccagaggttgggattcgtgtctggctctggaattgctactgctgcctctgtcactcctggtgaccagcattcaaggtcacttggtacatatgaccgtggtctccggcagcaacgtgactctgaacatctctgagagcctgcctgagaactacaaacaactaacctggttttatactttcgaccagaagattgtagaatgggattccagaaaatctaagtactttgaatccaaatttaaaggcagggtcagacttgatcctcagagtggcgcactgtacatctctaaggtccagaaagaggacaacagcacctacatcatgagggtgttgaaaaagactgggaatgagcaagaatggaagatcaagctgcaagtgcttggtgagtcaggggagccaaagagcaaatccccactccagtggccccagatggaccactgtagggcttcctgggaggcatggggcactctcggggaggaggagagaaaaacctcaggacaggtttgattcatttttccttgatccaattctatttgggagtgagcctaggtcaacagatatccaaattaacaatcttaggacatttaacacctcttctgaagttagtgagtctaagctttgaagagaaggaaaactagagatttttcctatttccttcattttgtcctgtgatcaacctaaatcagctcagctcatcttgattatatctccgaaattaggcttcattggacttaagaaaaaagagaatgtattaatataaagaatggggcaggagttatcaggagaatttttcaactttcataatgggcaggacaaaaaaacttccactcatagctccagtctaaccagtgtatatggaataaggactcaggcattatacctggagccagacagacttgggttcaaaactggtcagttgctcactagctgtgcagccttgaaaaaagatcttcacatctctgtgcccatattaggtaagattcttttgatagcaaataacagaaactaattcaatgtacctttaccaaaaaaggagaatttagtttaagaaactagggctatttaaagcaattcaaagagtttaaaagagctaggaagggcttaaggggagaagattgaaaaccaggttcgggccagaacccctagcttcaggaatctgtggactgtgcctatggatttggattcctgccattttacacatgttatctctcaaaacttagacttttgctcctctgagtttcaattctcagggcaatttaaagagagagaaactgatagtcccaatttagttcaggtgtgtgtacctgatctaaacatttttggtgaaaggatcagattatagggcagaaacatggatatggggaggggctccaggggttggggtatgcaattcttgtagaagagcggggctaaataatccaagagtggtgttcccttgagagccttgggttcttcatcatattatgagaataattctacttacctttcaggatgttattagagtcaaagtagataaggaaagtgaaaacattttttaaaatgtcaaaacatgcaaatgaagagtgttgtatacattcaagttccaccagccagacagtccctgatccaagcagtcagattccccttctaactcttcttccatgtcatatgggctgaaaattcagaaagtcctgggaacaaaaagattcaaggtctcttacagtggtgttctggttaacaagctctacaagatttaaaaaaaaaaaaaaaa

SEQ ID NO: 5127 - DNA, 1126 bp, Homo sapiens
  source 1..1126: mol_type = unassigned DNA
gtttggtaagttccgtttttagccccggcctttttctagccaggctctcaactgtctcctgcgttgctgggaagttctggaaggaagcatgtgctccagaggttgggattcgtgtctggctctggaattgctactgctgcctctgtcactcctggtgaccagcattcaaggtcacttggtacatatgaccgtggtctccggcagcaacgtgactctgaacatctctgagagcctgcctgagaactacaaacaactaacctggttttatactttcgaccagaagattgtagaatgggattccagaaaatctaagtactttgaatccaaatttaaaggcagggtcagacttgatcctcagagtggcgcactgtacatctctaaggtccagaaagaggacaacagcacctacatcatgagggtgttgaaaaagactgggaatgagcaagaatggaagatcaagctgcaagtgcttgaccctgtacccaagcctgtcatcaaaattgagaagatagaagacatggatgacaactgttatctgaaactgtcatgtgtgatacctggcgagtctgtaaactacacctggtatggggacaaaaggcccttcccaaaggagctccagaacagtgtgcttgaaaccacccttatgccacataattactccaggtgttatacttgccaagtcagcaattctgtgagcagcaagaatggcacggtctgcctcagtccaccctgtaccctggcccggtcctttggagtagaatggattgcaagttggctagtggtcacggtgcccaccattcttggcctgttacttacctgagatgagctcttttaactcaagcgaaacttcaaggccagaagatcttgcctgttggtgatcatgctcctcaccaggacagagactgtataggctgaccagaagcatgctgctgaattatcaacgaggattttcaagttaacttttaaatactggttattatttaattttatatccctttgttgttttctagtacacagagatatagagatacacatgcttttttcccacccaaaattgtgacaacattatgtgaatgttttattattttttaaaataaacatttgatataattgtcaattaactgaa

SEQ ID NO: 5128 - DNA, 2191 bp, Homo sapiens
  source 1..2191: mol_type = unassigned DNA
ctcctcttaacatacttgcagctaaaactaaatattgctgcttggggacctccttctagccttaaatttcagctcatcaccttcacctgccttggtcatggctctgctattctccttgatccttgccatttgcaccagacctggattcctagcgtctccatctggagtgcggctggtggggggcctccaccgctgtgaagggcgggtggaggtggaacagaaaggccagtggggcaccgtgtgtgatgacggctgggacattaaggacgtggctgtgttgtgccgggagctgggctgtggagctgccagcggaacccctagtggtattttgtatgagccaccagcagaaaaagagcaaaaggtcctcatccaatcagtcagttgcacaggaacagaagatacattggctcagtgtgagcaagaagaagtttatgattgttcacatgatgaagatgctggggcatcgtgtgagaacccagagagctctttctccccagtcccagagggtgtcaggctggctgacggccctgggcattgcaagggacgcgtggaagtgaagcaccagaaccagtggtataccgtgtgccagacaggctggagcctccgggccgcaaaggtggtgtgccggcagctgggatgtgggagggctgtactgactcaaaaacgctgcaacaagcatgcctatggccgaaaacccatctggctgagccagatgtcatgctcaggacgagaagcaacccttcaggattgcccttctgggccttgggggaagaacacctgcaaccatgatgaagacacgtgggtcgaatgtgaagatccctttgacttgagactagtaggaggagacaacctctgctctgggcgactggaggtgctgcacaagggcgtatggggctctgtctgtgatgacaactggggagaaaaggaggaccaggtggtatgcaagcaactgggctgtgggaagtccctctctccctccttcagagaccggaaatgctatggccctggggttggccgcatctggctggataatgttcgttgctcaggggaggagcagtccctggagcagtgccagcacagattttgggggtttcacgactgcacccaccaggaagatgtggctgtcatctgctcaggatagtatcctggtgttgcttgacctggcccccctggccccgcctgccctctgcttgttctcctgagccctgattatcctcatactcattctggggctcaggcttgagccactactccctcatcccctcaggagtctgaacactgggcttatgccttactctcagggacaagcagcccccattgctgcctgtagatgtgagctgttgagttccctcttgctggggaagatgagcttccatgtatcctgtgctcaaccctgaccctttgacactggttctggcctttcctgccttttctcaagctgcctggaatcctcaaacctgtcactttggtcagatgtgcagaccattactaaggtctatgtctgcaaacattactaatctaggtcctattactaatctatgtctgcaaacattaaaggaatgaaacaatgaaaggaacatttgaaagaaaatgtgggtagacaatttcttgcaacttgggggaaagtttagaattcttttgattggactactttttttttttttcctcaagcttcaggtgaccacaatagcaacacctccctattctgttatttcttagtgtaggtagacaattctttcaggagcagagcagcgtcctataatcctagaccttttcatgacgtgtaaaaaatgatgtttcatcctctgattgccccaataaaaatctttgttgtccatccctatacaacctgccaacatggttgacatttaatgagaggaatgtcaaaaatacattttactttattcaaagaaaaatatattggttactgggaaaaggtcaagaaagaggcagaaagagatcagggagggctaaagttgtgtcttatgccaagcgaaagtgaaaaatatcattttcactttatcaactgagactttggggcctgtaagcttgaggcaagacagaaataagagaatcaagacttgattgtaaaaattgacaactttagattctgaggctaggctgagtacttattatacggctacatttacacatttacacttatctaataaatcagatttcacagtctcaa

SEQ ID NO: 5129 - DNA, 1505 bp, Homo sapiens
  source 1..1505: mol_type = unassigned DNA
agccccggatatctgtgttaccagccttgtctcggccacctcaaggataatcactaaattctgccgaaaggactgaggaacggtgcctggaaaagggcaagaatatcacggcatgggcatgagtagcttgaaactgctgaagtatgtcctgtttttcttcaacttgctcttttggatctgtggctgctgcattttgggctttgggatctacctgctgatccacaacaacttcggagtgctcttccataacctcccctccctcacgctgggcaatgtgtttgtcatcgtgggctctattatcatggtagttgccttcctgggctgcatgggctctatcaaggaaaacaagtgtctgcttatgtcgttcttcatcctgctgctgattatcctccttgctgaggtgaccttggccatcctgctctttgtatatgaacagaagctgaatgagtatgtggctaagggtctgaccgacagcatccaccgttaccactcagacaatagcaccaaggcagcgtgggactccatccagtcatttctgcagtgttgtggtataaatggcacgagtgattggaccagtggcccaccagcatcttgcccctcagatcgaaaagtggagggttgctatgcgaaagcaagactgtggtttcattccaatttcctgtatatcggaatcatcaccatctgtgtatgtgtgattgaggtgttggggatgtcctttgcactgaccctgaactgccagattgacaaaaccagccagaccatagggctatgatctgcagtagtcctgtggtgaagagacttgtttcatctccggaaatgcaaaaccatttatagcatgaagccctacatgatcactgcaggatgatcctcctcccatcctttccctttttaggtccctgtcttatacaaccagagaagtgggtgttggccaggcacatcccatctcaggcagcaagacaatctttcactcactgacggcagcagccatgtctctcaaagtggtgaaactaatatctgagcatcttttagacaagagaggcaaagacaaactggatttaatggcccaacatcaaagggtgaacccaggatatgaatttttgcatcttcccattgtcgaattagtctccagcctctaaataatgcccagtcttctccccaaagtcaagcaagagactagttgaagggagttctggggccaggctcactggaccattgtcacaaccctctgtttctctttgactaagtgccctggctacaggaattacacagttctctttctccaaagggcaagatctcatttcaatttctttattagagggccttattgatgtgttctaagtctttccagaaaaaaactatccagtgatttatatcctgatttcaaccagtcacttagctgataatcacagtaagaagacttctggtattatctctctatcagataagattttgttaatgtactattttactcttcaataaataaaagtttattatctcaatcacaa

SEQ ID NO: 5130 - DNA, 977 bp, Homo sapiens
  source 1..977: mol_type = unassigned DNA
tagccccggatatctgtgttaccagccttgtctcggccacctcaaggataatcactaaattctgccgaaaggactgaggaacggtgcctggaaaagggcaagaatatcacggcatgggcatgagtagcttgaaactgctgaagtatgtcctgtttttcttcaacttgctcttttggatctgtggctgctgcattttgggctttgggatctacctgctgatccacaacaacttcggagtgctcttccataacctcccctccctcacgctgggcaatgtgtttgtcatcgtgggctctattatcatggtagttgccttcctgggctgcatgggctctatcaaggaaaacaagtgtctgcttatgtcgttcttcatcctgctgctgattatcctccttgctgaggtgaccttggccatcctgctctttgtatatgaacagaagggttgctatgcgaaagcaagactgtggtttcattccaatttcctgtatatcggaatcatcaccatctgtgtatgtgtgattgaggtgttggggatgtcctttgcactgaccctgaactgccagattgacaaaaccagccagaccatagggctatgatctgcagtagtcctgtggtgaagagacttgtttcatctccggaaatgcaaaaccatttatagcatgaagccctacatgatcactgcaggatgatcctcctcccatcctttccctttttaggtccctgtcttatacaaccagagaagtgggtgttggccaggcacatcccatctcaggcagcaagacaatctttcactcactgacggcagcagccatgtctctcaaagtggtgaaactaatatctgagcatcttttagacaagagaggcaaagacaaactggatttaatggcccaacatcaaagggtgaacccaggatatgaatttttgcatcttcccattgtcgaattagtctccagcctctaaataatgcccagtcttct

SEQ ID NO: 5131 - DNA, 2220 bp, Homo sapiens
  source 1..2220: mol_type = unassigned DNA
ccgctgggcgtagctgcgactcggcggagtcccggcggcgcgtccttgttctaacccggcgcgccatgaccgtcgcgcggccgagcgtgcccgcggcgctgcccctcctcggggagctgccccggctgctgctgctggtgctgttgtgcctgccggccgtgtggggtgactgtggccttcccccagatgtacctaatgcccagccagctttggaaggccgtacaagttttcccgaggatactgtaataacgtacaaatgtgaagaaagctttgtgaaaattcctggcgagaaggactcagtgatctgccttaagggcagtcaatggtcagatattgaagagttctgcaatcgtagctgcgaggtgccaacaaggctaaattctgcatccctcaaacagccttatatcactcagaattattttccagtcggtactgttgtggaatatgagtgccgtccaggttacagaagagaaccttctctatcaccaaaactaacttgccttcagaatttaaaatggtccacagcagtcgaattttgtaaaaagaaatcatgccctaatccgggagaaatacgaaatggtcagattgatgtaccaggtggcatattatttggtgcaaccatctccttctcatgtaacacagggtacaaattatttggctcgacttctagtttttgtcttatttcaggcagctctgtccagtggagtgacccgttgccagagtgcagagaaatttattgtccagcaccaccacaaattgacaatggaataattcaaggggaacgtgaccattatggatatagacagtctgtaacgtatgcatgtaataaaggattcaccatgattggagagcactctatttattgtactgtgaataatgatgaaggagagtggagtggcccaccacctgaatgcagaggaaaatctctaacttccaaggtcccaccaacagttcagaaacctaccacagtaaatgttccaactacagaagtctcaccaacttctcagaaaaccaccacaaaaaccaccacaccaaatgctcaagcaacacggagtacacctgtttccaggacaaccaagcattttcatgaaacaaccccaaataaaggaagtggaaccacttcaggtactacccgtcttctatctggttctcgtcctgtcacccaggctggtatgcggtggtgtgatcgtagctcactgcagtctcgaactcctgggttcaagcgatccttccacttcagcctcccaagtagctggtactacagggcacacgtgtttcacgttgacaggtttgcttgggacgctagtaaccatgggcttgctgacttagccaaagaagagttaagaagaaaatacacacaagtatacagactgttcctagtttcttagacttatctgcatattggataaaataaatgcaattgtgctcttcatttaggatgctttcattgtctttaagatgtgttaggaatgtcaacagagcaaggagaaaaaaggcagtcctggaatcacattcttagcacacctacacctcttgaaaatagaacaacttgcagaattgagagtgattcctttcctaaaagtgtaagaaagcatagagatttgttcgtatttagaatgggatcacgaggaaaagagaaggaaagtgatttttttccacaagatctgtaatgttatttccacttataaaggaaataaaaaatgaaaaacattatttggatatcaaaagcaaataaaaacccaattcagtctcttctaagcaaaattgctaaagagagatgaaccacattataaagtaatctttggctgtaaggcattttcatctttccttcgggttggcaaaatattttaaaggtaaaacatgctggtgaaccaggggtgttgatggtgataagggaggaatatagaatgaaagactgaatcttcctttgttgcacaaatagagtttggaaaaagcctgtgaaaggtgtcttctttgacttaatgtctttaaaagtatccagagatactacaatattaacataagaaaagattatatattatttctgaatcgagatgtccatagtcaaatttgtaaatcttattcttttgtaatatttatttatatttatttatgacagtgaacattctgattttacatgtaaaacaagaaaagttgaagaagatatgtgaagaaaaatgtatttttcctaaatagaaataaatgatcccattttttggt

SEQ ID NO: 5132 - DNA, 1515 bp, Homo sapiens
  source 1..1515: mol_type = unassigned DNA
gttctaacccggcgcgccatgaccgtcgcgcggccgagcgtgcccgcggcgctgcccctcctcggggagctgccccggctgctgctgctggtgctgttgtgcctgccggccgtgtggggtgactgtggccttcccccagatgtacctaatgcccagccagctttggaaggccgtacaagttttcccgaggatactgtaataacgtacaaatgtgaagaaagctttgtgaaaattcctggcgagaaggactcagtgatctgccttaagggcagtcaatggtcagatattgaagagttctgcaatcgtagctgcgaggtgccaacaaggctaaattctgcatccctcaaacagccttatatcactcagaattattttccagtcggtactgttgtggaatatgagtgccgtccaggttacagaagagaaccttctctatcaccaaaactaacttgccttcagaatttaaaatggtccacagcagtcgaattttgtaaaaagaaatcatgccctaatccgggagaaatacgaaatggtcagattgatgtaccaggtggcatattatttggtgcaaccatctccttctcatgtaacacagggtacaaattatttggctcgacttctagtttttgtcttatttcaggcagctctgtccagtggagtgacccgttgccagagtgcagagaaatttattgtccagcaccaccacaaattgacaatggaataattcaaggggaacgtgaccattatggatatagacagtctgtaacgtatgcatgtaataaaggattcaccatgattggagagcactctatttattgtactgtgaataatgatgaaggagagtggagtggcccaccacctgaatgcagaggaaaatctctaacttccaaggtcccaccaacagttcagaaacctaccacagtaaatgttccaactacagaagtctcaccaacttctcagaaaaccaccacaaaaaccaccacaccaaatgctcaagcaacacggagtacacctgtttccaggacaaccaagcattttcatgaaacaaccccaaataaaggaagtggaaccacttcaggtactacccgtcttctatctgttctgtttatgtgatgaatcacatttattgatttggatatgttgagccaaccttgcatcccaggaataaagcctacttgatcgtgggcacacgtgtttcacgttgacaggtttgcttgggacgctagtaaccatgggcttgctgacttagccaaagaagagttaagaagaaaatacacacaagtatacagactgttcctagtttcttagacttatctgcatattggataaaataaatgcaattgtgctcttcatttaggatgctttcattgtctttaagatgtgttaggaatgtcaacagagcaaggagaaaaaaggcagtcctggaatcacattcttagcacacctacacctcttgaaaatagaacaacttgcagaattgagagtgattcctttcctaaaagtgtaagaaagcat

SEQ ID NO: 5133 - DNA, 2760 bp, Homo sapiens
  source 1..2760: mol_type = unassigned DNA
gagtctagggcccccggggcgtatgacgccggagccctctgaccgcacctctgaccacaacaaacccctactccacccgtcttgtttgtcccacccttggtgacgcagagccccagcccagaccccgcccaaagcactcatttaactggtattgcggagccacgaggcttctgcttactgcaactcgctccggccgctgggcgtagctgcgactcggcggagtcccggcggcgcgtccttgttctaacccggcgcgccatgaccgtcgcgcggccgagcgtgcccgcggcgctgcccctcctcggggagctgccccggctgctgctgctggtgctgttgtgcctgccggccgtgtggggtgactgtggccttcccccagatgtacctaatgcccagccagctttggaaggccgtacaagttttcccgaggatactgtaataacgtacaaatgtgaagaaagctttgtgaaaattcctggcgagaaggactcagtgatctgccttaagggcagtcaatggtcagatattgaagagttctgcaatcgtagctgcgaggtgccaacaaggctaaattctgcatccctcaaacagccttatatcactcagaattattttccagtcggtactgttgtggaatatgagtgccgtccaggttacagaagagaaccttctctatcaccaaaactaacttgccttcagaatttaaaatggtccacagcagtcgaattttgtaaaaagaaatcatgccctaatccgggagaaatacgaaatggtcagattgatgtaccaggtggcatattatttggtgcaaccatctccttctcatgtaacacagggtacaaattatttggctcgacttctagtttttgtcttatttcaggcagctctgtccagtggagtgacccgttgccagagtgcagagaaatttattgtccagcaccaccacaaattgacaatggaataattcaaggggaacgtgaccattatggatatagacagtctgtaacgtatgcatgtaataaaggattcaccatgattggagagcactctatttattgtactgtgaataatgatgaaggagagtggagtggcccaccacctgaatgcagaggaaaatctctaacttccaaggtcccaccaacagttcagaaacctaccacagtaaatgttccaactacagaagtctcaccaacttctcagaaaaccaccacaaaaaccaccacaccaaatgctcaagcaacacggagtacacctgtttccaggacaaccaagcattttcatgaaacaaccccaaataaaggaagtggaaccacttcaggtactacccgtcttctatctgggcacacgtgtttcacgttgacaggtttgcttgggacgctagtaaccatgggcttgctgacttagccaaagaagagttaagaagaaaatacacacaagtatacagactgttcctagtttcttagacttatctgcatattggataaaataaatgcaattgtgctcttcatttaggatgctttcattgtctttaagatgtgttaggaatgtcaacagagcaaggagaaaaaaggcagtcctggaatcacattcttagcacacctacacctcttgaaaatagaacaacttgcagaattgagagtgattcctttcctaaaagtgtaagaaagcatagagatttgttcgtatttagaatgggatcacgaggaaaagagaaggaaagtgatttttttccacaagatctgtaatgttatttccacttataaaggaaataaaaaatgaaaaacattatttggatatcaaaagcaaataaaaacccaattcagtctcttctaagcaaaattgctaaagagagatgaaccacattataaagtaatctttggctgtaaggcattttcatctttccttcgggttggcaaaatattttaaaggtaaaacatgctggtgaaccaggggtgttgatggtgataagggaggaatatagaatgaaagactgaatcttcctttgttgcacaaatagagtttggaaaaagcctgtgaaaggtgtcttctttgacttaatgtctttaaaagtatccagagatactacaatattaacataagaaaagattatatattatttctgaatcgagatgtccatagtcaaatttgtaaatcttattcttttgtaatatttatttatatttatttatgacagtgaacattctgattttacatgtaaaacaagaaaagttgaagaagatatgtgaagaaaaatgtatttttcctaaatagaaataaatgatcccattttttggtatcatgtagtatgtgaaatttattcttaaacgtgactactttatttctaaataagaaattccctacctgcttcctacaagcagttcagaatgccatgccttggttgtcctagtgtgaataattttcagctactttaaaattatattgtactttctcaagcatgtcatatcctttcctattagagtatctatattacttgttactgatttacctgaaggcaatctgattaatttctaggtttttaccatattcttgtcatcttgccaattacattttaagtgttagactagactaagatgtactagttgtatagaatataactagatttattatggcaatgtttattttgtcattttgcttcatctgttttgttgttgaagtactttaaatttcatacgttcatggcatttcactgtaaagactttaatgtgtatttcttaaaataaaactttttttcctccttaa

SEQ ID NO: 5134 - DNA, 1545 bp, Homo sapiens
  source 1..1545: mol_type = unassigned DNA
gttctaacccggcgcgccatgaccgtcgcgcggccgagcgtgcccgcggcgctgcccctcctcggggagctgccccggctgctgctgctggtgctgttgtgcctgccggccgtgtggggtgactgtggccttcccccagatgtacctaatgcccagccagctttggaaggccgtacaagttttcccgaggatactgtaataacgtacaaatgtgaagaaagctttgtgaaaattcctggcgagaaggactcagtgatctgccttaagggcagtcaatggtcagatattgaagagttctgcaatcgtagctgcgaggtgccaacaaggctaaattctgcatccctcaaacagccttatatcactcagaattattttccagtcggtactgttgtggaatatgagtgccgtccaggttacagaagagaaccttctctatcaccaaaactaacttgccttcagaatttaaaatggtccacagcagtcgaattttgtaaaaagaaatcatgccctaatccgggagaaatacgaaatggtcagattgatgtaccaggtggcatattatttggtgcaaccatctccttctcatgtaacacagggtacaaattatttggctcgacttctagtttttgtcttatttcaggcagctctgtccagtggagtgacccgttgccagagtgcagagaaatttattgtccagcaccaccacaaattgacaatggaataattcaaggggaacgtgaccattatggatatagacagtctgtaacgtatgcatgtaataaaggattcaccatgattggagagcactctatttattgtactgtgaataatgatgaaggagagtggagtggcccaccacctgaatgcagaggaaaatctctaacttccaaggtcccaccaacagttcagaaacctaccacagtaaatgttccaactacagaagtctcaccaacttctcagaaaaccaccacaaaaaccaccacaccaaatgctcaagcaacacggagtacacctgtttccaggacaaccaagcattttcatgaaacaaccccaaataaaggaagtggaaccacttcaggtactacccgtcttctatctgagacggtgtttcaccgtgttatccaggatggtcttgatctcctggcctcgagatctgcctgcctcggcctcccaaagtgctgggattacaggcgtgagccaccgcacctggccagggcacacgtgtttcacgttgacaggtttgcttgggacgctagtaaccatgggcttgctgacttagccaaagaagagttaagaagaaaatacacacaagtatacagactgttcctagtttcttagacttatctgcatattggataaaataaatgcaattgtgctcttcatttaggatgctttcattgtctttaagatgtgttaggaatgtcaacagagcaaggagaaaaaaggcagtcctggaatcacattcttagcacacctacacctcttgaaaatagaacaacttgcagaattgagagtgattcctttcctaaaagtgtaagaaagcat

SEQ ID NO: 5135 - DNA, 1297 bp, Homo sapiens
  source 1..1297: mol_type = unassigned DNA
actgcaactcgctccggccgctgggcgtagctgcgactcggcggagtcccggcggcgcgtccttgttctaacccggcgcgccatgaccgtcgcgcggccgagcgtgcccgcggcgctgcccctcctcggggagctgccccggctgctgctgctggtgctgttgtgcctgccggccgtgtggggtgactgtggccttcccccagatgtacctaatgcccagccagctttggaaggccgtacaagttttcccgaggatactgtaataacgtacaaatgtgaagaaagctttgtgaaaattcctggcgagaaggactcagtgatctgccttaagggcagtcaatggtcagatattgaagagttctgcaatcgtagctgcgaggtgccaacaaggttacagaagagaaccttctctatcaccaaaactaacttgccttcagaatttaaaatggtccacagcagtcgaattttgtaaaaagaaatcatgccctaatccgggagaaatacgaaatggtcagattgatgtaccaggtggcatattatttggtgcaaccatctccttctcatgtaacacagggtacaaattatttggctcgacttctagtttttgtcttatttcaggcagctctgtccagtggagtgacccgttgccagagtgcagagaaatttattgtccagcaccaccacaaattgacaatggaataattcaaggggaacgtgaccattatggatatagacagtctgtaacgtatgcatgtaataaaggattcaccatgattggagagcactctatttattgtactgtgaataatgatgaaggagagtggagtggcccaccacctgaatgcagaggaaaatctctaacttccaaggtcccaccaacagttcagaaacctaccacagtaaatgttccaactacagaagtctcaccaacttctcagaaaaccaccacaaaaaccaccacaccaaatgctcaagcaacacggagtacacctgtttccaggacaaccaagcattttcatgaaacaaccccaaataaaggaagtggaaccacttcaggtactacccgtcttctatctgggcacacgtgtttcacgttgacaggtttgcttgggacgctagtaaccatgggcttgctgacttagccaaagaagagttaagaagaaaatacacacaagtatacagactgttcctagtttcttagacttatctgcatattggataaaataaatgcaattgtgctcttcatttaggatgctttcattgtctttaagatgtgttaggaatgtcaacagagcaa

SEQ ID NO: 5136 - DNA, 1523 bp, Homo sapiens
  source 1..1523: mol_type = unassigned DNA
gttctaacccggcgcgccatgaccgtcgcgcggccgagcgtgcccgcggcgctgcccctcctcggggagctgccccggctgctgctgctggtgctgttgtgcctgccggccgtgtggggtgactgtggccttcccccagatgtacctaatgcccagccagctttggaaggccgtacaagttttcccgaggatactgtaataacgtacaaatgtgaagaaagctttgtgaaaattcctggcgagaaggactcagtgatctgccttaagggcagtcaatggtcagatattgaagagttctgcaatcgtagctgcgaggtgccaacaaggctaaattctgcatccctcaaacagccttatatcactcagaattattttccagtcggtactgttgtggaatatgagtgccgtccaggttacagaagagaaccttctctatcaccaaaactaacttgccttcagaatttaaaatggtccacagcagtcgaattttgtaaaaagaaatcatgccctaatccgggagaaatacgaaatggtcagattgatgtaccaggtggcatattatttggtgcaaccatctccttctcatgtaacacagggtacaaattatttggctcgacttctagtttttgtcttatttcaggcagctctgtccagtggagtgacccgttgccagagtgcagagaaatttattgtccagcaccaccacaaattgacaatggaataattcaaggggaacgtgaccattatggatatagacagtctgtaacgtatgcatgtaataaaggattcaccatgattggagagcactctatttattgtactgtgaataatgatgaaggagagtggagtggcccaccacctgaatgcagaggaaaatctctaacttccaaggtcccaccaacagttcagaaacctaccacagtaaatgttccaactacagaagtctcaccaacttctcagaaaaccaccacaaaaaccaccacaccaaatgctcaagcaacacggagtacacctgtttccaggacaaccaagcattttcatgaaacaaccccaaataaaggaagtggaaccacttcaggtactacccgtcttctatctgctctgcaagttagaccttttgaagtgtctgggtcatcccacatttcttcaaaaaagatgatgtgcatcctctaggtcactccagttcttggagggcacacgtgtttcacgttgacaggtttgcttgggacgctagtaaccatgggcttgctgacttagccaaagaagagttaagaagaaaatacacacaagtatacagactgttcctagtttcttagacttatctgcatattggataaaataaatgcaattgtgctcttcatttaggatgctttcattgtctttaagatgtgttaggaatgtcaacagagcaaggagaaaaaaggcagtcctggaatcacattcttagcacacctacacctcttgaaaatagaacaacttgcagaattgagagtgattcctttcctaaaagtgtaagaaagcat

SEQ ID NO: 5137 - DNA, 1033 bp, Homo sapiens
  source 1..1033: mol_type = unassigned DNA
gcaactcgctccggccgctgggcgtagctgcgactcggcggagtcccggcggcgcgtccttgttctaacccggcgcgccatgaccgtcgcgcggccgagcgtgcccgcggcgctgcccctcctcggggagctgccccggctgctgctgctggtgctgttgtgcctgccggccgtgtggggtgactgtggccttcccccagatgtacctaatgcccagccagctttggaaggccgtacaagttttcccgaggatactgtaataacgtacaaatgtgaagaaagctttgtgaaaattcctggcgagaaggactcagtgatctgccttaagggcagtcaatggtcagatattgaagagttctgcaatcagaaatcatgccctaatccgggagaaatacgaaatggtcagattgatgtaccaggtggcatattatttggtgcaaccatctccttctcatgtaacacagggtacaaattatttggctcgacttctagtttttgtcttatttcaggcagctctgtccagtggagtgacccgttgccagagtgcagagaaatttattgtccagcaccaccacaaattgacaatggaataattcaaggggaacgtgaccattatggatatagacagtctgtaacgtatgcatgtaataaaggattcaccatgattggagagcactctatttattgtactgtgaataatgatgaaggagagtggagtggcccaccacctgaatgcagaggaaaatctctaacttccaaggtcccaccaacagttcagaaacctaccacagtaaatgttccaactacagaagtctcaccaacttctcagaaaaccaccacaaaaaccaccacaccaaatgctcaagcaacacggagtacacctgtttccaggacaaccaagcattttcatgaaacaaccccaaataaaggaagtggaaccacttcaggtcagttgacactgttttcagggcacacgtgtttcacgttgacaggtttgcttgggacgctagtaaccatgggcttgctgacttag

SEQ ID NO: 5138 - DNA, 1098 bp, Homo sapiens
  source 1..1098: mol_type = unassigned DNA
gtaggcggtgcttgaacttagggctgcttgtggctgggcactcgcgcagaggccggcccgacgagccatggttgctgggagcgacgcggggcgggccctgggggtcctcagcgtggtctgcctgctgcactgctttggtttcatcagctgtttttcccaacaaatatatggtgttgtgtatgggaatgtaactttccatgtaccaagcaatgtgcctttaaaagaggtcctatggaaaaaacaaaaggataaagttgcagaactggaaaattctgaattcagagctttctcatcttttaaaaatagggtttatttagacactgtgtcaggtagcctcactatctacaacttaacatcatcagatgaagatgagtatgaaatggaatcgccaaatattactgataccatgaagttctttctttatgtgcttgagtctcttccatctcccacactaacttgtgcattgactaatggaagcattgaagtccaatgcatgataccagagcattacaacagccatcgaggacttataatgtactcatgggattgtcctatggagcaatgtaaacgtaactcaaccagtatatattttaagatggaaaatgatcttccacaaaaaatacagtgtactcttagcaatccattatttaatacaacatcatcaatcattttgacaacctgtatcccaagcagcggtcattcaagacacagatatgcacttatacccataccattagcagtaattacaacatgtattgtgctgtatatgaatggtattctgaaatgtgacagaaaaccagacagaaccaactccaattgattggtaacagaagatgaagacaacagcataactaaattattttaaaaactaaaaagccatctgatttctcatttgagtattacaatttttgaacaactgttggaaatgtaacttgaagcagctgctttaagaagaaatacccactaacaaagaacaagcattagttttggctgtcatcaacttattatatgactaggtgcttgctttttttgtcagtaaattgtttttactgatgatgtagatacttttgtaaataaatgtaaatatgtacacaagtg

SEQ ID NO: 5139 - DNA, 1328 bp, Homo sapiens
  source 1..1328: mol_type = unassigned DNA
gaacttagggctgcttgtggctgggcactcgcgcagaggccggcccgacgagccatggttgctgggagcgacgcggggcgggccctgggggtcctcagcgtggtctgcctgctgcactgctttggtttcatcagctgtttttcccaacaaatatatggtgttgtgtatgggaatgtaactttccatgtaccaagcaatgtgcctttaaaagaggtcctatggaaaaaacaaaaggataaagttgcagaactggaaaattctgaattcagagctttctcatcttttaaaaatagggtttatttagacactgtgtcaggtagcctcactatctacaacttaacatcatcagatgaagatgagtatgaaatggaatcgccaaatattactgataccatgaagttctttctttatgtgcttgagtctcttccatctcccacactaacttgtgcattgactaatggaagcattgaagtccaatgcatgataccagagcattacaacagccatcgaggacttataatgtactcatgggattgtcctatggagcaatgtaaacgtaactcaaccagtatatattttaagatggaaaatgatcttccacaaaaaatacagtgtactcttagcaatccattatttaatacaacatcatcaatcattttgacaacctgtatcccaagcagcggtcattcaagacacagatatgcacttatacccataccattagcagtaattacaacatgtattgtgctgtatatgaatggtattctgaaatgtgacagaaaaccagacagaaccaagtaagtacactgcaggctgtgcactctgtgccagaacaacagcagccctgctgtagatgcccattacttgggaagccagattgtactcatctgttggttgccttgtacagtaataagaagtaacatcagcagatatactaaccatagtgtattaagtaccaactgtgtgccatgcactgcactagccactctctgcatatcgtttcctggaaccctctcaatgagccttgcaggaggagtatcataccccttgcttagagacagcgcatatgagattcatagaagtcaagtgagatatcaaagtcacgttgctagtaagtgatgggctgggatttaaatctaggtctttggactccaagagttatactgttaaccactacaatacactccctccacctcccatcccagaaaaagttggatcagggatagggttcacttcaggagccagggtcagagctgggcctgtagtcacatataaaagataggacacaaacacaattagcagcagtgttggtttaataaaccgccgta

SEQ ID NO: 5140 - DNA, 1775 bp, Homo sapiens
  source 1..1775: mol_type = unassigned DNA
aaagaatgcgggggctgagcgcagaagcggctcgaggctggaagaggatcttgggcgccgccagtctttagcaccagttggtgtaggagttgagacctacttcacagtagttctgtggacaatcacaatgggaatccaaggagggtctgtcctgttcgggctgctgctcgtcctggctgtcttctgccattcaggtcatagcctgcagtgctacaactgtcctaacccaactgctgactgcaaaacagccgtcaattgttcatctgattttgatgcgtgtctcattaccaaagctgggttacaagtgtataacaagtgttggaagtttgagcattgcaatttcaacgacgtcacaacccgcttgagggaaaatgagctaacgtactactgctgcaagaaggacctgtgtaactttaacgaacagcttgaaaatggtgggacatccttatcagagaaaacagttcttctgctggtgactccatttctggcagcagcctggagccttcatccctaagtcaacaccaggagagcttctcccaaactccccgttcctgcgtagtccgctttctcttgctgccacattctaaaggcttgatattttccaaatggatcctgttgggaaagaataaaattagcttgagcaacctggctaagatagaggggctctgggagactttgaagaccagtcctgtttgcagggaagccccacttgaaggaagaagtctaagagtgaagtaggtgtgacttgaactagattgcatgcttcctcctttgctcttgggaagaccagctttgcagtgacagcttgagtgggttctctgcagccctcagattatttttcctctggctccttggatgtagtcagttagcatcattagtacatctttggagggtggggcaggagtatatgagcatcctctctcacatggaacgctttcataaacttcagggatcccgtgttgccatggaggcatgccaaatgttccatatgtgggtgtcagtcagggacaacaagatccttaatgcagagctagaggacttctggcagggaagtggggaagtgttccagatagcagggcatgaaaacttagagaggtacaagtggctgaaaatcgagtttttcctctgtctttaaattttatatgggctttgttatcttccactggaaaagtgtaatagcatacatcaatggtgtgttaaagctatttccttgccttttttttattggaatggtaggatatcttggctttgccacacacagttacagagtgaacactctactacatgtgactggcagtattaagtgtgcttattttaaatgttactggtagaaaggcagttcaggtatgtgtgtatatagtatgaatgcagtggggacaccctttgtggttacagtttgagacttccaaaggtcatccttaataacaacagatctgcaggggtatgttttaccatctgcatccagcctcctgctaactcctagctgactcagcatagattgtataaaatacctttgtaacggctcttagcacactcacagatgtttgaggctttcagaagctcttctaaaaaatgatacacacctttcacaagggcaaactttttccttttccctgtgtattctagtgaatgaatctcaagattcagtagacctaatgacatttgtattttatgatcttggctgtatttaatggcataggctgacttttgcagatggaggaatttcttgattaatgttgaaaaaaaacccttgattatactctgttggacaaacc

SEQ ID NO: 5141 - DNA, 1889 bp, Homo sapiens
  source 1..1889: mol_type = unassigned DNA
tgcgggggctgagcgcagaagcggctcgaggctggaagaggatcttgggcgccgccaggttctgtggacaatcacaatgggaatccaaggagggtctgtcctgttcgggctgctgctcgtcctggctgtcttctgccattcaggtcatagcctgcagtgctacaactgtcctaacccaactgctgactgcaaaacagccgtcaattgttcatctgattttgatgcgtgtctcattaccaaagctgggttacaagtgtataacaagtgttggaagtttgagcattgcaatttcaacgacgtcacaacccgcttgagggaaaatgagctaacgtactactgctgcaagaaggacctgtgtaactttaacgaacagcttgaaaatggtgggacatccttatcagagaaaacagttcttctgctggtgactccatttctggcagcagcctggagccttcatccctaagtcaacaccaggagagcttctcccaaactccccgttcctgcgtagtccgctttctcttgctgccacattctaaaggcttgatattttccaaatggatcctgttgggaaagaataaaattagcttgagcaacctggctaagatagaggggctctgggagactttgaagaccagtcctgtttgcagggaagccccacttgaaggaagaagtctaagagtgaagtaggtgtgacttgaactagattgcatgcttcctcctttgctcttgggaagaccagctttgcagtgacagcttgagtgggttctctgcagccctcagattatttttcctctggctccttggatgtagtcagttagcatcattagtacatctttggagggtggggcaggagtatatgagcatcctctctcacatggaacgctttcataaacttcagggatcccgtgttgccatggaggcatgccaaatgttccatatgtgggtgtcagtcagggacaacaagatccttaatgcagagctagaggacttctggcagggaagtggggaagtgttccagatagcagggcatgaaaacttagagaggtacaagtggctgaaaatcgagtttttcctctgtctttaaattttatatgggctttgttatcttccactggaaaagtgtaatagcatacatcaatggtgtgttaaagctatttccttgccttttttttattggaatggtaggatatcttggctttgccacacacagttacagagtgaacactctactacatgtgactggcagtattaagtgtgcttattttaaatgttactggtagaaaggcagttcaggtatgtgtgtatatagtatgaatgcagtggggacaccctttgtggttacagtttgagacttccaaaggtcatccttaataacaacagatctgcaggggtatgttttaccatctgcatccagcctcctgctaactcctagctgactcagcatagattgtataaaatacctttgtaacggctcttagcacactcacagatgtttgaggctttcagaagctcttctaaaaaatgatacacacctttcacaagggcaaactttttccttttccctgtgtattctagtgaatgaatctcaagattcagtagacctaatgacatttgtattttatgatcttggctgtatttaatggcataggctgacttttgcagatggaggaatttcttgattaatgttgaaaaaaaacccttgattatactctgttggacaaaccgagtgcaatgaatgatgcttttctgaaaatgaaatataacaagtgggtgaatgtggttatggccgaaaaggatatgcagtatgcttaatggtagcaactgaaagaagacatcctgagcagtgccagctttcttctgttgatgccgttccctgaacataggaaaat

SEQ ID NO: 5142 - DNA, 1878 bp, Homo sapiens
  source 1..1878: mol_type = unassigned DNA
tgatggggaagatagtgttattcccacagtgtggtagtacacactggggcttatagggactgagcctactcaagggtatatggtgctgtgggtcagagctggggcatggcccagggattcagtgtgccttgactccccctgtaaatgttcctctcagaagccttcttggccttccagcccttggtttttgagacaaccagcagtcatttgttcgttcctgacattccttcctgtcccttccttccaggttctgtggacaatcacaatgggaatccaaggagggtctgtcctgttcgggctgctgctcgtcctggctgtcttctgccattcaggtcatagcctgcagtgctacaactgtcctaacccaactgctgactgcaaaacagccgtcaattgttcatctgattttgatgcgtgtctcattaccaaagctgggttacaagtgtataacaagtgttggaagtttgagcattgcaatttcaacgacgtcacaacccgcttgagggaaaatgagctaacgtactactgctgcaagaaggacctgtgtaactttaacgaacagcttgaaaatggtgggacatccttatcagagaaaacagttcttctgctggtgactccatttctggcagcagcctggagccttcatccctaagtcaacaccaggagagcttctcccaaactccccgttcctgcgtagtccgctttctcttgctgccacattctaaaggcttgatattttccaaatggatcctgttgggaaagaataaaattagcttgagcaacctggctaagatagaggggctctgggagactttgaagaccagtcctgtttgcagggaagccccacttgaaggaagaagtctaagagtgaagtaggtgtgacttgaactagattgcatgcttcctcctttgctcttgggaagaccagctttgcagtgacagcttgagtgggttctctgcagccctcagattatttttcctctggctccttggatgtagtcagttagcatcattagtacatctttggagggtggggcaggagtatatgagcatcctctctcacatggaacgctttcataaacttcagggatcccgtgttgccatggaggcatgccaaatgttccatatgtgggtgtcagtcagggacaacaagatccttaatgcagagctagaggacttctggcagggaagtggggaagtgttccagatagcagggcatgaaaacttagagaggtacaagtggctgaaaatcgagtttttcctctgtctttaaattttatatgggctttgttatcttccactggaaaagtgtaatagcatacatcaatggtgtgttaaagctatttccttgccttttttttattggaatggtaggatatcttggctttgccacacacagttacagagtgaacactctactacatgtgactggcagtattaagtgtgcttattttaaatgttactggtagaaaggcagttcaggtatgtgtgtatatagtatgaatgcagtggggacaccctttgtggttacagtttgagacttccaaaggtcatccttaataacaacagatctgcaggggtatgttttaccatctgcatccagcctcctgctaactcctagctgactcagcatagattgtataaaatacctttgtaacggctcttagcacactcacagatgtttgaggctttcagaagctcttctaaaaaatgatacacacctttcacaagggcaaactttttccttttccctgtgtattctagtgaatgaatctcaagattcagtagacctaatgacatttgtattttatgatcttggctgtatttaatggcataggctgacttttgcagatggaggaatttcttgattaatgttga

SEQ ID NO: 5143 - DNA, 741 bp, Homo sapiens
  source 1..741: mol_type = unassigned DNA
attatacttcttacagtgaggagccagagcttccaggttctgtggacaatcacaatgggaatccaaggagggtctgtcctgttcgggctgctgctcgtcctggctgtcttctgccattcaggtcatagcctgcagtgctacaactgtcctaacccaactgctgactgcaaaacagccgtcaattgttcatctgattttgatgcgtgtctcattaccaaagctgggttacaagtgtataacaagtgttggaagtttgagcattgcaatttcaacgacgtcacaacccgcttgagggaaaatgagctaacgtactactgctgcaagaaggacctgtgtaactttaacgaacagcttgaaaatggtgggacatccttatcagagaaaacagttcttctgctggtgactccatttctggcagcagcctggagccttcatccctaagtcaacaccaggagagcttctcccaaactccccgttcctgcgtagtccgctttctcttgctgccacattctaaaggcttgatattttccaaatggatcctgttgggaaagaataaaattagcttgagcaacctggctaagatagaggggctctgggagactttgaagaccagtcctgtttgcagggaagccccacttgaaggaagaagtctaagagtgaagtaggtgtgacttgaactagattgcatgcttcctcctttgctcttgggaagaccagctttgcagtgacagcttgagtggg

SEQ ID NO: 5144 - DNA, 758 bp, Homo sapiens
  source 1..758: mol_type = unassigned DNA
tttgactcactgaccctgatggggaagatagtgttattcccacagtgtggtagtacacactggggcttatagggactgagcctactcaagggtatatggtgctgtgggtcagagctggggcatggcccagggattcagtgtgccttgactccccctgttctgtggacaatcacaatgggaatccaaggagggtctgtcctgttcgggctgctgctcgtcctggctgtcttctgccattcaggtcatagcctgcagtgctacaactgtcctaacccaactgctgactgcaaaacagccgtcaattgttcatctgattttgatgcgtgtctcattaccaaagctgggttacaagtgtataacaagtgttggaagtttgagcattgcaatttcaacgacgtcacaacccgcttgagggaaaatgagctaacgtactactgctgcaagaaggacctgtgtaactttaacgaacagcttgaaaatggtgggacatccttatcagagaaaacagttcttctgctggtgactccatttctggcagcagcctggagccttcatccctaagtcaacaccaggagagcttctcccaaactccccgttcctgcgtagtccgctttctcttgctgccacattctaaaggcttgatattttccaaatggatcctgttgggaaagaataaaattagcttgagcaacctggctaagatagaggggctctgggagactttgaagaccagtcctgtttgcagggaagccccactt

SEQ ID NO: 5145 - DNA, 825 bp, Homo sapiens
  source 1..825: mol_type = unassigned DNA
atttgactcactgaccctgatggggaagatagtgttattcccacagtgtggtagtacacactggggcttatagggactgagcctactcaagggttctgtggacaatcacaatgggaatccaaggagggtctgtcctgttcgggctgctgctcgtcctggctgtcttctgccattcaggtcatagcctgcagtgctacaactgtcctaacccaactgctgactgcaaaacagccgtcaattgttcatctgattttgatgcgtgtctcattaccaaagctgggttacaagtgtataacaagtgttggaagtttgagcattgcaatttcaacgacgtcacaacccgcttgagggaaaatgagctaacgtactactgctgcaagaaggacctgtgtaactttaacgaacagcttgaaaatggtgggacatccttatcagagaaaacagttcttctgctggtgactccatttctggcagcagcctggagccttcatccctaagtcaacaccaggagagcttctcccaaactccccgttcctgcgtagtccgctttctcttgctgccacattctaaaggcttgatattttccaaatggatcctgttgggaaagaataaaattagcttgagcaacctggctaagatagaggggctctgggagactttgaagaccagtcctgtttgcagggaagccccacttgaaggaagaagtctaagagtgaagtaggtgtgacttgaactagattgcatgcttcctcctttgctcttgggaagaccagctttgcagtgacagcttgagtgggttctctgcagccctcagattatttttcc

SEQ ID NO: 5146 - DNA, 789 bp, Homo sapiens
  source 1..789: mol_type = unassigned DNA
ccaggttctgtggacaatcacaatgggaatccaaggagggtctgtcctgttcgggctgctgctcgtcctggctgtcttctgccattcaggtcatagcctgcagtgctacaactgtcctaacccaactgctgactgcaaaacagccgtcaattgttcatctgattttgatgcgtgtctcattaccaaagctgggttacaagtgtataacaagtgttggaagtttgagcattgcaatttcaacgacgtcacaacccgcttgagggaaaatgagctaacgtactactgctgcaagaaggacctgtgtaactttaacgaacagcttgaaaatggtgggacatccttatcagagaaaacagttcttctgctggtgactccatttctggcagcagcctggagccttcatccctaagtcaacaccaggagagcttctcccaaactccccgttcctgcgtagtccgctttctcttgctgccacattctaaaggcttgatattttccaaatggatcctgttgggaaagaataaaattagcttgagcaacctggctaagatagaggggctctgggagactttgaagaccagtcctgtttgcagggaagccccacttgaaggaagaagtctaagagtgaaacacattcctgaaggcgctaaaagacgaaaagttacaaggactgaagaccaagcaacctggaaagaagtcggcctctctctcctgaggagctgcctaccagagcttgggcagccacctccttaggtgttagtgcttagataatgtgtcccatttgttgtc

SEQ ID NO: 5147 - DNA, 686 bp, Homo sapiens
  source 1..686: mol_type = unassigned DNA
gcagaagcggctcgaggctggaagaggatcttgggcgccgccagtctctctctgttgcccaagctggagtgcagtggcacagtcttggctcactgcaacctccacctcctgggtgcaagcgattctcgtgtctcagcctctcaagtagctgggattacaggttctgtggacaatcacaatgggaatccaaggagggtctgtcctgttcgggctgctgctcgtcctggctgtcttctgccattcaggtcatagcctgcagtgctacaactgtcctaacccaactgctgactgcaaaacagccgtcaattgttcatctgattttgatgcgtgtctcattaccaaagctgggttacaagtgtataacaagtgttggaagtttgagcattgcaatttcaacgacgtcacaacccgcttgagggaaaatgagctaacgtactactgctgcaagaaggacctgtgtaactttaacgaacagcttgaaaatggtgggacatccttatcagagaaaacagttcttctgctggtgactccatttctggcagcagcctggagccttcatccctaagtcaacaccaggagagcttctcccaaactccccgttcctgcgtagtccgctttctcttgctgccacattctaaaggcttgatattttccaaatggatcctgttgggaaagaataaaattag

SEQ ID NO: 5148 - DNA, 652 bp, Homo sapiens
  source 1..652: mol_type = unassigned DNA
gaagcggctcgaggctggaagaggatcttgggcgccgccagtctctctctgttgcccaagctggagtgcagtggcacagtcttggctcactgcaacctccacctcctgggtgcaagcgattctcgtgtctcagcctctcaagtagctgggattacagtctttagcaccagttggtgtaggagttgagacctacttcacagtagttctgtggacaatcacaatgggaatccaaggagggtctgtcctgttcgggctgctgctcgtcctggctgtcttctgccattcaggtcatagcctgcagtgctacaactgtcctaacccaactgctgactgcaaaacagccgtcaattgttcatctgattttgatgcgtgtctcattaccaaagctgggttacaagtgtataacaagtgttggaagtttgagcattgcaatttcaacgacgtcacaacccgcttgagggaaaatgagctaacgtactactgctgcaagaaggacctgtgtaactttaacgaacagcttgaaaatggtgggacatccttatcagagaaaacagttcttctgctggtgactccatttctggcagcagcctggagccttcatccctaagtcaacaccaggagagcttctcccaaactccccgttcctgcgtag

SEQ ID NO: 5149 - DNA, 3252 bp, Homo sapiens
  source 1..3252: mol_type = unassigned DNA
actcacaggttgggtttgatcgcatgcgtgtcggagaggagagagcagagagagacacaggaacaagaacagcaaagggtagagcagacctgcgccaggggcgcacaacggccgtgtccacctcccggccccaagatggtgcttcccacaggcagccacgcgtagcagccagagacagctccagacatgtggctcttcttcgggatcactggattgctgacggcagccctctcaggtcatccatctccagccccacctgaccagctcaacaccagcagtgcagagagtgagctctgggagccaggggagcggcttccggtccgtctgacaaacgggagcagcagctgcagcgggacggtggaggtgcggctcgaggcgtcctgggagcccgcgtgcggggcgctctgggacagccgcgccgccgaggccgtgtgccgagcactgggctgcggcggggcggaggccgcctctcagctcgccccgccgacccctgagctgccgcccccgcctgcagccgggaacaccagcgtagcagctaatgccactctggccggggcgcccgccctcctgtgcagcggcgccgagtggcggctctgcgaggtggtggagcacgcgtgccgcagcgacgggaggcgggcccgtgtcacctgtgcagagaaccgcgcgctgcgcctggtggacggtggcggcgcctgcgccggccgcgtggagatgctggagcatggcgagtggggatcagtgtgcgatgacacttgggacctggaggacgcccacgtggtgtgcaggcaactgggctgcggctgggcagtccaggccctgcccggcttgcacttcacgcccggccgcgggcctatccaccgggaccaggtgaactgctcgggggccgaagcttacctgtgggactgcccggggctgccaggacagcactactgcggccacaaagaggacgcgggcgcggtgtgctcagagcaccagtcctggcgcctgacagggggcgctgaccgctgcgaggggcaggtggaggtacacttccgaggggtctggaacacagtgtgtgacagtgagtggtacccatcggaggccaaggtgctctgccagtccttgggctgtggaactgcggttgagaggcccaaggggctgccccactccttgtccggcaggatgtactactcatgcaatggggaggagctcaccctctccaactgctcctggcggttcaacaactccaacctctgcagccagtcgctggcagccagggtcctctgctcagcttcccggagtttgcacaatctgtccactcccgaagtccctgcaagtgttcagacagtcactatagaatcttctgtgacagtgaaaatagagaacaaggaatctcgggagctaatgctcctcatcccctccatcgttctgggaattctcctccttggctccctcatcttcatagccttcatcctcttgagaattaaaggaaaatatgccctccccgtaatggtgaaccaccagcacctacccaccaccatcccggcagggagcaatagctatcaaccggtccccatcaccatccccaaagaagttttcatgctgcccatccaggtccaggccccgccccctgaggactcagactctggctcggactcagactatgagcactatgacttcagcgcccagcctcctgtggccctgaccaccttctacaattcccagcggcatcgggtcacagatgaggaggtccagcaaagcaggttccagatgccacccttggaggaaggacttgaagagttgcatgcctcccacatcccaactgccaaccctggacactgcattacagacccgccatccctgggccctcagtatcacccgaggagcaacagtgagtcgagcacctcttcaggggaggattactgcaatagtcccaaaagcaagctgcctccatggaacccccaggtgttttcttcagagaggagttccttcctggagcagcccccaaacttggagctggccggcacccagccagccttttcagcagggcccccggctgatgacagctccagcacctcatccggggagtggtaccagaacttccagccaccaccccagcccccttcggaggagcagtttggctgtccagggtcccccagccctcagcctgactccaccgacaacgatgactacgatgacatcagcgcagcctaggccggggccagccgaggctcctggggtggctctgaccctctggcctcctgctctacctactccctttcccctttcccaccctcccagctcacctccccatggagctgagaggcctcccttggagagatggaaggaaacgttataccttgtacccctcggtctccatccatcaagccaaacctgctgccacagccctcccccggccccagatagcagccccagggaggatgctgcctccaagaggtgtgagccctctgtctcggggatgaacaagcagagtctgggctacctcttgacagctggtggaggggagttggggagctggactggatgactctggaggccccttccaaacctcaagtgtccggcgctttgattgcctgagtttctgacacttcagggcccagaggtcctgcgaggggcagaactggacccccatgccagtgctgctgcaggagggcccatatactagggtctgctgagctgttgtcactgatcggtgggcgctgggggggtagggtagcacaccagctgtcccaggctttgctccgggcggtaactgcacttgggcagggaatatagccttcctgggcacaactagctgacaatgacaggttgactgtgtacccccaaccaaggagctggggcccaaggccagtcctgccccagagacactccaagtccgccaggggcacagaccagttctgcagtgactgtccctggacaatgggtctttattctgagtttcctatggtttacaaagagggccccagcccagccccaccacagatcccagagataggggcccagtctccatgggggcaaggagcatagagatgttttccaggaaggggctcagaagctgcactaggccccgagtccccatgtgtctccttgaattgatgaggatgctcctgggagggatgcgtgactatgtggtgttgcacccggggctgcaaacgtctccgtgcagcccccagagagaggcccatgggctcagaccaggctttgttgtcctgctctgagtatcctgagattaaactgaattgctgaatgaaa

SEQ ID NO: 5150 - DNA, 3190 bp, Homo sapiens
  source 1..3190: mol_type = unassigned DNA
agaccaaaaccacaagcagaacaagcaggcgtgagacactcacaggttgggtttgatcgcatgcgtgtcggagaggagagagcagagagagacacaggaacaagaacagcaaagggtagagcagacctgcgccaggggcgcacaacggccgtgtccacctcccggccccaagatggtgcttcccacaggcagccacgcgtagcagccagagacagctccagacatgtggctcttcttcgggatcactggattgctgacggcagccctctcaggtcatccatctccagccccacctgaccagctcaacaccagcagtgcagagagtgagctctgggagccaggggagcggcttccggtccgtctgacaaacgggagcagcagctgcagcgggacggtggaggtgcggctcgaggcgtcctgggagcccgcgtgcggggcgctctgggacagccgcgccgccgaggccgtgtgccgagcactgggctgcggcggggcggaggccgcctctcagctcgccccgccgacccctgagctgccgcccccgcctgcagccgggaacaccagcgtagcagctaatgccactctggccggggcgcccgccctcctgtgcagcggcgccgagtggcggctctgcgaggtggtggagcacgcgtgccgcagcgacgggaggcgggcccgtgtcacctgtgcagagaaccgcgcgctgcgcctggtggacggtggcggcgcctgcgccggccgcgtggagatgctggagcatggcgagtggggatcagtgtgcgatgacacttgggacctggaggacgcccacgtggtgtgcaggcaactgggctgcggctgggcagtccaggccctgcccggcttgcacttcacgcccggccgcgggcctatccaccgggaccaggtgaactgctcgggggccgaagcttacctgtgggactgcccggggctgccaggacagcactactgcggccacaaagaggacgcgggcgcggtgtgctcagagcaccagtcctggcgcctgacagggggcgctgaccgctgcgaggggcaggtggaggtacacttccgaggggtctggaacacagtgtgtgacagtgagtggtacccatcggaggccaaggtgctctgccagtccttgggctgtggaactgcggttgagaggcccaaggggctgccccactccttgtccggcaggatgtactactcatgcaatggggaggagctcaccctctccaactgctcctggcggttcaacaactccaacctctgcagccagtcgctggcagccagggtcctctgctcagcttcccggagtttgcacaatctgtccactcccgaagtccctgcaagtgttcagacagtcactatagaatcttctgtgacagtgaaaatagagaacaaggaatctcgggagctaatgctcctcatcccctccatcgttctgggaattctcctccttggctccctcatcttcatagccttcatcctcttgagaattaaaggaaaatatgttttcatgctgcccatccaggtccaggccccgccccctgaggactcagactctggctcggactcagactatgagcactatgacttcagcgcccagcctcctgtggccctgaccaccttctacaattcccagcggcatcgggtcacagatgaggaggtccagcaaagcaggttccagatgccacccttggaggaaggacttgaagagttgcatgcctcccacatcccaactgccaaccctggacactgcattacagacccgccatccctgggccctcagtatcacccgaggagcaacagtgagtcgagcacctcttcaggggaggattactgcaatagtcccaaaagcaagctgcctccatggaacccccaggtgttttcttcagagaggagttccttcctggagcagcccccaaacttggagctggccggcacccagccagccttttcagcagggcccccggctgatgacagctccagcacctcatccggggagtggtaccagaacttccagccaccaccccagcccccttcggaggagcagtttggctgtccagggtcccccagccctcagcctgactccaccgacaacgatgactacgatgacatcagcgcagcctaggccggggccagccgaggctcctggggtggctctgaccctctggcctcctgctctacctactccctttcccctttcccaccctcccagctcacctccccatggagctgagaggcctcccttggagagatggaaggaaacgttataccttgtacccctcggtctccatccatcaagccaaacctgctgccacagccctcccccggccccagatagcagccccagggaggatgctgcctccaagaggtgtgagccctctgtctcggggatgaacaagcagagtctgggctacctcttgacagctggtggaggggagttggggagctggactggatgactctggaggccccttccaaacctcaagtgtccggcgctttgattgcctgagtttctgacacttcagggcccagaggtcctgcgaggggcagaactggacccccatgccagtgctgctgcaggagggcccatatactagggtctgctgagctgttgtcactgatcggtgggcgctgggggggtagggtagcacaccagctgtcccaggctttgctccgggcggtaactgcacttgggcagggaatatagccttcctgggcacaactagctgacaatgacaggttgactgtgtacccccaaccaaggagctggggcccaaggccagtcctgccccagagacactccaagtccgccaggggcacagaccagttctgcagtgactgtccctggacaatgggtctttattctgagtttcctatggtttacaaagagggccccagcccagccccaccacagatcccagagataggggcccagtctccatgggggcaaggagcatagagatgttttccaggaaggggctcagaagctgcactaggccccgagtccccatgtgtctccttgaattgatgaggatgctcctgggagggatgcgtgactatgtggtgttgcacccggggctgcaaacgtctccgtgcagcccccagagagaggcccatgggctcagaccaggctttgttgtcctgctctgagtatcctgagattaaactgaattgctgaatg

SEQ ID NO: 5151 - DNA, 3067 bp, Homo sapiens
  source 1..3067: mol_type = unassigned DNA
agaccaaaaccacaagcagaacaagcaggcgtgagacactcacaggttgggtttgatcgcatgcgtgtcggagaggagagagcagagagagacacaggaacaagaacagcaaagggtagagcagacctgcgccaggggcgcacaacggccgtgtccacctcccggccccaagatggtgcttcccacaggcagccacgcgtagcagccagagacagctccagacatgtggctcttcttcgggatcactggattgctgacggcagccctctcaggtcatccatctccagccccacctgaccagctcaacaccagcagtgcagagagtgagctctgggagccaggggagcggcttccggtccgtctgacaaacgggagcagcagctgcagcgggacggtggaggtgcggctcgaggcgtcctgggagcccgcgtgcggggcgctctgggacagccgcgccgccgaggccgtgtgccgagcactgggctgcggcggggcggaggccgcctctcagctcgccccgccgacccctgagctgccgcccccgcctgcagccgggaacaccagcgtagcagctaatgccactctggccggggcgcccgccctcctgtgcagcggcgccgagtggcggctctgcgaggtggtggagcacgcgtgccgcagcgacgggaggcgggcccgtgtcacctgtgcagagaaccgcgcgctgcgcctggtggacggtggcggcgcctgcgccggccgcgtggagatgctggagcatggcgagtggggatcagtgtgcgatgacacttgggacctggaggacgcccacgtggtgtgcaggcaactgggctgcggctgggcagtccaggccctgcccggcttgcacttcacgcccggccgcgggcctatccaccgggaccaggtgaactgctcgggggccgaagcttacctgtgggactgcccggggctgccaggacagcactactgcggccacaaagaggacgcgggcgcggtgtgctcagagcaccagtcctggcgcctgacagggggcgctgaccgctgcgaggggcaggtggaggtacacttccgaggggtctggaacacagtgtgtgacagtgagtggtacccatcggaggccaaggtgctctgccagtccttgggctgtggaactgcggttgagaggcccaaggggctgccccactccttgtccggcaggatgtactactcatgcaatggggaggagctcaccctctccaactgctcctggcggttcaacaactccaacctctgcagccagtcgctggcagccagggtcctctgctcagcttcccggagtttgcacaatctgtccactcccgaagtccctgcaagtgttcagacagtcactatagaatcttctgtgacagtgaaaatagagaacaaggaatctcgggagctaatgctcctcatcccctccatcgttctgggaattctcctccttggctccctcatcttcatagccttcatcctcttgagaattaaaggaaaatatgattcccagcggcatcgggtcacagatgaggaggtccagcaaagcaggttccagatgccacccttggaggaaggacttgaagagttgcatgcctcccacatcccaactgccaaccctggacactgcattacagacccgccatccctgggccctcagtatcacccgaggagcaacagtgagtcgagcacctcttcaggggaggattactgcaatagtcccaaaagcaagctgcctccatggaacccccaggtgttttcttcagagaggagttccttcctggagcagcccccaaacttggagctggccggcacccagccagccttttcagcagggcccccggctgatgacagctccagcacctcatccggggagtggtaccagaacttccagccaccaccccagcccccttcggaggagcagtttggctgtccagggtcccccagccctcagcctgactccaccgacaacgatgactacgatgacatcagcgcagcctaggccggggccagccgaggctcctggggtggctctgaccctctggcctcctgctctacctactccctttcccctttcccaccctcccagctcacctccccatggagctgagaggcctcccttggagagatggaaggaaacgttataccttgtacccctcggtctccatccatcaagccaaacctgctgccacagccctcccccggccccagatagcagccccagggaggatgctgcctccaagaggtgtgagccctctgtctcggggatgaacaagcagagtctgggctacctcttgacagctggtggaggggagttggggagctggactggatgactctggaggccccttccaaacctcaagtgtccggcgctttgattgcctgagtttctgacacttcagggcccagaggtcctgcgaggggcagaactggacccccatgccagtgctgctgcaggagggcccatatactagggtctgctgagctgttgtcactgatcggtgggcgctgggggggtagggtagcacaccagctgtcccaggctttgctccgggcggtaactgcacttgggcagggaatatagccttcctgggcacaactagctgacaatgacaggttgactgtgtacccccaaccaaggagctggggcccaaggccagtcctgccccagagacactccaagtccgccaggggcacagaccagttctgcagtgactgtccctggacaatgggtctttattctgagtttcctatggtttacaaagagggccccagcccagccccaccacagatcccagagataggggcccagtctccatgggggcaaggagcatagagatgttttccaggaaggggctcagaagctgcactaggccccgagtccccatgtgtctccttgaattgatgaggatgctcctgggagggatgcgtgactatgtggtgttgcacccggggctgcaaacgtctccgtgcagcccccagagagaggcccatgggctcagaccaggctttgttgtcctgctctgagtatcctgagattaaactgaattgctgaatg

SEQ ID NO: 5152 - DNA, 1809 bp, Homo sapiens
  source 1..1809: mol_type = unassigned DNA
atgtggctcttcttcgggatcactggattgctgacggcagccctctcaggtcatccatctccagccccacctgaccagctcaacaccagcagtgcagagagtgagctctgggagccaggggagcggcttccggtccgtctgacaaacgggagcagcagctgcagcgggacggtggaggtgcggctcgaggcgtcctgggagcccgcgtgcggggcgctctgggacagccgcgccgccgaggccgtgtgccgagcactgggctgcggcggggcggaggccgcctctcagctcgccccgccgacccctgagctgccgcccccgcctgcagccgggaacaccagcgtagcagctaatgccactctggccggggcgcccgccctcctgtgcagcggcgccgagtggcggctctgcgaggtggtggagcacgcgtgccgcagcgacgggaggcgggcccgtgtcacctgtgcagagaaccgcgcgctgcgcctggtggacggtggcggcgcctgcgccggccgcgtggagatgctggagcatggcgagtggggatcagtgtgcgatgacacttgggacctggaggacgcccacgtggtgtgcaggcaactgggctgcggctgggcagtccaggccctgcccggcttgcacttcacgcccggccgcgggcctatccaccgggaccaggtgaactgctcgggggccgaagcttacctgtgggactgcccggggctgccaggacagcactactgcggccacaaagaggacgcgggcgcggtgtgctcagagcaccagtcctggcgcctgacagggggcgctgaccgctgcgaggggcaggtggaggtacacttccgaggggtctggaacacagtgtgtgacagtgagtggtacccatcggaggccaaggtgctctgccagtccttgggctgtggaactgcggttgagaggcccaaggggctgccccactccttgtccggcaggatgtactactcatgcaatggggaggagctcaccctctccaactgctcctggcggttcaacaactccaacctctgcagccagtcgctggcagccagggtcctctgctcagcttcccggagtttgcacaatctgtccactcccgaagtccctgcaagtgttcagacagtcactatagaatcttctgtgacagtgaaaatagagaacaaggaatctcgggagctaatgctcctcatcccctccatcgttctgggaattctcctccttggctccctcatcttcatagccttcatcctcttgagaattaaaggaaaatatgttttcatgctgcccatccaggtccaggccccgccccctgaggactcagactctggctcggactcagactatgagcactatgacttcagcgcccagcctcctgtggccctgaccaccttctacaattcccagcggcatcgggtcacagatgaggaggtccagcaaagcaggttccagatgccacccttggaggaaggacttgaagagttgcatgcctcccacatcccaactgccaaccctggacactgcattacagacccgccatccctgggccctcagtatcacccgaggagcaacagtgagtcgagcacctcttcaggggaggattactgcaatagtcccaaaagcaagctgcctccatggaacccccaggtgttttcttcagagaggagttccttcctggagcagcccccaaacttggagctggccggcacccagccagccttttcagggtcccccagccctcagcctgactccaccgacaacgatgactacgatgacatcagcgcagcctaggcc

SEQ ID NO: 5153 - DNA, 1782 bp, Homo sapiens
  source 1..1782: mol_type = unassigned DNA
atgtggctcttcttcgggatcactggattgctgacggcagccctctcaggtcatccatctccagccccacctgaccagctcaacaccagcagtgcagagagtgagctctgggagccaggggagcggcttccggtccgtctgacaaacgggagcagcagctgcagcgggacggtggaggtgcggctcgaggcgtcctgggagcccgcgtgcggggcgctctgggacagccgcgccgccgaggccgtgtgccgagcactgggctgcggcggggcggaggccgcctctcagctcgccccgccgacccctgagctgccgcccccgcctgcagccgggaacaccagcgtagcagctaatgccactctggccggggcgcccgccctcctgtgcagcggcgccgagtggcggctctgcgaggtggtggagcacgcgtgccgcagcgacgggaggcgggcccgtgtcacctgtgcagagaaccgcgcgctgcgcctggtggacggtggcggcgcctgcgccggccgcgtggagatgctggagcatggcgagtggggatcagtgtgcgatgacacttgggacctggaggacgcccacgtggtgtgcaggcaactgggctgcggctgggcagtccaggccctgcccggcttgcacttcacgcccggccgcgggcctatccaccgggaccaggtgaactgctcgggggccgaagcttacctgtgggactgcccggggctgccaggacagcactactgcggccacaaagaggacgcgggcgcggtgtgctcagagcaccagtcctggcgcctgacagggggcgctgaccgctgcgaggggcaggtggaggtacacttccgaggggtctggaacacagtgtgtgacagtgagtggtacccatcggaggccaaggtgctctgccagtccttgggctgtggaactgcggttgagaggcccaaggggctgccccactccttgtccggcaggatgtactactcatgcaatggggaggagctcaccctctccaactgctcctggcggttcaacaactccaacctctgcagccagtcgctggcagccagggtcctctgctcagcttcccggagtttgcacaatctgtccactcccgaagtccctgcaagtgttcagacagtcactatagaatcttctgtgacagtgaaaatagagaacaaggaatctcgggagctaatgctcctcatcccctccatcgttctgggaattctcctccttggctccctcatcttcatagccttcatcctcttgagaattaaaggaaaatatgccctccccgtaatggtgaaccaccagcacctacccaccaccatcccggcagggagcaatagctatcaaccggtccccatcaccatccccaaagaagattcccagcggcatcgggtcacagatgaggaggtccagcaaagcaggttccagatgccacccttggaggaaggacttgaagagttgcatgcctcccacatcccaactgccaaccctggacactgcattacagacccgccatccctgggccctcagtatcacccgaggagcaacagtgagtcgagcacctcttcaggggaggattactgcaatagtcccaaaagcaagctgcctccatggaacccccaggtgttttcttcagagaggagttccttcctggagcagcccccaaacttggagctggccggcacccagccagccttttcagggtcccccagccctcagcctgactccaccgacaacgatgactacgatgacatcagcgcagcctaggcc

SEQ ID NO: 5154 - DNA, 1070 bp, Homo sapiens
  source 1..1070: mol_type = unassigned DNA
cgggggtgggcgccttcttccgggtaggggccacgtggccctggccgggcggggggctcggcccaccccgcgccgggcccagtgactcaggccgcagctgttaccgcgtcacatgagggaggccggcggccactcggcgggggaggggaccgtggctggagcccggggcggggccgcgcggcaggcggggcgggagccggggggcgcagctagagagccccggagccgcggcgggagaggaacgcgcagccagccttgggaagcccaggcccggcagccatggcggtggaaggaggaatgaaatgtgtgaagttcttgctctacgtcctcctgctggccttttgcgcctgtgcagtgggactgattgccgtgggtgtcggggcacagcttgtcctgagtcagaccataatccagggggctacccctggctctctgttgccagtggtcatcatcgcagtgggtgtcttcctcttcctggtggcttttgtgggctgctgcggggcctgcaaggagaactattgtcttatgatcacgtttgccatctttctgtctcttatcatgttggtggaggtggccgcagccattgctggctatgtgtttagagataaggtgatgtcagagtttaataacaacttccggcagcagatggagaattacccgaaaaacaaccacactgcttcgatcctggacaggatgcaggcagattttaagtgctgtggggctgctaactacacagattgggagaaaatcccttccatgtcgaagaaccgagtccccgactcctgctgcattaatgttactgtgggctgtgggattaatttcaacgagaaggcgatccataaggagggctgtgtggagaagattgggggctggctgaggaaaaatgtgctggtggtagctgcagcagcccttggaattgcttttgtcgaggttttgggaattgtctttgcctgctgcctcgtgaagagtatcagaagtggctacgaggtgatgtaggggtctggtctcctcagcctcctcatctgggggagtggaatagtatcctccaggtttttcaattaaacggatta

SEQ ID NO: 5155 - DNA, 855 bp, Homo sapiens
  source 1..855: mol_type = unassigned DNA
cggcgggagaggaacgcgcagccagccttgggaagcccaggcccggcagccatggcggtggaaggaggaatgaaatgtgtgaagttcttgctctacgtcctcctgctggccttttgcgcctgtgcagtgggactgattgccgtgggtgtcggggcacagcttgtcctgagtcagaccataatccagggggctacccctggctctctgttgccagtggtcatcatcgcagtgggtgtcttcctcttcctggtggcttttgtgggctgctgcggggcctgcaaggagaactattgtcttatgatcacgtttgccatctttctgtctcttatcatgttggtggaggtggccgcagccattgctggctatgtgtttagagataaggtgatgtcagagtttaataacaacttccggcagcagatggagaattacccgaaaaacaaccacactgcttcgatcctggacaggatgcaggcagattttaagtgctgtggggctgctaactacacagattgggagaaaatcccttccatgtcgaagaaccgagtccccgactcctgctgcattaatgttactgtgggctgtgggattaatttcaacgagaaggcgatccataaggagggctgtgtggagaagattgggggctggctgaggaaaaatgtgctggtggtagctgcagcagcccttggaattgcttttgttttgggaattgtctttgcctgctgcctcgtgaagagtatcagaagtggctacgaggtgatgtaggggtctggtctcctcagcctcctcatctgggggagtggaatagtatcctccaggtttttcaattaaacggattattttttcagaccgaaaaga

SEQ ID NO: 5156 - DNA, 607 bp, Homo sapiens
  source 1..607: mol_type = unassigned DNA
tggaaaatggagaagctgtgctaatagaggggggccagaaatccccactctagaatgctgtagaatgttgggagacacccaggatctctccgccccggcgctcagagggtaactctcacccacctcgtccgcttctctgaaccagagtgacccaggctgcgctccgccccgctctcctaccccgagttggcacggaggcccggcagccatggcggtggaaggaggaatgaaatgtgtgaagttcttgctctacgtcctcctgctggccttttgcgcctgtgcagtgggactgattgccgtgggtgtcggggcacagcttgtcctgagtcagaccataatccagggggctacccctggctctctgttgccagtggtcatcatcgcagtgggtgtcttcctcttcctggtggcttttgtgggctgctgcggggcctgcaaggagaactattgtcttatgatcacgtttgccatctttctgtctcttatcatgttggtggaggtggccgcagccattgctggctatgtgtttagagataaggtgatgtcagagtttaataacaacttccggcagcagatggagaattacccgaaaaacaaccacactgct

SEQ ID NO: 5157 - DNA, 1233 bp, Homo sapiens
  source 1..1233: mol_type = unassigned DNA
gtggcttcggggaagggcttcctccccttttctcagactaggatccctggaaaatggagaagctgtgctaatagaggggggccagaaatccccactctagaatgctgtagaatgttgggagacacccaggatgtgagccagggactttctggaagtgtttgttctggccccacccgaccccaggcagtccccagctgtctgcacagtcggatggggagggggcttgcacagagttggagccagaggagagagctggctcatcccctacggtaggatggggaaacctcacagaccacattgtcacccggcctcagctctccgccccggcgctcagagggtaactctcacccacctcgtccgcttctctgaaccagagtgacccaggctgcgctccgccccgctctcctaccccgagttggcacggaggcccggcagccatggcggtggaaggaggaatgaaatgtgtgaagttcttgctctacgtcctcctgctggccttttgcgcctgtgcagtgggactgattgccgtgggtgtcggggcacagcttgtcctgagtcagaccataatccagggggctacccctggctctctgttgccagtggtcatcatcgcagtgggtgtcttcctcttcctggtggcttttgtgggctgctgcggggcctgcaaggagaactattgtcttatgatcacgtttgccatctttctgtctcttatcatgttggtggaggtggccgcagccattgctggctatgtgtttagagataaggtgatgtcagagtttaataacaacttccggcagcagatggagaattacccgaaaaacaaccacactgcttcgatcctggacaggatgcaggcagattttaagtgctgtggggctgctaactacacagattgggagaaaatcccttccatgtcgaagaaccgagtccccgactcctgctgcattaatgttactgtgggctgtgggattaatttcaacgagaaggcgatccataaggagggctgtgtggagaagattgggggctggctgaggaaaaatgtgctggtggtagctgcagcagcccttggaattgcttttgtcgaggttttgggaattgtctttgcctgctgcctcgtgaagagtatcagaagtggctacgaggtgatgtaggggtctggtctcctcagcctcctcatctgggggagtggaatagtatcctccaggtttttcaattaaacggattattttt

SEQ ID NO: 5158 - DNA, 788 bp, Homo sapiens
  source 1..788: mol_type = unassigned DNA
ccggagactggcgggccgagggtcggcgtcaggctcaagcccctgccggcgcccttggatctgtcctgggccccagaggcggcggggcggggtccgggcttcgcggccgtcgcccccacccctctcctgcgggcccggcagccatggcggtggaaggaggaatgaaatgtgtgaagttcttgctctacgtcctcctgctggccttttgcgcctgtgcagtgggactgattgccgtgggtgtcggggcacagcttgtcctgagtcagaccataatccagggggctacccctggctctctgttgccagtggtcatcatcgcagtgggtgtcttcctcttcctggtggcttttgtgggctgctgcggggcctgcaaggagaactattgtcttatgatcacgtttgccatctttctgtctcttatcatgttggtggaggtggccgcagccattgctggctatgtgtttagagataaggtgatgtcagagtttaataacaacttccggcagcagatggagaattacccgaaaaacaaccacactgcttcgatcctggacaggatgcaggcagattttaagtgctgtggggctgctaactacacagattgggagaaaatcccttccatgtcgaagaaccgagtccccgactcctgctgcattaatgttactgtgggctgtgggattaatttcaacgagaaggcgatccataaggagggctgtgtggagaagattgggggctggctgaggaaaaatgtgctggtggtagctgcagcagcccttggaattgctttt

SEQ ID NO: 5159 - DNA, 845 bp, Homo sapiens
  source 1..845: mol_type = unassigned DNA
gcgcagccagccttgggaagcccaggtgaggccgcggggacccggcggacttcggcgcgggctgggagagaccacccgcagtcccttcctccagggctcgccccaggcccgcggagactcgtccggcgctctccagccgccctggagcaactttgcttcgaagttccctgggcccgggcagggcccggcagccatggcggtggaaggaggaatgaaatgtgtgaagttcttgctctacgtcctcctgctggccttttgcgcctgtgcagtgggactgattgccgtgggtgtcggggcacagcttgtcctgagtcagaccataatccagggggctacccctggctctctgttgccagtggtcatcatcgcagtgggtgtcttcctcttcctggtggcttttgtgggctgctgcggggcctgcaaggagaactattgtcttatgatcacgtttgccatctttctgtctcttatcatgttggtggaggtggccgcagccattgctggctatgtgtttagagataaggtgatgtcagagtttaataacaacttccggcagcagatggagaattacccgaaaaacaaccacactgcttcgatcctggacaggatgcaggcagattttaagtgctgtggggctgctaactacacagattgggagaaaatcccttccatgtcgaagaaccgagtccccgactcctgctgcattaatgttactgtgggctgtgggattaatttcaacgagaaggcgatccataaggagggctgtgtggagaagattgggggctggctgaggaaaaatgtgctggtggtagctgcagcagcccttggaattgcttttgtcgagg

SEQ ID NO: 5160 - DNA, 949 bp, Homo sapiens
  source 1..949: mol_type = unassigned DNA
gcgggtttccgggtgggaggggccgggaatcggggccgtgaagggaagccctcgagggccggccgggagcccggaaaccgaggtcccccttcggccagttttaatccccccgccctcccctctgccccaggcccggcagccatggcggtggaaggaggaatgaaatgtgtgaagttcttgctctacgtcctcctgctggccttttgcgcctgtgcagtgggactgattgccgtgggtgtcggggcacagcttgtcctgagtcagaccataatccagggggctacccctggctctctgttgccagtggtcatcatcgcagtgggtgtcttcctcttcctggtggcttttgtgggctgctgcggggcctgcaaggagaactattgtcttatgatcacgtttgccatctttctgtctcttatcatgttggtggaggtggccgcagccattgctggctatgtgtttagagataaggtgatgtcagagtttaataacaacttccggcagcagatggagaattacccgaaaaacaaccacactgcttcgatcctggacaggatgcaggcagattttaagtgctgtggggctgctaactacacagattgggagaaaatcccttccatgtcgaagaaccgagtccccgactcctgctgcattaatgttactgtgggctgtgggattaatttcaacgagaaggcgatccataaggagggctgtgtggagaagattgggggctggctgaggaaaaatgtgctggtggtagctgcagcagcccttggaattgcttttgtcgaggttttgggaattgtctttgcctgctgcctcgtgaagagtatcagaagtggctacgaggtgatgtaggggtctggtctcctcagcctcctcatctgggggagtggaatagtatcctccaggtttttcaattaaacggattattttttcagaccgaaaa

SEQ ID NO: 5161 - DNA, 682 bp, Homo sapiens
  source 1..682: mol_type = unassigned DNA
cggcagccatggcggtggaaggaggaatgaaatgtgtgaagttcttgctctacgtcctcctgctggccttttgcggggctacccctggctctctgttgccagtggtcatcatcgcagtgggtgtcttcctcttcctggtggcttttgtgggctgctgcggggcctgcaaggagaactattgtcttatgatcacgtttgccatctttctgtctcttatcatgttggtggaggtggccgcagccattgctggctatgtgtttagagataaggtgatgtcagagtttaataacaacttccggcagcagatggagaattacccgaaaaacaaccacactgcttcgatcctggacaggatgcaggcagattttaagtgctgtggggctgctaactacacagattgggagaaaatcccttccatgtcgaagaaccgagtccccgactcctgctgcattaatgttactgtgggctgtgggattaatttcaacgagaaggcgatccataaggagggctgtgtggagaagattgggggctggctgaggaaaaatgtgctggtggtagctgcagcagcccttggaattgcttttgtcgaggttttgggaattgtctttgcctgctgcctcgtgaagagtatcagaagtggctacgaggtgatgtaggggtctggtctcctcagcctcctcat

SEQ ID NO: 5162 - DNA, 779 bp, Homo sapiens
  source 1..779: mol_type = unassigned DNA
gcccctctccccctttccctcctcccagcgcttgggggcctgtgcagtgggactgattgccgtgggtgtcggggcacagcttgtcctgagtcagaccataatccagggggctacccctggctctctgttgccagtggtcatcatcgcagtgggtgtcttcctcttcctggtggcttttgtgggctgctgcggggcctgcaaggagaactattgtcttatgatcacgtttgccatctttctgtctcttatcatgttggtggaggtggccgcagccattgctggctatgtgtttagagataaggtgatgtcagagtttaataacaacttccggcagcagatggagaattacccgaaaaacaaccacactgcttcgatcctggacaggatgcaggcagattttaagtgctgtggggctgctaactacacagattgggagaaaatcccttccatgtcgaagaaccgagtccccgactcctgctgcattaatgttactgtgggctgtgggattaatttcaacgagaaggcgatccataaggagggctgtgtggagaagattgggggctggctgaggaaaaatgtgctggtggtagctgcagcagcccttggaattgcttttgtcgaggttttgggaattgtctttgcctgctgcctcgtgaagagtatcagaagtggctacgaggtgatgtaggggtctggtctcctcagcctcctcatctgggggagtggaatagtatcctccaggtttttcaattaaacggattattttttcagaccgaaaa

SEQ ID NO: 5163 - DNA, 870 bp, Homo sapiens
  source 1..870: mol_type = unassigned DNA
ggcttgagaggctactgtttgtctagggagggacacatcactcttgctcccttttcctcttcccttctcctggcctaactggccagaggaaccttagtcacagctgatgcgcgcgtgggatgtgcactggaggatagtgagggggcagttctgggagagaattgagctgggagccctggaggcctgtagaaagcattattctaggcctgtgcagtgggactgattgccgtgggtgtcggggcacagcttgtcctgagtcagaccataatccagggggctacccctggctctctgttgccagtggtcatcatcgcagtgggtgtcttcctcttcctggtggcttttgtgggctgctgcggggcctgcaaggagaactattgtcttatgatcacgtttgccatctttctgtctcttatcatgttggtggaggtggccgcagccattgctggctatgtgtttagagataaggtgatgtcagagtttaataacaacttccggcagcagatggagaattacccgaaaaacaaccacactgcttcgatcctggacaggatgcaggcagattttaagtgctgtggggctgctaactacacagattgggagaaaatcccttccatgtcgaagaaccgagtccccgactcctgctgcattaatgttactgtgggctgtgggattaatttcaacgagaaggcgatccataaggagggctgtgtggagaagattgggggctggctgaggaaaaatgtgctggtggtagctgcagcagcccttggaattgcttttgtcgaggttttgggaattgtctttgcctgctgcctcgtgaagagtatcagaagtggctacgaggtgatgtaggggtctggtctcctc

SEQ ID NO: 5164 - DNA, 1741 bp, Homo sapiens
  source 1..1741: mol_type = unassigned DNA
gagagggctgagggagcagggttgagcaactggtgcagacagcctagctggactttgggtgaggcggttcagccatgaggctggctgtgcttttctcgggggccctgctggggctactggcagcccaggggacagggaatgactgtcctcacaaaaaatcagctactttgctgccatccttcacggtgacacccacggttacagagagcactggaacaaccagccacaggactaccaagagccacaaaaccaccactcacaggacaaccaccacaggcaccaccagccacggacccacgactgccactcacaaccccaccaccaccagccatggaaacgtcacagttcatccaacaagcaatagcactgccaccagccagggaccctcaactgccactcacagtcctgccaccactagtcatggaaatgccacggttcatccaacaagcaacagcactgccaccagcccaggattcaccagttctgcccacccagaaccacctccaccctctccgagtcctagcccaacctccaaggagaccattggagactacacgtggaccaatggttcccagccctgtgtccacctccaagcccagattcagattcgagtcatgtacacaacccagggtggaggagaggcctggggcatctctgtactgaaccccaacaaaaccaaggtccagggaagctgtgagggtgcccatccccacctgcttctctcattcccctatggacacctcagctttggattcatgcaggacctccagcagaaggttgtctacctgagctacatggcggtggagtacaatgtgtccttcccccacgcagcacagtggacattctcggctcagaatgcatcccttcgagatctccaagcacccctggggcagagcttcagttgcagcaactcgagcatcattctttcaccagctgtccacctcgacctgctctccctgaggctccaggctgctcagctgccccacacaggggtctttgggcaaagtttctcctgccccagtgaccggtccatcttgctgcctctcatcatcggcctgatccttcttggcctcctcgccctggtgcttattgctttctgcatcatccggagacgcccatccgcctaccaggccctctgagcatttgcttcaaaccccagggcactgagggggttggggtgtggtgggggggtacccttatttcctcgacacgcaactggctcaaagacaatgttattttccttccctttcttgaagaacaaaaagaaagccgggcatgacggctcatgcctgtaatcccagcactttgggaggctgaggcaggtggatcactggaggtcaggagtttgagaccagcctggccaacatggtgaaaccctgtctctactaaaaatacaattagccaggtgtggcggcgtaatcccagctggcctgtaatcccagctacttgggaggctgaggcagaactgcttgaacccaggaggtggaggttgcagtgagccgtcatcgcgccactaagccaagatcgcgccactgcactccagcctgggcgacagagccagactgtctcaaataaataaatatgagataatgcagtcgggagaagggagggagagaattttattaaatgtgacgaactgccccccccccccccccagcaggagagcagcaaaatttatgcaaatctttgacggggttttccttgtcctgccaggattaaaagccatgagtttcttgtcaca

SEQ ID NO: 5165 - DNA, 1532 bp, Homo sapiens
  source 1..1532: mol_type = unassigned DNA
cagacagcctagctggactttgggtgaggcggttcagccatgaggctggctgtgcttttctcgggggccctgctggggctactggcagagagcactggaacaaccagccacaggactaccaagagccacaaaaccaccactcacaggacaaccaccacaggcaccaccagccacggacccacgactgccactcacaaccccaccaccaccagccatggaaatgccacggttcatccaacaagcaacagcactgccaccagcccaggattcaccagttctgcccacccagaaccacctccaccctctccgagtcctagcccaacctccaaggagaccattggagactacacgtggaccaatggttcccagccctgtgtccacctccaagcccagattcagattcgagtcatgtacacaacccagggtggaggagaggcctggggcatctctgtactgaaccccaacaaaaccaaggtccagggaagctgtgagggtgcccatccccacctgcttctctcattcccctatggacacctcagctttggattcatgcaggacctccagcagaaggttgtctacctgagctacatggcggtggagtacaatgtgtccttcccccacgcagcacagtggacattctcggctcagaatgcatcccttcgagatctccaagcacccctggggcagagcttcagttgcagcaactcgagcatcattctttcaccagctgtccacctcgacctgctctccctgaggctccaggctgctcagctgccccacacaggggtctttgggcaaagtttctcctgccccagtgaccggtccatcttgctgcctctcatcatcggcctgatccttcttggcctcctcgccctggtgcttattgctttctgcatcatccggagacgcccatccgcctaccaggccctctgagcatttgcttcaaaccccagggcactgagggggttggggtgtggtgggggggtacccttatttcctcgacacgcaactggctcaaagacaatgttattttccttccctttcttgaagaacaaaaagaaagccgggcatgacggctcatgcctgtaatcccagcactttgggaggctgaggcaggtggatcactggaggtcaggagtttgagaccagcctggccaacatggtgaaaccctgtctctactaaaaatacaattagccaggtgtggcggcgtaatcccagctggcctgtaatcccagctacttgggaggctgaggcagaactgcttgaacccaggaggtggaggttgcagtgagccgtcatcgcgccactaagccaagatcgcgccactgcactccagcctgggcgacagagccagactgtctcaaataaataaatatgagataatgcagtcgggagaagggagggagagaattttattaaatgtgacgaactgccccccccccccccccagcaggagagcagcaaaatttatgcaaatctttgacggggttttccttgtcctgccaggattaaaagccatgagtttcttgtc

SEQ ID NO: 5166 - DNA, 1676 bp, Homo sapiens
  source 1..1676: mol_type = unassigned DNA
agactcaacaagagctccagcaaagactttcactgtagcttgacttgacctgagattaactagggaatcttgagaataaagatgagctctgaaaattgtttcgtagcagagaacagctctttgcatccggagagtggacaagaaaatgatgccaccagtccccatttctcaacacgtcatgaagggtccttccaagttcctgtcctgtgtgctgtaatgaatgtggtcttcatcaccattttaatcatagctctcattgccttatcagtgggccaatacaattgtccaggccaatacacattctcaatgccatcagacagccatgtttcttcatgctctgaggactgggttggctaccagaggaaatgctactttatttctactgtgaagaggagctggacttcagcccaaaatgcttgttctgaacatggtgctactcttgctgtcattgattctgaaaaggacatgaactttctaaaacgatacgcaggtagagaggaacactgggttggactgaaaaaggaacctggtcacccatggaagtggtcaaatggcaaagaatttaacaactggttcaacgttacagggtctgacaagtgtgtttttctgaaaaacacagaggtcagcagcatggaatgtgagaagaatttatactggatatgtaacaaaccttacaaataataaggaaacatgttcacttattgactattatagaatggaactcaaggaaatctgtgtcagtggatgctgctctgtggtccgaagtcttccatagagactttgtgaaaaaaaattttatagtgtcttgggaattttcttccaaacagaactatggaaaaaaaggaagaaattccaggaaaatctgcactgtgggcttttattgccatgagctagaagcatcacaggttgaccaataaccatgcccaagaatgagaagaatgactatgcaacctttggatgcactttatattattttgaatccagaaataatgaaataactaggcgtggacttactatttattgctgaatgactaccaacagtgagagcccttcatgcatttgcactattggaaggagttagatgttggtactagatactgaatgtaaacaaaggaattatggctggtaacataggtttttagtctaattgaatcccttaaactcagggagcatttataaatggacaaatgcttatgaaactaagatttgtaatatttctctctttttagagaaatttgccaatttactttgttatttttccccaaaaagaatgggatgatcatgtatttatttttttacttcctcagctgtagacaggtccttttcgatggtacatatttctttgcctttataatcttttatacagtgtcttacagagaaaagacataagcaaagactatgaggaatatttgcaagacatagaatagtgttggaaaatgtgcaatatgtgatgtggcaaatctctattaggaaatattctgtaatcttcagacctagaataatactagtcttataataggtttgtgactttcctaaatcaattctattacgtgcaatacttcaatacttcatttaaaatatttttatgtgcaataaaatgtatttgtttgtattttgtgttcagtacaattataagctgtttttatatatgtgaaataaaagtagaataaacacaa

SEQ ID NO: 5167 - DNA, 1020 bp, Homo sapiens
  source 1..1020: mol_type = unassigned DNA
agactcaacaagagctccagcaaagactttcactgtagcttgacttgacctgagattaactagggaatcttgagaataaagatgagctctgaaaattgtttcgtagcagagaacagctctttgcatccggagagtggacaagaaaatgatgccaccagtccccatttctcaacacgtcatgaagggtccttccaagttcctgtcctgtgtgctgtaatgaatgtggtcttcatcaccattttaatcatagctctcattgccttatcagtgggccaatacaattgtccaggccaatacacattctcaatgccatcagacagccatgtttcttcatgctctgaggactgggttggctaccagaggaaatgctactttatttctactgtgaagaggagctggacttcagcccaaaatgcttgttctgaacatggtgctactcttgctgtcattgattctgaaaaggacatgaactttctaaaacgatacgcaggtagagaggaacactgggttggactgaaaaaggaacctggtcacccatggaagtggtcaaatggcaaagaatttaacaactggtaagtctccagaagtctctttatattccccagggtggcatctcaggaaaatcactttccttttctcctttcaaagcactttaaatataaaggctgagctcttcaagagctctaacaatctcttctgaatgcgtatactctggaattctttaataacaggctttattattattctttttctttatccacacttataatacataaaataaatgcttatagtaatttttctcagcaaactctaatgtgagtagtagatctggttaatttggaaatatttcaataataattatgatgatgcaacaaaaacccattttcaatgtcacatttagtctttactaataagacagttgctggaaaataaatccttcttactatttctcagttttcatctccacagaataaagaatagtttcaatgcctaattatgagtttctatacacctgaaaga

SEQ ID NO: 5168 - DNA, 1283 bp, Homo sapiens
  source 1..1283: mol_type = unassigned DNA
ctgagctctgagcgcctgcggtctcctgtgtgctgctctctgtggggtcctgtagacccagagaggctcagctgcactcgcccggctgggagagctgggtgtggggaacatggccgggcctccgaggctcctgctgctgcccctgcttctggcgctggctcgcggcctgcctggggccctggctgcccaagaggtgcagcagtctccccactgcacgactgtccccgtgggagcctccgtcaacatcacctgctccaccagcgggggcctgcgtgggatctacctgaggcagctcgggccacagccccaagacatcatttactacgaggacggggtggtgcccactacggacagacggttccggggccgcatcgacttctcagggtcccaggacaacctgactatcaccatgcaccgcctgcagctgtcggacactggcacctacacctgccaggccatcacggaggtcaatgtctacggctccggcaccctggtcctggtgacagaggaacagtcccaaggatggcacagatgctcggacgccccaccaagggcctctgccctccctgccccaccgacaggctccgccctccctgacccgcagacagcctctgccctccctgacccgccagcagcctctgccctccctgcggccctggcggtgatctccttcctcctcgggctgggcctgggggtggcgtgtgtgctggcgaggacacagataaagaaactgtgctcgtggcgggataagaattcggcggcatgtgtggtgtacgaggacatgtcgcacagccgctgcaacacgctgtcctcccccaaccagtaccagtgacccagtgggcccctgcacgtcccgcctgtggtccccccagcaccttccctgccccaccatgccccccaccctgccacacccctcaccctgctgtcctcccacggctgcagcagagtttgaagggcccagccgtgcccagctccaagcagacacacaggcagtggccaggccccacggtgcttctcagtggacaatgatgcctcctccgggaagccttccctgcccagcccacgccgccaccgggaggaagcctgactgtcctttggctgcatctcccgaccatggccaaggagggcttttctgtgggatgggcctgggcacgcggccctctcctgtcagtgccggcccacccaccagcaggcccccaacccccaggcagcccggcagaggacgggaggagaccagtcccccacccagccgtaccagaaataaaggcttctgtgcttccttt

SEQ ID NO: 5169 - DNA, 1548 bp, Homo sapiens
  source 1..1548: mol_type = unassigned DNA
aattgctaagccgtgcagtcacagagggaacacagagcctagttgtaaacggacagagacgagaggggcaagggaggacagtggatgacagggaagacgagtgggggcagagctgctcaggaccatggctgaggccatcacctatgcagatctgaggtttgtgaaggctcccctgaagaagagcatctccagccggttaggacaggacccaggggctgatgatgatggggaaatcacctacgagaatgttcaagtgcccgcagtcctaggggtgccctcaagcttggcttcttctgtactaggggacaaagcagcggtcaagtcggagcagccaactgcgtcctggagagccgtgacgtcaccagctgtcgggcggattctcccctgccgcacaacctgcctgcgatacctcctgctcggcctgctcctcacctgcctgctgttaggagtgaccgccatctgcctgggagtgcgctatctgcaggtgtctcagcagctccagcagacgaacagggttctggaagtcactaacagcagcctgaggcagcagctccgcctcaagataacgcagctgggacagagtgcagaggatctgcaggggtccaggagagagctggcgcagagtcaggaagcactacaggtggaacagagggctcatcaggcggccgaagggcagctacaggcctgccaggcagacagacagaagacgaaggagaccttgcaaagtgaggagcaacagaggagggccttggagcagaagctgagcaacatggagaacagactgaagcccttcttcacatgcggctcagcagacacctgctgtccgtcgggatggataatgcatcagaaaagctgcttttacatctcacttacttcaaaaaattggcaggagagccaaaaacaatgtgaaactctgtcttccaagctggccacattcagtgaaatttatccacaatcacactcttactacttcttaaattcactgttgccaaatggtggttcagggaattcatattggactggcctcagctctaacaaggattggaagttgactgatgatacacaacgcactaggacttatgctcaaagctcaaaatgtaacaaggtacataaaacttggtcatggtggacactggagtcagagtcatgtagaagttctcttccctacatctgtgagatgacagctttcaggtttccagattaggacagtcctttgcactgagttgacactcatgccaacaagaacctgtgcccctccttcctaacctgaggcctggggttcctcagaccatctccttcattctgggcagtgcccagccaccggctgacccacacctgacacttccagccagtctgctgcctgctccctcttcctgaaactggactgttcctgggaaaagggtgaagccacctctagaagggactttggcctccccccaagaacttcccatggtagaatggggtgggggaggagggcgcacgggctgagcggataggggcggcccggagccagccaggcagttttattgaaatctttttaaataattg

SEQ ID NO: 5170 - DNA, 585 bp, Homo sapiens
  source 1..585: mol_type = unassigned DNA
ctagttgtaaacggacagagacgagaggggcaagggaggacagtggatgacagggaagacgagtgggggcagagctgctcaggaccatggctgaggccatcacctatgcagatctgaggtttgtgaaggctcccctgaagaagagcatctccagccggttaggacaggacccaggggctgatgatgatggggaaatcacctacgagaatgttcaagtgcccgcagtcctaggggtgccctcaagcttggcttcttctgtactaggggacaaagcagcggtcaagtcggagcagccaactgcgtcctggagagccgtgacgtcaccagctgtcgggcggattctcccctgtgagtgtgcctgtgcggggcagccgcggggccaagtgctcgcgcctgtcccggctgcggatggcgctgggccccgcggggtgcagctccttccgggataaacccgggcgcagtccttccgacgcccgggctgccgtgccacattcaccttcatccggtgcgcctgaatccgacgtgcaccgcccccctgcggatggtcccaattcacctacctgccccccttcccctctctccgtc

SEQ ID NO: 5171 - DNA, 849 bp, Homo sapiens
  source 1..849: mol_type = unassigned DNA
gacgagaggggcaagggaggacagtggatgacagggaagacgagtgggggcagagctgctcaggaccatggctgaggccatcacctatgcagatctgaggtttgtgaaggctcccctgaagaagagcatctccagccggttaggacaggacccaggggctgatgatgatggggaaatcacctacgagaatgttcaagtgcccgcagtcctaggggtgccctcaagcttggcttcttctgtactaggggacaaagcagcggtcaagtcggagcagccaactgcgtcctggagagccgtgacgtcaccagctgtcgggcggattctcccctgccgcacaacctgcctgcgatacctcctgctcggcctgctcctcacctgcctgctgttaggagtgaccgccatctgcctgggagtgcgctgtgagtaaggctgtccctacttcccacttacaccgaacgactttcgtcccgactctcgccccaaagctgatcttcctcagcagggatcatagtcactaccaccacctccttagctttgggtttggtttccagccagggctgttgtcttcctgaattgtcctcacctaatccagtacctccttacgctttagtcagtcaaatcttgtatttcagcctgtgatgcaaaaagttgcaagaagcagaaaaagggctgatgctgcagtctcagggcactagggcagggctggagaagacatccaccaaatctctgtggccaaacagatctgcaggtgtctcagcagctccagcagacgaacagggttctggaagtcactaacagcagcctgaggcagcagctccgcctcaagataacgcagctgggacagagtgc

SEQ ID NO: 5172 - DNA, 2035 bp, Homo sapiens
  source 1..2035: mol_type = unassigned DNA
caccaccaatcatccgagctgttggcatgtgtcacagggccaattgctaagccgtgcagtcacagagggaacacagagcctagttgtaaacggacagagacgagaggggcaagggaggacagtggatgacagggaagacgagtgggggcagagctgctcaggaccatggctgaggccatcacctatgcagatctgaggtttgtgaaggctcccctgaagaagagcatctccagccggttaggacaggacccaggggctgatgatgatggggaaatcacctacgagaatgttcaagtgcccgcagtcctaggggtgccctcaagcttggcttcttctgtactaggggacaaagcagcggtcaagtcggagcagccaactgcgtcctggagagccgtgacgtcaccagctgtcgggcggattctcccctgccgcacaacctgcctgcgatacctcctgctcggcctgctcctcacctgcctgctgttaggagtgaccgccatctgcctgggagtgcgctatctgcaggtgtctcagcagctccagcagacgaacagggttctggaagtcactaacagcagcctgaggcagcagctccgcctcaagataacgcagctgggacagagtgcagaggatctgcaggggtccaggagagagctggcgcagagtcaggaagcactacaggtggaacagagggctcatcaggcggccgaagggcagctacaggcctgccaggcagacagacagaagacgaaggagaccttgcaaagtgaggagcaacagaggagggccttggagcagaagctgagcaacatggagaacagactgaagcccttcttcacatgcggctcagcagacacctgctgtccgtcgggatggataatgcatcagaaaagctgcttttacatctcacttacttcaaaaaattggcaggagagccaaaaacaatgtgaaactctgtcttccaagctggccacattcagtgaaatttatccacaatcacactcttactacttcttaaattcactgttgccaaatggtggttcagggaattcatattggactggcctcagctctaacaaggattggaagttgactgatgatacacaacgcactaggacttatgctcaaagctcaaaatgtaacaaggtacataaaacttggtcatggtggacactggagtcagagtcatgtagaagttctcttccctacatctgtgagatgacagctttcaggtttccagattaggacagtcctttgcactgagttgacactcatgccaacaagaacctgtgcccctccttcctaacctgaggcctggggttcctcagaccatctccttcattctgggcagtgcccagccaccggctgacccacacctgacacttccagccagtctgctgcctgctccctcttcctgaaactggactgttcctgggaaaagggtgaagccacctctagaagggactttggcctccccccaagaacttcccatggtagaatggggtgggggaggagggcgcacgggctgagcggataggggcggcccggagccagccaggcagttttattgaaatctttttaaataattgcacgtgttagtctcatgtgtcagcaatgctgtgtctggttcagtgatccccacgggaacgcgagccggggggtcgactggaagtgctctgtcccttgagtccatgctggggctcccctacacggggagaagagccggtcagcccatctggaactggcactgtccagcaagtgtgctctgttcttacagggtgtcctgaaggccaaagttggaggcctgagaccacgggctccactgctaagagcgtgccccaggcagctgcaggctgggtgtgggtggcttggcgtggtgccctcggtggcagaggagactgcccgcctcacagttcaggttgcggtagcgggcaacagctggtgtggggcgggggcacatggacaggaagccaaagctgaaggggccgaggcagcagccaggacagggcagcccctcatcgggctcccggggagc

SEQ ID NO: 5173 - DNA, 1424 bp, Homo sapiens
  source 1..1424: mol_type = unassigned DNA
atgcaaaccaggaacccccagtctcatggggagaacggagcctcaccctggagctggggagatcgtctgggccctggcccagacccaggggctgatgatgatggggaaatcacctacgagaatgttcaagtgcccgcagtcctaggggtgccctcaagcttggcttcttctgtactaggggacaaagcagcggtcaagtcggagcagccaactgcgtcctggagagccgtgacgtcaccagctgtcgggcggattctcccctgccgcacaacctgcctgcgatacctcctgctcggcctgctcctcacctgcctgctgttaggagtgaccgccatctgcctgggagtgcgctatctgcaggtgtctcagcagctccagcagacgaacagggttctggaagtcactaacagcagcctgaggcagcagctccgcctcaagataacgcagctgggacagagtgcagaggatctgcaggggtccaggagagagctggcgcagagtcaggaagcactacaggtggaacagagggctcatcaggcggccgaagggcagctacaggcctgccaggcagacagacagaagacgaaggagaccttgcaaagtgaggagcaacagaggagggccttggagcagaagctgagcaacatggagaacagactgaagcccttcttcacatgcggctcagcagacacctgctgtccgtcgggatggataatgcatcagaaaagctgcttttacatctcacttacttcaaaaaattggcaggagagccaaaaacaatgtgaaactctgtcttccaagctggccacattcagtgaaatttatccacaatcacactcttactacttcttaaattcactgttgccaaatggtggttcagggaattcatattggactggcctcagctctaacaaggattggaagttgactgatgatacacaacgcactaggacttatgctcaaagctcaaaatgtaacaaggtacataaaacttggtcatggtggacactggagtcagagtcatgtagaagttctcttccctacatctgtgagatgacagctttcaggtttccagattaggacagtcctttgcactgagttgacactcatgccaacaagaacctgtgcccctccttcctaacctgaggcctggggttcctcagaccatctccttcattctgggcagtgcccagccaccggctgacccacacctgacacttccagccagtctgctgcctgctccctcttcctgaaactggactgttcctgggaaaagggtgaagccacctctagaagggactttggcctccccccaagaacttcccatggtagaatggggtgggggaggagggcgcacgggctgagcggataggggcggcccggagccagccaggcagttttattgaaatctttttaaataattg

SEQ ID NO: 5174 - DNA, 981 bp, Homo sapiens
  source 1..981: mol_type = unassigned DNA
agatgcacaggaggagaagcaggagctgtcgggaagatcagaagccagtcatggatgaccagcgcgaccttatctccaacaatgagcaactgcccatgctgggccggcgccctggggccccggagagcaagtgcagccgcggagccctgtacacaggcttttccatcctggtgactctgctcctcgctggccaggccaccaccgcctacttcctgtaccagcagcagggccggctggacaaactgacagtcacctcccagaacctgcagctggagaacctgcgcatgaagcttcccaagcctcccaagcctgtgagcaagatgcgcatggccaccccgctgctgatgcaggcgctgcccatgggagccctgccccaggggcccatgcagaatgccaccaagtatggcaacatgacagaggaccatgtgatgcacctgctccagaatgctgaccccctgaaggtgtacccgccactgaaggggagcttcccggagaacctgagacaccttaagaacaccatggagaccatagactggaaggtctttgagagctggatgcaccattggctcctgtttgaaatgagcaggcactccttggagcaaaagcccactgacgctccaccgaaagtactgaccaagtgccaggaagaggtcagccacatccctgctgtccacccgggttcattcaggcccaagtgcgacgagaacggcaactatctgccactccagtgctatgggagcatcggctactgctggtgtgtcttccccaacggcacggaggtccccaacaccagaagccgcgggcaccataactgcagtgagtcactggaactggaggacccgtcttctgggctgggtgtgaccaagcaggatctgggcccagtccccatgtgagagcagcagaggcggtcttcaacatcctgccagccccacacagctacagctttcttgctcccttcagcccccagcccctcccccatct

SEQ ID NO: 5175 - DNA, 1449 bp, Homo sapiens
  source 1..1449: mol_type = unassigned DNA
gggagcccccccgccccacatcctgccccgcaaaaggcagcttcaccaaagtggggtatttccagcctttgtagctttcacttccacatctaccaagtgggcggagtggccttctgtggacgaatcagattcctctccagcaccgactttaagaggcgagccggggggtcagggtcccagatgcacaggaggagaagcaggagctgtcgggaagatcagaagccagtcatggatgaccagcgcgaccttatctccaacaatgagcaactgcccatgctgggccggcgccctggggccccggagagcaagtgcagccgcggagccctgtacacaggcttttccatcctggtgactctgctcctcgctggccaggccaccaccgcctacttcctgtaccagcagcagggccggctggacaaactgacagtcacctcccagaacctgcagctggagaacctgcgcatgaagcttcccaagcctcccaagcctgtgagcaagatgcgcatggccaccccgctgctgatgcaggcgctgcccatgggagccctgccccaggggcccatgcagaatgccaccaagtatggcaacatgacagaggaccatgtgatgcacctgctccagaatgctgaccccctgaaggtgtacccgccactgaaggggagcttcccggagaacctgagacaccttaagaacaccatggagaccatagactggaaggtctttgagagctggatgcaccattggctcctgtttgaaatgagcaggcactccttggagcaaaagcccactgacgctccaccgaaagagtcactggaactggaggacccgtcttctgggctgggtgtgaccaagcaggatctgggcccagtccccatgtgagagcagcagaggcggtcttcaacatcctgccagccccacacagctacagctttcttgctcccttcagcccccagcccctcccccatctcccaccctgtacctcatcccatgagaccctggtgcctggctctttcgtcacccttggacaagacaaaccaagtcggaacagcagataacaatgcagcaaggccctgctgcccaatctccatctgtcaacaggggcgtgaggtcccaggaagtggccaaaagctagacagatccccgttcctgacatcacagcagcctccaacacaaggctccaagacctaggctcatggacgagatgggaaggcacagggagaagggataaccctacacccagaccccaggctggacatgctgactgtcctctcccctccagcctttggccttggcttttctagcctatttacctgcaggctgagccactctcttccctttccccagcatcactccccaaggaagagccaatgttttccacccataatcctttctgccgacccctagttccctctgctcagccaagcttgttatcagctttcagggccatgg

SEQ ID NO: 5176 - DNA, 1138 bp, Homo sapiens
  source 1..1138: mol_type = unassigned DNA
ccggggggtcagggtcccagatgcacaggaggagaagcaggagctgtcgggaagatcagaagccagtcatggatgaccagcgcgaccttatctccaacaatgagcaactgcccatgctgggccggcgccctggggccccggagagcaagtgcagccgcggagccctgtacacaggcttttccatcctggtgactctgctcctcgctggccaggccaccaccgcctacttcctgtaccagcagcagggccggctggacaaactgacagtcacctcccagaacctgcagctggagaacctgcgcatgaagcttcccaagcctcccaagcctgtgagcaagatgcgcatggccaccccgctgctgatgcaggcgctgcccatgggagccctgccccaggggcccatgcagaatgccaccaagtatggcaacatgacagaggaccatgtgatgcacctgctccagagtcactggaactggaggacccgtcttctgggctgggtgtgaccaagcaggatctgggcccagtccccatgtgagagcagcagaggcggtcttcaacatcctgccagccccacacagctacagctttcttgctcccttcagcccccagcccctcccccatctcccaccctgtacctcatcccatgagaccctggtgcctggctctttcgtcacccttggacaagacaaaccaagtcggaacagcagataacaatgcagcaaggccctgctgcccaatctccatctgtcaacaggggcgtgaggtcccaggaagtggccaaaagctagacagatccccgttcctgacatcacagcagcctccaacacaaggctccaagacctaggctcatggacgagatgggaaggcacagggagaagggataaccctacacccagaccccaggctggacatgctgactgtcctctcccctccagcctttggccttggcttttctagcctatttacctgcaggctgagccactctcttccctttccccagcatcactccccaaggaagagccaatgttttccacccataatcctttctgccgacccctagttccctctgctcagccaagcttgttatcagctttcagggccatggttcacattagaataaaaggtagtaattagaaca

SEQ ID NO: 5177 - DNA, 1727 bp, Homo sapiens
  source 1..1727: mol_type = unassigned DNA
caggagctgtcgggaagatcagaagccagtcatggatgaccagcgcgaccttatctccaacaatgagcaactgcccatgctgggccggcgccctggggccccggagagcaagtgcagccgcggagccctgtacacaggcttttccatcctggtgactctgctcctcgctggccaggccaccaccgcctacttcctgtaccagcagcagggccggctggacaaactgacagtcacctcccagaacctgcagctggagaacctgcgcatgaagcttcccaagcctcccaagcctgtgagcaagatgcgcatggccaccccgctgctgatgcaggcgctgcccatgggagccctgccccaggggcccatgcagaatgccaccaagtatggcaacatgacagaggaccatgtgatgcacctgctccagaatgctgaccccctgaaggtgtacccgccactgaaggggagcttcccggagaacctgagacaccttaagaacaccatggagaccatagactggaaggtctttgagagctggatgcaccattggctcctgtttgaaatgagcaggcactccttggagcaaaagcccactgacgctccaccgaaagtactgaccaagtgccaggaagaggtcagccacatccctgctgtccacccgggttcattcaggcccaagtgcgacgagaacggcaactatctgccactccagtgctatgggagcatcggctactgctggtgtgtcttccccaacggcacggaggtccccaacaccagaagccgcgggcaccataactgcagtgagtcactggaactggaggacccgtcttctgggctgggtgtgaccaagcaggatctgggcccaggtaagggccttgcagaggggcatctggtcaccagcagctcatccccagcagggccagctcctttgtgggcaggtgaaggagtgtgacgctgggccactctccaacattcctgggatgtccatttcacagacgaaggaacagggttggggggctgtggggagttacacaaatccatgatggtcattattggacctgagcagggggcaggggagggtggacagtccttaactgctctgcaggtccaggatgttagaaaggggcagggacaacaaatgggtgaccccaacctcaacctgctgcttctctctccagtccccatgtgagagcagcagaggcggtcttcaacatcctgccagccccacacagctacagctttcttgctcccttcagcccccagcccctcccccatctcccaccctgtacctcatcccatgagaccctggtgcctggctctttcgtcacccttggacaagacaaaccaagtcggaacagcagataacaatgcagcaaggccctgctgcccaatctccatctgtcaacaggggcgtgaggtcccaggaagtggccaaaagctagacagatccccgttcctgacatcacagcagcctccaacacaaggctccaagacctaggctcatggacgagatgggaaggcacagggagaagggataaccctacacccagaccccaggctggacatgctgactgtcctctcccctccagcctttggccttggcttttctagcctatttacctgcaggctgagccactctcttccctttccccagcatcactccccaaggaagagccaatgttttccacccataatcctttctgccgacccctagttccctctgctcagcc

SEQ ID NO: 5178 - DNA, 563 bp, Homo sapiens
  source 1..563: mol_type = unassigned DNA
agatgcacaggaggagaagcaggagctgtcgggaagatcagaagccagtcatggatgaccagcgcgaccttatctccaacaatgagcaactgcccatgctgggccggcgccctggggccccggagagcaagtgcagccgcggagccctgtacacaggcttttccatcctggtgactctgctcctcgctggccaggccaccaccgcctacttcctgtaccagcagcagggccggctggacaaactgacagtcacctcccagaacctgcagctggagaacctgcgcatgaagcttcccaagccccatgcagaatgccaccaagtatggcaacatgacagaggaccatgtgatgcacctgctccagaatgctgaccccctgaaggtgtacccgccactgaaggggagcttcccggagaacctgagacaccttaagaacaccatggagaccatagactggaaggtctttgagagctggatgcaccattggctcctgtttgaaatgagcaggcactccttggagcaaaagcccactgacgctccaccgaaaggtacagggagtgggag

SEQ ID NO: 5179 - DNA, 584 bp, Homo sapiens
  source 1..584: mol_type = unassigned DNA
agatgcacaggaggagaagcaggagctgtcgggaagatcagaagccagtcatggatgaccagcgcgaccttatctccaacaatgagcaactgcccatgctgggccggcgccctggggccccggagagcaagtgcagccgcggagccctgtacacaggcttttccatcctggtgactctgctcctcgctggccaggccaccaccgcctacttcctgtaccagcagcagggccggctggacaaactgacagtcacctcccagaacctgcagctggagaacctgcgcatgaagcttcccaagcctcccaagcctgtgagcaagatgcgcatggccaccccgctgctgatgcaggcgctgcccatgggagccctgccccaggggcccatgcagaatgccaccaagtatggcaacatgacagaggaccatgtgatgcacctgctccaggaagtggccaaaagctagacagatccccgttcctgacatcacagcagcctccaacacaaggctccaagacctaggctcatggacgagatgggaaggcacagggagaagggataaccctacacccagaccccaggctggaca

SEQ ID NO: 5180 - DNA, 1269 bp, Homo sapiens
  source 1..1269: mol_type = unassigned DNA
aggggacaggctgcagccggtgcagttacacgttttcctccaaggagcctcggacgttgtcacgggtttggggtcggggacagagcggtgaccatggccaggctggcgttgtctcctgtgcccagccactggatggtggcgttgctgctgctgctctcagctgagccagtaccagcagccagatcggaggaccggtaccggaatcccaaaggtagtgcttgttcgcggatctggcagagcccacgtttcatagccaggaaacggggcttcacggtgaaaatgcactgctacatgaacagcgcctccggcaatgtgagctggctctggaagcaggagatggacgagaatccccagcagctgaagctggaaaagggccgcatggaagagtcccagaacgaatctctcgccaccctcaccatccaaggcatccggtttgaggacaatggcatctacttctgtcagcagaagtgcaacaacacctcggaggtctaccagggctgcggcacagagctgcgagtcatgggattcagcaccttggcacagctgaagcagaggaacacgctgaaggatggtatcatcatgatccagacgctgctgatcatcctcttcatcatcgtgcctatcttcctgctgctggacaaggatgacagcaaggctggcatggaggaagatcacacctacgagggcctggacattgaccagacagccacctatgaggacatagtgacgctgcggacaggggaagtgaagtggtctgtaggtgagcacccaggccaggagtgagagccaggtcgccccatgacctgggtgcaggctccctggcctcagtgactgcttcggagctgcctggctcatggcccaacccctttcctggaccccccagctggcctctgaagctggcccaccagagctgccatttgtctccagcccctggtccccagctcttgccaaagggcctggagtagaaggacaacagggcagcaacttggagggagttctctggggatggacgggacccagccttctgggggtgctatgaggtgatccgtccccacacatgggatgggggaggcagagactggtccagagcccgcaaatggactcggagccgagggcctcccagcagagcttgggaagggccatggacccaactgggccccagaagagccacaggaacatcattcctctcccgcaaccactcccaccccagggaggccctggcctccagtgccttcccccgtggaataaacggtgtgtcctgagaaacca

SEQ ID NO: 5181 - DNA, 378 bp, Homo sapiens
  source 1..378: mol_type = unassigned DNA
atggccaggctggcgttgtctcctgtgcccagccactggatggtggcgttgctgctgctgctctcagctgagccagtaccagcagccagatcggaggaccggtaccggaatcccaaaggattcagcaccttggcacagctgaagcagaggaacacgctgaaggatggtatcatcatgatccagacgctgctgatcatcctcttcatcatcgtgcctatcttcctgctgctggacaaggatgacagcaaggctggcatggaggaagatcacacctacgagggcctggacattgaccagacagccacctatgaggacatagtgacgctgcggacaggggaagtgaagtggtctgtaggtgagcacccaggccaggagtga

SEQ ID NO: 5182 - DNA, 1254 bp, Homo sapiens
  source 1..1254: mol_type = unassigned DNA
ggtgcagttacacgttttcctccaaggagcctcggacgttgtcacgggtttggggtcggggacagagcggtgaccatggccaggctggcgttgtctcctgtgcccagccactggatggtggcgttgctgctgctgctctcagcagctgagccagtaccagcagccagatcggaggaccggtaccggaatcccaaaggtagtgcttgttcgcggatctggcagagcccacgtttcatagccaggaaacggggcttcacggtgaaaatgcactgctacatgaacagcgcctccggcaatgtgagctggctctggaagcaggagatggacgagaatccccagcagctgaagctggaaaagggccgcatggaagagtcccagaacgaatctctcgccaccctcaccatccaaggcatccggtttgaggacaatggcatctacttctgtcagcagaagtgcaacaacacctcggaggtctaccagggctgcggcacagagctgcgagtcatgggattcagcaccttggcacagctgaagcagaggaacacgctgaaggatggtatcatcatgatccagacgctgctgatcatcctcttcatcatcgtgcctatcttcctgctgctggacaaggatgacagcaaggctggcatggaggaagatcacacctacgagggcctggacattgaccagacagccacctatgaggacatagtgacgctgcggacaggggaagtgaagtggtctgtaggtgagcacccaggccaggagtgagagccaggtcgccccatgacctgggtgcaggctccctggcctcagtgactgcttcggagctgcctggctcatggcccaacccctttcctggaccccccagctggcctctgaagctggcccaccagagctgccatttgtctccagcccctggtccccagctcttgccaaagggcctggagtagaaggacaacagggcagcaacttggagggagttctctggggatggacgggacccagccttctgggggtgctatgaggtgatccgtccccacacatgggatgggggaggcagagactggtccagagcccgcaaatggactcggagccgagggcctcccagcagagcttgggaagggccatggacccaactgggccccagaagagccacaggaacatcattcctctcccgcaaccactcccaccccagggaggccctggcctccagtgccttcccccgtggaataaacggtgtgtcctgagaaacca

SEQ ID NO: 5183 - DNA, 1498 bp, Homo sapiens
  source 1..1498: mol_type = unassigned DNA
agcgaggcgcgcgcccggccagagagcgagcgcgcaacggcggcgacggcggcgaccccaccgcgcatcctgccaggcctccggcgcccagcgccccacgcgcccccgcgcccccgcgcccccgcgcccctttcttcgcgcccccgcccctcggcccgccaggcccccttgccggccacccgccaggccccgcgccggcccgcccgccgcccaggaccggcccgcgccccgcaggccgcccgccgcccgcgccgccatgggagtggagggctgcaccaagtgcatcaagtacctgctcttcgtcttcaatttcgtcttctggctggctggaggcgtgatcctgggtgtggccctgtggctccgccatgacccgcagaccaccaacctcctgtatctggagctgggagacaagcccgcgcccaacaccttctatgtaggcatctacatcctcatcgctgtgggcgctgtcatgatgttcgttggcttcctgggctgctacggggccatccaggaatcccagtgcctgctggggacgttcttcacctgcctggtcatcctgtttgcctgtgaggtggccgccggcatctggggctttgtcaacaaggaccagatcgccaaggatgtgaagcagttctatgaccaggccctacagcaggccgtggtggatgatgacgccaacaacgccaaggctgtggtgaagaccttccacgagacgcttgactgctgtggctccagcacactgactgctttgaccacctcagtgctcaagaacaatttgtgtccctcgggcagcaacatcatcagcaacctcttcaaggaggactgccaccagaagatcgatgacctcttctccgggaagctgtacctcatcggcattgctgccatcgtggtcgctgtgatcatgatcttcgagatgatcctgagcatggtgctgtgctgtggcatccggaacagctccgtgtactgaggccccgcagctctggccacagggacctctgcagtgccccctaagtgacccggacacttccgagggggccatcaccgcctgtgtatataacgtttccggtattactctgctacacgtagcctttttacttttggggttttgtttttgttctgaactttcctgttaccttttcagggctgacgtcacatgtaggtggcgtgtatgagtggagacgggcctgggtcttggggactggagggcaggggtccttctgccctggggtcccagggtgctctgcctgctcagccaggcctctcctgggagccactcgcccagagactcagcttggccaacttggggggctgtgtccacccagcccgcccgtcctgtgggctgcacagctcaccttgttccctcctgccccggttcgagagccgagtctgtgggcactctctgccttcatgcacctgtcctttctaacacgtcgccttcaactgtaatcacaacatcctgactccgtcatttaataaagaaggaacatcaggcatgcta

SEQ ID NO: 5184 - DNA, 2471 bp, Homo sapiens
  source 1..2471: mol_type = unassigned DNA
gcgccccggcctaagcgggactaggagggcgcgccacccgcttccgctgcccgccggggaatcccccgggctggcgcgcagggaagttcccgaacgcgcgggcataaaagggcagccggcgcccgcgcgccacagctctgcagctcgtggcagcggcgcagcgctccagccatgtcgcgcggcctccagcttctgctcctgagctgcgcctacagcctggctcccgcgacgccggaggtgaaggtggcttgctccgaagatgtggacttgccctgcaccgccccctgggatccgcaggttccctacacggtctcctgggtcaagttattggagggtggtgaagagaggatggagacaccccaggaagaccacctcaggggacagcactatcatcagaaggggcaaaatggttctttcgacgcccccaatgaaaggccctattccctgaagatccgaaacactaccagctgcaactcggggacatacaggtgcactctgcaggacccggatgggcagagaaacctaagtggcaaggtgatcttgagagtgacaggatgccctgcacagcgtaaagaagagacttttaagaaatacagagcggagattgtcctgctgctggctctggttattttctacttaacactcatcattttcacttgtaagtttgcacggctacagagtatcttcccagatttttctaaagctggcatggaacgagcttttctcccagttacctccccaaataagcatttagggctagtgactcctcacaagacagaactggtatgagcaggatttctgcaggttcttcttcctgaagctgaggctcaggggtgtgcctgtctgttacactggaggagagaagaatgagcctacgctgaagatggcatcctgtgaagtccttcacctcactgaaaacatctggaaggggatcccaccccattttctgtgggcaggcctcgaaaaccatcacatgaccacatagcatgaggccactgctgcttctccatggccaccttttcagcgatgtatgcagctatctggtcaacctcctggacattttttcagtcatataaaagctatggtgagatgcagctggaaaagggtcttgggaaatatgaatgcccccagctggcccgtgacagactcctgaggacagctgtcctcttctgcatcttggggacatctctttgaattttctgtgttttgctgtaccagcccagatgttttacgtctgggagaaattgacagatcaagctgtgagacagtgggaaatatttagcaaataatttcctggtgtgaaggtcctgctattactaaggagtaatctgtgtacaaagaaataacaagtcgatgaactattccccagcagggtcttttcatctgggaaagacatccataaagaagcaataaagaagagtgccacatttatttttatatctatatgtacttgtcaaagaaggtttgtgtttttctgcttttgaaatctgtatctgtagtgagatagcattgtgaactgacaggcagcctggacatagagagggagaagaagtcagagagggtgacaagatagagagctatttaatggccggctggaaatgctgggctgacggtgcagtctgggtgctcgcccacttgtcccactatctgggtgcatgatcttgagcaagttccttctggtgtctgctttctccattgtaaaccacaaggctgttgcatgggctaatgaagatcatatacgtgaaaattatttgaaaacatataaagcactatacagattcgaaactccattgagtcattatccttgctatgatgatggtgttttggggatgagagggtgctatccatttctcatgttttccattgtttgaaacaaagaaggttaccaagaagcctttcctgtagccttctgtaggaattcttttggggaagtgaggaagccaggtccacggtctgttcttgaagcagtagcctaacacactccaagatatggacacacgggagccgctggcagaagggacttcacgaagtgttgcatggatgttttagccattgttggctttcccttatcaaacttgggcccttcccttcttggtttccaaaggcattttattgcttgagttatatgttcactgtccccctaatattagggagtaaaacggataccaagttgatttagtgtttttacctctgtcttggctttcatgttattaaacgtatgcatgtgaagaaagggtgtttttctgttttatattcaactcataagactttgggataggaaaaatgagtaatggttactaggcttaatacctgggtgattacataatctgtacaatgaacccccatgatgtaagtttacctatgtaacaaacctgcacttatacccatgaacttaaaatgaaagttaaaaataaaaaacatatacaaataaaaaaatcccgactttgggatgagtgctaggatgttgtaaa

SEQ ID NO: 5185 - DNA, 2068 bp, Homo sapiens
  source 1..2068: mol_type = unassigned DNA
ggaaggcttgcacagggtgaaagctttgcttctctgctgctgtaacagggactagcacagacacacggatgagtggggtcatttccagatattaggtcacagcagaagcagccaaaatggatccccagtgcactatgggactgagtaacattctctttgtgatggccttcctgctctctgagcttgaggaccctcagcctcccccagaccacattccttggattacagctgtacttccaacagttattatatgtgtgatggttttctgtctaattctatggaaatggaagaagaagaagcggcctcgcaactcttataaatgtggaaccaacacaatggagagggaagagagtgaacagaccaagaaaagagaaaaaatccatatacctgaaagatctgatgaagcccagcgtgtttttaaaagttcgaagacatcttcatgcgacaaaagtgatacatgtttttaattaaagagtaaagcccatacaagtattcattttttctaccctttcctttgtaagttcctgggcaacctttttgatttcttccagaaggcaaaaagacattaccatgagtaataagggggctccaggactccctctaagtggaatagcctccctgtaactccagctctgctccgtatgccaagaggagactttaattctcttactgcttcttttcacttcagagcacacttatgggccaagcccagcttaatggctcatgacctggaaataaaatttaggaccaatacctcctccagatcagattcttctcttaatttcatagattgtgttttttttttaaatagacctctcaatttctggaaaactgccttttatctgcccagaattctaagctggtgccccactgaattttgtgtgtacctgtgactaaacaactacctcctcagtctgggtgggacttatgtatttatgaccttatagtgttaatatcttgaaacatagagatctatgtactgtaatagtgtgattactatgctctagagaaaagtctacccctgctaaggagttctcatccctctgtcagggtcagtaaggaaaacggtggcctagggtacaggcaacaatgagcagaccaacctaaatttggggaaattaggagaggcagagatagaacctggagccacttctatctgggctgttgctaatattgaggaggcttgccccacccaacaagccatagtggagagaactgaataaacaggaaaatgccagagcttgtgaaccctgtttctcttgaagaactgactagtgagatggcctggggaagctgtgaaagaaccaaaagagatcacaatactcaaaagagagagagagagaaaaaagagagatcttgatccacagaaatacatgaaatgtctggtctgtccaccccatcaacaagtcttgaaacaagcaacagatggatagtctgtccaaatggacataagacagacagcagtttccctggtggtcagggaggggttttggtgatacccaagttattgggatgtcatcttcctggaagcagagctggggagggagagccatcaccttgataatgggatgaatggaaggaggcttaggactttccactcctggctgagagaggaagagctgcaacggaattaggaagaccaagacacagatcacccggggcttacttagcctacagatgtcctacgggaacgtgggctggcccagcatagggctagcaaatttgagttggatgattgtttttgctcaaggcaaccagaggaaacttgcatacagagacagatatactgggagaaatgactttgaaaacctggctctaaggtgggatcactaagggatggggcagtctctgcccaaacataaagagaactctggggagcctgagccacaaaaatgttcctttattttatgtaaaccctcaagggttatagactgccatgctagacaagcttgtccatgtaatattcccatgtttttaccctgcccctgccttgattagactcctagcacctggctagtttctaacatgttttgtgcagcacagtttttaataaatgcttgttacattc

SEQ ID NO: 5186 - DNA, 2708 bp, Homo sapiens
  source 1..2708: mol_type = unassigned DNA
ggaaggcttgcacagggtgaaagctttgcttctctgctgctgtaacagggactagcacagacacacggatgagtggggtcatttccagatattaggtcacagcagaagcagccaaaatggatccccagtgcactatgggactgagtaacattctctttgtgatggccttcctgctctctggtgctgctcctctgaagattcaagcttatttcaatgagactgcagacctgccatgccaatttgcaaactctcaaaaccaaagcctgagtgagctagtagtattttggcaggaccaggaaaacttggttctgaatgaggtatacttaggcaaagagaaatttgacagtgttcattccaagtatatgggccgcacaagttttgattcggacagttggaccctgagacttcacaatcttcagatcaaggacaagggcttgtatcaatgtatcatccatcacaaaaagcccacaggaatgattcgcatccaccagatgaattctgaactgtcagtgcttgctaacttcagtcaacctgaaatagtaccaatttctaatataacagaaaatgtgtacataaatttgacctgctcatctatacacggttacccagaacctaagaagatgagtgttttgctaagaaccaagaattcaactatcgagtatgatggtgttatgcagaaatctcaagataatgtcacagaactgtacgacgtttccatcagcttgtctgtttcattccctgatgttacgagcaatatgaccatcttctgtattctggaaactgacaagacgcggcttttatcttcacctttctctatagagcttgaggaccctcagcctcccccagaccacattccttggattacagctgtacttccaacagttattatatgtgtgatggttttctgtctaattctatggaaatggaagaagaagaagcggcctcgcaactcttataaatgtggaaccaacacaatggagagggaagagagtgaacagaccaagaaaagagaaaaaatccatatacctgaaagatctgatgaagcccagcgtgtttttaaaagttcgaagacatcttcatgcgacaaaagtgatacatgtttttaattaaagagtaaagcccatacaagtattcattttttctaccctttcctttgtaagttcctgggcaacctttttgatttcttccagaaggcaaaaagacattaccatgagtaataagggggctccaggactccctctaagtggaatagcctccctgtaactccagctctgctccgtatgccaagaggagactttaattctcttactgcttcttttcacttcagagcacacttatgggccaagcccagcttaatggctcatgacctggaaataaaatttaggaccaatacctcctccagatcagattcttctcttaatttcatagattgtgttttttttttaaatagacctctcaatttctggaaaactgccttttatctgcccagaattctaagctggtgccccactgaattttgtgtgtacctgtgactaaacaactacctcctcagtctgggtgggacttatgtatttatgaccttatagtgttaatatcttgaaacatagagatctatgtactgtaatagtgtgattactatgctctagagaaaagtctacccctgctaaggagttctcatccctctgtcagggtcagtaaggaaaacggtggcctagggtacaggcaacaatgagcagaccaacctaaatttggggaaattaggagaggcagagatagaacctggagccacttctatctgggctgttgctaatattgaggaggcttgccccacccaacaagccatagtggagagaactgaataaacaggaaaatgccagagcttgtgaaccctgtttctcttgaagaactgactagtgagatggcctggggaagctgtgaaagaaccaaaagagatcacaatactcaaaagagagagagagagaaaaaagagagatcttgatccacagaaatacatgaaatgtctggtctgtccaccccatcaacaagtcttgaaacaagcaacagatggatagtctgtccaaatggacataagacagacagcagtttccctggtggtcagggaggggttttggtgatacccaagttattgggatgtcatcttcctggaagcagagctggggagggagagccatcaccttgataatgggatgaatggaaggaggcttaggactttccactcctggctgagagaggaagagctgcaacggaattaggaagaccaagacacagatcacccggggcttacttagcctacagatgtcctacgggaacgtgggctggcccagcatagggctagcaaatttgagttggatgattgtttttgctcaaggcaaccagaggaaacttgcatacagagacagatatactgggagaaatgactttgaaaacctggctctaaggtgggatcactaagggatggggcagtctctgcccaaacataaagagaactctggggagcctgagccacaaaaatgttcctttattttatgtaaaccctcaagggttatagactgccatgctagacaagcttgtccatgtaatattcccatgtttttaccctgcccctgccttgattagactcctagcacctggctagtttctaacatgttttgtgcagcacagtttttaataaatgcttgttacattca

SEQ ID NO: 5187 - DNA, 1405 bp, Homo sapiens
  source 1..1405: mol_type = unassigned DNA
aggagccttaggaggtacggggagctcgcaaatactccttttggtttattcttaccaccttgcttctgtgttccttgggaatgctgctgtgcttatgcatctggtctctttttggagctacagtggacaggcatttgtgacagcactatgggactgagtaacattctctttgtgatggccttcctgctctctggtgctgctcctctgaagattcaagcttatttcaatgagactgcagacctgccatgccaatttgcaaactctcaaaaccaaagcctgagtgagctagtagtattttggcaggaccaggaaaacttggttctgaatgaggtatacttaggcaaagagaaatttgacagtgttcattccaagtatatgggccgcacaagttttgattcggacagttggaccctgagacttcacaatcttcagatcaaggacaagggcttgtatcaatgtatcatccatcacaaaaagcccacaggaatgattcgcatccaccagatgaattctgaactgtcagtgcttgctaacttcagtcaacctgaaatagtaccaatttctaatataacagaaaatgtgtacataaatttgacctgctcatctatacacggttacccagaacctaagaagatgagtgttttgctaagaaccaagaattcaactatcgagtatgatggtgttatgcagaaatctcaagataatgtcacagaactgtacgacgtttccatcagcttgtctgtttcattccctgatgttacgagcaatatgaccatcttctgtattctggaaactgacaagacgcggcttttatcttcacctttctctatagagcttgaggaccctcagcctcccccagaccacattccttggattacagctgtacttccaacagttattatatgtgtgatggttttctgtctaattctatggaaatggaagaagaagaagcggcctcgcaactcttataaatgtggaaccaacacaatggagagggaagagagtgaacagaccaagaaaagagaaaaaatccatatacctgaaagatctgatgaagcccagcgtgtttttaaaagttcgaagacatcttcatgcgacaaaagtgatacatgtttttaattaaagagtaaagcccatacaagtattcattttttctaccctttcctttgtaagttcctgggcaacctttttgatttcttccagaaggcaaaaagacattaccatgagtaataagggggctccaggactccctctaagtggaatagcctccctgtaactccagctctgctccgtatgccaagaggagactttaattctcttactgcttcttttcacttcagagcacacttatgggccaagcccagcttaatggctcatgacctggaaataaaatttaggaccaata

SEQ ID NO: 5188 - DNA, 567 bp, Homo sapiens
  source 1..567: mol_type = unassigned DNA
gtatttgagttctaccgtcagtcctggcattatttctctctctacaaggagccttaggagcactatgggactgagtaacattctctttgtgatggccttcctgctctctggtgctgctcctctgaagattcaagcttatttcaatgagactgcagacctgccatgccaatttgcaaactctcaaaaccaaagcctgagtgagctagtagtattttggcaggaccaggaaaacttggttctgaatgaggtatacttaggcaaagagaaatttgacagtgttcattccaagtatatgggccgcacaagttttgattcggacagttggaccctgagacttcacaatcttcagatcaaggacaagggcttgtatcaatgtatcatccatcacaaaaagcccacaggaatgattcgcatccaccagatgaattctgaactgtcagtgcttgctaacttcagtcaacctgaaatagtaccaatttctaatataacagaaaatgtgtacataaatttgacctgctcatctatacacggttacccagaacctaagaagatgagtgttttgctaag

SEQ ID NO: 5189 - DNA, 1604 bp, Homo sapiens
  source 1..1604: mol_type = unassigned DNA
attgccgaggaaggcttgcacagggtgaaagctttgcttctctgctgctgtaacagggactagcacagacacacggatgagtggggtcatttccagatattaggtcacagcagaagcagccaaaatggatccccagtggtgctgctcctctgaagattcaagcttatttcaatgagactgcagacctgccatgccaatttgcaaactctcaaaaccaaagcctgagtgagctagtagtattttggcaggaccaggaaaacttggttctgaatgaggtatacttaggcaaagagaaatttgacagtgttcattccaagtatatgggccgcacaagttttgattcggacagttggaccctgagacttcacaatcttcagatcaaggacaagggcttgtatcaatgtatcatccatcacaaaaagcccacaggaatgattcgcatccaccagatgaattctgaactgtcagtgcttgctaacttcagtcaacctgaaatagtaccaatttctaatataacagaaaatgtgtacataaatttgacctgctcatctatacacggttacccagaacctaagaagatgagtgttttgctaagaaccaagaattcaactatcgagtatgatggtgttatgcagaaatctcaagataatgtcacagaactgtacgacgtttccatcagcttgtctgtttcattccctgatgttacgagcaatatgaccatcttctgtattctggaaactgacaagacgcggcttttatcttcacctttctctatagagcttgaggaccctcagcctcccccagaccacattccttggattacagctgtacttccaacagttattatatgtgtgatggttttctgtctaattctatggaaatggaagaagaagaagcggcctcgcaactcttataaatgtggaaccaacacaatggagagggaagagagtgaacagaccaagaaaagagaaaaaatccatatacctgaaagatctgatgaagcccagcgtgtttttaaaagttcgaagacatcttcatgcgacaaaagtgatacatgtttttaattaaagagtaaagcccatacaagtattcattttttctaccctttcctttgtaagttcctgggcaacctttttgatttcttccagaaggcaaaaagacattaccatgagtaataagggggctccaggactccctctaagtggaatagcctccctgtaactccagctctgctccgtatgccaagaggagactttaattctcttactgcttcttttcacttcagagcacacttatgggccaagcccagcttaatggctcatgacctggaaataaaatttaggaccaatacctcctccagatcagattcttctcttaatttcatagattgtgttttttttttaaatagacctctcaatttctggaaaactgccttttatctgcccagaattctaagctggtgccccactgaattttgtgtgtacctgtgactaaacaactacctcctcagtctgggtgggacttatgtatttatgaccttatagtgttaatatcttgaaacatagagatctatgtactgtaatagtgtgattactatgctctag

SEQ ID NO: 5190 - DNA, 1572 bp, Homo sapiens
  source 1..1572: mol_type = unassigned DNA
attgccgaggaaggcttgcacagggtgaaagctttgcttctctgctgctgtaacagggactagcacagacacacggatgagtggggtcatttccagatattaggtcacagcagaagcagccaaaatggatccccagtgcactatgggactgagtaacattctctttgtgatggccttcctgctctctgctaacttcagtcaacctgaaatagtaccaatttctaatataacagaaaatgtgtacataaatttgacctgctcatctatacacggttacccagaacctaagaagatgagtgttttgctaagaaccaagaattcaactatcgagtatgatggtgttatgcagaaatctcaagataatgtcacagaactgtacgacgtttccatcagcttgtctgtttcattccctgatgttacgagcaatatgaccatcttctgtattctggaaactgacaagacgcggcttttatcttcacctttctctatagagcttgaggaccctcagcctcccccagaccacattccttggattacagctgtacttccaacagttattatatgtgtgatggttttctgtctaattctatggaaatggaagaagaagaagcggcctcgcaactcttataaatgtggaaccaacacaatggagagggaagagagtgaacagaccaagaaaagagaaaaaatccatatacctgaaagatctgatgaagcccagcgtgtttttaaaagttcgaagacatcttcatgcgacaaaagtgatacatgtttttaattaaagagtaaagcccatacaagtattcattttttctaccctttcctttgtaagttcctgggcaacctttttgatttcttccagaaggcaaaaagacattaccatgagtaataagggggctccaggactccctctaagtggaatagcctccctgtaactccagctctgctccgtatgccaagaggagactttaattctcttactgcttcttttcacttcagagcacacttatgggccaagcccagcttaatggctcatgacctggaaataaaatttaggaccaatacctcctccagatcagattcttctcttaatttcatagattgtgttttttttttaaatagacctctcaatttctggaaaactgccttttatctgcccagaattctaagctggtgccccactgaattttgtgtgtacctgtgactaaacaactacctcctcagtctgggtgggacttatgtatttatgaccttatagtgttaatatcttgaaacatagagatctatgtactgtaatagtgtgattactatgctctagagaaaagtctacccctgctaaggagttctcatccctctgtcagggtcagtaaggaaaacggtggcctagggtacaggcaacaatgagcagaccaacctaaatttggggaaattaggagaggcagagatagaacctggagccacttctatctgggctgttgctaatattgaggaggcttgccccacccaacaagccatagtggagagaactgaataaacaggaaaatgccagagcttgtgaaccctgtttctctt

SEQ ID NO: 5191 - DNA, 832 bp, Homo sapiens
  source 1..832: mol_type = unassigned DNA
gcgactgtctccgccgagcccccggggccaggtgtcccgggcgcgccacgatgcggccgcggctgtggctcctcttggccgcgcagctgacagttctccatggcaactcagtcctccagcagacccctgcatacataaaggtgcaaaccaacaagatggtgatgctgtcctgcgaggctaaaatctccctcagtaacatgcgcatctactggctgagacagcgccaggcaccgagcagtgacagtcaccacgagttcctggccctctgggattccgcaaaagggactatccacggtgaagaggtggaacaggagaagatagctgtgtttcgggatgcaagccggttcattctcaatctcacaagcgtgaagccggaagacagtggcatctacttctgcatgatcgtcgggagccccgagctgaccttcgggaagggaactcagctgagtgtggttgatttccttcccaccactgcccagcccaccaagaagtccaccctcaagaagagagtgtgccggttacccaggccagagacccagaagggcccactttgtagccccatcacccttggcctgctggtggctggcgtcctggttctgctggtttccctgggagtggccatccacctgtgctgccggcggaggagagcccggcttcgtttcatgaaacagcctcaaggggaaggtatatcaggaacctttgtcccccaatgcctgcatggatactacagcaatactacaacctcacagaagctgcttaacccatggatcctgaaaacataggcaagaagcacaggtcctgatgagtggatctttactacttttaccagatt

SEQ ID NO: 5192 - DNA, 849 bp, Homo sapiens
  source 1..849: mol_type = unassigned DNA
gcgactgtctccgccgagcccccggggccaggtgtcccgggcgcgccacgatgcggccgcggctgtggctcctcttggccgcgcagctgacagttctccatggcaactcagtcctccagcagacccctgcatacataaaggtgcaaaccaacaagatggtgatgctgtcctgcgaggctaaaatctccctcagtaacatgcgcatctactggctgagacagcgccaggcaccgagcagtgacagtcaccacgagttcctggccctctgggattccgcaaaagggactatccacggtgaagaggtggaacaggagaagatagctgtgtttcgggatgcaagccggttcattctcaatctcacaagcgtgaagccggaagacagtggcatctacttctgcatgatcgtcgggagccccgagctgaccttcgggaagggaactcagctgagtgtggttgatttccttcccaccactgcccagcccaccaagaagtccaccctcaagaagagagtgtgccggttacccaggccagagacccagaagggccggcggaggagagcccggcttcgtttcatgaaacagcctcaaggggaaggtatatcaggaacctttgtcccccaatgcctgcatggatactacagcaatactacaacctcacagaagctgcttaacccatggatcctgaaaacataggcaagaagcacaggtcctgatgagtggatctttactacttttaccagattcctccctcgctcagagggatcctcccacacacccagcagagacttctctgccaccatcaaccccccaagtcatagggggctcaagttctgccctggtgagctgtggc

SEQ ID NO: 5193 - DNA, 1417 bp, Homo sapiens
  source 1..1417: mol_type = unassigned DNA
accccagccgcgactgtctccgccgagcccccggggccaggtgtcccgggcgcgccacgatgcggccgcggctgtggctcctcttggccgcgcagctgacagttctccatggcaactcagtcctccagcagacccctgcatacataaaggtgcaaaccaacaagatggtgatgctgtcctgcgaggctaaaatctccctcagtaacatgcgcatctactggctgagacagcgccaggcaccgagcagtgacagtcaccacgagttcctggccctctgggattccgcaaaagggactatccacggtgaagaggtggaacaggagaagatagctgtgtttcgggatgcaagccggttcattctcaatctcacaagcgtgaagccggaagacagtggcatctacttctgcatgatcgtcgggagccccgagctgaccttcgggaagggaactcagctgagtgtggttgatttccttcccaccactgcccagcccaccaagaagtccaccctcaagaagagagtgtgccggttacccaggccagagacccagaagggcccactttgtagccccatcacccttggcctgctggtggctggcgtcctggttctgctggtttccctgggagtggccatccacctgtgctgccggcggaggagagcccggcttcgtttcatgaaacaattttacaaatgagcagagaatacggttttggtgtcctgctacaaaaagacatcggtcagtaacgagcacgatgtggaaaaatgagagaagggacacattcaaccctggagagttcaatggctgctgaagctgcctgcttttcactgctgcaaggcctttctgtgtgtgatgtgcatgggagcaacttgttcgtgggtcatcgggaatactagggagaaggtttcattgcccccagggcacttcacagagtgtgctggaggactgagtaagaaatgctgcccatgccaccgcttccggctcctgtgctttccctgaactgggacctttagtggtggccatttagccaccatctttgcaggttgctttgccctggtagggcagtaacattgggtcctgggtctttcatggggtgatgctgggctggctccctcttggtcttcccaggctggggctgaccttcctcgcagagaggccaggtgcaggttgggaatgaggcttgctgagaggggctgtccagttcccagaaggcatatcagtctctgagggcttcctttggggccgggaacttgcgggtttgaggataggagttcacttcatcttctcagctcccatttctactcttaagtttctcagctcccatttctactctcccatggcttaatgcttctttcattttctgtttgttttatacaaatgtcttagttgtacaaataaagtcccaggttaaagataacaaa

SEQ ID NO: 5194 - DNA, 1096 bp, Homo sapiens
  source 1..1096: mol_type = unassigned DNA
gcgactgtctccgccgagcccccggggccaggtgtcccgggcgcgccacgatgcggccgcggctgtggctcctcttggccgcgcagctgacagttctccatggcaactcagtcctccagcagacccctgcatacataaaggtgcaaaccaacaagatggtgatgctgtcctgcgaggctaaaatctccctcagtaacatgcgcatctactggctgagacagcgccaggcaccgagcagtgacagtcaccacgagttcctggccctctgggattccgcaaaagggactatccacggtgaagaggtggaacaggagaagatagctgtgtttcgggatgcaagccggttcattctcaatctcacaagcgtgaagccggaagacagtggcatctacttctgcatgatcgtcgggagccccgagctgaccttcgggaagggaactcagctgagtgtggttgatttccttcccaccactgcccagcccaccaagaagtccaccctcaagaagagagtgtgccggttacccaggccagagacccagaagggcccactttgtagccccatcacccttggcctgctggtggctggcgtcctggttctgctggtttccctgggagtggccatccacctgtgctgccggcggaggagagcccggcttcgtttcatgaaacaactaagattacatccactggagaaatgttccagaatggactactgaatatacaggcctcaaggggaaggtatatcaggaacctttgtcccccaatgcctgcatggatactacagcaatactacaacctcacagaagctgcttaacccatggatcctgaaaacataggcaagaagcacaggtcctgatgagtggatctttactacttttaccagattcctccctcgctcagagggatcctcccacacacccagcagagacttctctgccaccatcaaccccccaagtcatagggggctcaagttctgccctggtgagctgtggcccccatccttgtgaaccccaaagtgtcccccttgtggaaccaaatgtatccatcttgaataaatttgcccaaaatcctaaagaccgggaaaagggaaccattg

SEQ ID NO: 5195 - DNA, 932 bp, Homo sapiens
  source 1..932: mol_type = unassigned DNA
accccagccgcgactgtctccgccgagcccccggggccaggtgtcccgggcgcgccacgatgcggccgcggctgtggctcctcttggccgcgcagctgacagttctccatggcaactcagtcctccagcagacccctgcatacataaaggtgcaaaccaacaagatggtgatgctgtcctgcgaggctaaaatctccctcagtaacatgcgcatctactggctgagacagcgccaggcaccgagcagtgacagtcaccacgagttcctggccctctgggattccgcaaaagggactatccacggtgaagaggtggaacaggagaagatagctgtgtttcgggatgcaagccggttcattctcaatctcacaagcgtgaagccggaagacagtggcatctacttctgcatgatcgtcgggagccccgagctgaccttcgggaagggaactcagctgagtgtggttgatttccttcccaccactgcccagcccaccaagaagtccaccctcaagaagagagtgtgccggttacccaggccagagacccagaagggcctcaaggggaaggtatatcaggaacctttgtcccccaatgcctgcatggatactacagcaatactacaacctcacagaagctgcttaacccatggatcctgaaaacataggcaagaagcacaggtcctgatgagtggatctttactacttttaccagattcctccctcgctcagagggatcctcccacacacccagcagagacttctctgccaccatcaaccccccaagtcatagggggctcaagttctgccctggtgagctgtggcccccatccttgtgaaccccaaagtgtcccccttgtggaaccaaatgtatccatcttgaataaatttgcccaaaatcctaaagaccgggaaaagggaaccattgagcttggc

SEQ ID NO: 5196 - DNA, 143 bp, Homo sapiens
  source 1..143: mol_type = unassigned DNA
gcgactgtctccgccgagcccccggggccaggtgtcccgggcgcgccacgatgcggccgcggctgtggctcctcttggccgcgcagctgacaggccggcggaggagagcccggcttcgtttcatgaaacaactgtataaatag

SEQ ID NO: 5197 - DNA, 1526 bp, Homo sapiens
  source 1..1526: mol_type = unassigned DNA
gtcccgggcgcgccacgatgcggccgcggctgtggctcctcttggccgcgcagctgacagttctccatggcaactcagtcctccagcagacccctgcatacataaaggtgcaaaccaacaagatggtgatgctgtcctgcgaggctaaaatctccctcagtaacatgcgcatctactggctgagacagcgccaggcaccgagcagtgacagtcaccacgagttcctggccctctgggattccgcaaaagggactatccacggtgaagaggtggaacaggagaagatagctgtgtttcgggatgcaagccggttcattctcaatctcacaagcgtgaagccggaagacagtggcatctacttctgcatgatcgtcgggagccccgagctgaccttcgggaagggaactcagctgagtgtggttgatttccttcccaccactgcccagcccaccaagaagtccaccctcaagaagagagtgtgccggttacccaggccagagacccagaagggcccactttgtagccccatcacccttggcctgctggtggctggcgtcctggttctgctggtttccctgggagtggccatccacctgtgctgccggcggaggagagcccggcttcgtttcatgaaacagtaagtgtataacctgggtgtggccttgggttcctcagcccctgctgcagcttgcagcctctaactgcagcgaggagccaaagtcagacctcatcttccaaagatcatagactcggccgggcatagtagtgcacacctgtagtcacagctactcgggaggctgaagcaggaggatcacttgagcccaggagttcaaggctgcagtgagctatgatggtaccactgcactccagcctgggcaacagagtgagactccatctaaaaaaaaaaattacagactgtataaatagatggggtgatagagttcaggaacctaagagataacctaaacaatggacaaacaaaatgtatttttgaatactctaaaattgtaaatagccatataaattcatattactatatgctctgcattgttgtacacattatatttatatcgagagtggcttaaacatgcctgctggattttatgggcaattttcaatgatattttaattgtgtacaattttcaccttgtgtgttggatttagaagctgccccctacccaagagataataacttgagtgtagctgtctcaggccagacctctagaaagttccattcaaggccgggtgcagtggctcaagcctgtaatcccagcactttgggaggcccaaggcaggtagatcgcctgaggtcaggagtttgagaccagcctggccaacatggtgaaaccccatctctactaaaaatacaaaaaattaactggacgtggtggcaggcgcctatgtaatcccagctactcgagaggctgaggtaagagaatcacttgaaccccggaggcagaggttgcaatgagcagagatcacaccattccgctgcagcctgggcaacaagagtgaaactctgtctc

SEQ ID NO: 5198 - DNA, 150 bp, Homo sapiens
  source 1..150: mol_type = unassigned DNA
gaaagagggagagagagaagagtgaaactgcgattttcggcaaggcctcaaggggaaggtatatcaggaacctttgtcccccaatgcctgcatggatactacagcaatactacaacctcacagaagctgcttaacccatggatcctgaaa

SEQ ID NO: 5199 - DNA, 1169 bp, Homo sapiens
  source 1..1169: mol_type = unassigned DNA
cgcgccccccagtcccgcacccgttcggcccaggctaagttagccctcaccatgccggtcaaaggaggcaccaagtgcatcaaatacctgctgttcggatttaacttcatcttctggcttgccgggattgctgtccttgccattggactatggctccgattcgactctcagaccaagagcatcttcgagcaagaaactaataataataattccagcttctacacaggagtctatattctgatcggagccggcgccctcatgatgctggtgggcttcctgggctgctgcggggctgtgcaggagtcccagtgcatgctgggactgttcttcggcttcctcttggtgatattcgccattgaaatagctgcggccatctggggatattcccacaaggatgaggtgattaaggaagtccaggagttttacaaggacacctacaacaagctgaaaaccaaggatgagccccagcgggaaacgctgaaagccatccactatgcgttgaactgctgtggtttggctgggggcgtggaacagtttatctcagacatctgccccaagaaggacgtactcgaaaccttcaccgtgaagtcctgtcctgatgccatcaaagaggtcttcgacaataaattccacatcatcggcgcagtgggcatcggcattgccgtggtcatgatatttggcatgatcttcagtatgatcttgtgctgtgctatccgcaggaaccgcgagatggtctagagtcagcttacatccctgagcaggaaagtttacccatgaagattggtgggattttttgtttgtttgttttgttttgtttgttgtttgttgtttgtttttttgccactaattttagtattcattctgcattgctagataaaagctgaagttactttatgtttgtcttttaatgcttcattcaatattgacatttgtagttgagcggggggtttggtttgctttggtttatattttttcagttgtttgtttttgcttgttatattaagcagaaatcctgcaatgaaaggtactatatttgctagactctagacaagatattgtacataaaagaatttttttgtctttaaatagatacaaatgtctatcaactttaatcaagttgtaacttatattgaagacaatttgatacataataaaaaattatgacaatg

SEQ ID NO: 5200 - DNA, 1229 bp, Homo sapiens
  source 1..1229: mol_type = unassigned DNA
gtggggagccgggccctcttgagatgaggcgtgcgggagggtcctgagcactttagctcgcctaggatttgagctggggtgtgtgtctgctcccagctcaagtccctccgagtgccagagaggaaggcagggagaagcggagcacccctctttgggccaaggccaaggaggactgtgcttgccgggattgctgtccttgccattggactatggctccgattcgactctcagaccaagagcatcttcgagcaagaaactaataataataattccagcttctacacaggagtctatattctgatcggagccggcgccctcatgatgctggtgggcttcctgggctgctgcggggctgtgcaggagtcccagtgcatgctgggactgttcttcggcttcctcttggtgatattcgccattgaaatagctgcggccatctggggatattcccacaaggatgaggtgattaaggaagtccaggagttttacaaggacacctacaacaagctgaaaaccaaggatgagccccagcgggaaacgctgaaagccatccactatgcgttgaactgctgtggtttggctgggggcgtggaacagtttatctcagacatctgccccaagaaggacgtactcgaaaccttcaccgtgaagtcctgtcctgatgccatcaaagaggtcttcgacaataaattccacatcatcggcgcagtgggcatcggcattgccgtggtcatgatatttggcatgatcttcagtatgatcttgtgctgtgctatccgcaggaaccgcgagatggtctagagtcagcttacatccctgagcaggaaagtttacccatgaagattggtgggattttttgtttgtttgttttgttttgtttgttgtttgttgtttgtttttttgccactaattttagtattcattctgcattgctagataaaagctgaagttactttatgtttgtcttttaatgcttcattcaatattgacatttgtagttgagcggggggtttggtttgctttggtttatattttttcagttgtttgtttttgcttgttatattaagcagaaatcctgcaatgaaaggtactatatttgctagactctagacaagatattgtacataaaagaatttttttgtctttaaatagatacaaatgtctatcaactttaatcaagttgtaacttatattgaagacaatttgatacataataaaaaattatgacaatg

SEQ ID NO: 5201 - DNA, 1554 bp, Homo sapiens
  source 1..1554: mol_type = unassigned DNA
ctgcccagccctcagctgtgttattattcggtgataggtatttgctaattacttccaaaagcctcccatctgtcatcccacccagactgcgcgcttctaattcctcctaccccacatgctgtgcccaatgaaaagtatggtcagcgagcgaaggtttgcaaggagacagacgagggcgaaattaagccaggcggcttccctttaaatcctcgcaaagcagaagggcccctcactctggcagcaggccttggccaaggggcctttagccctgacgacccggggaagagtctcccaaagcagaacgcccggtccggcgcccagaccaaacgcgggggaaccggaagggcgaggcctccaccgccaggtcccgccagtcccagctgcgcgcgccccccagtcccgcacccgttcggcccaggctaagttagccctcaccatgccggtcaaaggaggcaccaagtgcatcaaatacctgctgttcggatttaacttcatcttctggcttgccgggattgctgtccttgccattggactatggctccgattcgactctcagaccaagagcatcttcgagcaagaaactaataataataattccagcttctacacaggagtctatattctgatcggagccggcgccctcatgatgctggtgggcttcctgggctgctgcggggctgtgcaggagtcccagtgcatgctgggactgttcttcggcttcctcttggtgatattcgccattgaaatagctgcggccatctggggatattcccacaaggatgaggtgattaaggaagtccaggagttttacaaggacacctacaacaagctgaaaaccaaggatgagccccagcgggaaacgctgaaagccatccactatgcgttgaactgctgtggtttggctgggggcgtggaacagtttatctcagacatctgccccaagaaggacgtactcgaaaccttcaccgtgaagtcctgtcctgatgccatcaaagaggtcttcgacaataaattccacatcatcggcgcagtgggcatcggcattgccgtggtcatgatatttggcatgatcttcagtatgatcttgtgctgtgctatccgcaggaaccgcgagatggtctagagtcagcttacatccctgagcaggaaagtttacccatgaagattggtgggattttttgtttgtttgttttgttttgtttgttgtttgttgtttgtttttttgccactaattttagtattcattctgcattgctagataaaagctgaagttactttatgtttgtcttttaatgcttcattcaatattgacatttgtagttgagcggggggtttggtttgctttggtttatattttttcagttgtttgtttttgcttgttatattaagcagaaatcctgcaatgaaaggtactatatttgctagactctagacaagatattgtacataaaagaatttttttgtctttaaatagatacaaatgtctatcaactttaatcaagttgtaacttatattgaagacaatttgatacataataaaaaattatgacaatg

SEQ ID NO: 5202 - DNA, 800 bp, Homo sapiens
  source 1..800: mol_type = unassigned DNA
cggagaccagcctacagccgcctgcatctgtatccagcgccaggtcccgccagtcccagctgcgcgcgccccccagtcccgcacccgttcggcccaggctaagttagccctcaccatgccggtcaaaggaggcaccaagtgcatcaaatacctgctgttcggatttaacttcatcttctggcttgccgggattgctgtccttgccattggactatggctccgattcgactctcagaccaagagcatcttcgagcaagaaactaataataataattccagcttctacacaggagtctatattctgatcggagccggcgccctcatgatgctggtgggcttcctgggctgctgcggggctgtgcaggagtcccagtgcatgctgggactggcaactaaaaggactatgtttcccccttttctcgaggaccacgtttgctttttttccctgaatccacagttcttcggcttcctcttggtgatattcgccattgaaatagctgcggccatctggggatattcccacaaggatgaggtgattaaggaagtccaggagttttacaaggacacctacaacaagctgaaaaccaaggatgagccccagcgggaaacgctgaaagccatccactatgcgttgaactgctgtggtttggctgggggcgtggaacagtttatctcagacatctgccccaagaaggacgtactcgaaaccttcaccgtgaagtcctgtcctgatgccatcaaagaggtcttcgacaataaattccacatcatcggcgcagtgggcatcggcattgccgtgg

SEQ ID NO: 5203 - DNA, 1229 bp, Homo sapiens
  source 1..1229: mol_type = unassigned DNA
gaccagcctacagccgcctgcatctgtatccagcgccaggtcccgccagtcccagctgcgcgcgccccccagtcccgcacccgttcggcccaggctaagttagccctcaccatgccggtcaaaggaggcaccaagtgcatcaaatacctgctgttcggatttaacttcatcttctggcttgccgggattgctgtccttgccattggactatggctccgattcgactctcagaccaagagcatcttcgagcaagaaactaataataataattccagcttctacacaggagtctatattctgatcggagccggcgccctcatgatgctggtgggcttcctgggctgctgcggggctgtgcaggagtcccagtgcatgctgggactgttcttcggcttcctcttggtgatattcgccattgaaatagctgcggccatctggggatattcccacaaggatgaggtgattaaggaagtccaggagttttacaaggacacctacaacaagctgaaaaccaaggatgagccccagcgggaaacgctgaaagccatccactatgcgttgaacctgtggtttggctgggggcgtggaacagtttatctcagacatctgccccaagaaggacgtactcgaaaccttcaccgtgaagtcctgtcctgatgccatcaaagaggtcttcgacaataaattccacatcatcggcgcagtgggcatcggcattgccgtggtcatgatatttggcatgatcttcagtatgatcttgtgctgtgctatccgcaggaaccgcgagatggtctagagtcagcttacatccctgagcaggaaagtttacccatgaagattggtgggattttttgtttgtttgttttgttttgtttgttgtttgttgtttgtttttttgccactaattttagtattcattctgcattgctagataaaagctgaagttactttatgtttgtcttttaatgcttcattcaatattgacatttgtagttgagcggggggtttggtttgctttggtttatattttttcagttgtttgtttttgcttgttatattaagcagaaatcctgcaatgaaaggtactatatttgctagactctagacaagatattgtacataaaagaatttttttgtctttaaatagatacaaatgtctatcaactttaatcaagttgtaacttatattgaagacaatttgatacataataaaaaattatgacaatgtc

SEQ ID NO: 5204 - DNA, 915 bp, Homo sapiens
  source 1..915: mol_type = unassigned DNA
agccgcctgcatctgtatccagcgccaggtcccgccagtcccagctgctgcggggctgtgcaggagtcccagtgcatgctgggactgttcttcggcttcctcttggtgatattcgccattgaaatagctgcggccatctggggatattcccacaaggatgaggtgattaaggaagtccaggagttttacaaggacacctacaacaagctgaaaaccaaggatgagccccagcgggaaacgctgaaagccatccactatgcgttgaactgctgtggtttggctgggggcgtggaacagtttatctcagacatctgccccaagaaggacgtactcgaaaccttcaccgtgaagtcctgtcctgatgccatcaaagaggtcttcgacaataaattccacatcatcggcgcagtgggcatcggcattgccgtggtcatgatatttggcatgatcttcagtatgatcttgtgctgtgctatccgcaggaaccgcgagatggtctagagtcagcttacatccctgagcaggaaagtttacccatgaagattggtgggattttttgtttgtttgttttgttttgtttgttgtttgttgtttgtttttttgccactaattttagtattcattctgcattgctagataaaagctgaagttactttatgtttgtcttttaatgcttcattcaatattgacatttgtagttgagcggggggtttggtttgctttggtttatattttttcagttgtttgtttttgcttgttatattaagcagaaatcctgcaatgaaaggtactatatttgctagactctagacaagatattgtacataaaagaatttttttgtctttaaatagatacaaatgtctatcaactttaatcaagttgtaacttatattgaagacaatttgatacataat

SEQ ID NO: 5205 - DNA, 4324 bp, Homo sapiens
  source 1..4324: mol_type = unassigned DNA
ataaacagacccaggcgtgtgtggtagagttcgggttttttagcacgaagtgggtggctggagtttgcttgaaaacatcaattgactttgtgatcattacagaaatgctggtgtaaggtgttcagaagacaatggagaaaaaatggaaatactgtgctgtctattacatcatccagatacattttgtcaagggagtttgggaaaaaacagtcaacacagaagaaaatgtttatgctacacttggctctgatgtcaacctgacctgccaaacacagacagtaggcttcttcgtgcagatgcaatggtccaaggtcaccaataagatagacctgattgctgtctatcatccccaatacggcttctactgtgcctatgggagaccctgtgagtcacttgtgactttcacagaaactcctgagaatgggtcaaaatggactctgcacttaaggaatatgtcttgttcagtcagtggaaggtacgagtgtatgcttgttctgtatccagagggcattcagactaaaatctacaaccttctcattcagacacacgttacagcagatgaatggaacagcaaccatacgatagaaatagagataaatcagactctggaaataccatgctttcaaaatagctcctcaaaaatttcatctgagttcacctatgcatggtcggtggaaaacagcagcacggattcttgggtccttctttctaagggtataaaggaggataatggaactcaggaaacacttatctcccaaaatcacctcatcagcaattccacattacttaaagatagagtcaagcttggtacagactacagactccacctctctccagtccaaatcttcgatgatgggcggaagttctcttgccacattagagtcggtcctaacaaaatcttgaggagctccaccacagtcaaggtttttgctaaaccagaaatccctgtgattgtggaaaataactccacggatgtcttggtagagagaagatttacctgcttactaaagaatgtatttcccaaagcaaatatcacatggtttatagatggaagttttcttcatgatgaaaaagaaggaatatatattactaatgaagagagaaaaggcaaagatggatttttggaactgaagtctgttttaacaagggtacatagtaataaaccagcccaatcagacaacttgaccatttggtgtatggctctgtctccagtcccaggaaataaagtgtggaacatctcatcagaaaagatcacttttctcttaggttctgaaatttcctcaacagaccctccactgagtgttacagaatctacccttgacacccaaccttctccagccagcagtgtatctcctgcaagatatccagctacatcttcagtgacccttgtagatgtgagtgccttgaggccaaacaccactcctcaacccagcaattccagtatgactacccgaggcttcaactatccctggacctccagtgggacagataccaaaaaatcagtttcacggatacctagtgaaacatacagttcatccccgtcaggtgcaggctcaacacttcatgacaatgtctttaccagcacagccagagcattttcagaagtccccacaactgccaatggatctacgaaaactaatcacgtccatatcactggtattgtggtcaataagcccaaagatggaatgtcctggccagtgattgtagcagctttactcttttgctgcatgatattgtttggtcttggagtgagaaaatggtgtcagtaccaaaaagaaataatggaaagacctccacctttcaagccaccaccacctcccatcaagtacacttgcattcaagagcccaacgaaagtgatctgccttatcatgagatggagaccctctagtctcgtgagactttgccccatggcagaactctgctggaatcctattgagaaggtagacattgtgctttattaatatagtcgctcttcagccatgcctttgctgcagctgaaatggaagtcagaagtgagtgacctgttttcccagcaactcaccctcttccatctccaaacgcctgaagcttaaccaagagtgagaggatatgtcatgttcacactcaatgcaattcgtagtggttttcttgcttatgtaagaagtacatattagtctgccatctttaaaaaaaaatacagtattttcatttaaattctctgatggagggacaacaatggtttcaactgtatgcccatgcctgatcctcttatttgaacatctatcaacattgtaaactctttgccaaaatcctggggctttgctgcattccctaagataattacaggaaaaagaaaatgtaaaagtgctaacaaggctgccaagtaatggagaagtatggttagtcttcatattgaaattctgttgcttattttcatggaaggaaacagaatactttgcacaggaaccacattttcaatcctccttcactgtcttcctaccatgttcagcccagactcctgccacatggaccaggatgaagagggatcaaagagataattagccaaaaacccagtagcctagaagatacaaaactccactggcctctaaaattatattagccaagagtggtttcatttgagtgccttcgtgtgtatgtccatcaaactggaaccaaactgttttgtaagtaaacaggcagcctaagcccaaccctactttctaattccagttattctctttttcatctggggatttacctgttcatttaatctgcctgttttgatctgttttgaaaaagataaagagcctcaaatcagaccagcactgattaattaaccctgctcctaccaatcttttttaaagcagttgaagcagaatgtataggtgtcagagaagaaacctagtcagccagacgtgctctgtattcagcaatagtttgtgaatgaataaattactaatcctccttgtcgcttgaaaccttcccacactccctgctccaggagggaaaaacagatgttgttgacagatagagtgataggcaaattctgtgtggactttagtcccaaaaggaaactttagttcacttgcagtatgcttatccttgactgcacatgagaatgccttgtgcagagttatttggagattatgtctttttcttaaacaccatggctgtcacacttcagttcaattaaatcagaatgtctgaggagtgagacacaggcatcaacactctcaaatgattcacatgttcagccaaagttgagaaccatcgagcctgtggaagttctttctcatggctcagaatcttaggtaggtgcttaactcttgtggtggccagcctccaagatgagccccagtgttcttgcctcctactattcacatctttatgtggtcccctccaatgctgaatacagatgatttgtgtaacctgaggccaggattaaggggaggcaatcaatgcacctagggaaaaaatttaaggaggtattcacactcagggtcatgcacttgcacaatgttgagaatgagtaccactctcaccattggtatagccaaaaaagcttggaagtgaccaaggctaggtcacaaaatacactgtggcttcttctttgatctctctttgaccatactgacactgggaaaagcccattcccatgccatgaagacaccaaggcagccctattgagaaatctacctgtcgtggccgggcgcagtggctcacgcctgtaatcccagcactttgggaggccgaggtgggtggatcacgaggtcaggagatcgagaccatcctggctaacacagtgaaaccccgtctctactaaaaatacaaaaaattagccgggtgtggtgtcgggcacctgtagtcccagctactcaggaggctgaggcaggagaagggtgggaacccgggaggcagagcttgcagtgagccgagattgtgccactgcacactccaatctgggtgaaagaccgagactccgcctcaaaaaaaaaaaaaaaagaaagaaagaaagaaagaaagaaatctacctgtcaaggaactaaggtattttgctaacaagcaccaacttgccagccatgtaagggagccatcttggaagcagatcctccagcctccagtcaagtcttcagataattgcaacttcagttgatcttttgaccaagacctcaagagagccagaactacccagctaagccttttactaaatttctgaacttctaacactattagataataagtgcttattgtttaacaccattaattttgagtataatttgttacatagcgacagataactatacagctcaacaactagaaaaataaactgtttacctgccttaa

SEQ ID NO: 5206 - DNA, 4315 bp, Homo sapiens
  source 1..4315: mol_type = unassigned DNA
ttcctgtctacgtttcatttcctgggggcttgccaagtgataaacagacccaggcgtgtgtggtagagttcgggttttttagcacgaagtgggtggctggagtttgcttgaaaacatcaattgactttgtgatcattacagaaatgctggtgtaaggtgttcagaagacaatggagaaaaaatggaaatactgtgctgtctattacatcatccagatacattttgtcaagggagtttgggaaaaaacagtcaacacagaagaaaatgtttatgctacacttggctctgatgtcaacctgacctgccaaacacagacagtaggcttcttcgtgcagatgcaatggtccaaggtcaccaataagatagacctgattgctgtctatcatccccaatacggcttctactgtgcctatgggagaccctgtgagtcacttgtgactttcacagaaactcctgagaatgggtcaaaatggactctgcacttaaggaatatgtcttgttcagtcagtggaaggtacgagtgtatgcttgttctgtatccagagggcattcagactaaaatctacaaccttctcattcagacacacgttacagcagatgaatggaacagcaaccatacgatagaaatagagataaatcagactctggaaataccatgctttcaaaatagctcctcaaaaatttcatctgagttcacctatgcatggtcggtggaggataatggaactcaggaaacacttatctcccaaaatcacctcatcagcaattccacattacttaaagatagagtcaagcttggtacagactacagactccacctctctccagtccaaatcttcgatgatgggcggaagttctcttgccacattagagtcggtcctaacaaaatcttgaggagctccaccacagtcaaggtttttgctaaaccagaaatccctgtgattgtggaaaataactccacggatgtcttggtagagagaagatttacctgcttactaaagaatgtatttcccaaagcaaatatcacatggtttatagatggaagttttcttcatgatgaaaaagaaggaatatatattactaatgaagagagaaaaggcaaagatggatttttggaactgaagtctgttttaacaagggtacatagtaataaaccagcccaatcagacaacttgaccatttggtgtatggctctgtctccagtcccaggaaataaagtgtggaacatctcatcagaaaagatcacttttctcttaggttctgaaatttcctcaacagaccctccactgagtgttacagaatctacccttgacacccaaccttctccagccagcagtgtatctcctgcaagatatccagctacatcttcagtgacccttgtagatgtgagtgccttgaggccaaacaccactcctcaacccagcaattccagtatgactacccgaggcttcaactatccctggacctccagtgggacagataccaaaaaatcagtttcacggatacctagtgaaacatacagttcatccccgtcaggtgcaggctcaacacttcatgacaatgtctttaccagcacagccagagcattttcagaagtccccacaactgccaatggatctacgaaaactaatcacgtccatatcactggtattgtggtcaataagcccaaagatggaatgtcctggccagtgattgtagcagctttactcttttgctgcatgatattgtttggtcttggagtgagaaaatggtgtcagtaccaaaaagaaataatggaaagacctccacctttcaagccaccaccacctcccatcaagtacacttgcattcaagagcccaacgaaagtgatctgccttatcatgagatggagaccctctagtctcgtgagactttgccccatggcagaactctgctggaatcctattgagaaggtagacattgtgctttattaatatagtcgctcttcagccatgcctttgctgcagctgaaatggaagtcagaagtgagtgacctgttttcccagcaactcaccctcttccatctccaaacgcctgaagcttaaccaagagtgagaggatatgtcatgttcacactcaatgcaattcgtagtggttttcttgcttatgtaagaagtacatattagtctgccatctttaaaaaaaaatacagtattttcatttaaattctctgatggagggacaacaatggtttcaactgtatgcccatgcctgatcctcttatttgaacatctatcaacattgtaaactctttgccaaaatcctggggctttgctgcattccctaagataattacaggaaaaagaaaatgtaaaagtgctaacaaggctgccaagtaatggagaagtatggttagtcttcatattgaaattctgttgcttattttcatggaaggaaacagaatactttgcacaggaaccacattttcaatcctccttcactgtcttcctaccatgttcagcccagactcctgccacatggaccaggatgaagagggatcaaagagataattagccaaaaacccagtagcctagaagatacaaaactccactggcctctaaaattatattagccaagagtggtttcatttgagtgccttcgtgtgtatgtccatcaaactggaaccaaactgttttgtaagtaaacaggcagcctaagcccaaccctactttctaattccagttattctctttttcatctggggatttacctgttcatttaatctgcctgttttgatctgttttgaaaaagataaagagcctcaaatcagaccagcactgattaattaaccctgctcctaccaatcttttttaaagcagttgaagcagaatgtataggtgtcagagaagaaacctagtcagccagacgtgctctgtattcagcaatagtttgtgaatgaataaattactaatcctccttgtcgcttgaaaccttcccacactccctgctccaggagggaaaaacagatgttgttgacagatagagtgataggcaaattctgtgtggactttagtcccaaaaggaaactttagttcacttgcagtatgcttatccttgactgcacatgagaatgccttgtgcagagttatttggagattatgtctttttcttaaacaccatggctgtcacacttcagttcaattaaatcagaatgtctgaggagtgagacacaggcatcaacactctcaaatgattcacatgttcagccaaagttgagaaccatcgagcctgtggaagttctttctcatggctcagaatcttaggtaggtgcttaactcttgtggtggccagcctccaagatgagccccagtgttcttgcctcctactattcacatctttatgtggtcccctccaatgctgaatacagatgatttgtgtaacctgaggccaggattaaggggaggcaatcaatgcacctagggaaaaaatttaaggaggtattcacactcagggtcatgcacttgcacaatgttgagaatgagtaccactctcaccattggtatagccaaaaaagcttggaagtgaccaaggctaggtcacaaaatacactgtggcttcttctttgatctctctttgaccatactgacactgggaaaagcccattcccatgccatgaagacaccaaggcagccctattgagaaatctacctgtcgtggccgggcgcagtggctcacgcctgtaatcccagcactttgggaggccgaggtgggtggatcacgaggtcaggagatcgagaccatcctggctaacacagtgaaaccccgtctctactaaaaatacaaaaaattagccgggtgtggtgtcgggcacctgtagtcccagctactcaggaggctgaggcaggagaagggtgggaacccgggaggcagagcttgcagtgagccgagattgtgccactgcacactccaatctgggtgaaagaccgagactccgcctcaaaaaaaaaaaaaaaagaaagaaagaaagaaagaaagaaatctacctgtcaaggaactaaggtattttgctaacaagcaccaacttgccagccatgtaagggagccatcttggaagcagatcctccagcctccagtcaagtcttcagataattgcaacttcagttgatcttttgaccaagacctcaagagagccagaactacccagctaagccttttactaaatttctgaacttctaacactattagataataagtgcttattgtttaacaccattaattttgagtataatttgttacatagcgacagataactatacagctcaacaactagaaaaataaactgtttacctgccttaa

SEQ ID NO: 5207 - DNA, 3229 bp, Homo sapiens
  source 1..3229: mol_type = unassigned DNA
cgccccccctccttcataaagtcctggcctcgggacagcctgcacagctgcctagcctgtggagacgggacagccctgtcccactcactctttcccctgccgctcctgccggcagctccaaccatgggaggccgcgtctttctcgcattctgtgtctggctgactctgccgggagctgaaacccaggactccaggggctgtgcccggtggtgccctcagaactcctcgtgtgtcaatgccaccgcctgtcgctgcaatccagggttcagctctttttctgagatcatcaccaccccgacggagacttgtgacgacatcaacgagtgtgcaacaccgtcgaaagtgtcatgcggaaaattctcggactgctggaacacagaggggagctacgactgcgtgtgcagcccgggatatgagcctgtttctggggcaaaaacattcaagaatgagagcgagaacacctgtcaagatgtggacgaatgtcagcagaacccaaggctctgtaaaagctacggcacctgcgtcaacacccttggcagctatacctgccagtgcctgcctggcttcaagttcatacctgaggatccgaaggtctgcacagatgtgaatgaatgcacctccggacaaaacccgtgccacagctccacccactgcctcaacaacgtgggcagctatcagtgccgctgccgcccgggctggcaaccgattccggggtcccccaatggcccaaacaataccgtctgtgaagatgtggacgagtgcagctccgggcagcatcagtgtgacagctccaccgtctgcttcaacaccgtgggttcatacagctgccgctgccgcccaggctggaagcccagacacggaatcccgaataaccaaaaggacactgtctgtgaagatatgactttctccacctggaccccgccccctggagtccacagccagacgctttcccgattcttcgacaaagtccaggacctgggcagagactccaagacaagctcagccgaggtcaccatccagaatgtcatcaaattggtggatgaactgatggaagctcctggagacgtagaggccctggcgccacctgtccggcacctcatagccacccagctgctctcaaaccttgaagatatcatgaggatcctggccaagagcctgcctaaaggccccttcacctacatttccccttcgaacacagagctgaccctgatgatccaggagcggggggacaagaacgtcactatgggtcagagcagcgcacgcatgaagctgaattgggctgtggcagctggagccgaggatccaggccccgccgtggcgggcatcctctccatccagaacatgacgacattgctggccaatgcctccttgaacctgcattccaagaagcaagccgaactggaggagatatatgaaagcagcatccgtggtgtccaactcagacgcctctctgccgtcaactccatctttctgagccacaacaacaccaaggaactcaactcccccatccttttcgccttctcccaccttgagtcctccgatggggaggcgggaagagaccctcctgccaaggacgtgatgcctgggccacggcaggagctgctctgtgccttctggaagagtgacagcgacaggggagggcactgggccaccgagggctgccaggtgctgggcagcaagaacggcagcaccacctgccaatgcagccacctgagcagctttgcgatccttatggctcattatgacgtggaggactggaagctgaccctgatcaccagggtgggactggcgctgtcactcttctgcctgctgctgtgcatcctcactttcctgctggtgcggcccatccagggctcgcgcaccaccatacacctgcacctctgcatctgcctcttcgtgggctccaccatcttcctggccggcatcgagaacgaaggcggccaggtggggctgcgctgccgcctggtggccgggctgctgcactactgtttcctggccgccttctgctggatgagcctcgaaggcctggagctctactttcttgtggtgcgcgtgttccaaggccagggcctgagtacgcgctggctctgcctgatcggctatggcgtgcccctgctcatcgtgggcgtctcggctgccatctacagcaagggctacggccgccccagatactgctggttggactttgagcagggcttcctctggagcttcttgggacctgtgaccttcatcattttgtgcaatgctgtcattttcgtgactaccgtctggaagctcactcagaagttttctgaaatcaatccagacatgaagaaattaaagaaggcgagggcgctgaccatcacggccatcgcgcagctcttcctgttgggctgcacctgggtctttggcctgttcatcttcgacgatcggagcttggtgctgacctatgtgtttaccatcctcaactgcctgcagggcgccttcctctacctgctgcactgcctgctcaacaagaaggttcgggaagaataccggaagtgggcctgcctagttgctggggggagcaagtactcagaattcacctccaccacgtctggcactggccacaatcagacccgggccctcagggcatcagagtccggcatatgaaggcgcatggttctggacggcccagcagctcctgtggccacagcagctttgtacacgaagaccatccatcctcccttcgtccaccactctactccctccaccctccctccctgatcccgtgtgccaccaggagggagtggcagctatagtctggcaccaaagtccaggacacccagtggggtggagtcggagccactggtcctgctgctggctgcctctctgctccaccttgtgacccagggtggggacaggggctggcccagggctgcaatgcagcatgttgccctggcacctgtggccagtactcgggacagactaagggcgcttgtcccatcctggacttttcctctcatgtctttgctgcagaactgaagagactaggcgctggggctcagcttccctcttaagctaagactgatgtcagaggccccatggcgaggccccttggggccactgcctgaggctcacggtacagaggcctgccctgcctggccgggcaggaggttctcactgttgtgaaggttgtagacgttgtgtaatgtgtttttatctgttaaaatttttcagtgttgacacttaaaattaaacacatgcatac

SEQ ID NO: 5208 - DNA, 3082 bp, Homo sapiens
  source 1..3082: mol_type = unassigned DNA
cgccccccctccttcataaagtcctggcctcgggacagcctgcacagctgcctagcctgtggagacgggacagccctgtcccactcactctttcccctgccgctcctgccggcagctccaaccatgggaggccgcgtctttctcgcattctgtgtctggctgactctgccgggagctgaaacccaggactccaggggctgtgcccggtggtgccctcagaactcctcgtgtgtcaatgccaccgcctgtcgctgcaatccagggttcagctctttttctgagatcatcaccaccccgacggagacttgtgacgacatcaacgagtgtgcaacaccgtcgaaagtgtcatgcggaaaattctcggactgctggaacacagaggggagctacgactgcgtgtgcagcccgggatatgagcctgtttctggggcaaaaacattcaagaatgagagcgagaacacctgtcaagatgtggacgaatgtcagcagaacccaaggctctgtaaaagctacggcacctgcgtcaacacccttggcagctatacctgccagtgcctgcctggcttcaagttcatacctgaggatccgaaggtctgcacagatgtggacgagtgcagctccgggcagcatcagtgtgacagctccaccgtctgcttcaacaccgtgggttcatacagctgccgctgccgcccaggctggaagcccagacacggaatcccgaataaccaaaaggacactgtctgtgaagatatgactttctccacctggaccccgccccctggagtccacagccagacgctttcccgattcttcgacaaagtccaggacctgggcagagactccaagacaagctcagccgaggtcaccatccagaatgtcatcaaattggtggatgaactgatggaagctcctggagacgtagaggccctggcgccacctgtccggcacctcatagccacccagctgctctcaaaccttgaagatatcatgaggatcctggccaagagcctgcctaaaggccccttcacctacatttccccttcgaacacagagctgaccctgatgatccaggagcggggggacaagaacgtcactatgggtcagagcagcgcacgcatgaagctgaattgggctgtggcagctggagccgaggatccaggccccgccgtggcgggcatcctctccatccagaacatgacgacattgctggccaatgcctccttgaacctgcattccaagaagcaagccgaactggaggagatatatgaaagcagcatccgtggtgtccaactcagacgcctctctgccgtcaactccatctttctgagccacaacaacaccaaggaactcaactcccccatccttttcgccttctcccaccttgagtcctccgatggggaggcgggaagagaccctcctgccaaggacgtgatgcctgggccacggcaggagctgctctgtgccttctggaagagtgacagcgacaggggagggcactgggccaccgagggctgccaggtgctgggcagcaagaacggcagcaccacctgccaatgcagccacctgagcagctttgcgatccttatggctcattatgacgtggaggactggaagctgaccctgatcaccagggtgggactggcgctgtcactcttctgcctgctgctgtgcatcctcactttcctgctggtgcggcccatccagggctcgcgcaccaccatacacctgcacctctgcatctgcctcttcgtgggctccaccatcttcctggccggcatcgagaacgaaggcggccaggtggggctgcgctgccgcctggtggccgggctgctgcactactgtttcctggccgccttctgctggatgagcctcgaaggcctggagctctactttcttgtggtgcgcgtgttccaaggccagggcctgagtacgcgctggctctgcctgatcggctatggcgtgcccctgctcatcgtgggcgtctcggctgccatctacagcaagggctacggccgccccagatactgctggttggactttgagcagggcttcctctggagcttcttgggacctgtgaccttcatcattttgtgcaatgctgtcattttcgtgactaccgtctggaagctcactcagaagttttctgaaatcaatccagacatgaagaaattaaagaaggcgagggcgctgaccatcacggccatcgcgcagctcttcctgttgggctgcacctgggtctttggcctgttcatcttcgacgatcggagcttggtgctgacctatgtgtttaccatcctcaactgcctgcagggcgccttcctctacctgctgcactgcctgctcaacaagaaggttcgggaagaataccggaagtgggcctgcctagttgctggggggagcaagtactcagaattcacctccaccacgtctggcactggccacaatcagacccgggccctcagggcatcagagtccggcatatgaaggcgcatggttctggacggcccagcagctcctgtggccacagcagctttgtacacgaagaccatccatcctcccttcgtccaccactctactccctccaccctccctccctgatcccgtgtgccaccaggagggagtggcagctatagtctggcaccaaagtccaggacacccagtggggtggagtcggagccactggtcctgctgctggctgcctctctgctccaccttgtgacccagggtggggacaggggctggcccagggctgcaatgcagcatgttgccctggcacctgtggccagtactcgggacagactaagggcgcttgtcccatcctggacttttcctctcatgtctttgctgcagaactgaagagactaggcgctggggctcagcttccctcttaagctaagactgatgtcagaggccccatggcgaggccccttggggccactgcctgaggctcacggtacagaggcctgccctgcctggccgggcaggaggttctcactgttgtgaaggttgtagacgttgtgtaatgtgtttttatctgttaaaatttttcagtgttgacacttaaaattaaacacatgcatac

SEQ ID NO: 5209 - DNA, 2950 bp, Homo sapiens
  source 1..2950: mol_type = unassigned DNA
cgccccccctccttcataaagtcctggcctcgggacagcctgcacagctgcctagcctgtggagacgggacagccctgtcccactcactctttcccctgccgctcctgccggcagctccaaccatgggaggccgcgtctttctcgcattctgtgtctggctgactctgccgggagctgaaacccaggactccaggggctgtgcccggtggtgccctcagaactcctcgtgtgtcaatgccaccgcctgtcgctgcaatccagggttcagctctttttctgagatcatcaccaccccgacggagacttgtgacgacatcaacgagtgtgcaacaccgtcgaaagtgtcatgcggaaaattctcggactgctggaacacagaggggagctacgactgcgtgtgcagcccgggatatgagcctgtttctggggcaaaaacattcaagaatgagagcgagaacacctgtcaagatgtggacgagtgcagctccgggcagcatcagtgtgacagctccaccgtctgcttcaacaccgtgggttcatacagctgccgctgccgcccaggctggaagcccagacacggaatcccgaataaccaaaaggacactgtctgtgaagatatgactttctccacctggaccccgccccctggagtccacagccagacgctttcccgattcttcgacaaagtccaggacctgggcagagactccaagacaagctcagccgaggtcaccatccagaatgtcatcaaattggtggatgaactgatggaagctcctggagacgtagaggccctggcgccacctgtccggcacctcatagccacccagctgctctcaaaccttgaagatatcatgaggatcctggccaagagcctgcctaaaggccccttcacctacatttccccttcgaacacagagctgaccctgatgatccaggagcggggggacaagaacgtcactatgggtcagagcagcgcacgcatgaagctgaattgggctgtggcagctggagccgaggatccaggccccgccgtggcgggcatcctctccatccagaacatgacgacattgctggccaatgcctccttgaacctgcattccaagaagcaagccgaactggaggagatatatgaaagcagcatccgtggtgtccaactcagacgcctctctgccgtcaactccatctttctgagccacaacaacaccaaggaactcaactcccccatccttttcgccttctcccaccttgagtcctccgatggggaggcgggaagagaccctcctgccaaggacgtgatgcctgggccacggcaggagctgctctgtgccttctggaagagtgacagcgacaggggagggcactgggccaccgagggctgccaggtgctgggcagcaagaacggcagcaccacctgccaatgcagccacctgagcagctttgcgatccttatggctcattatgacgtggaggactggaagctgaccctgatcaccagggtgggactggcgctgtcactcttctgcctgctgctgtgcatcctcactttcctgctggtgcggcccatccagggctcgcgcaccaccatacacctgcacctctgcatctgcctcttcgtgggctccaccatcttcctggccggcatcgagaacgaaggcggccaggtggggctgcgctgccgcctggtggccgggctgctgcactactgtttcctggccgccttctgctggatgagcctcgaaggcctggagctctactttcttgtggtgcgcgtgttccaaggccagggcctgagtacgcgctggctctgcctgatcggctatggcgtgcccctgctcatcgtgggcgtctcggctgccatctacagcaagggctacggccgccccagatactgctggttggactttgagcagggcttcctctggagcttcttgggacctgtgaccttcatcattttgtgcaatgctgtcattttcgtgactaccgtctggaagctcactcagaagttttctgaaatcaatccagacatgaagaaattaaagaaggcgagggcgctgaccatcacggccatcgcgcagctcttcctgttgggctgcacctgggtctttggcctgttcatcttcgacgatcggagcttggtgctgacctatgtgtttaccatcctcaactgcctgcagggcgccttcctctacctgctgcactgcctgctcaacaagaaggttcgggaagaataccggaagtgggcctgcctagttgctggggggagcaagtactcagaattcacctccaccacgtctggcactggccacaatcagacccgggccctcagggcatcagagtccggcatatgaaggcgcatggttctggacggcccagcagctcctgtggccacagcagctttgtacacgaagaccatccatcctcccttcgtccaccactctactccctccaccctccctccctgatcccgtgtgccaccaggagggagtggcagctatagtctggcaccaaagtccaggacacccagtggggtggagtcggagccactggtcctgctgctggctgcctctctgctccaccttgtgacccagggtggggacaggggctggcccagggctgcaatgcagcatgttgccctggcacctgtggccagtactcgggacagactaagggcgcttgtcccatcctggacttttcctctcatgtctttgctgcagaactgaagagactaggcgctggggctcagcttccctcttaagctaagactgatgtcagaggccccatggcgaggccccttggggccactgcctgaggctcacggtacagaggcctgccctgcctggccgggcaggaggttctcactgttgtgaaggttgtagacgttgtgtaatgtgtttttatctgttaaaatttttcagtgttgacacttaaaattaaacacatgcatac

SEQ ID NO: 5210 - DNA, 2956 bp, Homo sapiens
  source 1..2956: mol_type = unassigned DNA
ggcgggcggatcatgagagcattctgtgtctggctgactctgccgggagctgaaacccaggactccaggggctgtgcccggtggtgccctcagaactcctcgtgtgtcaatgccaccgcctgtcgctgcaatccagggttcagctctttttctgagatcatcaccaccccgacggagacttgtgacgacatcaacgagtgtgcaacaccgtcgaaagtgtcatgcggaaaattctcggactgctggaacacagaggggagctacgactgcgtgtgcagcccgggatatgagcctgtttctggggcaaaaacattcaagaatgagagcgagaacacctgtcaagatgtggacgaatgtcagcagaacccaaggctctgtaaaagctacggcacctgcgtcaacacccttggcagctatacctgccagtgcctgcctggcttcaagttcatacctgaggatccgaaggtctgcacagatgtggacgagtgcagctccgggcagcatcagtgtgacagctccaccgtctgcttcaacaccgtgggttcatacagctgccgctgccgcccaggctggaagcccagacacggaatcccgaataaccaaaaggacactgtctgtgaagatatgactttctccacctggaccccgccccctggagtccacagccagacgctttcccgattcttcgacaaagtccaggacctgggcagagactccaagacaagctcagccgaggtcaccatccagaatgtcatcaaattggtggatgaactgatggaagctcctggagacgtagaggccctggcgccacctgtccggcacctcatagccacccagctgctctcaaaccttgaagatatcatgaggatcctggccaagagcctgcctaaaggccccttcacctacatttccccttcgaacacagagctgaccctgatgatccaggagcggggggacaagaacgtcactatgggtcagagcagcgcacgcatgaagctgaattgggctgtggcagctggagccgaggatccaggccccgccgtggcgggcatcctctccatccagaacatgacgacattgctggccaatgcctccttgaacctgcattccaagaagcaagccgaactggaggagatatatgaaagcagcatccgtggtgtccaactcagacgcctctctgccgtcaactccatctttctgagccacaacaacaccaaggaactcaactcccccatccttttcgccttctcccaccttgagtcctccgatggggaggcgggaagagaccctcctgccaaggacgtgatgcctgggccacggcaggagctgctctgtgccttctggaagagtgacagcgacaggggagggcactgggccaccgagggctgccaggtgctgggcagcaagaacggcagcaccacctgccaatgcagccacctgagcagctttgcgatccttatggctcattatgacgtggaggactggaagctgaccctgatcaccagggtgggactggcgctgtcactcttctgcctgctgctgtgcatcctcactttcctgctggtgcggcccatccagggctcgcgcaccaccatacacctgcacctctgcatctgcctcttcgtgggctccaccatcttcctggccggcatcgagaacgaaggcggccaggtggggctgcgctgccgcctggtggccgggctgctgcactactgtttcctggccgccttctgctggatgagcctcgaaggcctggagctctactttcttgtggtgcgcgtgttccaaggccagggcctgagtacgcgctggctctgcctgatcggctatggcgtgcccctgctcatcgtgggcgtctcggctgccatctacagcaagggctacggccgccccagatactgctggttggactttgagcagggcttcctctggagcttcttgggacctgtgaccttcatcattttgtgcaatgctgtcattttcgtgactaccgtctggaagctcactcagaagttttctgaaatcaatccagacatgaagaaattaaagaaggcgagggcgctgaccatcacggccatcgcgcagctcttcctgttgggctgcacctgggtctttggcctgttcatcttcgacgatcggagcttggtgctgacctatgtgtttaccatcctcaactgcctgcagggcgccttcctctacctgctgcactgcctgctcaacaagaaggttcgggaagaataccggaagtgggcctgcctagttgctggggggagcaagtactcagaattcacctccaccacgtctggcactggccacaatcagacccgggccctcagggcatcagagtccggcatatgaaggcgcatggttctggacggcccagcagctcctgtggccacagcagctttgtacacgaagaccatccatcctcccttcgtccaccactctactccctccaccctccctccctgatcccgtgtgccaccaggagggagtggcagctatagtctggcaccaaagtccaggacacccagtggggtggagtcggagccactggtcctgctgctggctgcctctctgctccaccttgtgacccagggtggggacaggggctggcccagggctgcaatgcagcatgttgccctggcacctgtggccagtactcgggacagactaagggcgcttgtcccatcctggacttttcctctcatgtctttgctgcagaactgaagagactaggcgctggggctcagcttccctcttaagctaagactgatgtcagaggccccatggcgaggccccttggggccactgcctgaggctcacggtacagaggcctgccctgcctggccgggcaggaggttctcactgttgtgaaggttgtagacgttgtgtaatgtgtttttatctgttaaaatttttcagtgttgacacttaaaattaaacacatgcatac

SEQ ID NO: 5211 - DNA, 756 bp, Homo sapiens
  source 1..756: mol_type = unassigned DNA
accagaaaaagaagctatgcttcaaagaaaatgaaagagcttccatgtgcgtgttcctcagtgtttagggagaagaaagcaacccttaaaatagaggaaaatgaagctgcttggattaccctgttgaagttcatctctgcctgtgccatgcatgaaaaaatactggcaaagtcttcacttacatgagtgttagactccatgttcccagtgggtctcggggttcagaactgagtgctctcatccaagcaataggagcgtcgacctcaggaaagcccaagtgttttgtgtgtattttgaggagtgggttatctgttgcactgagcctctctgtgtattttcttcttcttttcagcagaacaaggggaggtggacatggagagccaccggaatgccaacgcagagccagctgttcagcgtactcttttagagaaatagaagattgtcggcagaaacagcccaggcgttggcagcagggttagaacagctgcctgaggctcctccctgaaggacacctgcctgagagcagagatggaggccttctgttcacggcggattctttgttttaatcttgcgatgtgctttgcttgttgctgggcggatgatgtttactaacgatgaattttacatccaaagggggataggcacttggacccccattctccaaggcccgggggggcggtttcccatgggatgtgaaaggctggccattattaagtccctgtaactcaaatgtcaaccccaccgaggcaccccccc

SEQ ID NO: 5212 - DNA, 530 bp, Homo sapiens
  source 1..530: mol_type = unassigned DNA
atggcccgcggggctgcgctggcgctgctgctcttcggcctgctgggtgttctggtcgccgccccggggtttggggacctgcgtcttcaggccgcgcgcggaggccgccctggagttgcctgtcacagccacgccctgcgtcccgggcctaaatttggaatcgctaggagcctgagacccgggtggtggggggaagggaaggaaaagttagaaaaaaactttgagccctgaaaatgttcaaaaatactctgtggatgcgggctccgggaatttcagcgcgtgctgtgcgccaagcaacacggggcgcagaaagaaacgtgtgcttaccaaattgtccatctgcggcggtggagaattcggaaaacagaaaaagtgggcagggaagaaagagccacggtcaccctcccacgccctaaaccgggcctatttctaattattactttaatcatgtttttctgtttccctccctttgaaacggaaacggagaccctgccggatgtggtatgttataaattcttttttcatgttat

SEQ ID NO: 5213 - DNA, 918 bp, Homo sapiens
  source 1..918: mol_type = unassigned DNA
ggcccgtgggggagtatctgtcctgccgccttcgcccacgccctgcactccgggaccgtccctgcgcgctctgggcgcaccatggcccgcggggctgcgctggcgctgctgctcttcggcctgctgggtgttctggtcgccgccccggatggtggtttcgatttatccgatgcccttcctgacaatgaaaacaagaaacccactgcaatccccaagaaacccagtgctggggatgactttgacttaggagatgctgttgttgatggagaaaatgacgacccacgaccaccgaacccacccaaaccgatgccaaatccaaaccccaaccaccctagttcctccggtagcttttcagatgctgaccttgcggatggcgtttcaggtggagaaggaaaaggaggcagtgatggtggaggcagccacaggaaagaaggggaagaggccgacgccccaggcgtgatccccgggattgtgggggctgtcgtggtcgccgtggctggagccatctctagcttcattgcttaccagaaaaagaagctatgcttcaaagaaaatggtcagctggcaggctctttgggaccttgtattgggatccgccgtgaagctgatggctgaagacctaggggtgagcagagaacccagcccaggcctgcggagcgtcctgaccgtaatcgttttatctgctaagacatagccttaaagcaaacccttccatctgccgctcccctcgccctgctggcaaattcccaccacgatgggattctcaatcacatggcggattctctgccttcagttccatatgcttttgcctttctggatgcacagaagctcattatagcaaatcatatttctgcataagagcttcagaaaatgaagagaaatgcagatattttcttttaaacatgaatctaacagaaa

SEQ ID NO: 5214 - DNA, 892 bp, Homo sapiens
  source 1..892: mol_type = unassigned DNA
acccggcccgtgggggagtatctgtcctgccgccttcgcccacgccctgcactccgggaccgtccctgcgcgctctgggcgcaccatggcccgcggggctgcgctggcgctgctgctcttcggcctgctgggtgttctggtcgccgccccggatggtggtttcgatttatccgatgcccttcctggggatgactttgacttaggagatgctgttgttgatggagaaaatgacgacccacgaccaccgaacccacccaaaccgatgccaaatccaaaccccaaccaccctagttcctccggtagcttttcagatgctgaccttgcggatggcgtttcaggtggagaaggaaaaggaggcagtgatggtggaggcagccacaggaaagaaggggaagaggccgacgccccaggcgtgatccccgggattgtgggggctgtcgtggtcgccgtggctggagccatctctagcttcattgcttaccagaaaaagaagctatgcttcaaagaaaatgcagaacaaggggaggtggacatggagagccaccggaatgccaacgcagagccagctgttcagcgtactcttttagagaaatagaagattgtcggcagaaacagcccaggcgttggcagcagggttagaacagctgcctgaggctcctccctgaaggacacctgcctgagagcagagatggaggccttctgttcacggcggattctttgttttaatcttgcgatgtgctttgcttgttgctgggcggatgatgtttactaacgatgaattttacatccaaagggggataggcacttggacccccattctccaaggcccgggggggcggtttcccatgggatgtgaaaggctggccattattaagtccctgtaactcaaatg

SEQ ID NO: 5215 - DNA, 1245 bp, Homo sapiens
  source 1..1245: mol_type = unassigned DNA
gcgcgcgtggaggccggggcggggcgggcgcagccggcgctgagcttgcagggccgctcccctcacccgcccccttcgagtccccgggcttcgccccacccggcccgtgggggagtatctgtcctgccgccttcgcccacgccctgcactccgggaccgtccctgcgcgctctgggcgcaccatggcccgcggggctgcgctggcgctgctgctcttcggcctgctgggtgttctggtcgccgccccggatggtggtttcgatttatccgatgcccttcctgacaatgaaaacaagaaacccactgcaatccccaagaaacccagtgctggggatgactttgacttaggagatgctgttgttgatggagaaaatgacgacccacgaccaccgaacccacccaaaccgatgccaaatccaaaccccaaccaccctagttcctccggtagcttttcagatgctgaccttgcggatggcgtttcaggtggagaaggaaaaggaggcagtgatggtggaggcagccacaggaaagaaggggaagaggccgacgccccaggcgtgatccccgggattgtgggggctgtcgtggtcgccgtggctggagccatctctagcttcattgcttaccagaaaaagaagctatgcttcaaagaaaatgcagaacaaggggaggtggacatggagagccaccggaatgccaacgcagagccagctgttcagcgtactcttttagagaaatagaagattgtcggcagaaacagcccaggcgttggcagcagggttagaacagctgcctgaggctcctccctgaaggacacctgcctgagagcagagatggaggccttctgttcacggcggattctttgttttaatcttgcgatgtgctttgcttgttgctgggcggatgatgtttactaacgatgaattttacatccaaagggggataggcacttggacccccattctccaaggcccgggggggcggtttcccatgggatgtgaaaggctggccattattaagtccctgtaactcaaatgtcaaccccaccgaggcacccccccgtcccccagaatcttggctgtttacaaatcacgtgtccatcgagcacgtctgaaacccctggtagccccgacttctttttaattaaaataaggtaagcccttcaatttgtttcttcaatatttctttcatttgtagggatatttgtttttcatatcagactaataaaaagaaattagaaaccaa

SEQ ID NO: 5216 - DNA, 604 bp, Homo sapiens
  source 1..604: mol_type = unassigned DNA
cggcgttgggggcgccccgcggggacacccggagcctcctccctgcccggcaggacgcgctgtgcccacgggggcccaggcccggaggaggcgcccactttctccccaacgcttttcctggagccgttccagagagaaaagtcagcgtttgttgtcggagttgcaaactcttacatgtggggcggccttgggagagatggtggtttcgatttatccgatgcccttcctgacaatgaaaacaagaaacccactgcaatccccaagaaacccagtgctggggatgactttgacttaggagatgctgttgttgatggagaaaatgacgacccacgaccaccgaacccacccaaaccgatgccaaatccaaaccccaaccaccctagttcctccggtagcttttcagatgctgaccttgcggatggcgtttcaggtggagaaggaaaaggaggcagtgatggtggaggcagccacaggaaagaaggggaagaggccgacgccccaggcgtgatccccgggattgtgggggctgtcgtggtcgccgtggctggagccatctctagcttcattgcttaccagaaaaagaagctatgcttcaaagaaaatg

SEQ ID NO: 5217 - DNA, 556 bp, Homo sapiens
  source 1..556: mol_type = unassigned DNA
gctttgggcgggaccctgcagaggcggcggggctcctcctcccgctcctcctcggcctccccttcgggcgctctcgcgctaactgtgctcctccggggccctccgcctgctcccagccatggtggcctggcgctcggcgttccttgtctgcctcgctttctccttggccaccctggtccagcgaggatctggggactttgatgattttaacctggaggatgcagtgaaagaaacttcctcagtaaagcctgccttaggaatgtaccacaaactagatggcttaaaacaacagaactttattctgtcactgttctggatgctagaagttctatatcaaggtgttggttgggccacattctctctgaaggctctagggaagaatctttccttgactttccccacttctggtggctctaggtgttccttggtttgtggttgcatcactccaatctctgcctctgttgtcacgtggtgttcccctttctgtgtctctctcctttctcttacaaagatgcttgttagtgggtttaaggcccacctggataatccaggatga

SEQ ID NO: 5218 - DNA, 3496 bp, Homo sapiens
  source 1..3496: mol_type = unassigned DNA
gcagcctcgccccgccccccggcctaaccccagcccaggcgccctcaggcgccggctctctagcgcgcccgacctccatcttcccggggccgcgccgcgcgcgcgcgcgggctttgggcgggaccctgcagaggcggcggggctcctcctcccgctcctcctcggcctccccttcgggcgctctcgcgctaactgtgctcctccggggccctccgcctgctcccagccatggtggcctggcgctcggcgttccttgtctgcctcgctttctccttggccaccctggtccagcgaggatctggggactttgatgattttaacctggaggatgcagtgaaagaaacttcctcagtaaagcgaaatgattttgacttggctgatgccctggatgatcgaaatgatcgagatgatggccgcaggaaaccaattgctggaggaggaggtttttcagacaaggatcttgaagacatagtagggggtggagaatacaaacctgacaagggtaaaggtgatggccggtacggcagcaatgacgaccctggatctggcatggtggcagagcctggcaccattgccggggtggccagcgccctggccatggccctcatcggtgccgtctccagctacatctcctaccagcagaagaagttctgcttcagcattcagcagggtctcaacgcagactacgtgaagggagagaacctggaagccgtggtatgtgaggaaccccaagtgaaatactccacgttgcacacgcagtctgcagagccgccgccgccgcccgaaccagcccggatctgagggccctgtccagctgcaggcatgcacaatggtgccaccgcttgtcacccggctccccccaccccttcatttggacccgcagctgctgtgctgctctgtgccatcggctccttgttggtctgagtttcccggatgagctctgggtgtttgtgagtttggtttctctgccctgccccaagcgtgctgagacttggtgccgaaattcaagagccagctctgatagaaagccagcaccagcctcgggagctgctgagccaccaactcccaaagccagcctgcctccagctttactgagcacaggatgcgggggccaagatgatgctgaggcctgatgacatttatgcttaggggacaagagtttgaactcaagggactgtgacccctgcacactggagtggctcattgtggcaggtttctgccaatagacagcccctgacagtggcctcaaggagctgcaggtggggggctcagcctgcacccacttggagcccctgcaaggagcgaaccggtcagcaccaagtaacaccacacacacgcagcacccaggatgatggtttcacttcagtcttccccatcccaggttttatgttgctgggcttccggagagccggtccaagcggaggctttcagtgatttaagtacaaacatgcatctcgtgatagtcctgccttgagagcttaggaatcttccggataagtatgaagcaattcgtaggcctgtttcccatctgattccatagggggctgggtgtggccttcgggttgacatgagaaaggtctttagcaatcatttctgcaccggagatgagttttatcctgtgttggggagaggtgctcaccctccaccctgtgtccctgttttggtagcaagagtgaccgatgtcaagaacgagcatcaaagccagaatcctgcttgtttgcttaaaaatgtaattgggggcggcgggggaggagaggggaaagagacattcgcttggtttagtgaaacgcaggtgactttgtagctctgtggtcagcctacttgtctgctctgagggagagtgcgtggggagccatgctcaccgtggcaaacacaggaaccccatgactcgcccctcacctggcgtggagctgcctggtttgggctggagcagagctggtttcctggaatgttcctttggcccacatatggttctgtcccggtgagctctgttgtcagaggctcacgggacagaaccacatgctagggtctagggcccctgtctactgatagtcagtttgctgtgtcagaaagcacttctgaaagcagatatgagtcaccagacaggcaggatcttacaaaactcacgggcctctttggtctgcatgatggccccatgcgtttcataggctgtccactgagcgggattgtctgctgagtgggatgagccaactccagtttcttaaggaaaccactggaatctgcagcccccacatgcatctgtctaacgcatgcctcgtgttcgttttgcaaacatgcctgtggtggagggtggtcagttgtagccctgtgcgtctcaaggctgccttgtgaggccattcccagtgcgtgcccttgagctccttaccaccccttttcctgctcggccctttaatccctgacagacctggactgtgtggctgaagggggacctgcagcactgcagaaatgcctctgcgtggtgccatgaaggaaagaaaccttggcctggtctcgagaagcttcccatgcttcaggaagttagtaagggtggggtggcttgcaggattggcctgtttccagggcctcccacactcattggccagattgtgaactttgtcaggcttgtccctccctgataccaagtatgtcgagaaccgatggccccaccctctggctggtgctgggccggaggtggctatggaggattttggcatgcgtggcctgtcgccacctggacagcgtgacctcaggggttgtccactttacctttatggtgaggcctgtcggatggctaagtccttgaaaccctagagctgtgacgtagaatatgtgctgtctgtgagaccgtgttcccaggagcactgactgcagttgagagagacccattttgctctcccttaccgccccccgccccgggtgctttctgcacaaagcctagagcctggcactcaagcccaccggtggcagctcctagtgactggacatgcctggaagacccctcagccttctgtttgcagaacgttcatttcaggagcttctccttcccacagacatcttacacttgctcgacactgccacctgcagaagcctggcgggctctggtcaccatgtgtctatctgaaggttgcactggccagcatgggcctgtcccaagcgagaggggagacacagtggactgaaaggactggttgaaagtggccaatctctatcagcttaatttggcagagaaaatttgtaacaactctgagcacatgctgggtgaagtcacagctcaaggaaagataaagctgggcggaaggaggtgtgcgtggcttctggggtgggacccagaggggaggctctgggacaggggctggggttcagtgccagggccctgaggaagaaatggggactgatctcaaaattccagaattccctgtacatctgttcacgtgcttgtgtccaggtgtgacttgtaaactgtctagtgtttgcattaaataaaatggcaccgagc

SEQ ID NO: 5219 - DNA, 3604 bp, Homo sapiens
  source 1..3604: mol_type = unassigned DNA
gctttgggcgggaccctgcagaggcggcggggctcctcctcccgctcctcctcggcctccccttcgggcgctctcgcgctaactgtgctcctccggggccctccgcctgctcccagccatggtggcctggcgctcggcgttccttgtctgcctcgctttctccttggccaccctggtccagcgaggatctggggactttgatgattttaacctggaggatgcagtgaaagaaacttcctcagtaaagcagccatgggaccacaccaccaccaccacaaccaataggccaggaaccaccagagctccggcaaaacctccaggtagtggattggacttggctgatgctttggatgatcaagatgatggccgcaggaaaccgggtataggaggaagagagagatggaaccatgtaaccaccacgaccaagaggccagtaaccaccagagctccagcaaatactttaggaaatgattttgacttggctgatgccctggatgatcgaaatgatcgagatgatggccgcaggaaaccaattgctggaggaggaggtttttcagacaaggatcttgaagacatagtagggggtggagaatacaaacctgacaagggtaaaggtgatggccggtacggcagcaatgacgaccctggatctggcatggtggcagagcctggcaccattgccggggtggccagcgccctggccatggccctcatcggtgccgtctccagctacatctcctaccagcagaagaagttctgcttcagcattcagcagggtctcaacgcagactacgtgaagggagagaacctggaagccgtggtatgtgaggaaccccaagtgaaatactccacgttgcacacgcagtctgcagagccgccgccgccgcccgaaccagcccggatctgagggccctgtccagctgcaggcatgcacaatggtgccaccgcttgtcacccggctccccccaccccttcatttggacccgcagctgctgtgctgctctgtgccatcggctccttgttggtctgagtttcccggatgagctctgggtgtttgtgagtttggtttctctgccctgccccaagcgtgctgagacttggtgccgaaattcaagagccagctctgatagaaagccagcaccagcctcgggagctgctgagccaccaactcccaaagccagcctgcctccagctttactgagcacaggatgcgggggccaagatgatgctgaggcctgatgacatttatgcttaggggacaagagtttgaactcaagggactgtgacccctgcacactggagtggctcattgtggcaggtttctgccaatagacagcccctgacagtggcctcaaggagctgcaggtggggggctcagcctgcacccacttggagcccctgcaaggagcgaaccggtcagcaccaagtaacaccacacacacgcagcacccaggatgatggtttcacttcagtcttccccatcccaggttttatgttgctgggcttccggagagccggtccaagcggaggctttcagtgatttaagtacaaacatgcatctcgtgatagtcctgccttgagagcttaggaatcttccggataagtatgaagcaattcgtaggcctgtttcccatctgattccatagggggctgggtgtggccttcgggttgacatgagaaaggtctttagcaatcatttctgcaccggagatgagttttatcctgtgttggggagaggtgctcaccctccaccctgtgtccctgttttggtagcaagagtgaccgatgtcaagaacgagcatcaaagccagaatcctgcttgtttgcttaaaaatgtaattgggggcggcgggggaggagaggggaaagagacattcgcttggtttagtgaaacgcaggtgactttgtagctctgtggtcagcctacttgtctgctctgagggagagtgcgtggggagccatgctcaccgtggcaaacacaggaaccccatgactcgcccctcacctggcgtggagctgcctggtttgggctggagcagagctggtttcctggaatgttcctttggcccacatatggttctgtcccggtgagctctgttgtcagaggctcacgggacagaaccacatgctagggtctagggcccctgtctactgatagtcagtttgctgtgtcagaaagcacttctgaaagcagatatgagtcaccagacaggcaggatcttacaaaactcacgggcctctttggtctgcatgatggccccatgcgtttcataggctgtccactgagcgggattgtctgctgagtgggatgagccaactccagtttcttaaggaaaccactggaatctgcagcccccacatgcatctgtctaacgcatgcctcgtgttcgttttgcaaacatgcctgtggtggagggtggtcagttgtagccctgtgcgtctcaaggctgccttgtgaggccattcccagtgcgtgcccttgagctccttaccaccccttttcctgctcggccctttaatccctgacagacctggactgtgtggctgaagggggacctgcagcactgcagaaatgcctctgcgtggtgccatgaaggaaagaaaccttggcctggtctcgagaagcttcccatgcttcaggaagttagtaagggtggggtggcttgcaggattggcctgtttccagggcctcccacactcattggccagattgtgaactttgtcaggcttgtccctccctgataccaagtatgtcgagaaccgatggccccaccctctggctggtgctgggccggaggtggctatggaggattttggcatgcgtggcctgtcgccacctggacagcgtgacctcaggggttgtccactttacctttatggtgaggcctgtcggatggctaagtccttgaaaccctagagctgtgacgtagaatatgtgctgtctgtgagaccgtgttcccaggagcactgactgcagttgagagagacccattttgctctcccttaccgccccccgccccgggtgctttctgcacaaagcctagagcctggcactcaagcccaccggtggcagctcctagtgactggacatgcctggaagacccctcagccttctgtttgcagaacgttcatttcaggagcttctccttcccacagacatcttacacttgctcgacactgccacctgcagaagcctggcgggctctggtcaccatgtgtctatctgaaggttgcactggccagcatgggcctgtcccaagcgagaggggagacacagtggactgaaaggactggttgaaagtggccaatctctatcagcttaatttggcagagaaaatttgtaacaactctgagcacatgctgggtgaagtcacagctcaaggaaagataaagctgggcggaaggaggtgtgcgtggcttctggggtgggacccagaggggaggctctgggacaggggctggggttcagtgccagggccctgaggaagaaatggggactgatctcaaaattccagaattccctgtacatctgttcacgtgcttgtgtccaggtgtgacttgtaaactgtctagtgtttgcattaaataaaatggcaccgagcag

SEQ ID NO: 5220 - DNA, 966 bp, Homo sapiens
  source 1..966: mol_type = unassigned DNA
gaaacttcctcagtaaagcagccatgggaccacaccaccaccaccacaaccaataggccaggaaccaccagagctccggcaaaacctccaggtagtggattggacttggctgatgctttggatgatcaagatgatggccgcaggaaaccgggtataggaggaagagagagatggaaccatgtaaccaccacgaccaagaggccagtaaccaccagagctccagcaaatactttaggaaatgattttgacttggctgatgccctggatgatcgaaatgatcgagatgatggccgcaggaaaccaattgctggaggaggaggtttttcagacaaggatcttgaagacatagtagggggtggagaatacaaacctgacaagggtaaaggtgatggccggtacggcagcaatgacgaccctggatctggtgggtttctgaatcctgaggctcctgttggccatgtgaaaggaaaatgaatctcaggaccccaaaatcactaagccaagggaaaagtcaagctagaaactgcatcaggcaaacgtgcctcccattctactcctaaataagatagctgcaaagatggaaaaagctgcacgcctccctcacaatttgcctacaaagaaatttcttatgggcctcaatatctttaccctaaaacagttctgtgaatttcaccctggcaatacaaactgatagctgatctttacagagggagagagagccgtccctctgctcccctgatacaaatgcatctctggttgcttcctctgcccaattgcttatgtaaaaatgcaggttcactgagccagacaaaattgtgtattcagtgaaaggctgatcaaggactcaaaagaatgcaaccttttgtctctttctcttatctccctatgacctggaagcaccccacctctacccctgctttgagttgtcccacctttctggaccaaaccaatgtacgtcttacacat

SEQ ID NO: 5221 - DNA, 3493 bp, Homo sapiens
  source 1..3493: mol_type = unassigned DNA
gcagcctcgccccgccccccggcctaaccccagcccaggcgccctcaggcgccggctctctagcgcgcccgacctccatcttcccggggccgcgccgcgcgcgcgcgcgggctttgggcgggaccctgcagaggcggcggggctcctcctcccgctcctcctcggcctccccttcgggcgctctcgcgctaactgtgctcctccggggccctccgcctgctcccagccatggtggcctggcgctcggcgttccttgtctgcctcgctttctccttggccaccctggtccagcgaggatctggggactttgatgattttaacctggaggatgcagtgaaagaaacttcctcagtaaagcagccatgggaccacaccaccaccaccacaaccaataggccaggaaccaccagagctccggcaaaacctccaggtagtggattggacttggctgatgctttggatgatcaagatgatggccgcaggaaaccgggtataggaggaagaggtgatggccggtacggcagcaatgacgaccctggatctggcatggtggcagagcctggcaccattgccggggtggccagcgccctggccatggccctcatcggtgccgtctccagctacatctcctaccagcagaagaagttctgcttcagcattcagcagggtctcaacgcagactacgtgaagggagagaacctggaagccgtggtatgtgaggaaccccaagtgaaatactccacgttgcacacgcagtctgcagagccgccgccgccgcccgaaccagcccggatctgagggccctgtccagctgcaggcatgcacaatggtgccaccgcttgtcacccggctccccccaccccttcatttggacccgcagctgctgtgctgctctgtgccatcggctccttgttggtctgagtttcccggatgagctctgggtgtttgtgagtttggtttctctgccctgccccaagcgtgctgagacttggtgccgaaattcaagagccagctctgatagaaagccagcaccagcctcgggagctgctgagccaccaactcccaaagccagcctgcctccagctttactgagcacaggatgcgggggccaagatgatgctgaggcctgatgacatttatgcttaggggacaagagtttgaactcaagggactgtgacccctgcacactggagtggctcattgtggcaggtttctgccaatagacagcccctgacagtggcctcaaggagctgcaggtggggggctcagcctgcacccacttggagcccctgcaaggagcgaaccggtcagcaccaagtaacaccacacacacgcagcacccaggatgatggtttcacttcagtcttccccatcccaggttttatgttgctgggcttccggagagccggtccaagcggaggctttcagtgatttaagtacaaacatgcatctcgtgatagtcctgccttgagagcttaggaatcttccggataagtatgaagcaattcgtaggcctgtttcccatctgattccatagggggctgggtgtggccttcgggttgacatgagaaaggtctttagcaatcatttctgcaccggagatgagttttatcctgtgttggggagaggtgctcaccctccaccctgtgtccctgttttggtagcaagagtgaccgatgtcaagaacgagcatcaaagccagaatcctgcttgtttgcttaaaaatgtaattgggggcggcgggggaggagaggggaaagagacattcgcttggtttagtgaaacgcaggtgactttgtagctctgtggtcagcctacttgtctgctctgagggagagtgcgtggggagccatgctcaccgtggcaaacacaggaaccccatgactcgcccctcacctggcgtggagctgcctggtttgggctggagcagagctggtttcctggaatgttcctttggcccacatatggttctgtcccggtgagctctgttgtcagaggctcacgggacagaaccacatgctagggtctagggcccctgtctactgatagtcagtttgctgtgtcagaaagcacttctgaaagcagatatgagtcaccagacaggcaggatcttacaaaactcacgggcctctttggtctgcatgatggccccatgcgtttcataggctgtccactgagcgggattgtctgctgagtgggatgagccaactccagtttcttaaggaaaccactggaatctgcagcccccacatgcatctgtctaacgcatgcctcgtgttcgttttgcaaacatgcctgtggtggagggtggtcagttgtagccctgtgcgtctcaaggctgccttgtgaggccattcccagtgcgtgcccttgagctccttaccaccccttttcctgctcggccctttaatccctgacagacctggactgtgtggctgaagggggacctgcagcactgcagaaatgcctctgcgtggtgccatgaaggaaagaaaccttggcctggtctcgagaagcttcccatgcttcaggaagttagtaagggtggggtggcttgcaggattggcctgtttccagggcctcccacactcattggccagattgtgaactttgtcaggcttgtccctccctgataccaagtatgtcgagaaccgatggccccaccctctggctggtgctgggccggaggtggctatggaggattttggcatgcgtggcctgtcgccacctggacagcgtgacctcaggggttgtccactttacctttatggtgaggcctgtcggatggctaagtccttgaaaccctagagctgtgacgtagaatatgtgctgtctgtgagaccgtgttcccaggagcactgactgcagttgagagagacccattttgctctcccttaccgccccccgccccgggtgctttctgcacaaagcctagagcctggcactcaagcccaccggtggcagctcctagtgactggacatgcctggaagacccctcagccttctgtttgcagaacgttcatttcaggagcttctccttcccacagacatcttacacttgctcgacactgccacctgcagaagcctggcgggctctggtcaccatgtgtctatctgaaggttgcactggccagcatgggcctgtcccaagcgagaggggagacacagtggactgaaaggactggttgaaagtggccaatctctatcagcttaatttggcagagaaaatttgtaacaactctgagcacatgctgggtgaagtcacagctcaaggaaagataaagctgggcggaaggaggtgtgcgtggcttctggggtgggacccagaggggaggctctgggacaggggctggggttcagtgccagggccctgaggaagaaatggggactgatctcaaaattccagaattccctgtacatctgttcacgtgcttgtgtccaggtgtgacttgtaaactgtctagtgtttgcattaaataaaatggcaccgagc

SEQ ID NO: 5222 - DNA, 3554 bp, Homo sapiens
  source 1..3554: mol_type = unassigned DNA
aactgtgctcctccggggccctccgcctgctcccagccatggtggcctggcgctcggcgttccttgtctgcctcgctttctccttggccaccctggtccagcgaggatctggggactttgatgattttaacctggaggatgcagtgaaagaaacttcctcagtaaagcagccatgggaccacaccaccaccaccacaaccaataggccaggaaccaccagagctccggcaaaacctccagggcccactgaaggtagtggattggacttggctgatgctttggatgatcaagatgatggccgcaggaaaccgggtataggaggaagagagagatggaaccatgtaaccaccacgaccaagaggccagtaaccaccagagctccagcaaatactttaggaaatgattttgacttggctgatgccctggatgatcgaaatgatcgagatgatggccgcaggaaaccaattgctggaggaggaggtttttcagacaaggatcttgaagacatagtagggggtggagaatacaaacctgacaagggtaaaggtgatggccggtacggcagcaatgacgaccctggatctggcatggtggcagagcctggcaccattgccggggtggccagcgccctggccatggccctcatcggtgccgtctccagctacatctcctaccagcagaagaagttctgcttcagcattcagcatgcagcagcaggtcaagagggtctcaacgcagactacgtgaagggagagaacctggaagccgtggtatgtgaggaaccccaagtgaaatactccacgttgcacacgcagtctgcagagccgccgccgccgcccgaaccagcccggatctgagggccctgtccagctgcaggcatgcacaatggtgccaccgcttgtcacccggctccccccaccccttcatttggacccgcagctgctgtgctgctctgtgccatcggctccttgttggtctgagtttcccggatgagctctgggtgtttgtgagtttggtttctctgccctgccccaagcgtgctgagacttggtgccgaaattcaagagccagctctgatagaaagccagcaccagcctcgggagctgctgagccaccaactcccaaagccagcctgcctccagctttactgagcacaggatgcgggggccaagatgatgctgaggcctgatgacatttatgcttaggggacaagagtttgaactcaagggactgtgacccctgcacactggagtggctcattgtggcaggtttctgccaatagacagcccctgacagtggcctcaaggagctgcaggtggggggctcagcctgcacccacttggagcccctgcaaggagcgaaccggtcagcaccaagtaacaccacacacacgcagcacccaggatgatggtttcacttcagtcttccccatcccaggttttatgttgctgggcttccggagagccggtccaagcggaggctttcagtgatttaagtacaaacatgcatctcgtgatagtcctgccttgagagcttaggaatcttccggataagtatgaagcaattcgtaggcctgtttcccatctgattccatagggggctgggtgtggccttcgggttgacatgagaaaggtctttagcaatcatttctgcaccggagatgagttttatcctgtgttggggagaggtgctcaccctccaccctgtgtccctgttttggtagcaagagtgaccgatgtcaagaacgagcatcaaagccagaatcctgcttgtttgcttaaaaatgtaattgggggcggcgggggaggagaggggaaagagacattcgcttggtttagtgaaacgcaggtgactttgtagctctgtggtcagcctacttgtctgctctgagggagagtgcgtggggagccatgctcaccgtggcaaacacaggaaccccatgactcgcccctcacctggcgtggagctgcctggtttgggctggagcagagctggtttcctggaatgttcctttggcccacatatggttctgtcccggtgagctctgttgtcagaggctcacgggacagaaccacatgctagggtctagggcccctgtctactgatagtcagtttgctgtgtcagaaagcacttctgaaagcagatatgagtcaccagacaggcaggatcttacaaaactcacgggcctctttggtctgcatgatggccccatgcgtttcataggctgtccactgagcgggattgtctgctgagtgggatgagccaactccagtttcttaaggaaaccactggaatctgcagcccccacatgcatctgtctaacgcatgcctcgtgttcgttttgcaaacatgcctgtggtggagggtggtcagttgtagccctgtgcgtctcaaggctgccttgtgaggccattcccagtgcgtgcccttgagctccttaccaccccttttcctgctcggccctttaatccctgacagacctggactgtgtggctgaagggggacctgcagcactgcagaaatgcctctgcgtggtgccatgaaggaaagaaaccttggcctggtctcgagaagcttcccatgcttcaggaagttagtaagggtggggtggcttgcaggattggcctgtttccagggcctcccacactcattggccagattgtgaactttgtcaggcttgtccctccctgataccaagtatgtcgagaaccgatggccccaccctctggctggtgctgggccggaggtggctatggaggattttggcatgcgtggcctgtcgccacctggacagcgtgacctcaggggttgtccactttacctttatggtgaggcctgtcggatggctaagtccttgaaaccctagagctgtgacgtagaatatgtgctgtctgtgagaccgtgttcccaggagcactgactgcagttgagagagacccattttgctctcccttaccgccccccgccccgggtgctttctgcacaaagcctagagcctggcactcaagcccaccggtggcagctcctagtgactggacatgcctggaagacccctcagccttctgtttgcagaacgttcatttcaggagcttctccttcccacagacatcttacacttgctcgacactgccacctgcagaagcctggcgggctctggtcaccatgtgtctatctgaaggttgcactggccagcatgggcctgtcccaagcgagaggggagacacagtggactgaaaggactggttgaaagtggccaatctctatcagcttaatttggcagagaaaatttgtaacaactctgagcacatgctgggtgaagtcacagctcaaggaaagataaagctgggcggaaggaggtgtgcgtggcttctggggtgggacccagaggggaggctctgggacaggggctggggttcagtgccagggccctgaggaagaaatggggactgatctcaaaattccagaattccctgtacatctgttcacgtgcttgtgtccaggtgtgacttgtaaactgtctagtgtttgcattaaataaaatggcaccgagcag

SEQ ID NO: 5223 - DNA, 988 bp, Homo sapiens
  source 1..988: mol_type = unassigned DNA
gctaactgtgctcctccggggccctccgcctgctcccagccatggtggcctggcgctcggcgttccttgtctgcctcgctttctccttggccaccctggtccagcgaggatctggggactttgatgattttaacctggaggatgcagtgaaagaaacttcctcagtaaagcagagatggaaccatgtaaccaccacgaccaagaggccagtaaccaccagagctccagcaaatactttaggaaatgattttgacttggctgatgccctggatgatcgaaatgatcgagatgatggccgcaggaaaccaattgctggaggaggaggtttttcagacaaggatcttgaagacatagtagggggtggagaatacaaacctgacaagggtaaaggtgatggccggtacggcagcaatgacgaccctggatctggcatggtggcagagcctggcaccattgccggggtggccagcgccctggccatggccctcatcggtgccgtctccagctacatctcctaccagcagaagaagttctgcttcagcattcagcagggtctcaacgcagactacgtgaagggagagaacctggaagccgtggtatgtgaggaaccccaagtgaaatactccacgttgcacacgcagtctgcagagccgccgccgccgcccgaaccagcccggatctgagggccctgtccagctgcaggcatgcacaatggtgccaccgcttgtcacccggctccccccaccccttcatttggacccgcagctgctgtgctgctctgtgccatcggctccttgttggtctgagtttcccggatgagctctgggtgtttgtgagtttggtttctctgccctgccccaagcgtgctgagacttggtgccgaaattcaagagccagctctgatagaaagccagcaccagcctcgggagctgctgagccaccaactcccaaagccagcctgcctccagctttactgagcacaggatgc

SEQ ID NO: 5224 - DNA, 4137 bp, Homo sapiens
  source 1..4137: mol_type = unassigned DNA
atcactttggaagccgggggaagactttgccctgccctgagagctggtctgcgtttcccaggcgcggcggcggcggagcagcagctgcagcagccgagtccaaataggagcggccacagccaggggcgtgagcgccccgcgcggagcgagctcgggttcccctcggaatgtccccggggcgcccggcgcgctgaccccgaagccgcctccgccttcggcgcctgctgcctccctcggccaggcttgttgttcgggactgtgagcttcctggctcctgggcagtggggaagcccccgggggcgagtgacttcagctggccacgacccagccctcccccgtgcgtatctcgcttaagatggcagcggagtcaggggaactaatcggggcttgtgagttcatgaaagatcggttatattttgctactttaaggaatagaccaaaaagcacagtaaatacccactatttctccatcgatgaggagctggtctatgaaaatttctatgcagattttggaccgctgaacttggcaatggtgtacagatattgctgcaaactaaacaagaaactaaaatcatacagtttgtcaagaaagaaaatagtgcactacacctgttttgaccaacggaaaagagcaaatgcagcatttttgataggtgcctatgcagtaatctatttaaagaagacaccagaagaagcctacagagcactcctgtctggctcaaaccccccctatcttccattcagggatgcttcctttggaaattgcacttacaatctcaccattctcgactgtttgcagggaatcagaaagggattacaacatggattttttgactttgagacatttgatgtggatgaatatgaacattatgagcgagttgaaaatggtgacttcaactggattgttccaggaaaatttttagcatttagtggaccacatcctaaaagcaaaattgagaatggttatcctcttcacgcccctgaagcctactttccttatttcaaaaagcataatgtgactgcagttgtgaggctaaacaaaaagatttatgaggcaaagcgcttcacagacgctggcttcgagcactatgacctcttcttcatagatggcagcacacccagtgacaacatcgtgcgaaggttcctgaacatctgtgagaacaccgaaggggccatcgccgttcactgcaaagctggtcttggaagaacagggacattgatagcctgttatgtaatgaaacactacaggtttacacatgctgaaataattgcttggattagaatatgccggccaggctctattataggaccccagcagcacttcctggaagaaaaacaagcatcgttgtgggtccaaggagacattttccgatccaaactgaaaaatcgaccatccagtgaaggaagtattaataaaattctttctggcctagatgatatgtctattggtggaaatctttcaaaaacacaaaacatggaacgatttggagaggataacttagaagatgatgatgtggaaatgaaaaatggtataacccagggagacaaactacgtgccttaaaaagtcagagacagccacgtacctcaccatcctgtgcatttaggtcagatgatacaaaaggacatccaagagcagtgtcccagcctttcagattaagttcatccctgcaaggatctgcagttactttgaagacatcaaaaatggcactgtccccttcagcaacggccaagaggatcaacagaacttctttgtcttcgggtgccactgtaagaagcttttccataaactcccggctagccagttctctagggaacttgaatgctgcaacagatgatccagagaacaaaaagacctcctcatcctctaaggcaggcttcacagccagcccgtttaccaacctcttgaatggcagctcccagccaactaccagaaattaccctgagctcaacaataatcagtacaacagaagcagcaacagcaacgggggcaacctgaacagccccccaggcccccacagcgccaagacagaggagcacaccaccatcctccgaccctcctacaccgggctttcttcttcttcagcgagattcctgagccgttctatcccttcccttcagtctgaatatgttcattactaaggccttgccactccagtgaaagctgttcttctcttagacacaatttcttcatctggacgagcagtggagagggaaagcaacttcttgctggaagaatatctctgccttcttaccttaaattaaaaagagcactaagataacaccttcaagagacttgaaaacagaaaactggttaatgactactataaatgcactgaaactatgtttatggagatttccatacttttaaagacagttttaatgttgaatttggtattttgaagggttatttttaatgtattttggtaatacatttattattatatttacatgtacagtgttacattatatatgtattgtgaactttaaaagactattttgataaatttataaatatataaaattatgtaaaaactacactatattttgatttagattttcctgctgtttgctaccaaaaatttgtattttaaatctgtttagttttagtatggttttgtctctaatgaataaataattccttcttattaagaagaagtaagggagaaagtttttagaaagtgatttttatgctcgcactataaatatggcaggtcagttcattcttttgggaagtcagtttagttacactgagtttatccaagtttatctctaccaagagtataatggcatgggatggcttatttaggacaattccctttcctattgtttttgttgctgagccaatttgagttagttttgcatcctggggggctttaaaatacagcatgcagtgaaagatcagaattcactgaatatttcttctgagagcatggtttcatggtttttctctatgaaatgactcaatattccaaatgtttttttttccttcctcctttcaaaagagttcttaacccaattaggatatcctgctttgggtatgaggttgttgttgcctgtaatcacacatggtttgacatcagttttaaatcaatggagagaaaaaactgaaaaagatgctgctaagtagttctctgtattaaaggagatatttttaaaacagggtacaaccccctgctgcacacgctagcatatctggaacctactatgaaaatgaaaggacccttataggtactcacagccctttcatgtaagtatgatctgatatttaggtcttcagaagcctgtaggtttcatttctatgaggaatcgaggagcgttacatcctgatatccttccaggctgcttaagaatggactgcttcgacactgaaagtgctagttaaatggattcatatgaagtgctttactcccaaccattgagttatttataatgtatttattaggggagggtaccttgagtctattatatatgcttcatcaaaacatcttgttcatgttttatgtttttaaaaaaggcatttgaatgaatgtttgactcaggtttgttaaattaaccttcagtaactgcagtaccaaaaattacactcaactgatgaaaaaaacgaattgtatgatttaggaatcaaaaactaaaataagtggaattatgtatcttttctaaagttaaaaaagtaaaatattttattatgagttattataaaaattggttaattgtataggaagatgacagtatttttttcaagttatcataaaaagtaattcagatgacatttgagaagtaggggaaagggaatcatgttgacagttttagttctgtgaacactaatttgtgtgaagctattaaaatgattgtaaagttgactactgtaaatttcccataattatgtgtgtatatgtgtcatatgtatgtacatgtatatgtctaaaaattactttacacatgtgcctacatagacacaccaagaagtggatgtatataatatagaaagtatatagcaaagtaattttactctgataataaaaattgtttgacatgtattttgttatgaatagtttatcttccaaaagatattttgctctattttaaagtgtagaagaatacactgctaataaataataaaagttttattcaattta

SEQ ID NO: 5225 - DNA, 2417 bp, Homo sapiens
  source 1..2417: mol_type = unassigned DNA
cgaaggaggatccggagcagctgctgccagcccgcgggcactgaagtcctcccggctgccgctcgagtagccacgggcgcgatcgggaccagaagtctcctcctccatgatcactttggaagccgggggaagactttgccctgccctgagagctggtctgcgtttcccaggcgcggcggcggcggagcagcagctgcagcagccgagtccaaataggagcggccacagccaggggcgtgagcgccccgcgcggagcgagctcgggttcccctcggaatgtccccggggcgcccggcgcgctgaccccgaagccgcctccgccttcggcgcctgctgcctccctcggccaggcttgttgttcgggactgtgagcttcctggctcctgggcagtggggaagcccccgggggcgagtgacttcagctggccacgacccagccctcccccgtgcgtatctcgcttaagatggcagcggagtcaggggaactaatcggggcttgtgagttcatgaaagatcggttatattttgctactttaaggaatagaccaaaaagcacagtaaatacccactatttctccatcgatgaggagctggtctatgaaaatttctatgcagattttggaccgctgaacttggcaatggtgtacagatattgctgcaaactaaacaagaaactaaaatcatacagtttgtcaagaaagaaaatagtgcactacacctgttttgaccaacggaaaagagcaaatgcagcatttttgataggtgcctatgcagtaatctatttaaagaagacaccagaagaagcctacagagcactcctgtctggctcaaaccccccctatcttccattcagggatgcttcctttggaaattgcacttacaatctcaccattctcgactgtttgcagggaatcagaaagggattacaacatggattttttgactttgagacatttgatgtggatgaatatgaacattatgagcgagttgaaaatggtgacttcaactggattgttccaggaaaatttttagcatttagtggaccacatcctaaaagcaaaattgagaatggttatcctcttcacgcccctgaagcctactttccttatttcaaaaagcataatgtgactgcagttgtgaggctaaacaaaaagatttatgaggcaaagcgcttcacagacgctggcttcgagcactatgacctcttcttcatagatggcagcacacccagtgacaacatcgtgcgaaggttcctgaacatctgtgagaacaccgaaggggccatcgccgttcactgcaaagctggtcttggaagaacagggacattgatagcctgttatgtaatgaaacactacaggtttacacatgctgaaataattgcttggattagaatatgccggccaggctctattataggaccccagcagcacttcctggaagaaaaacaagcatcgttgtgggtccaaggagacattttccgatccaaactgaaaaatcgaccatccagtgaaggaagtattaataaaattctttctggcctagatgatatgtctattggtggaaatctttcaaaaacacaaaacatggaacgatttggagaggataacttagaagatgatgatgtggaaatgaaaaatggtataacccagggagacaaactacgtgccttaaaaagtcagagacagccacgtacctcaccatcctgtgcatttaggtcagatgatacaaaaggacatccaagagcagtgtcccagcctttcagattaagttcatccctgcaaggatctgcagttactttgaagacatcaaaaatggcactgtccccttcagcaacggccaagaggatcaacagaacttctttgtcttcgggtgccactgtaagaagcttttccataaactcccggctagccagttctctagggaacttgaatgctgcaacagatgatccagagaacaaaaagacctcctcatcctctaaggcaggcttcacagccagcccgtttaccaacctcttgaatggcagctcccagccaactaccagaaattaccctgagctcaacaataatcagtacaacagaagcagcaacagcaacgggggcaacctgaacagccccccaggcccccacagcgccaagacagaggagcacaccaccatcctccgaccctcctacaccgggctttcttcttcttcagcgagattcctgagccgttctatccctgtaagtgcgcagacaccacctcctggtcctcagaaccctgaatgcaacttctgtgccttgccttcccagccgaggctgccaccaaagaaatttaatagtgccaaggaagccttctgagcgatgccttccctctgtgctgtgaaactgtctatgcactacattctgctagctcctcttcaagtaaacgccaagtcacaa

SEQ ID NO: 5226 - DNA, 1883 bp, Homo sapiens
  source 1..1883: mol_type = unassigned DNA
ccggagcagctgctgccagcccgcgggcactgaagtcctcccggctgccgctcgagtagccacgggcgcgatcgggaccagaagtctcctcctccatgatcactttggaagccgggggaagactttgccctgccctgagagctggtctgcgtttcccaggcgcggcggcggcggagcagcagctgcagcagccgagtccaaataggagcggccacagccaggggcgtgagcgccccgcgcggagcgagctcgggttcccctcggaatgtccccggggcgcccggcgcgctgaccccgaagccgcctccgccttcggcgcctgctgcctccctcggccaggcttgttgttcgggactgtgagcttcctggctcctgggcagtggggaagcccccgggggcgagtgacttcagctggccacgacccagccctcccccgtgcgtatctcgcttaagatggcagcggagtcaggggaactaatcggggcttgtgagttcatgaaagatcggttatattttgctactttaaggaatagaccaaaaagcacagtaaatacccactatttctccatcgatgaggagctggtctatgaaaatttctatgcagattttggaccgctgaacttggcaatggtgtacagatattgctgcaaactaaacaagaaactaaaatcatacagtttgtcaagaaagaaaatagtgcactacacctgttttgaccaacggaaaagagcaaatgcagcatttttgataggtgcctatgcagtaatctatttaaagaagacaccagaagaagcctacagagcactcctgtctggctcaaaccccccctatcttccattcagggatgcttcctttggaaattgcacttacaatctcaccattctcgactgtttgcagggaatcagaaagggattacaacatggattttttgactttgagacatttgatgtggatgaatatgaacattatgagcgagttgaaaatggtgacttcaactggattgttccaggaaaatttttagcatttagtggaccacatcctaaaagcaaaattgagaatggttatcctcttcacgcccctgaagcctactttccttatttcaaaaagcataatgtgactgcagttgtgaggctaaacaaaaagatttatgaggcaaagcgcttcacagacgctggcttcgagcactatgacctcttcttcatagatggcagcacacccagtgacaacatcgtgcgaaggttcctgaacatctgtgagaacaccgaaggggccatcgccgttcactgcaaagctggtcttggaagaacagggacattgatagcctgttatgtaatgaaacactacaggtttacacatgctgaaataattgcttggattagaatatgccggccaggctctattataggaccccagcagcacttcctggaagaaaaacaagcatcgttgtgggtccaaggagacattttccgatccaaactgaaaaatcgaccatccagtgaaggaagtattaataaaattctttctggcctagatgatatgtctattggtggaaatctttcaaaaacacaaaacatggaacgatttggagaggtaagttttccctaggagattctatcttcttaaaactgatgttctgcatttgtttctcagttggacctatataacatagcagtgtcttttctctggatgccacgagtaccaagtttttagaagtagagccatccgtctatatagcaagaagcagaggaaagaaaccaattgcccttaaaaaaaaaaaagctataatttaaggagtaaattataaaggaggctactctggtaaggggtaatatttatagaaaggaaacagaaaagcaaactttctatttgaaaattaaaataaa

SEQ ID NO: 5227 - DNA, 4181 bp, Homo sapiens
  source 1..4181: mol_type = unassigned DNA
agagtaactgctgaaaggaggtggcgaaggaggatccggagcagctgctgccagcccgcgggcactgaagtcctcccggctgccgctcgagtagccacgggcgcgatcgggaccagaagtctcctcctccatgatcactttggaagccgggggaagactttgccctgccctgagagctggtctgcgtttcccaggcgcggcggcggcggagcagcagctgcagcagccgagtccaaataggagcggccacagccaggggcgtgagcgccccgcgcggagcgagctcgggttcccctcggaatgtccccggggcgcccggcgcgctgaccccgaagccgcctccgccttcggcgcctgctgcctccctcggccaggcttgttgttcgggactgtgagcttcctggctcctgggcagtggggaagcccccgggggcgagtgacttcagctggccacgacccagccctcccccgtgcgtatctcgcttaagatggcagcggagtcaggggaactaatcggggcttgtgagttcatgaaagatcggttatattttgctactttaaggaatagaccaaaaagcacagtaaatacccactatttctccatcgatgaggagctggtctatgaaaatttctatgcagattttggaccgctgaacttggcaatggtgtacagatattgctgcaaactaaacaagaaactaaaatcatacagtttgtcaagaaagaaaatagtgcactacacctgttttgaccaacggaaaagagcaaatgcagcatttttgataggtgcctatgcagtaatctatttaaagaagacaccagaagaagcctacagagcactcctgtctggctcaaaccccccctatcttccattcagggatgcttcctttggaaattgcacttacaatctcaccattctcgactgtttgcagggaatcagaaagggattacaacatggattttttgactttgagacatttgatgtggatgaatatgaacattatgaggttatcctcttcacgcccctgaagcctactttccttatttcaaaaagcataatgtgactgcagttgtgaggctaaacaaaaagatttatgaggcaaagcgcttcacagacgctggcttcgagcactatgacctcttcttcatagatggcagcacacccagtgacaacatcgtgcgaaggttcctgaacatctgtgagaacaccgaaggggccatcgccgttcactgcaaagctggtcttggaagaacagggacattgatagcctgttatgtaatgaaacactacaggtttacacatgctgaaataattgcttggattagaatatgccggccaggctctattataggaccccagcagcacttcctggaagaaaaacaagcatcgttgtgggtccaaggagacattttccgatccaaactgaaaaatcgaccatccagtgaaggaagtattaataaaattctttctggcctagatgatatgtctattggtggaaatctttcaaaaacacaaaacatggaacgatttggagaggataacttagaagatgatgatgtggaaatgaaaaatggtataacccagggagacaaactacgtgccttaaaaagtcagagacagccacgtacctcaccatcctgtgcatttaggtcagatgatacaaaaggacatccaagagcagtgtcccagcctttcagattaagttcatccctgcaaggatctgcagttactttgaagacatcaaaaatggcactgtccccttcagcaacggccaagaggatcaacagaacttctttgtcttcgggtgccactgtaagaagcttttccataaactcccggctagccagttctctagggaacttgaatgctgcaacagatgatccagagaacaaaaagacctcctcatcctctaaggcaggcttcacagccagcccgtttaccaacctcttgaatggcagctcccagccaactaccagaaattaccctgagctcaacaataatcagtacaacagaagcagcaacagcaacgggggcaacctgaacagccccccaggcccccacagcgccaagacagaggagcacaccaccatcctccgaccctcctacaccgggctttcttcttcttcagcgagattcctgagccgttctatcccttcccttcagtctgaatatgttcattactaaggccttgccactccagtgaaagctgttcttctcttagacacaatttcttcatctggacgagcagtggagagggaaagcaacttcttgctggaagaatatctctgccttcttaccttaaattaaaaagagcactaagataacaccttcaagagacttgaaaacagaaaactggttaatgactactataaatgcactgaaactatgtttatggagatttccatacttttaaagacagttttaatgttgaatttggtattttgaagggttatttttaatgtattttggtaatacatttattattatatttacatgtacagtgttacattatatatgtattgtgaactttaaaagactattttgataaatttataaatatataaaattatgtaaaaactacactatattttgatttagattttcctgctgtttgctaccaaaaatttgtattttaaatctgtttagttttagtatggttttgtctctaatgaataaataattccttcttattaagaagaagtaagggagaaagtttttagaaagtgatttttatgctcgcactataaatatggcaggtcagttcattcttttgggaagtcagtttagttacactgagtttatccaagtttatctctaccaagagtataatggcatgggatggcttatttaggacaattccctttcctattgtttttgttgctgagccaatttgagttagttttgcatcctggggggctttaaaatacagcatgcagtgaaagatcagaattcactgaatatttcttctgagagcatggtttcatggtttttctctatgaaatgactcaatattccaaatgtttttttttccttcctcctttcaaaagagttcttaacccaattaggatatcctgctttgggtatgaggttgttgttgcctgtaatcacacatggtttgacatcagttttaaatcaatggagagaaaaaactgaaaaagatgctgctaagtagttctctgtattaaaggagatatttttaaaacagggtacaaccccctgctgcacacgctagcatatctggaacctactatgaaaatgaaaggacccttataggtactcacagccctttcatgtaagtatgatctgatatttaggtcttcagaagcctgtaggtttcatttctatgaggaatcgaggagcgttacatcctgatatccttccaggctgcttaagaatggactgcttcgacactgaaagtgctagttaaatggattcatatgaagtgctttactcccaaccattgagttatttataatgtatttattaggggagggtaccttgagtctattatatatgcttcatcaaaacatcttgttcatgttttatgtttttaaaaaaggcatttgaatgaatgtttgactcaggtttgttaaattaaccttcagtaactgcagtaccaaaaattacactcaactgatgaaaaaaacgaattgtatgatttaggaatcaaaaactaaaataagtggaattatgtatcttttctaaagttaaaaaagtaaaatattttattatgagttattataaaaattggttaattgtataggaagatgacagtatttttttcaagttatcataaaaagtaattcagatgacatttgagaagtaggggaaagggaatcatgttgacagttttagttctgtgaacactaatttgtgtgaagctattaaaatgattgtaaagttgactactgtaaatttcccataattatgtgtgtatatgtgtcatatgtatgtacatgtatatgtctaaaaattactttacacatgtgcctacatagacacaccaagaagtggatgtatataatatagaaagtatatagcaaagtaattttactctgataataaaaattgtttgacatgtattttgttatgaatagtttatcttccaaaagatattttgctctattttaaagtgtagaagaatacactgctaataaataataaaagttttattcaattt

SEQ ID NO: 5228 - DNA, 841 bp, Homo sapiens
  source 1..841: mol_type = unassigned DNA
gatgagagggcgtggagaaccagatgggaaactttttgtcccgtgagaacaaagtacaagttatatcagagtctgatcggttatattttgctactttaaggaatagaccaaaaagcacagtaaatacccactatttctccatcgatgaggagctggtctatgaaaatttctatgcagattttggaccgctgaacttggcaatggtgtacagatattgctgcaaactaaacaagaaactaaaatcatacagtttgtcaagaaagaaaatagtgcactacacctgttttgaccaacggaaaagagcaaatgcagcatttttgataggtgcctatgcagtaatctatttaaagaagacaccagaagaagcctacagagcactcctgtctggctcaaaccccccctatcttccattcagggatgcttcctttggaaattgcacttacaatctcaccattctcgactgtttgcagggaatcagaaagggattacaacatggattttttgactttgagacatttgatgtggatgaatatgaacattatgagcgagttgaaaatggtgacttcaactggattgttccaggaaaatttttagcatttagtggaccacatcctaaaagcaaaattgagaatggttatcctcttcacgcccctgaagcctactttccttatttcaaaaagcataatgtgactgcagttgtgaggctaaacaaaaagatttatgaggcaaagcgcttcacagacgctggcttcgagcactatgacctcttcttcatagatggcagcacacccagtgacaacatcgtgcgaaggttcctgaacatctgtgagaacaccgaagg

SEQ ID NO: 5229 - DNA, 2065 bp, Homo sapiens
  source 1..2065: mol_type = unassigned DNA
aggggaatttaggaatccattgaggatgcctgaatggggttgttggccctgatcacactctagagacaggcatatcatcacaggcaatcagaaatgaagaaggacattaacttgtaccctgtggaattgtcttcagttgataaaaaggacttctctatcggttatattttgctactttaaggaatagaccaaaaagcacagtaaatacccactatttctccatcgatgaggagctggtctatgaaaatttctatgcagattttggaccgctgaacttggcaatggtgtacagatattgctgcaaactaaacaagaaactaaaatcatacagtttgtcaagaaagaaaatagtgcactacacctgttttgaccaacggaaaagagcaaatgcagcatttttgataggtgcctatgcagtaatctatttaaagaagacaccagaagaagcctacagagcactcctgtctggctcaaaccccccctatcttccattcagggatgcttcctttggaaattgcacttacaatctcaccattctcgactgtttgcagggaatcagaaagggattacaacatggattttttgactttgagacatttgatgtggatgaatatgaacattatgagcgagttgaaaatggtgacttcaactggattgttccaggaaaatttttagcatttagtggaccacatcctaaaagcaaaattgagaatggttatcctcttcacgcccctgaagcctactttccttatttcaaaaagcataatgtgactgcagttgtgaggctaaacaaaaagatttatgaggcaaagcgcttcacagacgctggcttcgagcactatgacctcttcttcatagatggcagcacacccagtgacaacatcgtgcgaaggttcctgaacatctgtgagaacaccgaaggggccatcgccgttcactgcaaagctggtcttggaagaacagggacattgatagcctgttatgtaatgaaacactacaggtttacacatgctgaaataattgcttggattagaatatgccggccaggctctattataggaccccagcagcacttcctggaagaaaaacaagcatcgttgtgggtccaaggagacattttccgatccaaactgaaaaatcgaccatccagtgaaggaagtattaataaaattctttctggcctagatgatatgtctattggtggaaatctttcaaaaacacaaaacatggaacgatttggagaggataacttagaagatgatgatgtggaaatgaaaaatggtataacccagggagacaaactacgtgccttaaaaagtcagagacagccacgtacctcaccatcctgtgcatttaggtcagatgatacaaaaggacatccaagagcagtgtcccagcctttcagattaagttcatccctgcaaggatctgcagttactttgaagacatcaaaaatggcactgtccccttcagcaacggccaagaggatcaacagaacttctttgtcttcgggtgccactgtaagaagcttttccataaactcccggctagccagttctctagggaacttgaatgctgcaacagatgatccagagaacaaaaagacctcctcatcctctaaggcaggcttcacagccagcccgtttaccaacctcttgaatggcagctcccagccaactaccagaaattaccctgagctcaacaataatcagtacaacagaagcagcaacagcaacgggggcaacctgaacagccccccaggcccccacagcgccaagacagaggagcacaccaccatcctccgaccctcctacaccgggctttcttcttcttcagcgagattcctgagccgttctatccctgtaagtgcgcagacaccacctcctggtcctcagaaccctgaatgcaacttctgtgccttgccttcccagccgaggctgccaccaaagaaatttaatagtgccaaggaagccttctgagcgatgccttccctctgtgctgtgaaactgtctatgcactacattctgctagctcctcttcaagtaaacgccaagtcacaactggg

SEQ ID NO: 5230 - DNA, 1928 bp, Homo sapiens
  source 1..1928: mol_type = unassigned DNA
cttaagatggcagcggagtcaggggaactaatcggggcttgtgagttcatgaaagatcggttatattttgctactttaaggaatagaccaaaaagcacagtaaatacccactatttctccatcgatgaggagctggtctatgaaaatttctatgcagattttggaccgctgaacttggcaatggtgtacagatattgctgcaaactaaacaagaaactaaaatcatacagtttgtcaagaaagaaaatagtgcactacacctgttttgaccaacggaaaagagcaaatgcagcatttttgataggtgcctatgcagtaatctatttaaagaagacaccagaagaagcctacagagcactcctgtctggctcaaaccccccctatcttccattcagggatgcttcctttggaaattgcacttacaatctcaccattctcgactgtttgcagggaatcagaaagggattacaacatggattttttgactttgagacatttgatgtggatgaatatgaacattatgagcgagttgaaaatggtgacttcaactggattgttccaggaaaatttttagcatttagtggaccacatcctaaaagcaaaattgagaatggttatcctcttcacgcccctgaagcctactttccttatttcaaaaagcataatgtgactgcagttgtgaggctaaacaaaaagatttatgaggcaaagcgcttcacagacgctggcttcgagcactatgacctcttcttcatagatggcagcacacccagtgacaacatcgtgcgaaggttcctgaacatctgtgagaacaccgaaggggccatcgccgttcactgcaaagctggtcttggaagaacagggacattgatagcctgttatgtaatgaaacactacaggtttacacatgctgaaataattgcttggattagaatatgccggccaggctctattataggaccccagcagcacttcctggaagaaaaacaagcatcgttgtgggtccaaggagacattttccgatccaaactgaaaaatcgaccatccagtgaaggaagtattaataaaattctttctggcctagatgatatgtctattggtggaaatctttcaaaaacacaaaacatggaacgatttggagaggataacttagaagatgatgatgtggaaatgaaaaatggtataacccagggagacaaactacgtgccttaaaaagtcagagacagccacgtacctcaccatcctgtgcatttaggtcagatgatacaaaaggacatccaagagcagtgtcccagcctttcagattaagttcatccctgcaaggatctgcagttactttgaagacatcaaaaatggcactgtccccttcagcaacggccaagaggatcaacagaacttctttgtcttcgggtgccactgtaagaagcttttccataaactcccggctagccagttctctagggaacttgaatgctgcaacagatgatccagagaacaaaaagacctcctcatcctctaaggcaggcttcacagccagcccgtttaccaacctcttgaatggcagctcccagccaactaccagaaattaccctgagctcaacaataatcagtacaacagaagcagcaacagcaacgggggcaacctgaacagccccccaggcccccacagcgccaagacagaggagcacaccaccatcctccgaccctcctacaccgggctttcttcttcttcagcgagattcctgagccgttctatcccttgttcatgcctactgctagtctttaggaagccctttcttggaagccccctgctctccttaccaatttctcatctttaaataaagacatatattacctcccatgtcttctgtgaagctctccccatcccttcagtctgaatatgttcattactaaggccttgccactc

SEQ ID NO: 5231 - DNA, 1868 bp, Homo sapiens
  source 1..1868: mol_type = unassigned DNA
cacggaacagccctcctggggtccccacgagccgcgtcctgctgtgccccggcgcctacgcagcagcggccgcggccgcggtgggcacgcacggttaccccgggcagctccggccgccagctgcagccccgtcgcctcggccgcgccagccggctgcgggcacctgggggcgggctgggggcgccggccgcggcaggaggcgctgtagcgagggctgcggcgccggtcctgcggcggccgcgggaggcagcggggcaggcgctgtgggccgggctcctcctccggctcctgcgcgaccgcctcccgccgggctctgccggcgcccgccgtccccgcagcgccgctctgcgcccgccgccccgagcgcccgcgcggggctggcgggagcctcggcgggcgcgcgggcgcgcggggccatggtcgtggccccctgacgggccgcggccgcctccatgaagcggaaaagcgagcggcggtcgagctgggccgccgcgcccccctgctcgcggcgctgctcgtcgacctcgccgggtgtgaagaagatccgcagctccacgcagcaagacccgcgccgccgggacccccaggacgacgtgtacctggacatcaccgatcgcctttgttttgccattctctacagcagaccaaagagtgcatcaaatgtacattatttcagcatagataatgaacttgaatatgagaacttctacgcagattttggaccactcaatctggcaatggtttacagatattgttgcaagatcaataagaaattaaagtccattacaatgttaaggaagaaaattgttcattttactggctctgatcagagaaaacaagcaaatgctgccttccttgttggatgctacatggttatatatttggggagaaccccagaagaagcatatagaatattaatctttggagagacatcctatattcctttcagagatgctgcctatggaagttgcaatttctacattacacttcttgactgttttcatgcagtaaagaaggcaatgcagtatggcttccttaatttcaactcatttaaccttgatgaatatgaacactatgaaaaagcagaaaatggagatttaaattggataataccagaccgatttattgccttctgtggacctcattcaagagccagacttgaaagtggttaccaccaacattctcctgagacttatattcaatattttaagaatcacaatgttactaccattattcgtctgaataaaaggatgtatgatgccaaacgctttacggatgctggcttcgatcaccatgatcttttctttgcggatggcagcacccctactgatgccattgtcaaagaattcctagatatctgtgaaaatgctgagggtgccattgcagtacattgcaaagctggccttggtcgcacgggcactctgatagcctgctacatcatgaagcattacaggatgacagcagccgagaccattgcgtgggtcaggatctgcagacctggctcggtgattgggcctcagcagcagtttttggtgatgaagcaaaccaacctctggctggaaggggactattttcgtcagaagttaaaggggcaggagaatggacaacacagagcagccttctccaaacttctctctggcgttgatgacatttccataaatggggtcgagaatcaagatcagcaagaacccgaaccgtacagtgatgatgacgaaatcaatggagtgacacaaggtgatagacttcgggccttgaaaagcagaagacaatccaaaacaaacgctattcctctcaccgatggttggctgtcccaggctgtcacctttctagaccggcttctgatctggctcgggatccacaaggactag

SEQ ID NO: 5232 - DNA, 1910 bp, Homo sapiens
  source 1..1910: mol_type = unassigned DNA
cacggaacagccctcctggggtccccacgagccgcgtcctgctgtgccccggcgcctacgcagcagcggccgcggccgcggtgggcacgcacggttaccccgggcagctccggccgccagctgcagccccgtcgcctcggccgcgccagccggctgcgggcacctgggggcgggctgggggcgccggccgcggcaggaggcgctgtagcgagggctgcggcgccggtcctgcggcggccgcgggaggcagcggggcaggcgctgtgggccgggctcctcctccggctcctgcgcgaccgcctcccgccgggctctgccggcgcccgccgtccccgcagcgccgctctgcgcccgccgccccgagcgcccgcgcggggctggcgggagcctcggcgggcgcgcgggcgcgcggggccatggtcgtggccccctgacgggccgcggccgcctccatgaagcggaaaagcgagcggcggtcgagctgggccgccgcgcccccctgctcgcggcgctgctcgtcgacctcgccgggtgtgaagaagatccgcagctccacgcagcaagacccgcgccgccgggacccccaggacgacgtgtacctggacatcaccgatcgcctttgttttgccattctctacagcagaccaaagagtgcatcaaatgtacattatttcagcatagataatgaacttgaatatgagaacttctacgcagattttggaccactcaatctggcaatggtttacagatattgttgcaagatcaataagaaattaaagtccattacaatgttaaggaagaaaattgttcattttactggctctgatcagagaaaacaagcaaatgctgccttccttgttggatgctacatggttatatatttggggagaaccccagaagaagcatatagaatattaatctttggagagacatcctatattcctttcagagatgctgcctatggaagttgcaatttctacattacacttcttgactgttttcatgcagtaaagaaggcaatgcagtatggcttccttaatttcaactcatttaaccttgatgaatatgaacactatgaaaaagcagaaaatggagatttaaattggataataccagaccgatttattgccttctgtggacctcattcaagagccagacttgaaagtggttaccaccaacattctcctgagacttatattcaatattttaagaatcacaatgttactaccattattcgtctgaataaaaggatgtatgatgccaaacgctttacggatgctggcttcgatcaccatgatcttttctttgcggatggcagcacccctactgatgccattgtcaaagaattcctagatatctgtgaaaatgctgagggtgccattgcagtacattgcaaagctggccttggtcgcacgggcactctgatagcctgctacatcatgaagcattacaggatgacagcagccgagaccattgcgtgggtcaggatctgcagacctggctcggtgattgggcctcagcagcagtttttggtgatgaagcaaaccaacctctggctggaaggggactattttcgtcagaagttaaaggggcaggagaatggacaacacagagcagccttctccaaacttctctctggcgttgatgacatttccataaatggggtcgagaatcaagatcagcaagaacccgaaccgtacagtgatgatgacgaaatcaatggagtgacacaaggtgatagacttcgggccttgaaaagcagaagacaatccaaaacaaacgctattcctctcacatgtcccctagctgtgctgacctctgcactgtgtagtgttgtcatctggtggattgtttgtgactacattcttcccatcctgctattctgtctcgatggtttcagaacacagtag

SEQ ID NO: 5233 - DNA, 2547 bp, Homo sapiens
  source 1..2547: mol_type = unassigned DNA
atgaagcggaaaagcgagcggcggtcgagctgggccgccgcgcccccctgctcgcggcgctgctcgtcgacctcgccgggtgtgaagaagatccgcagctccacgcagcaagacccgcgccgccgggacccccaggacgacgtgtacctggacatcaccgatcgcctttgttttgccattctctacagcagaccaaagagtgcatcaaatgtacattatttcagcatagataatgaacttgaatatgagaacttctacgcagattttggaccactcaatctggcaatggtttacagatattgttgcaagatcaataagaaattaaagtccattacaatgttaaggaagaaaattgttcattttactggctctgatcagagaaaacaagcaaatgctgccttccttgttggatgctacatggttatatatttggggagaaccccagaagaagcatatagaatattaatctttggagagacatcctatattcctttcagagatgctgcctatggaagttgcaatttctacattacacttcttgactgttttcatgcagtaaagaaggcaatgcagtatggcttccttaatttcaactcatttaaccttgatgaatatgaacactatgaaaaagcagaaaatggagatttaaattggataataccagaccgatttattgccttctgtggacctcattcaagagccagacttgaaagtggttaccaccaacattctcctgagacttatattcaatattttaagaatcacaatgttactaccattattcgtctgaataaaaggatgtatgatgccaaacgctttacggatgctggcttcgatcaccatgatcttttctttgcggatggcagcacccctactgatgccattgtcaaagaattcctagatatctgtgaaaatgctgagggtgccattgcagtacattgcaaagctggccttggtcgcacgggcactctgatagcctgctacatcatgaagcattacaggatgacagcagccgagaccattgcgtgggtcaggatctgcagacctggctcggtgattgggcctcagcagcagtttttggtgatgaagcaaaccaacctctggctggaaggggactattttcgtcagaagttaaaggggcaggagaatggacaacacagagcagccttctccaaacttctctctggcgttgatgacatttccataaatggggtcgagaatcaagatcagcaagaacccgaaccgtacagtgatgatgacgaaatcaatggagtgacacaaggtgatagacttcgggccttgaaaagcagaagacaatccaaaacaaacgctattcctctcactctctccatttcaaggactaaaacagtcttgcgttaagtaaaaacctgtgaccagagctgaaggaagactctaggactgaaaactgcaacagaaattagcacaatttgaaaacaaaacaaaattgcaaaagccttagttgctttttccacctaagaagttgatcaatggagaaaatgtccactggagtttgaataatgaactttgagtttgggtgcaagcaaatgactcagagaagggtccagctctcaagctgaatgacaaacatgctgttgtaaatttagtctcaggtgtaaatacccaagccctctggtacccagggagctggctggtctgtggtgcatgtgtgtccctgtgatggcaatcattgtagttgctggccttcagaagaattgaggatctgatggaggttttttatgtatttattttctgttcaccttgtgaccctgtgtcaaaatttataaagatacaaaaggcattactgaaatggtactttctgtaatttgatactatttggcttaatcatcttcacttgactatttgtaatactgttgtaatgttaactctgttaagtacccaagctgcttgtcttccaccaaagagtgctttattaacaagaatctgtgaaaatcacatttaaacactgttgcatgttgtaagaccaggtggtaccttagtaacctaaaacttgcaagagaatattaatggtagctttagaagactcaggaggagaaactgacttcagagttggaagatgttgcaagtcgttcctttttctgtccttcagggactgaagaactgggaggctgcccattgtttggttgccagtcatacaaattaaaatcatatttccttccatgaatggaagaaacacactattggtttttccccttggaaacagcaatcccaaataatgtcggcttacaaaaaaaaaaagttaccacttttttagagtccttccctgtaacattggattttttttttcccttatgagatccacctaaggccattgacgtggcctgcgatctcagtgacaatgatctgcttctggatctcactgttgcctttggttagggaacacaactagtaactctgcagagtgccttctcccgcagccctactggaacacagcagagtctgtgccatgaagcagttacagaaacagaattgatgtgctgctaaaaaaaaaaaaaaaaatggggcccg

SEQ ID NO: 5234 - DNA, 5589 bp, Homo sapiens
  source 1..5589: mol_type = unassigned DNA
cacggaacagccctcctggggtccccacgagccgcgtcctgctgtgccccggcgcctacgcagcagcggccgcggccgcggtgggcacgcacggttaccccgggcagctccggccgccagctgcagccccgtcgcctcggccgcgccagccggctgcgggcacctgggggcgggctgggggcgccggccgcggcaggaggcgctgtagcgagggctgcggcgccggtcctgcggcggccgcgggaggcagcggggcaggcgctgtgggccgggctcctcctccggctcctgcgcgaccgcctcccgccgggctctgccggcgcccgccgtccccgcagcgccgctctgcgcccgccgccccgagcgcccgcgcggggctggcgggagcctcggcgggcgcgcgggcgcgcggggccatggtcgtggccccctgacgggccgcggccgcctccatgaagcggaaaagcgagcggcggtcgagctgggccgccgcgcccccctgctcgcggcgctgctcgtcgacctcgccgggtgtgaagaagatccgcagctccacgcagcaagacccgcgccgccgggacccccaggacgacgtgtacctggacatcaccgatcgcctttgttttgccattctctacagcagaccaaagagtgcatcaaatgtacattatttcagcatagataatgaacttgaatatgagaacttctacgcagattttggaccactcaatctggcaatggtttacagatattgttgcaagatcaataagaaattaaagtccattacaatgttaaggaagaaaattgttcattttactggctctgatcagagaaaacaagcaaatgctgccttccttgttggatgctacatggttatatatttggggagaaccccagaagaagcatatagaatattaatctttggagagacatcctatattcctttcagagatgctgcctatggaagttgcaatttctacattacacttcttgactgttttcatgcagtaaagaaggcaatgcagtatggcttccttaatttcaactcatttaaccttgatgaatatgaacactatgaaaaagcagaaaatggagatttaaattggataataccagaccgatttattgccttctgtggacctcattcaagagccagacttgaaagtggttaccaccaacattctcctgagacttatattcaatattttaagaatcacaatgttactaccattattcgtctgaataaaaggatgtatgatgccaaacgctttacggatgctggcttcgatcaccatgatcttttctttgcggatggcagcacccctactgatgccattgtcaaagaattcctagatatctgtgaaaatgctgagggtgccattgcagtacattgcaaagctggccttggtcgcacgggcactctgatagcctgctacatcatgaagcattacaggatgacagcagccgagaccattgcgtgggtcaggatctgcagacctggctcggtgattgggcctcagcagcagtttttggtgatgaagcaaaccaacctctggctggaaggggactattttcgtcagaagttaaaggggcaggagaatggacaacacagagcagccttctccaaacttctctctggcgttgatgacatttccataaatggggtcgagaatcaagatcagcaagaacccgaaccgtacagtgatgatgacgaaatcaatggagtgacacaaggtgatagacttcgggccttgaaaagcagaagacaatccaaaacaaacgctattcctctcacagtaattcttcaatccagtgttcagagctgtaaaacatctgaacctaacatttctggcagtgcaggcattactaaaagaaccaccagatctgcttcaaggaaaagcagtgttaaaagtctctccatttcaaggactaaaacagtcttgcgttaagtaaaaacctgtgaccagagctgaaggaagactctaggactgaaaactgcaacagaaattagcacaatttgaaaacaaaacaaaattgcaaaagccttagttgctttttccacctaagaagttgatcaatggagaaaatgtccactggagtttgaataatgaactttgagtttgggtgcaagcaaatgactcagagaagggtccagctctcaagctgaatgacaaacatgctgttgtaaatttagtctcaggtgtaaatacccaagccctctggtacccagggagctggctggtctgtggtgcatgtgtgtccctgtgatggcaatcattgtagttgctggccttcagaagaattgaggatctgatggaggttttttatgtatttattttctgttcaccttgtgaccctgtgtcaaaatttataaagatacaaaaggcattactgaaatggtactttctgtaatttgatactatttggcttaatcatcttcacttgactatttgtaatactgttgtaatgttaactctgttaagtacccaagctgcttgtcttccaccaaagagtgctttattaacaagaatctgtgaaaatcacatttaaacactgttgcatgttgtaagaccaggtggtaccttagtaacctaaaacttgcaagagaatattaatggtagctttagaagactcaggaggagaaactgacttcagagttggaagatgttgcaagtcgttcctttttctgtccttcagggactgaagaactgggaggctgcccattgtttggttgccagtcatacaaattaaaatcatatttccttccatgaatggaagaaacacactattggtttttccccttggaaacagcaatcccaaataatgtcggcttacaaaaaaaaaaagttaccacttttttagagtccttccctgtaacattggattttttttttcccttatgagatccacctaaggccattgacgtggcctgcgatctcagtgacaatgatctgcttctggatctcactgttgcctttggttagggaacacaactagtaactctgcagagtgccttctcccgcagccctactggaacacagcagagtctgtgccatgaagcagttacagaaacagaattgatgtgctgctaaaaaaaaaaaaaaaaatggggcccgaaataaaagaatatatagtactcacctcagttccttccataagaagtgggtggtttaatgattgttaagccatttttgcctgtgccgggagcatggagggctgagatgtcgacaggcagtgggaaacaaatgccctcctaagccacaaggcgtgcgccagattagtaggcaactccattttaagaagctgcctttttcacaaaactggaagaaataaaagcggttggaataaacaagttaaaagtctttaatgcaaaaagtaattgaaaggcagtgcctccattttggtgtactttcttggaagaaagtataaaattgaccggcatcatgagagacggaagatgccgtgttctcagccaaacaagcaactctttccccgccaggcactgtcgggtggggtcaggccagcttttaaacactggggactggatcacagaaaaacagtggttttctgtccctggaaatgaataggcacaaagacccacttggctgtgggcagactactcttcaataagatttgggtgggaggaggaacattccttttgctattttgagctgagacaatataaatattcaaactgtgccatgcataaagcattgaattctcagggcacctcttcttccccttaccccttttaaggccatcccctccattaataataatccaggtagttgtgaaaatcgtgcttctatctgatcccttcttagtttggcttttcatcccatcagaacaagtaaacgtaggcgccacagctcttgtgagtactgtctccctcacggtgaatgagcctcctggtgtttcgtccaagaaaagaaagggtgtcactggaaccacagccctttttcattttataaactgcctcttcatgttgcctgctcaagtttccacctagaattgctatcactgtggctctttctaaaaatctttctatttaactggttcactgaaattagtcatagaaaacttgtgatttggtgaagaggcattccttgtaataaccaaatgacttgggatggtgtgcatagcaagggcagtgttacacttatgaggactgtctctagcatccaggaagtctctgggtctgagggatggaaagttcttcctgctatgaatgagagtggactcttcccctcacccccaactgaaaccacaaacaaccagaatcttctggaattctgacttagagtcgttgttatagaagaccttgttgctatggaacatgaaactgtgtgtcagatggagagatccccttaacctaagagccttaaatagccctgaaagtacactgggacggtttgcgatggaattaaaattggaagtgaatatttttaggtgctcttgaagctttctggggactcaaaattatcaaaagtcagggacagtccggaggaagagcgtctgcaaaactgggttcctagaagtatagacggacttagctttttgtagaatttggtgaggagcagcgcctcgtgagagcagaatggcctggcgtggccagtgcttcccggcagcacgcagctctgcggcctccagaattcccctgttctgagcttgatgcccctagcctgtcccctacctacttcctcccctcctctctagccctctcacaggggtgattgctacctctctgttttcttgggcctaggcaagttttagaggagttcccaagcattgttatgaggccagtgtgctcgctgggctgggcgggatggcctgggcttgtgtgtggcctgagggctctcctggggccttctcttttcccagtcacctttggagccacagaagcagtgcactcattggatgtctgttcttaacacagcttctctttctacattaaaaaaaatcattattgcattttggaaagcagtgctcatcaaaagcaacttttaaaacctattttattgttcctttaaatgttctctcccgctgaaactgccctggagaggctatctgctgctcttccatttacccacatcaggttattctccatgtcactcagtggagatgactccagatgtgtttaaagactggacaattcacctatactgtgtaggaaattacctccttaattacctggtagaattgtcagcagacatgttcatccgatgatagtactgcagttttctattaataatttgcagacttttatctaacctgcactcatgtacagattattaaaagttttaaaatgtaactgatcagtattgatcaatcattgtcttgatttttttttacagcgtatatttctaatcatattttttaaagccaagagaactggttgaatgaatgtttattttcctgaaggtatttttaagataaagcttcctaatggcgtgtaaactttgcatatgtatgtagtttgatacatattgtcacatttgaaaatcttgtgggttgtaactggttttatacaaaatatcgaatagtggaaattgtataattacaatcatgtaattaaaagtattaacccaa

SEQ ID NO: 5235 - DNA, 2965 bp, Homo sapiens
  source 1..2965: mol_type = unassigned DNA
ccttttgctcgaagtcctttaatcgctaaggagctttcccagactcttccctctgcaggcccgctggcctctgacgcatgtcccctctgcggagcgtttgggcactggaggagccctggttggcacaggccgccccgcgttcccagctggggaaggaaggcgggcggccaggcggggggaaagaaagcgggaggtggggcggggtgctgtccgtccccacggcctcgtcgcgcgcggggctttttccaggacttggggacttccggggttgcgctgtcgtgtcaggccgttgggccgccgaggggtgtcgctgcgcccgctgccccgcgcggccctttaaactttgttttttaaacttcgggggtgtggtcgcggcgcctcccctctcggcggctggcagtccttgcctctgccccgccttccagatgctttggagtcatgagccgggagggcgcgggggcagctttggtagccgaggtgatcaaagatcgcctttgttttgccattctctacagcagaccaaagagtgcatcaaatgtacattatttcagcatagataatgaacttgaatatgagaacttctacgcagattttggaccactcaatctggcaatggtttacagatattgttgcaagatcaataagaaattaaagtccattacaatgttaaggaagaaaattgttcattttactggctctgatcagagaaaacaagcaaatgctgccttccttgttggatgctacatggttatatatttggggagaaccccagaagaagcatatagaatattaatctttggagagacatcctatattcctttcagagatgctgcctatggaagttgcaatttctacattacacttcttgactgttttcatgcagtaaagaaggcaatgcagtatggcttccttaatttcaactcatttaaccttgatgaatatgaacactatgaaaaagcagaaaatggagatttaaattggataataccagaccgatttattgccttctgtggacctcattcaagagccagacttgaaagtggttaccaccaacattctcctgagacttatattcaatattttaagaatcacaatgttactaccattattcgtctgaataaaaggatgtatgatgccaaacgctttacggatgctggcttcgatcaccatgatcttttctttgcggatggcagcacccctactgatgccattgtcaaagaattcctagatatctgtgaaaatgctgagggtgccattgcagtacattgcaaagctggccttggtcgcacgggcactctgatagcctgctacatcatgaagcattacaggatgacagcagccgagaccattgcgtgggtcaggatctgcagacctggctcggtgattgggcctcagcagcagtttttggtgatgaagcaaaccaacctctggctggaaggggactattttcgtcagaagttaaaggggcaggagaatggacaacacagagcagccttctccaaacttctctctggcgttgatgacatttccataaatggggtcgagaatcaagatcagcaagaacccgaaccgtacagtgatgatgacgaaatcaatggagtgacacaaggtgatagacttcgggccttgaaaagcagaagacaatccaaaacaaacgctattcctctcacagtaattcttcaatccagtgttcagagctgtaaaacatctgaacctaacatttctggcagtgcaggcattactaaaagaaccaccagatctgcttcaaggaaaagcagtgttaaaagtctctccatttcaaggactaaaacagtcttgcgttaagtaaaaacctgtgaccagagctgaaggaagactctaggactgaaaactgcaacagaaattagcacaatttgaaaacaaaacaaaattgcaaaagccttagttgctttttccacctaagaagttgatcaatggagaaaatgtccactggagtttgaataatgaactttgagtttgggtgcaagcaaatgactcagagaagggtccagctctcaagctgaatgacaaacatgctgttgtaaatttagtctcaggtgtaaatacccaagccctctggtacccagggagctggctggtctgtggtgcatgtgtgtccctgtgatggcaatcattgtagttgctggccttcagaagaattgaggatctgatggaggttttttatgtatttattttctgttcaccttgtgaccctgtgtcaaaatttataaagatacaaaaggcattactgaaatggtactttctgtaatttgatactatttggcttaatcatcttcacttgactatttgtaatactgttgtaatgttaactctgttaagtacccaagctgcttgtcttccaccaaagagtgctttattaacaagaatctgtgaaaatcacatttaaacactgttgcatgttgtaagaccaggtggtaccttagtaacctaaaacttgcaagagaatattaatggtagctttagaagactcaggaggagaaactgacttcagagttggaagatgttgcaagtcgttcctttttctgtccttcagggactgaagaactgggaggctgcccattgtttggttgccagtcatacaaattaaaatcatatttccttccatgaatggaagaaacacactattggtttttccccttggaaacagcaatcccaaataatgtcggcttacaaaaaaaaaaagttaccacttttttagagtccttccctgtaacattggattttttttttcccttatgagatccacctaaggccattgacgtggcctgcgatctcagtgacaatgatctgcttctggatctcactgttgcctttggttagggaacacaactagtaactctgcagagtgccttctcccgcagccctactggaacacagcagagtctgtgccatgaagcagttacagaaacagaattgatgtgctgct

SEQ ID NO: 5236 - DNA, 1734 bp, Homo sapiens
  source 1..1734: mol_type = unassigned DNA
ctgacgggccgcggccgcctccatgaagcggaaaagcgagcggcggtcgagctgggccgccgcgcccccctgctcgcggcgctgctcgtcgacctcgccgggtgtgaagaagatccgcagctccacgcagcaagacccgcgccgccgggacccccaggacgacgtgtacctggacatcaccgatcgcctttgttttgccattctctacagcagaccaaagagtgcatcaaatgtacattatttcagcatagataatgaacttgaatatgagaacttctacgcagattttggaccactcaatctggcaatggtttacagatattgttgcaagatcaataagaaattaaagtccattacaatgttaaggaagaaaattgttcattttactggctctgatcagagaaaacaagcaaatgctgccttccttgttggatgctacatggttatatatttggggagaaccccagaagaagcatatagaatattaatctttggagagacatcctatattcctttcagagatgctgcctatggaagttgcaatttctacattacacttcttgactgttttcatgcagtaaagaaggcaatgcagtatggcttccttaatttcaactcatttaaccttgatgaatatgaacactatgaaaaagcagaaaatggagatttaaattggataataccagaccgatttattgccttctgtggacctcattcaagagccagacttgaaagtggttaccaccaacattctcctgagacttatattcaatattttaagaatcacaatgttactaccattattcgtctgaataaaaggatgtatgatgccaaacgctttacggatgctggcttcgatcaccatgatcttttctttgcggatggcagcacccctactgatgccattgtcaaagaattcctagatatctgtgaaaatgctgagggtgccattgcagtacattgcaaagctggccttggtcgcacgggcactctgatagcctgctacatcatgaagcattacaggatgacagcagccgagaccattgcgtgggtcaggatctgcagacctggctcggtgattgggcctcagcagcagtttttggtgatgaagcaaaccaacctctggctggaaggggactattttcgtcagaagttaaaggggcaggagaatggacaacacagagcagccttctccaaacttctctctggcgttgatgacatttccataaatggggtcgagaatcaagatcagcaagaacccgaaccgtacagtgatgatgacgaaatcaatggagtgacacaaggtgatagacttcgggccttgaaaagcagaagacaatccaaaacaaacgctattcctctcacatgtcccctagctgtgctgacctctgcactgtgtagtgttgtcatctggtggattgtttgtgactacattcttcccatcctgctattctgtctcgatggtttcagaacacagtagccatcaggaccccctgacagatagctgcttctctccatttcaaggactaaaacagtcttgcgttaagtaaaaacctgtgaccagagctgaaggaagactctaggactgaaaactgcaacagaaattagcacaatttgaaaacaaaacaaaattgcaaaagccttagttgctttttccacctaagaagttgatcaatggagaaaatgtccactggagtttgaataatgaactttgagtttgggtgcaagcaaatg

SEQ ID NO: 5237 - DNA, 10691 bp, Homo sapiens
  source 1..10691: mol_type = unassigned DNA
gcggcccggtgcgggtgtcggggagaccgggctctctgcccggcgcggcgcggcgcggctcggcccacgagcgaccaccgacatggagtgggctcgggcggccaagtagccgcttctccggagcccggtgccagtgccgcccgcagcccgccttccacccccggccgcgccgccggtcaggccctagggtgaagccgggaggaaaatgaagagttttcaccggaatccgttgaaaataggactgactgcaaagccttaaagaaagaaggacctcgggaggagaaacgaaaagccgcctccgggcaagacttggcgtgctccgagccgaggggctgcttcagggacctcgccccctccctttcccgctggagaaattgccgctgatgcattatccaagtggtggttgggaggatttgcagcaacatttttggttttccctcccccttctatgcattctgtttttttcctcccttttctgtttttcttcttcccgggaagtgaattgctgatgcaaatcggactttattcattaatgatgcaaccggattcgtttcaggattacgttgcacgagttgaattttgaatgaaggagaagagtttttttttttttttttaaagaagtgttgactctctagttcgttgtacttttaattattattttatttaaatatacgacttaattgtattcttttaaaaatgcattaagtatatattttatggtaatttaccctcaaaatatatgtatatgggtgaaattgaagacgcttcagttaagtgaggttactggtgtgttggatgtttaattcagcaccagcattgcatgacagttgtttgaataacaagtggtttatttttaaaaccataccttttaaaatttaggttcagataatagtaaaagtcatcataataatttaaaggaaaaccagcagaaatcgaagcaaacatgtctggagaagtgcgtttgaggcagttggagcagtttattttggacgggcccgctcagaccaatgggcagtgcttcagtgtggagacattactggatatactcatctgcctttatgatgaatgcaataattctccattgagaagagagaagaacattctcgaatacctagaatgggctaaaccatttacttctaaagtgaaacaaatgcgattacatagagaagactttgaaatattaaaggtgattggtcgaggagcttttggggaggttgctgtagtaaaactaaaaaatgcagataaagtgtttgccatgaaaatattgaataaatgggaaatgctgaaaagagctgagacagcatgttttcgtgaagaaagggatgtattagtgaatggagacaataaatggattacaaccttgcactatgctttccaggatgacaataacttatacctggttatggattattatgttggtggggatttgcttactctactcagcaaatttgaagatagattgcctgaagatatggctagattttacttggctgagatggtgatagcaattgactcagttcatcagctacattatgtacacagagacattaaacctgacaatatactgatggatatgaatggacatattcggttagcagattttggttcttgtctgaagctgatggaagatggaacggttcagtcctcagtggctgtaggaactccagattatatctctcctgaaatccttcaagccatggaagatggaaaagggagatatggacctgaatgtgactggtggtctttgggggtctgtatgtatgaaatgctttacggagaaacaccattttatgcagaatcgctggtggagacatacggaaaaatcatgaaccacaaagagaggtttcagtttccagcccaagtgactgatgtgtctgaaaatgctaaggatcttattcgaaggctcatttgtagcagagaacatcgacttggtcaaaatggaatagaagactttaagaaacacccatttttcagtggaattgattgggataatattcggaactgtgaagcaccttatattccagaagttagtagcccaacagatacatcgaattttgatgtagatgatgattgtttaaaaaattctgaaacgatgcccccaccaacacatactgcattttctggccaccatctgccatttgttggttttacatatactagtagctgtgtactttctgatcggagctgtttaagagttacggctggtcccacctcactggatcttgatgttaatgttcagaggactctagacaacaacttagcaactgaagcttatgaaagaagaattaagcgccttgagcaagaaaaacttgaactcagtagaaaacttcaagagtcaacacagactgtccaagctctgcagtattcaactgttgatggtccactaacagcaagcaaagatttagaaataaaaaacttaaaagaagaaattgaaaaactaagaaaacaagtaacagaatcaagtcatttggaacagcaacttgaagaagctaatgctgtgaggcaagaactagatgatgcttttagacaaatcaaggcttatgaaaaacaaatcaaaacgttacaacaagaaagagaagatctaaataaggaactagtccaggctagtgagcgattaaaaaaccaatccaaagagctgaaagacgcacactgtcagaggaaactggccatgcaggaattcatggagatcaatgagcggctaacagaattgcacacccaaaaacagaaacttgctcgccatgtccgagataaggaagaagaggtggacctggtgatgcaaaaagttgaaagcttaaggcaagaactgcgcagaacagaaagagccaaaaaagagctggaagttcatacagaagctctagctgctgaagcatctaaagacaggaagctacgtgaacagagtgagcactattctaagcaactggaaaatgaattggagggactgaagcaaaaacaaattagttactcaccaggagtatgcagcatagaacatcagcaagagataaccaaactaaagactgatttggaaaagaaaagtatcttttatgaagaagaattatctaaaagagaaggaatacatgcaaatgaaataaaaaatcttaagaaagaactgcatgattcagaaggtcagcaacttgctctcaacaaagaaattatgattttaaaagacaaattggaaaaaaccagaagagaaagtcaaagtgaaagggaggaatttgaaagtgagttcaaacaacaatatgaacgagaaaaagtgttgttaactgaagaaaataaaaagctgacgagtgaacttgataagcttactactttgtatgagaacttaagtatacacaaccagcagttagaagaagaggttaaagatctagcagacaagaaagaatcagttgcacattgggaagcccaaatcacagaaataattcagtgggtcagcgatgaaaaggatgcacgagggtatcttcaggccttagcttctaaaatgactgaagaattggaggcattaagaaattccagcttgggtacacgagcaacagatatgccctggaaaatgcgtcgttttgcgaaactggatatgtcagctagactggagttgcagtcggctctggatgcagaaataagagccaaacaggccatccaagaagagttgaataaagttaaagcatctaatatcataacagaatgtaaactaaaagattcagagaagaagaacttggaactactctcagaaatcgaacagctgataaaggacactgaagagcttagatctgaaaagggtatagagcaccaagactcacagcattctttcttggcatttttgaatacgcctaccgatgctctggatcaatttgaaactgtagactccactccactttcagttcacacaccaaccttaaggaaaaaaggatgtcctggttcaactggctttccacctaagcgcaagactcaccagttttttgtaaaatcttttactactcctaccaagtgtcatcagtgtacctccttgatggtgggtttaataagacagggctgttcatgtgaagtgtgtggattctcatgccatataacttgtgtaaacaaagctccaaccacttgtccagttcctcctgaacagacaaaaggtcccctgggtatagatcctcagaaaggaataggaacagcatatgaaggtcatgtcaggattcctaagccagctggagtgaagaaagggtggcagagagcactggctatagtgtgtgacttcaaactctttctgtacgatattgctgaaggaaaagcatctcagcccagtgttgtcattagtcaagtgattgacatgagggatgaagaattttctgtgagttcagtcttggcttctgatgttatccatgcaagtcggaaagatataccctgtatatttagggtcacagcttcccagctctcagcatctaataacaaatgttcaatcctgatgctagcagacactgagaatgagaagaataagtgggtgggagtgctgagtgaattgcacaagattttgaagaaaaacaaattcagagaccgctcagtctatgttcccaaagaggcttatgacagcactctacccctcattaaaacaacccaggcagccgcaatcatagatcatgaaagaattgctttgggaaacgaagaagggttatttgttgtacatgtcaccaaagatgaaattattagagttggtgacaataagaagattcatcagattgaactcattccaaatgatcagcttgttgctgtgatctcaggacgaaatcgtcatgtacgactttttcctatgtcagcattggatgggcgagagaccgatttttacaagctgtcagaaactaaagggtgtcaaaccgtaacttctggaaaggtgcgccatggagctctcacatgcctgtgtgtggctatgaaaaggcaggtcctctgttatgaactatttcagagcaagacccgtcacagaaaatttaaagaaattcaagtcccatataatgtccagtggatggcaatcttcagtgaacaactctgtgtgggattccagtcaggatttctaagataccccttgaatggagaaggaaatccatacagtatgctccattcaaatgaccatacactatcatttattgcacatcaaccaatggatgctatctgcgcagttgagatctccagtaaagaatatctgctgtgttttaacagcattgggatatacactgactgccagggccgaagatctagacaacaggaattgatgtggccagcaaatccttcctcttgttgttacaatgcaccatatctctcggtgtacagtgaaaatgcagttgatatctttgatgtgaactccatggaatggattcagactcttcctctcaaaaaggttcgacccttaaacaatgaaggatcattaaatcttttagggttggagaccattagattaatatatttcaaaaataagatggcagaaggggacgaactggtagtacctgaaacatcagataatagtcggaaacaaatggttagaaacattaacaataagcggcgttattccttcagagtcccagaagaggaaaggatgcagcagaggagggaaatgctacgagatccagaaatgagaaataaattaatttctaatccaactaattttaatcacatagcacacatgggtcctggagatggaatacagatcctgaaagatctgcccatgccaggtttcccttatccatcccctcatcatcactccggtctgatctcctctccgatcaactttgaacacatctatcacatgactgttaattctgctgaaaaatttctctctcctgattccataaaccctgaatattccccgtctctgcgctctgtccctggtacaccaagctttatgactctgaggaaccctcggcctcaggaaagtcggacagtattcagtggctcagtcagtattccatctatcaccaaatcccgccctgagccaggccgctccatgagtgctagcagtggcttgtcagcaaggtcatccgcacagaatggcagcgcattaaagagggaattctctggaggaagctacagtgccaagcggcagcccatgccctccccgtcagagggctctttgtcctctggaggcatggaccaaggaagtgatgccccagcgagggactttgacggagaggactctgactctccgaggcattccacagcttccaacagttccaacctaagcagccccccaagcccagcttcaccccgaaaaaccaagagcctctccctggagagcactgaccgcgggagctgggacccgtgagctgcctcagcactgggacctctcgctctccgctccctgccactcgcctcctctcactttcatctcttccctccacctcgcctgctcggcctgaaagccaccaggggctggcagcagtagcaggacagggattcaggagttctgacgacacgactctcagatccacgcccccagcctaacagcaacaacaaagacagactttccgtagcagcttagattaacgttgatttcattccatgcacttagagttgctttcagtaacattttacccctactcccaaaggtagcttaaatagacagattacacaaatgtaagtgataagaataagattagacagattttgctttcacagtagagtctcattatagtcctaaaatagctcatgggcttctccgcatccagaagggagaattggtccctggagtggctcactaagctcttaatcagcaaacgcagtgagtatcaacctgattgttgccaggaaatccttatgaattaaaacaatgcatattttactacagtacagagtttaaatgaatacataaatgtagaagtactgaatgtatatatttaaaaggagcctcttgtattcaacaaaagatggatgcatatataagagagatgatttaatttaaagaaatatgttgtttcttgtctgtaatgtaatgtaaagggtggaaaggcctcaagctcacatttgtagagagagagcgagagaaatcagagttccctttattgccctgtcctcaaactggtcataggctctagtcacctggggagctgtagaaaacacttgcagagccaggttttgctggtttggggcatgccctgggcaccagagctttaacatttgaagccacttcagcagcagcagcaaaaggcgaactcatctctacccaagatgtttcttttcctagtggtggaatttgaacacttctcactttttattgtattttatcttccgcagataaatgtagaaatacacgattctgtcacctctgatcccttccatctgaaaggttacaaggagtgttgtagcttctgaaggtgcagaaaacaatttctaaaaatgcttttattcctgggctaatcctgtccctccctaagtcacagcgaggtgtctgtcccagggctggagatgcttcccaaggaggagtctgttttgttgagagtgggcgtgggcttcttcacataagcctggggaaggaagaaaaaacggctttcattaccaaataatgtaaaacctcaaaagcaagggcttcaacagccttaaccaaatattattccccatagccagtggaaaatggatgtgacaaccccagtgcgcaggccagagtgagtgagcccagcacggcgctccgactggcttcctctctcaggtgctggattgtggggttagtggcatttccagctggattcctcctgttgtagttgccataaggaaatgagatgcagaatcagaaggatctatttctacagaatcatttcaccagttaagcacatgagtagagaaagagataaaaataaaagtatctcatgaaggaaagagattttgcctctcttttacttttcacctaagtttctctgagaaatagagacaggattctctctttaaaattcagtgaaaatgaagaaagttttcctgcagttgctaacctgagttgcagtgtttaaggccatcatttcactgctgctgtctgtgactccacgtctgtgtcactgaggtgacctgcgtgtcactgaggtggccaccatgctggcctgcggcatgtgcagggagctgaggctgtttccaggtgatgctgctgtgtggagaaggttctgagatgcagtgagggaagaaaggatcctgctggggattccattgtaagcacctataatcgggaattttcatgtaacagctttgacatttaaacattctgagtttggtgccagctcagatttgattatattttattttggatgggtgtaattcacagcacagttctaatctcccaaatctttctgctttttagaatgaagtataaaaatacttttctcacctgaataccaagggttggccctttagttggatcattgtcatatgacttggtagatccttgtcctcagcacctcacgtgagagaagggagtcagccagccggccccctgcttggtgctcgtgaccagctcgcaccccttctgtccacccttctctcctctcctccccactctccccaccctcctcactctccccaccctcctcactctccccaccctcccctcctctcctcctcactcttcccaccctccccatccccaccctccccatcctcctcttccctttccccttgccttctcctctctcccttctcttctcaggcagggaggaggccatcccaagccgagattaacaggacttgacataagccattagtttgtagctttgacaagtaattatgaatttttgttgcttataggtgcttattttgcaaaggatgcttttaagatcaaaataataaccctacctaaagtctagctccactgctatgggtcatactcttcagcctcccaacagggcagagagagagagctactgaggcttgtctaggttgccaggctaactgggcgacttgtccatattcaccccatggattgcaccatggcactctttgatttttccactgcaatggcaagtaatctcatcagtcataatagagcagtcccgaatgcgtgcagattctaaaagcagggctttaggagagaaacactgccagggggaatagttttggggagggttttcccaaaataacggtcatcctactgggtttatcccacccttaaatatgaagcctgttacctccagaagcttctgagaagaatgatgtgaaaagacagggagtgggttctaggcaaagaaaacataatgaccattcagaggagtcagtagcacagctcacagataaagtattttattactatctgaagttttcttttgttttcatgcaggacattttaaaaacgtatatggcagcagaaacctgtttctcaatagaaaaaatacattcagaggcatttctgggatagtctatctgtgttagtatttggtgctatctatgtccagccaagttatctaccctcaaattctgactaatcatgtttgtgctttgggtatttaaaattacatacatatatattctttttgccaaaaacaaaagtcttgcttcttgtcaaatgattgctaaagtagatcttacattttttgttattatgtatgtatttatacacatccccaacacacttagtgatttctgttatttcctagggagcacagctttaaggctatgagatacaactaaaaggagcccatctatttggttttccagccaattattgtactcacatttcaggggagaatctgaaattcctgtcatgtttacagcaacaatctatcattcctggctagctctcagcctctctctccttccataggttagaattatgtcattttgttacttagtggccacgtctatttctgagaaagactggttacatttatgtggcatctcaggtatcattaaggaaaagccagagcaggggtgagcagaggtcaaaaccacagacgcagcagggccatttgccgcctttggccgggatcacaaccactgcagtctcccagcaggtaggccttgccaagcctaaggctccccatccaatctagacagaggggcgctcagagcagactttgccgtagcccatgtctggtgagcacaacagggaatgaattgggcactccactcccccgtctctctggcccagccctgaactagatgagctgcatttcatggagcccattttaaaatctctttccttatgactttgttactcaagtccagagttctctgtgcacttctgctagataaggagtgtaagccctgccccccagcactggcagcacgctgggccctccccacacaggacaccgtgcagttccgggggaagctgactcaaatcaaccttgaaatctcatgaaaacaaaatgacttgtctttttatttgatagtgtaatatcattcattttataaattttttagggtttttctcgtaatattgtacagttttgcatggcctggtgtgatcattttttggttagaatataatgctgacaaatgtggatggaggggaagatactgctttagcctatcactccttattttattttgtttggttttatgccctcagtgtcttagggaactttttaagagatcctctgctaccaaacaatgatgtggattcttttgcacagaaatatttaaggtgggatggtaaaaaatgtcacaaaagactcctcaccaatactttatgttgatatcacttaatattaaccagactttgctgtattgcaataaaacagagaactgtt

SEQ ID NO: 5238 - DNA, 10658 bp, Homo sapiens
  source 1..10658: mol_type = unassigned DNA
gcggcccggtgcgggtgtcggggagaccgggctctctgcccggcgcggcgcggcgcggctcggcccacgagcgaccaccgacatggagtgggctcgggcggccaagtagccgcttctccggagcccggtgccagtgccgcccgcagcccgccttccacccccggccgcgccgccggtcaggccctagggtgaagccgggaggaaaatgaagagttttcaccggaatccgttgaaaataggactgactgcaaagccttaaagaaagaaggacctcgggaggagaaacgaaaagccgcctccgggcaagacttggcgtgctccgagccgaggggctgcttcagggacctcgccccctccctttcccgctggagaaattgccgctgatgcattatccaagtggtggttgggaggatttgcagcaacatttttggttttccctcccccttctatgcattctgtttttttcctcccttttctgtttttcttcttcccgggaagtgaattgctgatgcaaatcggactttattcattaatgatgcaaccggattcgtttcaggattacgttgcacgagttgaattttgaatgaaggagaagagtttttttttttttttttaaagaagtgttgactctctagttcgttgtacttttaattattattttatttaaatatacgacttaattgtattcttttaaaaatgcattaagtatatattttatggtaatttaccctcaaaatatatgtatatgggtgaaattgaagacgcttcagttaagtgaggttactggtgtgttggatgtttaattcagcaccagcattgcatgacagttgtttgaataacaagtggtttatttttaaaaccataccttttaaaatttaggttcagataatagtaaaagtcatcataataatttaaaggaaaaccagcagaaatcgaagcaaacatgtctggagaagtgcgtttgaggcagttggagcagtttattttggacgggcccgctcagaccaatgggcagtgcttcagtgtggagacattactggatatactcatctgcctttatgatgaatgcaataattctccattgagaagagagaagaacattctcgaatacctagaatgggctaaaccatttacttctaaagtgaaacaaatgcgattacatagagaagactttgaaatattaaaggtgattggtcgaggagcttttggggaggttgctgtagtaaaactaaaaaatgcagataaagtgtttgccatgaaaatattgaataaatgggaaatgctgaaaagagctgagacagcatgttttcgtgaagaaagggatgtattagtgaatggagacaataaatggattacaaccttgcactatgctttccaggatgacaataacttatacctggttatggattattatgttggtggggatttgcttactctactcagcaaatttgaagatagattgcctgaagatatggctagattttacttggctgagatggtgatagcaattgactcagttcatcagctacattatgtacacagagacattaaacctgacaatatactgatggatatgaatggacatattcggttagcagattttggttcttgtctgaagctgatggaagatggaacggttcagtcctcagtggctgtaggaactccagattatatctctcctgaaatccttcaagccatggaagatggaaaagggagatatggacctgaatgtgactggtggtctttgggggtctgtatgtatgaaatgctttacggagaaacaccattttatgcagaatcgctggtggagacatacggaaaaatcatgaaccacaaagagaggtttcagtttccagcccaagtgactgatgtgtctgaaaatgctaaggatcttattcgaaggctcatttgtagcagagaacatcgacttggtcaaaatggaatagaagactttaagaaacacccatttttcagtggaattgattgggataatattcggaactgtgaagcaccttatattccagaagttagtagcccaacagatacatcgaattttgatgtagatgatgattgtttaaaaaattctgaaacgatgcccccaccaacacatactgcattttctggccaccatctgccatttgttggttttacatatactagtagctgtgtactttctgatcggagctgtttaagagttacggctggtcccacctcactggatcttgatgttaatgttcagaggactctagacaacaacttagcaactgaagcttatgaaagaagaattaagcgccttgagcaagaaaaacttgaactcagtagaaaacttcaagagtcaacacagactgtccaagctctgcagtattcaactgttgatggtccactaacagcaagcaaagatttagaaataaaaaacttaaaagaagaaattgaaaaactaagaaaacaagtaacagaatcaagtcatttggaacagcaacttgaagaagctaatgctgtgaggcaagaactagatgatgcttttagacaaatcaaggcttatgaaaaacaaatcaaaacgttacaacaagaaagagaagatctaaataaggaactagtccaggctagtgagcgattaaaaaaccaatccaaagagctgaaagacgcacactgtcagaggaaactggccatgcaggaattcatggagatcaatgagcggctaacagaattgcacacccaaaaacagaaacttgctcgccatgtccgagataaggaagaagaggtggacctggtgatgcaaaaagttgaaagcttaaggcaagaactgcgcagaacagaaagagccaaaaaagagctggaagttcatacagaagctctagctgctgaagcatctaaagacaggaagctacgtgaacagagtgagcactattctaagcaactggaaaatgaattggagggactgaagcaaaaacaaattagttactcaccaggagtatgcagcatagaacatcagcaagagataaccaaactaaagactgatttggaaaagaaaagtatcttttatgaagaagaattatctaaaagagaaggaatacatgcaaatgaaataaaaaatcttaagaaagaactgcatgattcagaaggtcagcaacttgctctcaacaaagaaattatgattttaaaagacaaattggaaaaaaccagaagagaaagtcaaagtgaaagggaggaatttgaaagtgagttcaaacaacaatatgaacgagaaaaagtgttgttaactgaagaaaataaaaagctgacgagtgaacttgataagcttactactttgtatgagaacttaagtatacacaaccagcagttagaagaagaggttaaagatctagcagacaagaaagaatcagttgcacattgggaagcccaaatcacagaaataattcagtgggtcagcgatgaaaaggatgcacgagggtatcttcaggccttagcttctaaaatgactgaagaattggaggcattaagaaattccagcttgggtacacgagcaacagatatgccctggaaaatgcgtcgttttgcgaaactggatatgtcagctagactggagttgcagtcggctctggatgcagaaataagagccaaacaggccatccaagaagagttgaataaagttaaagcatctaatatcataacagaatgtaaactaaaagattcagagaagaagaacttggaactactctcagaaatcgaacagctgataaaggacactgaagagcttagatctgaaaagggtatagagcaccaagactcacagcattctttcttggcatttttgaatacgcctaccgatgctctggatcaatttgaagattccttttcttcttcctcatcttcactgattgattttttggatgacactgatcccgttgagaacacatatgtatggaacccgagcgtcaagtttcacatccagtcacggtccacatctccttccacatctagtgaagctgagccagttaagactgtagactccactccactttcagttcacacaccaaccttaaggaaaaaaggatgtcctggttcaactggctttccacctaagcgcaagactcaccagttttttgtaaaatcttttactactcctaccaagtgtcatcagtgtacctccttgatggtgggtttaataagacagggctgttcatgtgaagtgtgtggattctcatgccatataacttgtgtaaacaaagctccaaccacttgtccagttcctcctgaacagacaaaaggtcccctgggtatagatcctcagaaaggaataggaacagcatatgaaggtcatgtcaggattcctaagccagctggagtgaagaaagggtggcagagagcactggctatagtgtgtgacttcaaactctttctgtacgatattgctgaaggaaaagcatctcagcccagtgttgtcattagtcaagtgattgacatgagggatgaagaattttctgtgagttcagtcttggcttctgatgttatccatgcaagtcggaaagatataccctgtatatttagggtcacagcttcccagctctcagcatctaataacaaatgttcaatcctgatgctagcagacactgagaatgagaagaataagtgggtgggagtgctgagtgaattgcacaagattttgaagaaaaacaaattcagagaccgctcagtctatgttcccaaagaggcttatgacagcactctacccctcattaaaacaacccaggcagccgcaatcatagatcatgaaagaattgctttgggaaacgaagaagggttatttgttgtacatgtcaccaaagatgaaattattagagttggtgacaataagaagattcatcagattgaactcattccaaatgatcagcttgttgctgtgatctcaggacgaaatcgtcatgtacgactttttcctatgtcagcattggatgggcgagagaccgatttttacaagctgtcagaaactaaagggtgtcaaaccgtaacttctggaaaggtgcgccatggagctctcacatgcctgtgtgtggctatgaaaaggcaggtcctctgttatgaactatttcagagcaagacccgtcacagaaaatttaaagaaattcaagtcccatataatgtccagtggatggcaatcttcagtgaacaactctgtgtgggattccagtcaggatttctaagataccccttgaatggagaaggaaatccatacagtatgctccattcaaatgaccatacactatcatttattgcacatcaaccaatggatgctatctgcgcagttgagatctccagtaaagaatatctgctgtgttttaacagcattgggatatacactgactgccagggccgaagatctagacaacaggaattgatgtggccagcaaatccttcctcttgttgttacaatgcaccatatctctcggtgtacagtgaaaatgcagttgatatctttgatgtgaactccatggaatggattcagactcttcctctcaaaaaggttcgacccttaaacaatgaaggatcattaaatcttttagggttggagaccattagattaatatatttcaaaaataagatggcagaaggggacgaactggtagtacctgaaacatcagataatagtcggaaacaaatggttagaaacattaacaataagcggcgttattccttcagagtcccagaagaggaaaggatgcagcagaggagggaaatgctacgagatccagaaatgagaaataaattaatttctaatccaactaattttaatcacatagcacacatgggtcctggagatggaatacagatcctgaaagatctgcccatgaaccctcggcctcaggaaagtcggacagtattcagtggctcagtcagtattccatctatcaccaaatcccgccctgagccaggccgctccatgagtgctagcagtggcttgtcagcaaggtcatccgcacagaatggcagcgcattaaagagggaattctctggaggaagctacagtgccaagcggcagcccatgccctccccgtcagagggctctttgtcctctggaggcatggaccaaggaagtgatgccccagcgagggactttgacggagaggactctgactctccgaggcattccacagcttccaacagttccaacctaagcagccccccaagcccagcttcaccccgaaaaaccaagagcctctccctggagagcactgaccgcgggagctgggacccgtgagctgcctcagcactgggacctctcgctctccgctccctgccactcgcctcctctcactttcatctcttccctccacctcgcctgctcggcctgaaagccaccaggggctggcagcagtagcaggacagggattcaggagttctgacgacacgactctcagatccacgcccccagcctaacagcaacaacaaagacagactttccgtagcagcttagattaacgttgatttcattccatgcacttagagttgctttcagtaacattttacccctactcccaaaggtagcttaaatagacagattacacaaatgtaagtgataagaataagattagacagattttgctttcacagtagagtctcattatagtcctaaaatagctcatgggcttctccgcatccagaagggagaattggtccctggagtggctcactaagctcttaatcagcaaacgcagtgagtatcaacctgattgttgccaggaaatccttatgaattaaaacaatgcatattttactacagtacagagtttaaatgaatacataaatgtagaagtactgaatgtatatatttaaaaggagcctcttgtattcaacaaaagatggatgcatatataagagagatgatttaatttaaagaaatatgttgtttcttgtctgtaatgtaatgtaaagggtggaaaggcctcaagctcacatttgtagagagagagcgagagaaatcagagttccctttattgccctgtcctcaaactggtcataggctctagtcacctggggagctgtagaaaacacttgcagagccaggttttgctggtttggggcatgccctgggcaccagagctttaacatttgaagccacttcagcagcagcagcaaaaggcgaactcatctctacccaagatgtttcttttcctagtggtggaatttgaacacttctcactttttattgtattttatcttccgcagataaatgtagaaatacacgattctgtcacctctgatcccttccatctgaaaggttacaaggagtgttgtagcttctgaaggtgcagaaaacaatttctaaaaatgcttttattcctgggctaatcctgtccctccctaagtcacagcgaggtgtctgtcccagggctggagatgcttcccaaggaggagtctgttttgttgagagtgggcgtgggcttcttcacataagcctggggaaggaagaaaaaacggctttcattaccaaataatgtaaaacctcaaaagcaagggcttcaacagccttaaccaaatattattccccatagccagtggaaaatggatgtgacaaccccagtgcgcaggccagagtgagtgagcccagcacggcgctccgactggcttcctctctcaggtgctggattgtggggttagtggcatttccagctggattcctcctgttgtagttgccataaggaaatgagatgcagaatcagaaggatctatttctacagaatcatttcaccagttaagcacatgagtagagaaagagataaaaataaaagtatctcatgaaggaaagagattttgcctctcttttacttttcacctaagtttctctgagaaatagagacaggattctctctttaaaattcagtgaaaatgaagaaagttttcctgcagttgctaacctgagttgcagtgtttaaggccatcatttcactgctgctgtctgtgactccacgtctgtgtcactgaggtgacctgcgtgtcactgaggtggccaccatgctggcctgcggcatgtgcagggagctgaggctgtttccaggtgatgctgctgtgtggagaaggttctgagatgcagtgagggaagaaaggatcctgctggggattccattgtaagcacctataatcgggaattttcatgtaacagctttgacatttaaacattctgagtttggtgccagctcagatttgattatattttattttggatgggtgtaattcacagcacagttctaatctcccaaatctttctgctttttagaatgaagtataaaaatacttttctcacctgaataccaagggttggccctttagttggatcattgtcatatgacttggtagatccttgtcctcagcacctcacgtgagagaagggagtcagccagccggccccctgcttggtgctcgtgaccagctcgcaccccttctgtccacccttctctcctctcctccccactctccccaccctcctcactctccccaccctcctcactctccccaccctcccctcctctcctcctcactcttcccaccctccccatccccaccctccccatcctcctcttccctttccccttgccttctcctctctcccttctcttctcaggcagggaggaggccatcccaagccgagattaacaggacttgacataagccattagtttgtagctttgacaagtaattatgaatttttgttgcttataggtgcttattttgcaaaggatgcttttaagatcaaaataataaccctacctaaagtctagctccactgctatgggtcatactcttcagcctcccaacagggcagagagagagagctactgaggcttgtctaggttgccaggctaactgggcgacttgtccatattcaccccatggattgcaccatggcactctttgatttttccactgcaatggcaagtaatctcatcagtcataatagagcagtcccgaatgcgtgcagattctaaaagcagggctttaggagagaaacactgccagggggaatagttttggggagggttttcccaaaataacggtcatcctactgggtttatcccacccttaaatatgaagcctgttacctccagaagcttctgagaagaatgatgtgaaaagacagggagtgggttctaggcaaagaaaacataatgaccattcagaggagtcagtagcacagctcacagataaagtattttattactatctgaagttttcttttgttttcatgcaggacattttaaaaacgtatatggcagcagaaacctgtttctcaatagaaaaaatacattcagaggcatttctgggatagtctatctgtgttagtatttggtgctatctatgtccagccaagttatctaccctcaaattctgactaatcatgtttgtgctttgggtatttaaaattacatacatatatattctttttgccaaaaacaaaagtcttgcttcttgtcaaatgattgctaaagtagatcttacattttttgttattatgtatgtatttatacacatccccaacacacttagtgatttctgttatttcctagggagcacagctttaaggctatgagatacaactaaaaggagcccatctatttggttttccagccaattattgtactcacatttcaggggagaatctgaaattcctgtcatgtttacagcaacaatctatcattcctggctagctctcagcctctctctccttccataggttagaattatgtcattttgttacttagtggccacgtctatttctgagaaagactggttacatttatgtggcatctcaggtatcattaaggaaaagccagagcaggggtgagcagaggtcaaaaccacagacgcagcagggccatttgccgcctttggccgggatcacaaccactgcagtctcccagcaggtaggccttgccaagcctaaggctccccatccaatctagacagaggggcgctcagagcagactttgccgtagcccatgtctggtgagcacaacagggaatgaattgggcactccactcccccgtctctctggcccagccctgaactagatgagctgcatttcatggagcccattttaaaatctctttccttatgactttgttactcaagtccagagttctctgtgcacttctgctagataaggagtgtaagccctgccccccagcactggcagcacgctgggccctccccacacaggacaccgtgcagttccgggggaagctgactcaaatcaaccttgaaatctcatgaaaacaaaatgacttgtctttttatttgatagtgtaatatcattcattttataaattttttagggtttttctcgtaatattgtacagttttgcatggcctggtgtgatcattttttggttagaatataatgctgacaaatgtggatggaggggaagatactgctttagcctatcactccttattttattttgtttggttttatgccctcagtgtcttagggaactttttaagagatcctctgctaccaaacaatgatgtggattcttttgcacagaaatatttaaggtgggatggtaaaaaatgtcacaaaagactcctcaccaatactttatgttgatatcacttaatattaaccagactttgctgtattgcaataaaacagagaactgtt

SEQ ID NO: 5239 - DNA, 10421 bp, Homo sapiens
  source 1..10421: mol_type = unassigned DNA
gcggcccggtgcgggtgtcggggagaccgggctctctgcccggcgcggcgcggcgcggctcggcccacgagcgaccaccgacatggagtgggctcgggcggccaagtagccgcttctccggagcccggtgccagtgccgcccgcagcccgccttccacccccggccgcgccgccggtcaggccctagggtgaagccgggaggaaaatgaagagttttcaccggaatccgttgaaaataggactgactgcaaagccttaaagaaagaaggacctcgggaggagaaacgaaaagccgcctccgggcaagacttggcgtgctccgagccgaggggctgcttcagggacctcgccccctccctttcccgctggagaaattgccgctgatgcattatccaagtggtggttgggaggatttgcagcaacatttttggttttccctcccccttctatgcattctgtttttttcctcccttttctgtttttcttcttcccgggaagtgaattgctgatgcaaatcggactttattcattaatgatgcaaccggattcgtttcaggattacgttgcacgagttgaattttgaatgaaggagaagagtttttttttttttttttaaagaagtgttgactctctagttcgttgtacttttaattattattttatttaaatatacgacttaattgtattcttttaaaaatgcattaagtatatattttatggtaatttaccctcaaaatatatgtatatgggtgaaattgaagacgcttcagttaagtgaggttactggtgtgttggatgtttaattcagcaccagcattgcatgacagttgtttgaataacaagtggtttatttttaaaaccataccttttaaaatttaggttcagataatagtaaaagtcatcataataatttaaaggaaaaccagcagaaatcgaagcaaacatgtctggagaagtgcgtttgaggcagttggagcagtttattttggacgggcccgctcagaccaatgggcagtgcttcagtgtggagacattactggatatactcatctgcctttatgatgaatgcaataattctccattgagaagagagaagaacattctcgaatacctagaatgggctaaaccatttacttctaaagtgaaacaaatgcgattacatagagaagactttgaaatattaaaggtgattggtcgaggagcttttggggaggttgctgtagtaaaactaaaaaatgcagataaagtgtttgccatgaaaatattgaataaatgggaaatgctgaaaagagctgagacagcatgttttcgtgaagaaagggatgtattagtgaatggagacaataaatggattacaaccttgcactatgctttccaggatgacaataacttatacctggttatggattattatgttggtggggatttgcttactctactcagcaaatttgaagatagattgcctgaagatatggctagattttacttggctgagatggtgatagcaattgactcagttcatcagctacattatgtacacagagacattaaacctgacaatatactgatggatatgaatggacatattcggttagcagattttggttcttgtctgaagctgatggaagatggaacggttcagtcctcagtggctgtaggaactccagattatatctctcctgaaatccttcaagccatggaagatggaaaagggagatatggacctgaatgtgactggtggtctttgggggtctgtatgtatgaaatgctttacggagaaacaccattttatgcagaatcgctggtggagacatacggaaaaatcatgaaccacaaagagaggtttcagtttccagcccaagtgactgatgtgtctgaaaatgctaaggatcttattcgaaggctcatttgtagcagagaacatcgacttggtcaaaatggaatagaagactttaagaaacacccatttttcagtggaattgattgggataatattcggaactgtgaagcaccttatattccagaagttagtagcccaacagatacatcgaattttgatgtagatgatgattgtttaaaaaattctgaaacgatgcccccaccaacacatactgcattttctggccaccatctgccatttgttggttttacatatactagtagctgtgtactttctgatcggagctgtttaagagttacggctggtcccacctcactggatcttgatgttaatgttcagaggactctagacaacaacttagcaactgaagcttatgaaagaagaattaagcgccttgagcaagaaaaacttgaactcagtagaaaacttcaagagtcaacacagactgtccaagctctgcagtattcaactgttgatggtccactaacagcaagcaaagatttagaaataaaaaacttaaaagaagaaattgaaaaactaagaaaacaagtaacagaatcaagtcatttggaacagcaacttgaagaagctaatgctgtgaggcaagaactagatgatgcttttagacaaatcaaggcttatgaaaaacaaatcaaaacgttacaacaagaaagagaagatctaaataaggaactagtccaggctagtgagcgattaaaaaaccaatccaaagagctgaaagacgcacactgtcagaggaaactggccatgcaggaattcatggagatcaatgagcggctaacagaattgcacacccaaaaacagaaacttgctcgccatgtccgagataaggaagaagaggtggacctggtgatgcaaaaagttgaaagcttaaggcaagaactgcgcagaacagaaagagccaaaaaagagctggaagttcatacagaagctctagctgctgaagcatctaaagacaggaagctacgtgaacagagtgagcactattctaagcaactggaaaatgaattggagggactgaagcaaaaacaaattagttactcaccaggagtatgcagcatagaacatcagcaagagataaccaaactaaagactgatttggaaaagaaaagtatcttttatgaagaagaattatctaaaagagaaggaatacatgcaaatgaaataaaaaatcttaagaaagaactgcatgattcagaaggtcagcaacttgctctcaacaaagaaattatgattttaaaagacaaattggaaaaaaccagaagagaaagtcaaagtgaaagggaggaatttgaaagtgagttcaaacaacaatatgaacgagaaaaagtgttgttaactgaagaaaataaaaagctgacgagtgaacttgataagcttactactttgtatgagaacttaagtatacacaaccagcagttagaagaagaggttaaagatctagcagacaagaaagaatcagttgcacattgggaagcccaaatcacagaaataattcagtgggtcagcgatgaaaaggatgcacgagggtatcttcaggccttagcttctaaaatgactgaagaattggaggcattaagaaattccagcttgggtacacgagcaacagatatgccctggaaaatgcgtcgttttgcgaaactggatatgtcagctagactggagttgcagtcggctctggatgcagaaataagagccaaacaggccatccaagaagagttgaataaagttaaagcatctaatatcataacagaatgtaaactaaaagattcagagaagaagaacttggaactactctcagaaatcgaacagctgataaaggacactgaagagcttagatctgaaaagggtatagagcaccaagactcacagcattctttcttggcatttttgaatacgcctaccgatgctctggatcaatttgaacgcaagactcaccagttttttgtaaaatcttttactactcctaccaagtgtcatcagtgtacctccttgatggtgggtttaataagacagggctgttcatgtgaagtgtgtggattctcatgccatataacttgtgtaaacaaagctccaaccacttgtccagttcctcctgaacagacaaaaggtcccctgggtatagatcctcagaaaggaataggaacagcatatgaaggtcatgtcaggattcctaagccagctggagtgaagaaagggtggcagagagcactggctatagtgtgtgacttcaaactctttctgtacgatattgctgaaggaaaagcatctcagcccagtgttgtcattagtcaagtgattgacatgagggatgaagaattttctgtgagttcagtcttggcttctgatgttatccatgcaagtcggaaagatataccctgtatatttagggtcacagcttcccagctctcagcatctaataacaaatgttcaatcctgatgctagcagacactgagaatgagaagaataagtgggtgggagtgctgagtgaattgcacaagattttgaagaaaaacaaattcagagaccgctcagtctatgttcccaaagaggcttatgacagcactctacccctcattaaaacaacccaggcagccgcaatcatagatcatgaaagaattgctttgggaaacgaagaagggttatttgttgtacatgtcaccaaagatgaaattattagagttggtgacaataagaagattcatcagattgaactcattccaaatgatcagcttgttgctgtgatctcaggacgaaatcgtcatgtacgactttttcctatgtcagcattggatgggcgagagaccgatttttacaagctgtcagaaactaaagggtgtcaaaccgtaacttctggaaaggtgcgccatggagctctcacatgcctgtgtgtggctatgaaaaggcaggtcctctgttatgaactatttcagagcaagacccgtcacagaaaatttaaagaaattcaagtcccatataatgtccagtggatggcaatcttcagtgaacaactctgtgtgggattccagtcaggatttctaagataccccttgaatggagaaggaaatccatacagtatgctccattcaaatgaccatacactatcatttattgcacatcaaccaatggatgctatctgcgcagttgagatctccagtaaagaatatctgctgtgttttaacagcattgggatatacactgactgccagggccgaagatctagacaacaggaattgatgtggccagcaaatccttcctcttgttgttacaatgcaccatatctctcggtgtacagtgaaaatgcagttgatatctttgatgtgaactccatggaatggattcagactcttcctctcaaaaaggttcgacccttaaacaatgaaggatcattaaatcttttagggttggagaccattagattaatatatttcaaaaataagatggcagaaggggacgaactggtagtacctgaaacatcagataatagtcggaaacaaatggttagaaacattaacaataagcggcgttattccttcagagtcccagaagaggaaaggatgcagcagaggagggaaatgctacgagatccagaaatgagaaataaattaatttctaatccaactaattttaatcacatagcacacatgggtcctggagatggaatacagatcctgaaagatctgcccatgaaccctcggcctcaggaaagtcggacagtattcagtggctcagtcagtattccatctatcaccaaatcccgccctgagccaggccgctccatgagtgctagcagtggcttgtcagcaaggtcatccgcacagaatggcagcgcattaaagagggaattctctggaggaagctacagtgccaagcggcagcccatgccctccccgtcagagggctctttgtcctctggaggcatggaccaaggaagtgatgccccagcgagggactttgacggagaggactctgactctccgaggcattccacagcttccaacagttccaacctaagcagccccccaagcccagcttcaccccgaaaaaccaagagcctctccctggagagcactgaccgcgggagctgggacccgtgagctgcctcagcactgggacctctcgctctccgctccctgccactcgcctcctctcactttcatctcttccctccacctcgcctgctcggcctgaaagccaccaggggctggcagcagtagcaggacagggattcaggagttctgacgacacgactctcagatccacgcccccagcctaacagcaacaacaaagacagactttccgtagcagcttagattaacgttgatttcattccatgcacttagagttgctttcagtaacattttacccctactcccaaaggtagcttaaatagacagattacacaaatgtaagtgataagaataagattagacagattttgctttcacagtagagtctcattatagtcctaaaatagctcatgggcttctccgcatccagaagggagaattggtccctggagtggctcactaagctcttaatcagcaaacgcagtgagtatcaacctgattgttgccaggaaatccttatgaattaaaacaatgcatattttactacagtacagagtttaaatgaatacataaatgtagaagtactgaatgtatatatttaaaaggagcctcttgtattcaacaaaagatggatgcatatataagagagatgatttaatttaaagaaatatgttgtttcttgtctgtaatgtaatgtaaagggtggaaaggcctcaagctcacatttgtagagagagagcgagagaaatcagagttccctttattgccctgtcctcaaactggtcataggctctagtcacctggggagctgtagaaaacacttgcagagccaggttttgctggtttggggcatgccctgggcaccagagctttaacatttgaagccacttcagcagcagcagcaaaaggcgaactcatctctacccaagatgtttcttttcctagtggtggaatttgaacacttctcactttttattgtattttatcttccgcagataaatgtagaaatacacgattctgtcacctctgatcccttccatctgaaaggttacaaggagtgttgtagcttctgaaggtgcagaaaacaatttctaaaaatgcttttattcctgggctaatcctgtccctccctaagtcacagcgaggtgtctgtcccagggctggagatgcttcccaaggaggagtctgttttgttgagagtgggcgtgggcttcttcacataagcctggggaaggaagaaaaaacggctttcattaccaaataatgtaaaacctcaaaagcaagggcttcaacagccttaaccaaatattattccccatagccagtggaaaatggatgtgacaaccccagtgcgcaggccagagtgagtgagcccagcacggcgctccgactggcttcctctctcaggtgctggattgtggggttagtggcatttccagctggattcctcctgttgtagttgccataaggaaatgagatgcagaatcagaaggatctatttctacagaatcatttcaccagttaagcacatgagtagagaaagagataaaaataaaagtatctcatgaaggaaagagattttgcctctcttttacttttcacctaagtttctctgagaaatagagacaggattctctctttaaaattcagtgaaaatgaagaaagttttcctgcagttgctaacctgagttgcagtgtttaaggccatcatttcactgctgctgtctgtgactccacgtctgtgtcactgaggtgacctgcgtgtcactgaggtggccaccatgctggcctgcggcatgtgcagggagctgaggctgtttccaggtgatgctgctgtgtggagaaggttctgagatgcagtgagggaagaaaggatcctgctggggattccattgtaagcacctataatcgggaattttcatgtaacagctttgacatttaaacattctgagtttggtgccagctcagatttgattatattttattttggatgggtgtaattcacagcacagttctaatctcccaaatctttctgctttttagaatgaagtataaaaatacttttctcacctgaataccaagggttggccctttagttggatcattgtcatatgacttggtagatccttgtcctcagcacctcacgtgagagaagggagtcagccagccggccccctgcttggtgctcgtgaccagctcgcaccccttctgtccacccttctctcctctcctccccactctccccaccctcctcactctccccaccctcctcactctccccaccctcccctcctctcctcctcactcttcccaccctccccatccccaccctccccatcctcctcttccctttccccttgccttctcctctctcccttctcttctcaggcagggaggaggccatcccaagccgagattaacaggacttgacataagccattagtttgtagctttgacaagtaattatgaatttttgttgcttataggtgcttattttgcaaaggatgcttttaagatcaaaataataaccctacctaaagtctagctccactgctatgggtcatactcttcagcctcccaacagggcagagagagagagctactgaggcttgtctaggttgccaggctaactgggcgacttgtccatattcaccccatggattgcaccatggcactctttgatttttccactgcaatggcaagtaatctcatcagtcataatagagcagtcccgaatgcgtgcagattctaaaagcagggctttaggagagaaacactgccagggggaatagttttggggagggttttcccaaaataacggtcatcctactgggtttatcccacccttaaatatgaagcctgttacctccagaagcttctgagaagaatgatgtgaaaagacagggagtgggttctaggcaaagaaaacataatgaccattcagaggagtcagtagcacagctcacagataaagtattttattactatctgaagttttcttttgttttcatgcaggacattttaaaaacgtatatggcagcagaaacctgtttctcaatagaaaaaatacattcagaggcatttctgggatagtctatctgtgttagtatttggtgctatctatgtccagccaagttatctaccctcaaattctgactaatcatgtttgtgctttgggtatttaaaattacatacatatatattctttttgccaaaaacaaaagtcttgcttcttgtcaaatgattgctaaagtagatcttacattttttgttattatgtatgtatttatacacatccccaacacacttagtgatttctgttatttcctagggagcacagctttaaggctatgagatacaactaaaaggagcccatctatttggttttccagccaattattgtactcacatttcaggggagaatctgaaattcctgtcatgtttacagcaacaatctatcattcctggctagctctcagcctctctctccttccataggttagaattatgtcattttgttacttagtggccacgtctatttctgagaaagactggttacatttatgtggcatctcaggtatcattaaggaaaagccagagcaggggtgagcagaggtcaaaaccacagacgcagcagggccatttgccgcctttggccgggatcacaaccactgcagtctcccagcaggtaggccttgccaagcctaaggctccccatccaatctagacagaggggcgctcagagcagactttgccgtagcccatgtctggtgagcacaacagggaatgaattgggcactccactcccccgtctctctggcccagccctgaactagatgagctgcatttcatggagcccattttaaaatctctttccttatgactttgttactcaagtccagagttctctgtgcacttctgctagataaggagtgtaagccctgccccccagcactggcagcacgctgggccctccccacacaggacaccgtgcagttccgggggaagctgactcaaatcaaccttgaaatctcatgaaaacaaaatgacttgtctttttatttgatagtgtaatatcattcattttataaattttttagggtttttctcgtaatattgtacagttttgcatggcctggtgtgatcattttttggttagaatataatgctgacaaatgtggatggaggggaagatactgctttagcctatcactccttattttattttgtttggttttatgccctcagtgtcttagggaactttttaagagatcctctgctaccaaacaatgatgtggattcttttgcacagaaatatttaaggtgggatggtaaaaaatgtcacaaaagactcctcaccaatactttatgttgatatcacttaatattaaccagactttgctgtattgcaataaaacagagaactgtt

SEQ ID NO: 5240 - DNA, 5732 bp, Homo sapiens
  source 1..5732: mol_type = unassigned DNA
atttgcagcaacatttttggttttccctcccccttctatgcattctgtttttttcctcccttttctgtttttcttcttcccgggaagtgaattgctgatgcaaatcggactttattcattaatgatgcaaccggattcgtttcaggattacgttgcacgagttgaattttgaatgaaggagaagagtttttttttttttttttaaagaagtgttgactctctagttcgttgtacttttaattattattttatttaaatatacgacttaattgtattcttttaaaaatgcattaagtatatattttatggtaatttaccctcaaaatatatgtatatgggtgaaattgaagacgcttcagttaagtgaggttactggtgtgttggatgtttaattcagcaccagcattgcatgacagttgtttgaataacaagtggtttatttttaaaaccataccttttaaaatttaggttcagataatagtaaaagtcatcataataatttaaaggaaaaccagcagaaatcgaagcaaacatgtctggagaagtgcgtttgaggcagttggagcagtttattttggacgggcccgctcagaccaatgggcagtgcttcagtgtggagacattactggatatactcatctgcctttatgatgaatgcaataattctccattgagaagagagaagaacattctcgaatacctagaatgggctaaaccatttacttctaaagtgaaacaaatgcgattacatagagaagactttgaaatattaaaggtgattggtcgaggagcttttggggaggttgctgtagtaaaactaaaaaatgcagataaagtgtttgccatgaaaatattgaataaatgggaaatgctgaaaagagctgagacagcatgttttcgtgaagaaagggatgtattagtgaatggagacaataaatggattacaaccttgcactatgctttccaggatgacaataacttatacctggttatggattattatgttggtggggatttgcttactctactcagcaaatttgaagatagattgcctgaagatatggctagattttacttggctgagatggtgatagcaattgactcagttcatcagctacattatgtacacagagacattaaacctgacaatatactgatggatatgaatggacatattcggttagcagattttggttcttgtctgaagctgatggaagatggaacggttcagtcctcagtggctgtaggaactccagattatatctctcctgaaatccttcaagccatggaagatggaaaagggagatatggacctgaatgtgactggtggtctttgggggtctgtatgtatgaaatgctttacggagaaacaccattttatgcagaatcgctggtggagacatacggaaaaatcatgaaccacaaagagaggtttcagtttccagcccaagtgactgatgtgtctgaaaatgctaaggatcttattcgaaggctcatttgtagcagagaacatcgacttggtcaaaatggaatagaagactttaagaaacacccatttttcagtggaattgattgggataatattcggaactgtgaagcaccttatattccagaagttagtagcccaacagatacatcgaattttgatgtagatgatgattgtttaaaaaattctgaaacgatgcccccaccaacacatactgcattttctggccaccatctgccatttgttggttttacatatactagtagctgtgtactttctgatcggagctgtttaagagttacggctggtcccacctcactggatcttgatgttaatgttcagaggactctagacaacaacttagcaactgaagcttatgaaagaagaattaagcgccttgagcaagaaaaacttgaactcagtagaaaacttcaagagtcaacacagactgtccaagctctgcagtattcaactgttgatggtccactaacagcaagcaaagatttagaaataaaaaacttaaaagaagaaattgaaaaactaagaaaacaagtaacagaatcaagtcatttggaacagcaacttgaagaagctaatgctgtgaggcaagaactagatgatgcttttagacaaatcaaggcttatgaaaaacaaatcaaaacgttacaacaagaaagagaagatctaaataaggaactagtccaggctagtgagcgattaaaaaaccaatccaaagagctgaaagacgcacactgtcagaggaaactggccatgcaggaattcatggagatcaatgagcggctaacagaattgcacacccaaaaacagaaacttgctcgccatgtccgagataaggaagaagaggtggacctggtgatgcaaaaagttgaaagcttaaggcaagaactgcgcagaacagaaagagccaaaaaagagctggaagttcatacagaagctctagctgctgaagcatctaaagacaggaagctacgtgaacagagtgagcactattctaagcaactggaaaatgaattggagggactgaagcaaaaacaaattagttactcaccaggagtatgcagcatagaacatcagcaagagataaccaaactaaagactgatttggaaaagaaaagtatcttttatgaagaagaattatctaaaagagaaggaatacatgcaaatgaaataaaaaatcttaagaaagaactgcatgattcagaaggtcagcaacttgctctcaacaaagaaattatgattttaaaagacaaattggaaaaaaccagaagagaaagtcaaagtgaaagggaggaatttgaaagtgagttcaaacaacaatatgaacgagaaaaagtgttgttaactgaagaaaataaaaagctgacgagtgaacttgataagcttactactttgtatgagaacttaagtatacacaaccagcagttagaagaagaggttaaagatctagcagacaagaaagaatcagttgcacattgggaagcccaaatcacagaaataattcagtgggtcagcgatgaaaaggatgcacgagggtatcttcaggccttagcttctaaaatgactgaagaattggaggcattaagaaattccagcttgggtacacgagcaacagatatgccctggaaaatgcgtcgttttgcgaaactggatatgtcagctagactggagttgcagtcggctctggatgcagaaataagagccaaacaggccatccaagaagagttgaataaagttaaagcatctaatatcataacagaatgtaaactaaaagattcagagaagaagaacttggaactactctcagaaatcgaacagctgataaaggacactgaagagcttagatctgaaaagggtatagagcaccaagactcacagcattctttcttggcatttttgaatacgcctaccgatgctctggatcaatttgaacgctctccatcctgtactccagctagcaaaggcagacgtactgtagactccactccactttcagttcacacaccaaccttaaggaaaaaaggatgtcctggttcaactggctttccacctaagcgcaagactcaccagttttttgtaaaatcttttactactcctaccaagtgtcatcagtgtacctccttgatggtgggtttaataagacagggctgttcatgtgaagtgtgtggattctcatgccatataacttgtgtaaacaaagctccaaccacttgtccagttcctcctgaacagacaaaaggtcccctgggtatagatcctcagaaaggaataggaacagcatatgaaggtcatgtcaggattcctaagccagctggagtgaagaaagggtggcagagagcactggctatagtgtgtgacttcaaactctttctgtacgatattgctgaaggaaaagcatctcagcccagtgttgtcattagtcaagtgattgacatgagggatgaagaattttctgtgagttcagtcttggcttctgatgttatccatgcaagtcggaaagatataccctgtatatttagggtcacagcttcccagctctcagcatctaataacaaatgttcaatcctgatgctagcagacactgagaatgagaagaataagtgggtgggagtgctgagtgaattgcacaagattttgaagaaaaacaaattcagagaccgctcagtctatgttcccaaagaggcttatgacagcactctacccctcattaaaacaacccaggcagccgcaatcatagatcatgaaagaattgctttgggaaacgaagaagggttatttgttgtacatgtcaccaaagatgaaattattagagttggtgacaataagaagattcatcagattgaactcattccaaatgatcagcttgttgctgtgatctcaggacgaaatcgtcatgtacgactttttcctatgtcagcattggatgggcgagagaccgatttttacaagctgtcagaaactaaagggtgtcaaaccgtaacttctggaaaggtgcgccatggagctctcacatgcctgtgtgtggctatgaaaaggcaggtcctctgttatgaactatttcagagcaagacccgtcacagaaaatttaaagaaattcaagtcccatataatgtccagtggatggcaatcttcagtgaacaactctgtgtgggattccagtcaggatttctaagataccccttgaatggagaaggaaatccatacagtatgctccattcaaatgaccatacactatcatttattgcacatcaaccaatggatgctatctgcgcagttgagatctccagtaaagaatatctgctgtgttttaacagcattgggatatacactgactgccagggccgaagatctagacaacaggaattgatgtggccagcaaatccttcctcttgttgttacaatgcaccatatctctcggtgtacagtgaaaatgcagttgatatctttgatgtgaactccatggaatggattcagactcttcctctcaaaaaggttcgacccttaaacaatgaaggatcattaaatcttttagggttggagaccattagattaatatatttcaaaaataagatggcagaaggggacgaactggtagtacctgaaacatcagataatagtcggaaacaaatggttagaaacattaacaataagcggcgttattccttcagagtcccagaagaggaaaggatgcagcagaggagggaaatgctacgagatccagaaatgagaaataaattaatttctaatccaactaattttaatcacatagcacacatgggtcctggagatggaatacagatcctgaaagatctgcccatgaaccctcggcctcaggaaagtcggacagtattcagtggctcagtcagtattccatctatcaccaaatcccgccctgagccaggccgctccatgagtgctagcagtggcttgtcagcaaggtcatccgcacagaatggcagcgcattaaagagggaattctctggaggaagctacagtgccaagcggcagcccatgccctccccgtcagagggctctttgtcctctggaggcatggaccaaggaagtgatgccccagcgagggactttgacggagaggactctgactctccgaggcattccacagcttccaacagttccaacctaagcagccccccaagcccagcttcaccccgaaaaaccaagagcctctccctggagagcactgaccgcgggagctgggacccgtgag

SEQ ID NO: 5241 - DNA, 10610 bp, Homo sapiens
  source 1..10610: mol_type = unassigned DNA
gcggcccggtgcgggtgtcggggagaccgggctctctgcccggcgcggcgcggcgcggctcggcccacgagcgaccaccgacatggagtgggctcgggcggccaagtagccgcttctccggagcccggtgccagtgccgcccgcagcccgccttccacccccggccgcgccgccggtcaggccctagggtgaagccgggaggaaaatgaagagttttcaccggaatccgttgaaaataggactgactgcaaagccttaaagaaagaaggacctcgggaggagaaacgaaaagccgcctccgggcaagacttggcgtgctccgagccgaggggctgcttcagggacctcgccccctccctttcccgctggagaaattgccgctgatgcattatccaagtggtggttgggaggatttgcagcaacatttttggttttccctcccccttctatgcattctgtttttttcctcccttttctgtttttcttcttcccgggaagtgaattgctgatgcaaatcggactttattcattaatgatgcaaccggattcgtttcaggattacgttgcacgagttgaattttgaatgaaggagaagagtttttttttttttttttaaagaagtgttgactctctagttcgttgtacttttaattattattttatttaaatatacgacttaattgtattcttttaaaaatgcattaagtatatattttatggtaatttaccctcaaaatatatgtatatgggtgaaattgaagacgcttcagttaagtgaggttactggtgtgttggatgtttaattcagcaccagcattgcatgacagttgtttgaataacaagtggtttatttttaaaaccataccttttaaaatttaggttcagataatagtaaaagtcatcataataatttaaaggaaaaccagcagaaatcgaagcaaacatgtctggagaagtgcgtttgaggcagttggagcagtttattttggacgggcccgctcagaccaatgggcagtgcttcagtgtggagacattactggatatactcatctgcctttatgatgaatgcaataattctccattgagaagagagaagaacattctcgaatacctagaatgggctaaaccatttacttctaaagtgaaacaaatgcgattacatagagaagactttgaaatattaaaggtgattggtcgaggagcttttggggaggttgctgtagtaaaactaaaaaatgcagataaagtgtttgccatgaaaatattgaataaatgggaaatgctgaaaagagctgagacagcatgttttcgtgaagaaagggatgtattagtgaatggagacaataaatggattacaaccttgcactatgctttccaggatgacaataacttatacctggttatggattattatgttggtggggatttgcttactctactcagcaaatttgaagatagattgcctgaagatatggctagattttacttggctgagatggtgatagcaattgactcagttcatcagctacattatgtacacagagacattaaacctgacaatatactgatggatatgaatggacatattcggttagcagattttggttcttgtctgaagctgatggaagatggaacggttcagtcctcagtggctgtaggaactccagattatatctctcctgaaatccttcaagccatggaagatggaaaagggagatatggacctgaatgtgactggtggtctttgggggtctgtatgtatgaaatgctttacggagaaacaccattttatgcagaatcgctggtggagacatacggaaaaatcatgaaccacaaagagaggtttcagtttccagcccaagtgactgatgtgtctgaaaatgctaaggatcttattcgaaggctcatttgtagcagagaacatcgacttggtcaaaatggaatagaagactttaagaaacacccatttttcagtggaattgattgggataatattcggaactgtgaagcaccttatattccagaagttagtagcccaacagatacatcgaattttgatgtagatgatgattgtttaaaaaattctgaaacgatgcccccaccaacacatactgcattttctggccaccatctgccatttgttggttttacatatactagtagctgtgtactttctgatcggagctgtttaagagttacggctggtcccacctcactggatcttgatgttaatgttcagaggactctagacaacaacttagcaactgaagcttatgaaagaagaattaagcgccttgagcaagaaaaacttgaactcagtagaaaacttcaagagtcaacacagactgtccaagctctgcagtattcaactgttgatggtccactaacagcaagcaaagatttagaaataaaaaacttaaaagaagaaattgaaaaactaagaaaacaagtaacagaatcaagtcatttggaacagcaacttgaagaagctaatgctgtgaggcaagaactagatgatgcttttagacaaatcaaggcttatgaaaaacaaatcaaaacgttacaacaagaaagagaagatctaaataaggaactagtccaggctagtgagcgattaaaaaaccaatccaaagagctgaaagacgcacactgtcagaggaaactggccatgcaggaattcatggagatcaatgagcggctaacagaattgcacacccaaaaacagaaacttgctcgccatgtccgagataaggaagaagaggtggacctggtgatgcaaaaagttgaaagcttaaggcaagaactgcgcagaacagaaagagccaaaaaagagctggaagttcatacagaagctctagctgctgaagcatctaaagacaggaagctacgtgaacagagtgagcactattctaagcaactggaaaatgaattggagggactgaagcaaaaacaaattagttactcaccaggagtatgcagcatagaacatcagcaagagataaccaaactaaagactgatttggaaaagaaaagtatcttttatgaagaagaattatctaaaagagaaggaatacatgcaaatgaaataaaaaatcttaagaaagaactgcatgattcagaaggtcagcaacttgctctcaacaaagaaattatgattttaaaagacaaattggaaaaaaccagaagagaaagtcaaagtgaaagggaggaatttgaaagtgagttcaaacaacaatatgaacgagaaaaagtgttgttaactgaagaaaataaaaagctgacgagtgaacttgataagcttactactttgtatgagaacttaagtatacacaaccagcagttagaagaagaggttaaagatctagcagacaagaaagaatcagttgcacattgggaagcccaaatcacagaaataattcagtgggtcagcgatgaaaaggatgcacgagggtatcttcaggccttagcttctaaaatgactgaagaattggaggcattaagaaattccagcttgggtacacgagcaacagatatgccctggaaaatgcgtcgttttgcgaaactggatatgtcagctagactggagttgcagtcggctctggatgcagaaataagagccaaacaggccatccaagaagagttgaataaagttaaagcatctaatatcataacagaatgtaaactaaaagattcagagaagaagaacttggaactactctcagaaatcgaacagctgataaaggacactgaagagcttagatctgaaaagggtatagagcaccaagactcacagcattctttcttggcatttttgaatacgcctaccgatgctctggatcaatttgaaactgatcccgttgagaacacatatgtatggaacccgagcgtcaagtttcacatccagtcacggtccacatctccttccacatctagtgaagctgagccagttaagactgtagactccactccactttcagttcacacaccaaccttaaggaaaaaaggatgtcctggttcaactggctttccacctaagcgcaagactcaccagttttttgtaaaatcttttactactcctaccaagtgtcatcagtgtacctccttgatggtgggtttaataagacagggctgttcatgtgaagtgtgtggattctcatgccatataacttgtgtaaacaaagctccaaccacttgtccagttcctcctgaacagacaaaaggtcccctgggtatagatcctcagaaaggaataggaacagcatatgaaggtcatgtcaggattcctaagccagctggagtgaagaaagggtggcagagagcactggctatagtgtgtgacttcaaactctttctgtacgatattgctgaaggaaaagcatctcagcccagtgttgtcattagtcaagtgattgacatgagggatgaagaattttctgtgagttcagtcttggcttctgatgttatccatgcaagtcggaaagatataccctgtatatttagggtcacagcttcccagctctcagcatctaataacaaatgttcaatcctgatgctagcagacactgagaatgagaagaataagtgggtgggagtgctgagtgaattgcacaagattttgaagaaaaacaaattcagagaccgctcagtctatgttcccaaagaggcttatgacagcactctacccctcattaaaacaacccaggcagccgcaatcatagatcatgaaagaattgctttgggaaacgaagaagggttatttgttgtacatgtcaccaaagatgaaattattagagttggtgacaataagaagattcatcagattgaactcattccaaatgatcagcttgttgctgtgatctcaggacgaaatcgtcatgtacgactttttcctatgtcagcattggatgggcgagagaccgatttttacaagctgtcagaaactaaagggtgtcaaaccgtaacttctggaaaggtgcgccatggagctctcacatgcctgtgtgtggctatgaaaaggcaggtcctctgttatgaactatttcagagcaagacccgtcacagaaaatttaaagaaattcaagtcccatataatgtccagtggatggcaatcttcagtgaacaactctgtgtgggattccagtcaggatttctaagataccccttgaatggagaaggaaatccatacagtatgctccattcaaatgaccatacactatcatttattgcacatcaaccaatggatgctatctgcgcagttgagatctccagtaaagaatatctgctgtgttttaacagcattgggatatacactgactgccagggccgaagatctagacaacaggaattgatgtggccagcaaatccttcctcttgttgttacaatgcaccatatctctcggtgtacagtgaaaatgcagttgatatctttgatgtgaactccatggaatggattcagactcttcctctcaaaaaggttcgacccttaaacaatgaaggatcattaaatcttttagggttggagaccattagattaatatatttcaaaaataagatggcagaaggggacgaactggtagtacctgaaacatcagataatagtcggaaacaaatggttagaaacattaacaataagcggcgttattccttcagagtcccagaagaggaaaggatgcagcagaggagggaaatgctacgagatccagaaatgagaaataaattaatttctaatccaactaattttaatcacatagcacacatgggtcctggagatggaatacagatcctgaaagatctgcccatgaaccctcggcctcaggaaagtcggacagtattcagtggctcagtcagtattccatctatcaccaaatcccgccctgagccaggccgctccatgagtgctagcagtggcttgtcagcaaggtcatccgcacagaatggcagcgcattaaagagggaattctctggaggaagctacagtgccaagcggcagcccatgccctccccgtcagagggctctttgtcctctggaggcatggaccaaggaagtgatgccccagcgagggactttgacggagaggactctgactctccgaggcattccacagcttccaacagttccaacctaagcagccccccaagcccagcttcaccccgaaaaaccaagagcctctccctggagagcactgaccgcgggagctgggacccgtgagctgcctcagcactgggacctctcgctctccgctccctgccactcgcctcctctcactttcatctcttccctccacctcgcctgctcggcctgaaagccaccaggggctggcagcagtagcaggacagggattcaggagttctgacgacacgactctcagatccacgcccccagcctaacagcaacaacaaagacagactttccgtagcagcttagattaacgttgatttcattccatgcacttagagttgctttcagtaacattttacccctactcccaaaggtagcttaaatagacagattacacaaatgtaagtgataagaataagattagacagattttgctttcacagtagagtctcattatagtcctaaaatagctcatgggcttctccgcatccagaagggagaattggtccctggagtggctcactaagctcttaatcagcaaacgcagtgagtatcaacctgattgttgccaggaaatccttatgaattaaaacaatgcatattttactacagtacagagtttaaatgaatacataaatgtagaagtactgaatgtatatatttaaaaggagcctcttgtattcaacaaaagatggatgcatatataagagagatgatttaatttaaagaaatatgttgtttcttgtctgtaatgtaatgtaaagggtggaaaggcctcaagctcacatttgtagagagagagcgagagaaatcagagttccctttattgccctgtcctcaaactggtcataggctctagtcacctggggagctgtagaaaacacttgcagagccaggttttgctggtttggggcatgccctgggcaccagagctttaacatttgaagccacttcagcagcagcagcaaaaggcgaactcatctctacccaagatgtttcttttcctagtggtggaatttgaacacttctcactttttattgtattttatcttccgcagataaatgtagaaatacacgattctgtcacctctgatcccttccatctgaaaggttacaaggagtgttgtagcttctgaaggtgcagaaaacaatttctaaaaatgcttttattcctgggctaatcctgtccctccctaagtcacagcgaggtgtctgtcccagggctggagatgcttcccaaggaggagtctgttttgttgagagtgggcgtgggcttcttcacataagcctggggaaggaagaaaaaacggctttcattaccaaataatgtaaaacctcaaaagcaagggcttcaacagccttaaccaaatattattccccatagccagtggaaaatggatgtgacaaccccagtgcgcaggccagagtgagtgagcccagcacggcgctccgactggcttcctctctcaggtgctggattgtggggttagtggcatttccagctggattcctcctgttgtagttgccataaggaaatgagatgcagaatcagaaggatctatttctacagaatcatttcaccagttaagcacatgagtagagaaagagataaaaataaaagtatctcatgaaggaaagagattttgcctctcttttacttttcacctaagtttctctgagaaatagagacaggattctctctttaaaattcagtgaaaatgaagaaagttttcctgcagttgctaacctgagttgcagtgtttaaggccatcatttcactgctgctgtctgtgactccacgtctgtgtcactgaggtgacctgcgtgtcactgaggtggccaccatgctggcctgcggcatgtgcagggagctgaggctgtttccaggtgatgctgctgtgtggagaaggttctgagatgcagtgagggaagaaaggatcctgctggggattccattgtaagcacctataatcgggaattttcatgtaacagctttgacatttaaacattctgagtttggtgccagctcagatttgattatattttattttggatgggtgtaattcacagcacagttctaatctcccaaatctttctgctttttagaatgaagtataaaaatacttttctcacctgaataccaagggttggccctttagttggatcattgtcatatgacttggtagatccttgtcctcagcacctcacgtgagagaagggagtcagccagccggccccctgcttggtgctcgtgaccagctcgcaccccttctgtccacccttctctcctctcctccccactctccccaccctcctcactctccccaccctcctcactctccccaccctcccctcctctcctcctcactcttcccaccctccccatccccaccctccccatcctcctcttccctttccccttgccttctcctctctcccttctcttctcaggcagggaggaggccatcccaagccgagattaacaggacttgacataagccattagtttgtagctttgacaagtaattatgaatttttgttgcttataggtgcttattttgcaaaggatgcttttaagatcaaaataataaccctacctaaagtctagctccactgctatgggtcatactcttcagcctcccaacagggcagagagagagagctactgaggcttgtctaggttgccaggctaactgggcgacttgtccatattcaccccatggattgcaccatggcactctttgatttttccactgcaatggcaagtaatctcatcagtcataatagagcagtcccgaatgcgtgcagattctaaaagcagggctttaggagagaaacactgccagggggaatagttttggggagggttttcccaaaataacggtcatcctactgggtttatcccacccttaaatatgaagcctgttacctccagaagcttctgagaagaatgatgtgaaaagacagggagtgggttctaggcaaagaaaacataatgaccattcagaggagtcagtagcacagctcacagataaagtattttattactatctgaagttttcttttgttttcatgcaggacattttaaaaacgtatatggcagcagaaacctgtttctcaatagaaaaaatacattcagaggcatttctgggatagtctatctgtgttagtatttggtgctatctatgtccagccaagttatctaccctcaaattctgactaatcatgtttgtgctttgggtatttaaaattacatacatatatattctttttgccaaaaacaaaagtcttgcttcttgtcaaatgattgctaaagtagatcttacattttttgttattatgtatgtatttatacacatccccaacacacttagtgatttctgttatttcctagggagcacagctttaaggctatgagatacaactaaaaggagcccatctatttggttttccagccaattattgtactcacatttcaggggagaatctgaaattcctgtcatgtttacagcaacaatctatcattcctggctagctctcagcctctctctccttccataggttagaattatgtcattttgttacttagtggccacgtctatttctgagaaagactggttacatttatgtggcatctcaggtatcattaaggaaaagccagagcaggggtgagcagaggtcaaaaccacagacgcagcagggccatttgccgcctttggccgggatcacaaccactgcagtctcccagcaggtaggccttgccaagcctaaggctccccatccaatctagacagaggggcgctcagagcagactttgccgtagcccatgtctggtgagcacaacagggaatgaattgggcactccactcccccgtctctctggcccagccctgaactagatgagctgcatttcatggagcccattttaaaatctctttccttatgactttgttactcaagtccagagttctctgtgcacttctgctagataaggagtgtaagccctgccccccagcactggcagcacgctgggccctccccacacaggacaccgtgcagttccgggggaagctgactcaaatcaaccttgaaatctcatgaaaacaaaatgacttgtctttttatttgatagtgtaatatcattcattttataaattttttagggtttttctcgtaatattgtacagttttgcatggcctggtgtgatcattttttggttagaatataatgctgacaaatgtggatggaggggaagatactgctttagcctatcactccttattttattttgtttggttttatgccctcagtgtcttagggaactttttaagagatcctctgctaccaaacaatgatgtggattcttttgcacagaaatatttaaggtgggatggtaaaaaatgtcacaaaagactcctcaccaatactttatgttgatatcacttaatattaaccagactttgctgtattgcaataaaacagagaactgtt

SEQ ID NO: 5242 - DNA, 9320 bp, Homo sapiens
  source 1..9320: mol_type = unassigned DNA
atgtctggagaagtgcgtttgaggcagttggagcagtttattttggacgggcccgctcagaccaatgggcagtgcttcagtgtggagacattactggatatactcatctgcctttatgatgaatgcaataattctccattgagaagagagaagaacattctcgaatacctagaatgggctaaaccatttacttctaaagtgaaacaaatgcgattacatagagaagactttgaaatattaaaggtgattggtcgaggagcttttggggaggttgctgtagtaaaactaaaaaatgcagataaagtgtttgccatgaaaatattgaataaatgggaaatgctgaaaagagctgagacagcatgttttcgtgaagaaagggatgtattagtgaatggagacaataaatggattacaaccttgcactatgctttccaggatgacaataacttatacctggttatggattattatgttggtggggatttgcttactctactcagcaaatttgaagatagattgcctgaagatatggctagattttacttggctgagatggtgatagcaattgactcagttcatcagctacattatgtacacagagacattaaacctgacaatatactgatggatatgaatggacatattcggttagcagattttggttcttgtctgaagctgatggaagatggaacggttcagtcctcagtggctgtaggaactccagattatatctctcctgaaatccttcaagccatggaagatggaaaagggagatatggacctgaatgtgactggtggtctttgggggtctgtatgtatgaaatgctttacggagaaacaccattttatgcagaatcgctggtggagacatacggaaaaatcatgaaccacaaagagaggtttcagtttccagcccaagtgactgatgtgtctgaaaatgctaaggatcttattcgaaggctcatttgtagcagagaacatcgacttggtcaaaatggaatagaagactttaagaaacacccatttttcagtggaattgattgggataatattcggaactgtgaagcaccttatattccagaagttagtagcccaacagatacatcgaattttgatgtagatgatgattgtttaaaaaattctgaaacgatgcccccaccaacacatactgcattttctggccaccatctgccatttgttggttttacatatactagtagctgtgtactttctgatcggagctgtttaagagttacggctggtcccacctcactggatcttgatgttaatgttcagaggactctagacaacaacttagcaactgaagcttatgaaagaagaattaagcgccttgagcaagaaaaacttgaactcagtagaaaacttcaagagtcaacacagactgtccaagctctgcagtattcaactgttgatggtccactaacagcaagcaaagatttagaaataaaaaacttaaaagaagaaattgaaaaactaagaaaacaagtaacagaatcaagtcatttggaacagcaacttgaagaagctaatgctgtgaggcaagaactagatgatgcttttagacaaatcaaggcttatgaaaaacaaatcaaaacgttacaacaagaaagagaagatctaaataagctggaagttcatacagaagctctagctgctgaagcatctaaagacaggaagctacgtgaacagagtgagcactattctaagcaactggaaaatgaattggagggactgaagcaaaaacaaattagttactcaccaggagtatgcagcatagaacatcagcaagagataaccaaactaaagactgatttggaaaagaaaagtatcttttatgaagaagaattatctaaaagagaaggaatacatgcaaatgaaataaaaaatcttaagaaagaactgcatgattcagaaggtcagcaacttgctctcaacaaagaaattatgattttaaaagacaaattggaaaaaaccagaagagaaagtcaaagtgaaagggaggaatttgaaagtgagttcaaacaacaatatgaacgagaaaaagtgttgttaactgaagaaaataaaaagctgacgagtgaacttgataagcttactactttgtatgagaacttaagtatacacaaccagcagttagaagaagaggttaaagatctagcagacaagaaagaatcagttgcacattgggaagcccaaatcacagaaataattcagtgggtcagcgatgaaaaggatgcacgagggtatcttcaggccttagcttctaaaatgactgaagaattggaggcattaagaaattccagcttgggtacacgagcaacagatatgccctggaaaatgcgtcgttttgcgaaactggatatgtcagctagactggagttgcagtcggctctggatgcagaaataagagccaaacaggccatccaagaagagttgaataaagttaaagcatctaatatcataacagaatgtaaactaaaagattcagagaagaagaacttggaactactctcagaaatcgaacagctgataaaggacactgaagagcttagatctgaaaagggtatagagcaccaagactcacagcattctttcttggcatttttgaatacgcctaccgatgctctggatcaatttgaaactgtagactccactccactttcagttcacacaccaaccttaaggaaaaaaggatgtcctggttcaactggctttccacctaagcgcaagactcaccagttttttgtaaaatcttttactactcctaccaagtgtcatcagtgtacctccttgatggtgggtttaataagacagggctgttcatgtgaagtgtgtggattctcatgccatataacttgtgtaaacaaagctccaaccacttgtccagttcctcctgaacagacaaaaggtcccctgggtatagatcctcagaaaggaataggaacagcatatgaaggtcatgtcaggattcctaagccagctggagtgaagaaagggtggcagagagcactggctatagtgtgtgacttcaaactctttctgtacgatattgctgaaggaaaagcatctcagcccagtgttgtcattagtcaagtgattgacatgagggatgaagaattttctgtgagttcagtcttggcttctgatgttatccatgcaagtcggaaagatataccctgtatatttagggtcacagcttcccagctctcagcatctaataacaaatgttcaatcctgatgctagcagacactgagaatgagaagaataagtgggtgggagtgctgagtgaattgcacaagattttgaagaaaaacaaattcagagaccgctcagtctatgttcccaaagaggcttatgacagcactctacccctcattaaaacaacccaggcagccgcaatcatagatcatgaaagaattgctttgggaaacgaagaagggttatttgttgtacatgtcaccaaagatgaaattattagagttggtgacaataagaagattcatcagattgaactcattccaaatgatcagcttgttgctgtgatctcaggacgaaatcgtcatgtacgactttttcctatgtcagcattggatgggcgagagaccgatttttacaagctgtcagaaactaaagggtgtcaaaccgtaacttctggaaaggtgcgccatggagctctcacatgcctgtgtgtggctatgaaaaggcaggtcctctgttatgaactatttcagagcaagacccgtcacagaaaatttaaagaaattcaagtcccatataatgtccagtggatggcaatcttcagtgaacaactctgtgtgggattccagtcaggatttctaagataccccttgaatggagaaggaaatccatacagtatgctccattcaaatgaccatacactatcatttattgcacatcaaccaatggatgctatctgcgcagttgagatctccagtaaagaatatctgctgtgttttaacagcattgggatatacactgactgccagggccgaagatctagacaacaggaattgatgtggccagcaaatccttcctcttgttgttacaatgcaccatatctctcggtgtacagtgaaaatgcagttgatatctttgatgtgaactccatggaatggattcagactcttcctctcaaaaaggttcgacccttaaacaatgaaggatcattaaatcttttagggttggagaccattagattaatatatttcaaaaataagatggcagaaggggacgaactggtagtacctgaaacatcagataatagtcggaaacaaatggttagaaacattaacaataagcggcgttattccttcagagtcccagaagaggaaaggatgcagcagaggagggaaatgctacgagatccagaaatgagaaataaattaatttctaatccaactaattttaatcacatagcacacatgggtcctggagatggaatacagatcctgaaagatctgcccatgaaccctcggcctcaggaaagtcggacagtattcagtggctcagtcagtattccatctatcaccaaatcccgccctgagccaggccgctccatgagtgctagcagtggcttgtcagcaaggtcatccgcacagaatggcagcgcattaaagagggaattctctggaggaagctacagtgccaagcggcagcccatgccctccccgtcagagggctctttgtcctctggaggcatggaccaaggaagtgatgccccagcgagggactttgacggagaggactctgactctccgaggcattccacagcttccaacagttccaacctaagcagccccccaagcccagcttcaccccgaaaaaccaagagcctctccctggagagcactgaccgcgggagctgggacccgtgagctgcctcagcactgggacctctcgctctccgctccctgccactcgcctcctctcactttcatctcttccctccacctcgcctgctcggcctgaaagccaccaggggctggcagcagtagcaggacagggattcaggagttctgacgacacgactctcagatccacgcccccagcctaacagcaacaacaaagacagactttccgtagcagcttagattaacgttgatttcattccatgcacttagagttgctttcagtaacattttacccctactcccaaaggtagcttaaatagacagattacacaaatgtaagtgataagaataagattagacagattttgctttcacagtagagtctcattatagtcctaaaatagctcatgggcttctccgcatccagaagggagaattggtccctggagtggctcactaagctcttaatcagcaaacgcagtgagtatcaacctgattgttgccaggaaatccttatgaattaaaacaatgcatattttactacagtacagagtttaaatgaatacataaatgtagaagtactgaatgtatatatttaaaaggagcctcttgtattcaacaaaagatggatgcatatataagagagatgatttaatttaaagaaatatgttgtttcttgtctgtaatgtaatgtaaagggtggaaaggcctcaagctcacatttgtagagagagagcgagagaaatcagagttccctttattgccctgtcctcaaactggtcataggctctagtcacctggggagctgtagaaaacacttgcagagccaggttttgctggtttggggcatgccctgggcaccagagctttaacatttgaagccacttcagcagcagcagcaaaaggcgaactcatctctacccaagatgtttcttttcctagtggtggaatttgaacacttctcactttttattgtattttatcttccgcagataaatgtagaaatacacgattctgtcacctctgatcccttccatctgaaaggttacaaggagtgttgtagcttctgaaggtgcagaaaacaatttctaaaaatgcttttattcctgggctaatcctgtccctccctaagtcacagcgaggtgtctgtcccagggctggagatgcttcccaaggaggagtctgttttgttgagagtgggcgtgggcttcttcacataagcctggggaaggaagaaaaaacggctttcattaccaaataatgtaaaacctcaaaagcaagggcttcaacagccttaaccaaatattattccccatagccagtggaaaatggatgtgacaaccccagtgcgcaggccagagtgagtgagcccagcacggcgctccgactggcttcctctctcaggtgctggattgtggggttagtggcatttccagctggattcctcctgttgtagttgccataaggaaatgagatgcagaatcagaaggatctatttctacagaatcatttcaccagttaagcacatgagtagagaaagagataaaaataaaagtatctcatgaaggaaagagattttgcctctcttttacttttcacctaagtttctctgagaaatagagacaggattctctctttaaaattcagtgaaaatgaagaaagttttcctgcagttgctaacctgagttgcagtgtttaaggccatcatttcactgctgctgtctgtgactccacgtctgtgtcactgaggtgacctgcgtgtcactgaggtggccaccatgctggcctgcggcatgtgcagggagctgaggctgtttccaggtgatgctgctgtgtggagaaggttctgagatgcagtgagggaagaaaggatcctgctggggattccattgtaagcacctataatcgggaattttcatgtaacagctttgacatttaaacattctgagtttggtgccagctcagatttgattatattttattttggatgggtgtaattcacagcacagttctaatctcccaaatctttctgctttttagaatgaagtataaaaatacttttctcacctgaataccaagggttggccctttagttggatcattgtcatatgacttggtagatccttgtcctcagcacctcacgtgagagaagggagtcagccagccggccccctgcttggtgctcgtgaccagctcgcaccccttctgtccacccttctctcctctcctccccactctccccaccctcctcactctccccaccctcctcactctccccaccctcccctcctctcctcctcactcttcccaccctccccatccccaccctccccatcctcctcttccctttccccttgccttctcctctctcccttctcttctcaggcagggaggaggccatcccaagccgagattaacaggacttgacataagccattagtttgtagctttgacaagtaattatgaatttttgttgcttataggtgcttattttgcaaaggatgcttttaagatcaaaataataaccctacctaaagtctagctccactgctatgggtcatactcttcagcctcccaacagggcagagagagagagctactgaggcttgtctaggttgccaggctaactgggcgacttgtccatattcaccccatggattgcaccatggcactctttgatttttccactgcaatggcaagtaatctcatcagtcataatagagcagtcccgaatgcgtgcagattctaaaagcagggctttaggagagaaacactgccagggggaatagttttggggagggttttcccaaaataacggtcatcctactgggtttatcccacccttaaatatgaagcctgttacctccagaagcttctgagaagaatgatgtgaaaagacagggagtgggttctaggcaaagaaaacataatgaccattcagaggagtcagtagcacagctcacagataaagtattttattactatctgaagttttcttttgttttcatgcaggacattttaaaaacgtatatggcagcagaaacctgtttctcaatagaaaaaatacattcagaggcatttctgggatagtctatctgtgttagtatttggtgctatctatgtccagccaagttatctaccctcaaattctgactaatcatgtttgtgctttgggtatttaaaattacatacatatatattctttttgccaaaaacaaaagtcttgcttcttgtcaaatgattgctaaagtagatcttacattttttgttattatgtatgtatttatacacatccccaacacacttagtgatttctgttatttcctagggagcacagctttaaggctatgagatacaactaaaaggagcccatctatttggttttccagccaattattgtactcacatttcaggggagaatctgaaattcctgtcatgtttacagcaacaatctatcattcctggctagctctcagcctctctctccttccataggttagaattatgtcattttgttacttagtggccacgtctatttctgagaaagactggttacatttatgtggcatctcaggtatcattaaggaaaagccagagcaggggtgagcagaggtcaaaaccacagacgcagcagggccatttgccgcctttggccgggatcacaaccactgcagtctcccagcaggtaggccttgccaagcctaaggctccccatccaatctagacagaggggcgctcagagcagactttgccgtagcccatgtctggtgagcacaacagggaatgaattgggcactccactcccccgtctctctggcccagccctgaactagatgagctgcatttcatggagcccattttaaaatctctttccttatgactttgttactcaagtccagagttctctgtgcacttctgctagataaggagtgtaagccctgccccccagcactggcagcacgctgggccctccccacacaggacaccgtgcagttccgggggaagctgactcaaatcaaccttgaaatctcatgaaaacaaaatgacttgtctttttatttgatagtgtaatatcattcattttataaattttttagggtttttctcgtaatattgtacagttttgcatggcctggtgtgatcattttttggttagaatataatgctgacaaatgtggatggaggggaagatactgctttagcctatcactccttattttattttgtttggttttatgccctcagtgtcttagggaactttttaagagatcctctgctaccaaacaatgatgtggattcttttgcacagaaatatttaaggtgggatggtaaaaaatgtcacaaaagactcctcaccaatactttatgttgatatcacttaatattaaccagactttgctgtattgcaataaaacagagaactgtta

SEQ ID NO: 5243 - DNA, 10855 bp, Homo sapiens
  source 1..10855: mol_type = unassigned DNA
tccgcaagcctccgcctctgtgcggcgggactggaggagcctcgctgagcccagggcgcgagcgcgagaggagagggaaggcgggggagggctggaagggagaggaagggagtggttgggagccgggctgccgcagcctctagtctcctcagccgcggaagcgacccctcctcctgcgccgggccgcctccctcctcgctgtggaaagatgcccttagcccaggggtgtgaagaagggggagaagtagctgccagagccgcccgcgccgccgccgcagctgctgctgcttgtgtcctttgaattcagagaagcacccccccgcctggggcgtcgggagcctccggcgcggcggcccggtgcgggtgtcggggagaccgggctctctgcccggcgcggcgcggcgcggctcggcccacgagcgaccaccgacatggagtgggctcgggcggccaagtagccgcttctccggagcccggtgccagtgccgcccgcagcccgccttccacccccggccgcgccgccggtcaggccctagggtgaagccgggaggaaaatgaagagttttcaccggaatccgttgaaaataggactgactgcaaagccttaaagaaagaaggacctcgggaggagaaacgaaaagccgcctccgggcaagacttggcgtgctccgagccgaggggctgcttcagggacctcgccccctccctttcccgctggagaaattgccgctgatgcattatccaagtggtggttgggaggatttgcagcaacatttttggttttccctcccccttctatgcattctgtttttttcctcccttttctgtttttcttcttcccgggaagtgaattgctgatgcaaatcggactttattcattaatgatgcaaccggattcgtttcaggattacgttgcacgagttgaattttgaatgaaggagaagagtttttttttttttttttaaagaagtgttgactctctagttcgttgtacttttaattattattttatttaaatatacgacttaattgtattcttttaaaaatgcattaagtatatattttatggtaatttaccctcaaaatatatgtatatgggtgaaattgaagacgcttcagttaagtgaggttactggtgtgttggatgtttaattcagcaccagcattgcatgacagttgtttgaataacaagtggtttatttttaaaaccataccttttaaaatttaggttcagataatagtaaaagtcatcataataatttaaaggaaaaccagcagaaatcgaagcaaacatgtctggagaagtgcgtttgaggcagttggagcagtttattttggacgggcccgctcagaccaatgggcagtgcttcagtgtggagacattactggatatactcatctgcctttatgatgaatgcaataattctccattgagaagagagaagaacattctcgaatacctagaatgggctaaaccatttacttctaaagtgaaacaaatgcgattacatagagaagactttgaaatattaaaggtgattggtcgaggagcttttggggaggttgctgtagtaaaactaaaaaatgcagataaagtgtttgccatgaaaatattgaataaatgggaaatgctgaaaagagctgagacagcatgttttcgtgaagaaagggatgtattagtgaatggagacaataaatggattacaaccttgcactatgctttccaggatgacaataacttatacctggttatggattattatgttggtggggatttgcttactctactcagcaaatttgaagatagattgcctgaagatatggctagattttacttggctgagatggtgatagcaattgactcagttcatcagctacattatgtacacagagacattaaacctgacaatatactgatggatatgaatggacatattcggttagcagattttggttcttgtctgaagctgatggaagatggaacggttcagtcctcagtggctgtaggaactccagattatatctctcctgaaatccttcaagccatggaagatggaaaagggagatatggacctgaatgtgactggtggtctttgggggtctgtatgtatgaaatgctttacggagaaacaccattttatgcagaatcgctggtggagacatacggaaaaatcatgaaccacaaagagaggtttcagtttccagcccaagtgactgatgtgtctgaaaatgctaaggatcttattcgaaggctcatttgtagcagagaacatcgacttggtcaaaatggaatagaagactttaagaaacacccatttttcagtggaattgattgggataatattcggaactgtgaagcaccttatattccagaagttagtagcccaacagatacatcgaattttgatgtagatgatgattgtttaaaaaattctgaaacgatgcccccaccaacacatactgcattttctggccaccatctgccatttgttggttttacatatactagtagctgtgtactttctgatcggagctgtttaagagttacggctggtcccacctcactggatcttgatgttaatgttcagaggactctagacaacaacttagcaactgaagcttatgaaagaagaattaagcgccttgagcaagaaaaacttgaactcagtagaaaacttcaagagtcaacacagactgtccaagctctgcagtattcaactgttgatggtccactaacagcaagcaaagatttagaaataaaaaacttaaaagaagaaattgaaaaactaagaaaacaagtaacagaatcaagtcatttggaacagcaacttgaagaagctaatgctgtgaggcaagaactagatgatgcttttagacaaatcaaggcttatgaaaaacaaatcaaaacgttacaacaagaaagagaagatctaaataaggaactagtccaggctagtgagcgattaaaaaaccaatccaaagagctgaaagacgcacactgtcagaggaaactggccatgcaggaattcatggagatcaatgagcggctaacagaattgcacacccaaaaacagaaacttgctcgccatgtccgagataaggaagaagaggtggacctggtgatgcaaaaagttgaaagcttaaggcaagaactgcgcagaacagaaagagccaaaaaagagctggaagttcatacagaagctctagctgctgaagcatctaaagacaggaagctacgtgaacagagtgagcactattctaagcaactggaaaatgaattggagggactgaagcaaaaacaaattagttactcaccaggagtatgcagcatagaacatcagcaagagataaccaaactaaagactgatttggaaaagaaaagtatcttttatgaagaagaattatctaaaagagaaggaatacatgcaaatgaaataaaaaatcttaagaaagaactgcatgattcagaaggtcagcaacttgctctcaacaaagaaattatgattttaaaagacaaattggaaaaaaccagaagagaaagtcaaagtgaaagggaggaatttgaaagtgagttcaaacaacaatatgaacgagaaaaagtgttgttaactgaagaaaataaaaagctgacgagtgaacttgataagcttactactttgtatgagaacttaagtatacacaaccagcagttagaagaagaggttaaagatctagcagacaagaaagaatcagttgcacattgggaagcccaaatcacagaaataattcagtgggtcagcgatgaaaaggatgcacgagggtatcttcaggccttagcttctaaaatgactgaagaattggaggcattaagaaattccagcttgggtacacgagcaacagatatgccctggaaaatgcgtcgttttgcgaaactggatatgtcagctagactggagttgcagtcggctctggatgcagaaataagagccaaacaggccatccaagaagagttgaataaagttaaagcatctaatatcataacagaatgtaaactaaaagattcagagaagaagaacttggaactactctcagaaatcgaacagctgataaaggacactgaagagcttagatctgaaaagggtatagagcaccaagactcacagcattctttcttggcatttttgaatacgcctaccgatgctctggatcaatttgaaactgtagactccactccactttcagttcacacaccaaccttaaggaaaaaaggatgtcctggttcaactggctttccacctaagcgcaagactcaccagttttttgtaaaatcttttactactcctaccaagtgtcatcagtgtacctccttgatggtgggtttaataagacagggctgttcatgtgaagtgtgtggattctcatgccatataacttgtgtaaacaaagctccaaccacttgtccagttcctcctgaacagacaaaaggtcccctgggtatagatcctcagaaaggaataggaacagcatatgaaggtcatgtcaggattcctaagccagctggagtgaagaaagggtggcagagagcactggctatagtgtgtgacttcaaactctttctgtacgatattgctgaaggaaaagcatctcagcccagtgttgtcattagtcaagtgattgacatgagggatgaagaattttctgtgagttcagtcttggcttctgatgttatccatgcaagtcggaaagatataccctgtatatttagggtcacagcttcccagctctcagcatctaataacaaatgttcaatcctgatgctagcagacactgagaatgagaagaataagtgggtgggagtgctgagtgaattgcacaagattttgaagaaaaacaaattcagagaccgctcagtctatgttcccaaagaggcttatgacagcactctacccctcattaaaacaacccaggcagccgcaatcatagatcatgaaagaattgctttgggaaacgaagaagggttatttgttgtacatgtcaccaaagatgaaattattagagttggtgacaataagaagattcatcagattgaactcattccaaatgatcagcttgttgctgtgatctcaggacgaaatcgtcatgtacgactttttcctatgtcagcattggatgggcgagagaccgatttttacaagctgtcagaaactaaagggtgtcaaaccgtaacttctggaaaggtgcgccatggagctctcacatgcctgtgtgtggctatgaaaaggcaggtcctctgttatgaactatttcagagcaagacccgtcacagaaaatttaaagaaattcaagtcccatataatgtccagtggatggcaatcttcagtgaacaactctgtgtgggattccagtcaggatttctaagataccccttgaatggagaaggaaatccatacagtatgctccattcaaatgaccatacactatcatttattgcacatcaaccaatggatgctatctgcgcagttgagatctccagtaaagaatatctgctgtgttttaacagcattgggatatacactgactgccagggccgaagatctagacaacaggaattgatgtggccagcaaatccttcctcttgttgttacaatgcaccatatctctcggtgtacagtgaaaatgcagttgatatctttgatgtgaactccatggaatggattcagactcttcctctcaaaaaggttcgacccttaaacaatgaaggatcattaaatcttttagggttggagaccattagattaatatatttcaaaaataagatggcagaaggggacgaactggtagtacctgaaacatcagataatagtcggaaacaaatggttagaaacattaacaataagcggcgttattccttcagagtcccagaagaggaaaggatgcagcagaggagggaaatgctacgagatccagaaatgagaaataaattaatttctaatccaactaattttaatcacatagcacacatgggtcctggagatggaatacagatcctgaaagatctgcccatgaaccctcggcctcaggaaagtcggacagtattcagtggctcagtcagtattccatctatcaccaaatcccgccctgagccaggccgctccatgagtgctagcagtggcttgtcagcaaggtcatccgcacagaatggcagcgcattaaagagggaattctctggaggaagctacagtgccaagcggcagcccatgccctccccgtcagagggctctttgtcctctggaggcatggaccaaggaagtgatgccccagcgagggactttgacggagaggactctgactctccgaggcattccacagcttccaacagttccaacctaagcagccccccaagcccagcttcaccccgaaaaaccaagagcctctccctggagagcactgaccgcgggagctgggacccgtgagctgcctcagcactgggacctctcgctctccgctccctgccactcgcctcctctcactttcatctcttccctccacctcgcctgctcggcctgaaagccaccaggggctggcagcagtagcaggacagggattcaggagttctgacgacacgactctcagatccacgcccccagcctaacagcaacaacaaagacagactttccgtagcagcttagattaacgttgatttcattccatgcacttagagttgctttcagtaacattttacccctactcccaaaggtagcttaaatagacagattacacaaatgtaagtgataagaataagattagacagattttgctttcacagtagagtctcattatagtcctaaaatagctcatgggcttctccgcatccagaagggagaattggtccctggagtggctcactaagctcttaatcagcaaacgcagtgagtatcaacctgattgttgccaggaaatccttatgaattaaaacaatgcatattttactacagtacagagtttaaatgaatacataaatgtagaagtactgaatgtatatatttaaaaggagcctcttgtattcaacaaaagatggatgcatatataagagagatgatttaatttaaagaaatatgttgtttcttgtctgtaatgtaatgtaaagggtggaaaggcctcaagctcacatttgtagagagagagcgagagaaatcagagttccctttattgccctgtcctcaaactggtcataggctctagtcacctggggagctgtagaaaacacttgcagagccaggttttgctggtttggggcatgccctgggcaccagagctttaacatttgaagccacttcagcagcagcagcaaaaggcgaactcatctctacccaagatgtttcttttcctagtggtggaatttgaacacttctcactttttattgtattttatcttccgcagataaatgtagaaatacacgattctgtcacctctgatcccttccatctgaaaggttacaaggagtgttgtagcttctgaaggtgcagaaaacaatttctaaaaatgcttttattcctgggctaatcctgtccctccctaagtcacagcgaggtgtctgtcccagggctggagatgcttcccaaggaggagtctgttttgttgagagtgggcgtgggcttcttcacataagcctggggaaggaagaaaaaacggctttcattaccaaataatgtaaaacctcaaaagcaagggcttcaacagccttaaccaaatattattccccatagccagtggaaaatggatgtgacaaccccagtgcgcaggccagagtgagtgagcccagcacggcgctccgactggcttcctctctcaggtgctggattgtggggttagtggcatttccagctggattcctcctgttgtagttgccataaggaaatgagatgcagaatcagaaggatctatttctacagaatcatttcaccagttaagcacatgagtagagaaagagataaaaataaaagtatctcatgaaggaaagagattttgcctctcttttacttttcacctaagtttctctgagaaatagagacaggattctctctttaaaattcagtgaaaatgaagaaagttttcctgcagttgctaacctgagttgcagtgtttaaggccatcatttcactgctgctgtctgtgactccacgtctgtgtcactgaggtgacctgcgtgtcactgaggtggccaccatgctggcctgcggcatgtgcagggagctgaggctgtttccaggtgatgctgctgtgtggagaaggttctgagatgcagtgagggaagaaaggatcctgctggggattccattgtaagcacctataatcgggaattttcatgtaacagctttgacatttaaacattctgagtttggtgccagctcagatttgattatattttattttggatgggtgtaattcacagcacagttctaatctcccaaatctttctgctttttagaatgaagtataaaaatacttttctcacctgaataccaagggttggccctttagttggatcattgtcatatgacttggtagatccttgtcctcagcacctcacgtgagagaagggagtcagccagccggccccctgcttggtgctcgtgaccagctcgcaccccttctgtccacccttctctcctctcctccccactctccccaccctcctcactctccccaccctcctcactctccccaccctcccctcctctcctcctcactcttcccaccctccccatccccaccctccccatcctcctcttccctttccccttgccttctcctctctcccttctcttctcaggcagggaggaggccatcccaagccgagattaacaggacttgacataagccattagtttgtagctttgacaagtaattatgaatttttgttgcttataggtgcttattttgcaaaggatgcttttaagatcaaaataataaccctacctaaagtctagctccactgctatgggtcatactcttcagcctcccaacagggcagagagagagagctactgaggcttgtctaggttgccaggctaactgggcgacttgtccatattcaccccatggattgcaccatggcactctttgatttttccactgcaatggcaagtaatctcatcagtcataatagagcagtcccgaatgcgtgcagattctaaaagcagggctttaggagagaaacactgccagggggaatagttttggggagggttttcccaaaataacggtcatcctactgggtttatcccacccttaaatatgaagcctgttacctccagaagcttctgagaagaatgatgtgaaaagacagggagtgggttctaggcaaagaaaacataatgaccattcagaggagtcagtagcacagctcacagataaagtattttattactatctgaagttttcttttgttttcatgcaggacattttaaaaacgtatatggcagcagaaacctgtttctcaatagaaaaaatacattcagaggcatttctgggatagtctatctgtgttagtatttggtgctatctatgtccagccaagttatctaccctcaaattctgactaatcatgtttgtgctttgggtatttaaaattacatacatatatattctttttgccaaaaacaaaagtcttgcttcttgtcaaatgattgctaaagtagatcttacattttttgttattatgtatgtatttatacacatccccaacacacttagtgatttctgttatttcctagggagcacagctttaaggctatgagatacaactaaaaggagcccatctatttggttttccagccaattattgtactcacatttcaggggagaatctgaaattcctgtcatgtttacagcaacaatctatcattcctggctagctctcagcctctctctccttccataggttagaattatgtcattttgttacttagtggccacgtctatttctgagaaagactggttacatttatgtggcatctcaggtatcattaaggaaaagccagagcaggggtgagcagaggtcaaaaccacagacgcagcagggccatttgccgcctttggccgggatcacaaccactgcagtctcccagcaggtaggccttgccaagcctaaggctccccatccaatctagacagaggggcgctcagagcagactttgccgtagcccatgtctggtgagcacaacagggaatgaattgggcactccactcccccgtctctctggcccagccctgaactagatgagctgcatttcatggagcccattttaaaatctctttccttatgactttgttactcaagtccagagttctctgtgcacttctgctagataaggagtgtaagccctgccccccagcactggcagcacgctgggccctccccacacaggacaccgtgcagttccgggggaagctgactcaaatcaaccttgaaatctcatgaaaacaaaatgacttgtctttttatttgatagtgtaatatcattcattttataaattttttagggtttttctcgtaatattgtacagttttgcatggcctggtgtgatcattttttggttagaatataatgctgacaaatgtggatggaggggaagatactgctttagcctatcactccttattttattttgtttggttttatgccctcagtgtcttagggaactttttaagagatcctctgctaccaaacaatgatgtggattcttttgcacagaaatatttaaggtgggatggtaaaaaatgtcacaaaagactcctcaccaatactttatgttgatatcacttaatattaaccagactttgctgtattgcaataaaacagagaactgtta

SEQ ID NO: 5244 - DNA, 2501 bp, Homo sapiens
  source 1..2501: mol_type = unassigned DNA
cgatattgctgaaggaaaagcatctcagcccagtgttgtcattagtcaagtgattgacatgagggatgaagaattttctgtgagttcagtcttggcttctgatgttatccatgcaagtcggaaagatataccctgtatatttagggtcacagcttcccagctctcagcatctaataacaaatgttcaatcctgatgctagcagacactgagaatgagaagaataagtgggtgggagtgctgagtgaattgcacaagattttgaagaaaaacaaattcagagaccgctcagtctatgttcccaaagaggcttatgacagcactctacccctcattaaaacaacccaggcagccgcaatcatagatcatgaaagaattgctttgggaaacgaagaagggttatttgttgtacatgtcaccaaagatgaaattattagagttggtgacaataagaagattcatcagattgaactcattccaaatgatcagcttgttgctgtgatctcaggacgaaatcgtcatgtacgactttttcctatgtcagcattggatgggcgagagaccgatttttacaagctgtcagaaactaaagggtgtcaaaccgtaacttctggaaaggtgcgccatggagctctcacatgcctgtgtgtggctatgaaaaggcaggtcctctgttatgaactatttcagagcaagacccgtcacagaaaatttaaagaaattcaagtcccatataatgtccagtggatggcaatcttcagtgaacaactctgtgtgggattccagtcaggatttctaagataccccttgaatggagaaggaaatccatacagtatgctccattcaaatgaccatacactatcatttattgcacatcaaccaatggatgctatctgcgcagttgagatctccagtaaagaatatctgctgtgttttaacagcattgggatatacactgactgccagggccgaagatctagacaacaggaattgatgtggccagcaaatccttcctcttgttgttacaatgcaccatatctctcggtgtacagtgaaaatgcagttgatatctttgatgtgaactccatggaatggattcagactcttcctctcaaaaaggttcgacccttaaacaatgaaggatcattaaatcttttagggttggagaccattagattaatatatttcaaaaataagatggcagaaggggacgaactggtagtacctgaaacatcagataatagtcggaaacaaatggttagaaacattaacaataagcggcgttattccttcagagtcccagaagaggaaaggatgcagcagaggagggaaatgctacgagatccagaaatgagaaataaattaatttctaatccaactaattttaatcacatagcacacatgggtcctggagatggaatacagatcctgaaagatctgcccatgaaccctcggcctcaggaaagtcggacagtattcagtggctcagtcagtattccatctatcaccaaatcccgccctgagccaggccgctccatgagtgctagcagtggcttgtcagcaagtaagtgccggggctacaggaaggtgcctctgagacagggtgacccccagctccctcccctcctgtcccgtgggtgacatgtccttcacttacgtgtgcccattgcattctcaagtggctgcagtgtctcagaccctgctgggtaatgcctaataggcacaaatgcagttgttaagaaaatagtcccagagtccttctagagtgtacaggccatctgggagacagacaaatatgattacaaattgtgatgataaaggctctgaaggaagtaaacagcatacattaatagagaataacaaggggtagctgttagggatgaatccctacttggcagaataattaggaaaatcactccctagaggtggagtcatgtttgagtaatgtttggttaactgaaagaaggctagtatggctacatggtagtggtgaggaagtaacaaaaattagagcggggtagcaggtaagggtcagaccagcagggacttgaagaccaaggtaagacattttttactttattcaaaaggaaaaggaagacttttaagtagggaagaattttctttcaatttacattcttaaaacaatcctgcgggctgccaagtggagaatggactagaggcaggaagagtggaagccagcatccagataggagactcctagagtggtcccaatggaaaccaatgagggcttgggatgcagcaggggcagaaggagagaagatggtagattctccagatatattttcagagttaaaagcagtaagacttgatgatgaattagtcatggaaaagtaagggagagagttaaagatgactcccagacttcctgctagggccttagtatgataccatttactcccatttaccaccgtttaagaaggggctgaggcaggacattccacgcatgtccaaaggtcccgaggtagcaaaaaaaaaaaaaaaa

SEQ ID NO: 5245 - DNA, 2183 bp, Homo sapiens
  source 1..2183: mol_type = unassigned DNA
ggtcagcgatgaaaaggatgcacgagggtatcttcaggccttagcttctaaaatgactgaagaattggaggcattaagaaattccagcttgggtacacgagcaacagatatgccctggaaaatgcgtcgttttgcgaaactggatatgtcagctagactggagttgcagtcggctctggatgcagaaataagagccaaacaggccatccaagaagagttgaataaagttaaagcatctaatatcataacagaatgtaaactaaaagattcagagaagaagaacttggaactactctcagaaatcgaacagctgataaaggacactgaagagcttagatctgaaaagggtatagagcaccaagactcacagcattctttcttggcatttttgaatacgcctaccgatgctctggatcaatttgaagattccttttcttcttcctcatcttcactgattgattttttggatgacactgatcccgttgagaacacatatgtatggaacccgagcgtcaagtttcacatccagtcacggtccacatctccttccacatctagtgaagctgagccagttaagactgtagactccactccactttcagttcacacaccaaccttaaggaaaaaaggatgtcctggttcaactggctttccacctaagcgcaagactcaccagttttttgtaaaatcttttactactcctaccaagtgtcatcagtgtacctccttgatggtgggtttaataagacagggctgttcatgtgaagtgtgtggattctcatgccatataacttgtgtaaacaaagctccaaccacttgtccagttcctcctgaacagacaaaaggtcccctgggtatagatcctcagaaaggaataggaacagcatatgaaggtcatgtcaggattcctaagccagctggagtgaagaaagggtggcagagagcactggctatagtgtgtgacttcaaactctttctgtacgatattgctgaaggaaaagcatctcagcccagtgttgtcattagtcaagtgattgacatgagggatgaagaattttctgtgagttcagtcttggcttctgatgttatccatgcaagtcggaaagatataccctgtatatttagggtcacagcttcccagctctcagcatctaataacaaatgttcaatcctgatgctagcagacactgagaatgagaagaataagtgggtgggagtgctgagtgaattgcacaagattttgaagaaaaacaaattcagagaccgctcagtctatgttcccaaagaggcttatgacagcactctacccctcattaaaacaacccaggcagccgcaatcatagatcatgaaagaattgctttgggaaacgaagaagggttatttgttgtacatgtcaccaaagatgaaattattagagttggtgacaataagaagattcatcagattgaactcattccaaatgatcagcttgttgctgtgatctcaggacgaaatcgtcatgtacgactttttcctatgtcagcattggatgggcgagagaccgatttttacaagctgtcagaaactaaagggtgtcaaaccgtaacttctggaaaggtgcgccatggagctctcacatgcctgtgtgtggctatgaaaaggcaggtcctctgttatgaactatttcagagcaagacccgtcacagaaaatttaaagaaattcaagtcccatataatgtccagtggatggcaatcttcagtgaacaactctgtgtgggattccagtcaggatttctaagataccccttgaatggagaaggaaatccatacagtatgctccattcaaatgaccatacactatcatttattgcacatcaaccaatggatgctatctgcgcagttgagatctccagtaaagaatatctgctgtgttttaacagcattgggatatacactgactgccagggccgaagatctagacaacaggaattgatgtggccagcaaatccttcctcttgttgttacaatgcaccatatctctcggtgtacagtgaaaatgcagttgatatctttgatgtgaactccatggaatggattcagactcttcctctcaaaaaggttcgacccttaaacaatgaaggatcattaaatcttttagggttggagaccattagattaatatatttcaaaaataagatggcag

SEQ ID NO: 5246 - DNA, 3786 bp, Homo sapiens
  source 1..3786: mol_type = unassigned DNA
agaaggaatacatgcaaatgaaataaaaaatcttaagaaagaactgcatgattcagaaggtcagcaacttgctctcaacaaagaaattatgattttaaaagacaaattggaaaaaaccagaagagaaagtcaaagtgaaagggaggaatttgaaagtgagttcaaacaacaatatgaacgagaaaaagtgttgttaactgaagaaaataaaaagctgacgagtgaacttgataagcttactactttgtatgagaacttaagtatacacaaccagcagttagaagaagaggttaaagatctagcagacaagaaagaatcagttgcacattgggaagcccaaatcacagaaataattcagtgggtcagcgatgaaaaggatgcacgagggtatcttcaggccttagcttctaaaatgactgaagaattggaggcattaagaaattccagcttgggtacacgagcaacagatatgccctggaaaatgcgtcgttttgcgaaactggatatgtcagctagactggagttgcagtcggctctggatgcagaaataagagccaaacaggccatccaagaagagttgaataaagttaaagcatctaatatcataacagaatgtaaactaaaagattcagagaagaagaacttggaactactctcagaaatcgaacagctgataaaggacactgaagagcttagatctgaaaagggtatagagcaccaagactcacagcattctttcttggcatttttgaatacgcctaccgatgctctggatcaatttgaaactgatcccgttgagaacacatatgtatggaacccgagcgtcaagtttcacatccagtcacggtccacatctccttccacatctagtgaagctgagccagttaagactgtagactccactccactttcagttcacacaccaaccttaaggaaaaaaggatgtcctggttcaactggctttccacctaagcgcaagactcaccagttttttgtaaaatcttttactactcctaccaagtgtcatcagtgtacctccttgatggtgggtttaataagacagggctgttcatgtgaagtgtgtggattctcatgccatataacttgtgtaaacaaagctccaaccacttgtccagttcctcctgaacagacaaaaggtcccctgggtatagatcctcagaaaggaataggaacagcatatgaaggtcatgtcaggattcctaagccagctggagtgaagaaagggtggcagagagcactggctatagtgtgtgacttcaaactctttctgtacgatattgctgaaggaaaagcatctcagcccagtgttgtcattagtcaagtgattgacatgagggatgaagaattttctgtgagttcagtcttggcttctgatgttatccatgcaagtcggaaagatataccctgtatatttagggtcacagcttcccagctctcagcatctaataacaaatgttcaatcctgatgctagcagacactgagaatgagaagaataagtgggtgggagtgctgagtgaattgcacaagattttgaagaaaaacaaattcagagaccgctcagtctatgttcccaaagaggcttatgacagcactctacccctcattaaaacaacccaggcagccgcaatcatagatcatgaaagaattgctttgggaaacgaagaagggttatttgttgtacatgtcaccaaagatgaaattattagagttggtgacaataagaagattcatcagattgaactcattccaaatgatcagcttgttgctgtgatctcaggacgaaatcgtcatgtacgactttttcctatgtcagcattggatgggcgagagaccgatttttacaagctgtcagaaactaaagggtgtcaaaccgtaacttctggaaaggtgcgccatggagctctcacatgcctgtgtgtggctatgaaaaggcaggtcctctgttatgaactatttcagagcaagacccgtcacagaaaatttaaagaaattcaagtcccatataatgtccagtggatggcaatcttcagtgaacaactctgtgtgggattccagtcaggatttctaagataccccttgaatggagaaggaaatccatacagtatgctccattcaaatgaccatacactatcatttattgcacatcaaccaatggatgctatctgcgcagttgagatctccagtaaagaatatctgctgtgttttaacagcattgggatatacactgactgccagggccgaagatctagacaacaggaattgatgtggccagcaaatccttcctcttgttgttacaatgcaccatatctctcggtgtacagtgaaaatgcagttgatatctttgatgtgaactccatggaatggattcagactcttcctctcaaaaaggttcgacccttaaacaatgaaggatcattaaatcttttagggttggagaccattagattaatatatttcaaaaataagatggcagaaggggacgaactggtagtacctgaaacatcagataatagtcggaaacaaatggttagaaacattaacaataagcggcgttattccttcagagtcccagaagaggaaaggatgcagcagaggagggaaatgctacgagatccagaaatgagaaataaattaatttctaatccaactaattttaatcacatagcacacatgggtcctggagatggaatacagatcctgaaagatctgcccatgaaccctcggcctcaggaaagtcggacagtattcagtggctcagtcagtattccatctatcaccaaatcccgccctgagccaggccgctccatgagtgctagcagtggcttgtcagcaaggtcatccgcacagaatggcagcgcattaaagagggaattctctggaggaagctacagtgccaagcggcagcccatgccctccccgtcagagggctctttgtcctctggaggcatggaccaaggaagtgatgccccagcgagggactttgacggagaggactctgactctccgaggcattccacagcttccaacagttccaacctaagcagccccccaagcccagcttcaccccgaaaaaccaagagcctctccctggagagcactgaccgcgggagctgggacccgtgagctgcctcagcactgggacctctcgctctccgctccctgccactcgcctcctctcactttcatctcttccctccacctcgcctgctcggcctgaaagccaccaggggctggcagcagtagcaggacagggattcaggagttctgacgacacgactctcagatccacgcccccagcctaacagcaacaacaaagacagactttccgtagcagcttagattaacgttgatttcattccatgcacttagagttgctttcagtaacattttacccctactcccaaaggtagcttaaatagacagattacacaaatgtaagtgataagaataagattagacagattttgctttcacagtagagtctcattatagtcctaaaatagctcatgggcttctccgcatccagaagggagaattggtccctggagtggctcactaagctcttaatcagcaaacgcagtgagtatcaacctgattgttgccaggaaatccttatgaattaaaacaatgcatattttactacagtacagagtttaaatgaatacataaatgtagaagtactgaatgtatatatttaaaaggagcctcttgtattcaacaaaagatggatgcatatataagagagatgatttaatttaaagaaa

SEQ ID NO: 5247 - DNA, 7355 bp, Homo sapiens
  source 1..7355: mol_type = unassigned DNA
gcagttagaagaagaggttaaagatctagcagacaagaaagaatcagttgcacattgggaagcccaaatcacagaaataattcagtgggtcagcgatgaaaaggatgcacgagggtatcttcaggccttagcttctaaaatgactgaagaattggaggcattaagaaattccagcttgggtacacgagcaacagatatgccctggaaaatgcgtcgttttgcgaaactggatatgtcagctagactggagttgcagtcggctctggatgcagaaataagagccaaacaggccatccaagaagagttgaataaagttaaagcatctaatatcataacagaatgtaaactaaaagattcagagaagaagaacttggaactactctcagaaatcgaacagctgataaaggacactgaagagcttagatctgaaaagggtatagagcaccaagactcacagcattctttcttggcatttttgaatacgcctaccgatgctctggatcaatttgaaactgtagactccactccactttcagttcacacaccaaccttaaggaaaaaaggatgtcctggttcaactggctttccacctaagcgcaagactcaccagttttttgtaaaatcttttactactcctaccaagtgtcatcagtgtacctccttgatggtgggtttaataagacagggctgttcatgtgaagtgtgtggattctcatgccatataacttgtgtaaacaaagctccaaccacttgtccagttcctcctgaacagacaaaaggtcccctgggtatagatcctcagaaaggaataggaacagcatatgaaggtcatgtcaggattcctaagccagctggagtgaagaaagggtggcagagagcactggctatagtgtgtgacttcaaactctttctgtacgatattgctgaaggaaaagcatctcagcccagtgttgtcattagtcaagtgattgacatgagggatgaagaattttctgtgagttcagtcttggcttctgatgttatccatgcaagtcggaaagatataccctgtatatttagggtcacagcttcccagctctcagcatctaataacaaatgttcaatcctgatgctagcagacactgagaatgagaagaataagtgggtgggagtgctgagtgaattgcacaagattttgaagaaaaacaaattcagagaccgctcagtctatgttcccaaagaggcttatgacagcactctacccctcattaaaacaacccaggcagccgcaatcatagatcatgaaagaattgctttgggaaacgaagaagggttatttgttgtacatgtcaccaaagatgaaattattagagttggtgacaataagaagattcatcagattgaactcattccaaatgatcagcttgttgctgtgatctcaggacgaaatcgtcatgtacgactttttcctatgtcagcattggatgggcgagagaccgatttttacaagctgtcagaaactaaagggtgtcaaaccgtaacttctggaaaggtgcgccatggagctctcacatgcctgtgtgtggctatgaaaaggcaggtcctctgttatgaactatttcagagcaagacccgtcacagaaaatttaaagaaattcaagtcccatataatgtccagtggatggcaatcttcagtgaacaactctgtgtgggattccagtcaggatttctaagataccccttgaatggagaaggaaatccatacagtatgctccattcaaatgaccatacactatcatttattgcacatcaaccaatggatgctatctgcgcagttgagatctccagtaaagaatatctgctgtgttttaacagcattgggatatacactgactgccagggccgaagatctagacaacaggaattgatgtggccagcaaatccttcctcttgttgttacaatgcaccatatctctcggtgtacagtgaaaatgcagttgatatctttgatgtgaactccatggaatggattcagactcttcctctcaaaaaggttcgacccttaaacaatgaaggatcattaaatcttttagggttggagaccattagattaatatatttcaaaaataagatggcagaaggggacgaactggtagtacctgaaacatcagataatagtcggaaacaaatggttagaaacattaacaataagcggcgttattccttcagagtcccagaagaggaaaggatgcagcagaggagggaaatgctacgagatccagaaatgagaaataaattaatttctaatccaactaattttaatcacatagcacacatgggtcctggagatggaatacagatcctgaaagatctgcccatgccaggtttcccttatccatcccctcatcatcactccggtctgatctcctctccgatcaactttgaacacatctatcacatgactgttaattctgctgaaaaatttctctctcctgattccataaaccctgaatattccccgtctctgcgctctgtccctggtacaccaagctttatgactctgaggaaccctcggcctcaggaaagtcggacagtattcagtggctcagtcagtattccatctatcaccaaatcccgccctgagccaggccgctccatgagtgctagcagtggcttgtcagcaaggtcatccgcacagaatggcagcgcattaaagagggaattctctggaggaagctacagtgccaagcggcagcccatgccctccccgtcagagggctctttgtcctctggaggcatggaccaaggaagtgatgccccagcgagggactttgacggagaggactctgactctccgaggcattccacagcttccaacagttccaacctaagcagccccccaagcccagcttcaccccgaaaaaccaagagcctctccctggagagcactgaccgcgggagctgggacccgtgagctgcctcagcactgggacctctcgctctccgctccctgccactcgcctcctctcactttcatctcttccctccacctcgcctgctcggcctgaaagccaccaggggctggcagcagtagcaggacagggattcaggagttctgacgacacgactctcagatccacgcccccagcctaacagcaacaacaaagacagactttccgtagcagcttagattaacgttgatttcattccatgcacttagagttgctttcagtaacattttacccctactcccaaaggtagcttaaatagacagattacacaaatgtaagtgataagaataagattagacagattttgctttcacagtagagtctcattatagtcctaaaatagctcatgggcttctccgcatccagaagggagaattggtccctggagtggctcactaagctcttaatcagcaaacgcagtgagtatcaacctgattgttgccaggaaatccttatgaattaaaacaatgcatattttactacagtacagagtttaaatgaatacataaatgtagaagtactgaatgtatatatttaaaaggagcctcttgtattcaacaaaagatggatgcatatataagagagatgatttaatttaaagaaatatgttgtttcttgtctgtaatgtaatgtaaagggtggaaaggcctcaagctcacatttgtagagagagagcgagagaaatcagagttccctttattgccctgtcctcaaactggtcataggctctagtcacctggggagctgtagaaaacacttgcagagccaggttttgctggtttggggcatgccctgggcaccagagctttaacatttgaagccacttcagcagcagcagcaaaaggcgaactcatctctacccaagatgtttcttttcctagtggtggaatttgaacacttctcactttttattgtattttatcttccgcagataaatgtagaaatacacgattctgtcacctctgatcccttccatctgaaaggttacaaggagtgttgtagcttctgaaggtgcagaaaacaatttctaaaaatgcttttattcctgggctaatcctgtccctccctaagtcacagcgaggtgtctgtcccagggctggagatgcttcccaaggaggagtctgttttgttgagagtgggcgtgggcttcttcacataagcctggggaaggaagaaaaaacggctttcattaccaaataatgtaaaacctcaaaagcaagggcttcaacagccttaaccaaatattattccccatagccagtggaaaatggatgtgacaaccccagtgcgcaggccagagtgagtgagcccagcacggcgctccgactggcttcctctctcaggtgctggattgtggggttagtggcatttccagctggattcctcctgttgtagttgccataaggaaatgagatgcagaatcagaaggatctatttctacagaatcatttcaccagttaagcacatgagtagagaaagagataaaaataaaagtatctcatgaaggaaagagattttgcctctcttttacttttcacctaagtttctctgagaaatagagacaggattctctctttaaaattcagtgaaaatgaagaaagttttcctgcagttgctaacctgagttgcagtgtttaaggccatcatttcactgctgctgtctgtgactccacgtctgtgtcactgaggtgacctgcgtgtcactgaggtggccaccatgctggcctgcggcatgtgcagggagctgaggctgtttccaggtgatgctgctgtgtggagaaggttctgagatgcagtgagggaagaaaggatcctgctggggattccattgtaagcacctataatcgggaattttcatgtaacagctttgacatttaaacattctgagtttggtgccagctcagatttgattatattttattttggatgggtgtaattcacagcacagttctaatctcccaaatctttctgctttttagaatgaagtataaaaatacttttctcacctgaataccaagggttggccctttagttggatcattgtcatatgacttggtagatccttgtcctcagcacctcacgtgagagaagggagtcagccagccggccccctgcttggtgctcgtgaccagctcgcaccccttctgtccacccttctctcctctcctccccactctccccaccctcctcactctccccaccctcctcactctccccaccctcccctcctctcctcctcactcttcccaccctccccatccccaccctccccatcctcctcttccctttccccttgccttctcctctctcccttctcttctcaggcagggaggaggccatcccaagccgagattaacaggacttgacataagccattagtttgtagctttgacaagtaattatgaatttttgttgcttataggtgcttattttgcaaaggatgcttttaagatcaaaataataaccctacctaaagtctagctccactgctatgggtcatactcttcagcctcccaacagggcagagagagagagctactgaggcttgtctaggttgccaggctaactgggcgacttgtccatattcaccccatggattgcaccatggcactctttgatttttccactgcaatggcaagtaatctcatcagtcataatagagcagtcccgaatgcgtgcagattctaaaagcagggctttaggagagaaacactgccagggggaatagttttggggagggttttcccaaaataacggtcatcctactgggtttatcccacccttaaatatgaagcctgttacctccagaagcttctgagaagaatgatgtgaaaagacagggagtgggttctaggcaaagaaaacataatgaccattcagaggagtcagtagcacagctcacagataaagtattttattactatctgaagttttcttttgttttcatgcaggacattttaaaaacgtatatggcagcagaaacctgtttctcaatagaaaaaatacattcagaggcatttctgggatagtctatctgtgttagtatttggtgctatctatgtccagccaagttatctaccctcaaattctgactaatcatgtttgtgctttgggtatttaaaattacatacatatatattctttttgccaaaaacaaaagtcttgcttcttgtcaaatgattgctaaagtagatcttacattttttgttattatgtatgtatttatacacatccccaacacacttagtgatttctgttatttcctagggagcacagctttaaggctatgagatacaactaaaaggagcccatctatttggttttccagccaattattgtactcacatttcaggggagaatctgaaattcctgtcatgtttacagcaacaatctatcattcctggctagctctcagcctctctctccttccataggttagaattatgtcattttgttacttagtggccacgtctatttctgagaaagactggttacatttatgtggcatctcaggtatcattaaggaaaagccagagcaggggtgagcagaggtcaaaaccacagacgcagcagggccatttgccgcctttggccgggatcacaaccactgcagtctcccagcaggtaggccttgccaagcctaaggctccccatccaatctagacagaggggcgctcagagcagactttgccgtagcccatgtctggtgagcacaacagggaatgaattgggcactccactcccccgtctctctggcccagccctgaactagatgagctgcatttcatggagcccattttaaaatctctttccttatgactttgttactcaagtccagagttctctgtgcacttctgctagataaggagtgtaagccctgccccccagcactggcagcacgctgggccctccccacacaggacaccgtgcagttccgggggaagctgactcaaatcaaccttgaaatctcatgaaaacaaaatgacttgtctttttatttgatagtgtaatatcattcattttataaattttttagggtttttctcgtaatattgtacagttttgcatggcctggtgtgatcattttttggttagaatataatgctgacaaatgtggatggaggggaagatactgctttagcctatcactccttattttattttgtttggttttatgccctcagtgtcttagggaactttttaagagatcctctgctaccaaacaatgatgtggattcttttgcacagaaatatttaaggtgggatggtaaaaaatgtcacaaaagactcctcaccaatactttatgttgatatcacttaatattaaccagactttgctgtattgcaataaaacagagaactgtt

SEQ ID NO: 5248 - DNA, 5158 bp, Homo sapiens
  source 1..5158: mol_type = unassigned DNA
ggaaaaccagcagaaatcgaagcaaacatgtctggagaagtgcgtttgaggcagttggagcagtttattttggacgggcccgctcagaccaatgggcagtgcttcagtgtggagacattactggatatactcatctgcctttatgatgaatgcaataattctccattgagaagagagaagaacattctcgaatacctagaatgggctaaaccatttacttctaaagtgaaacaaatgcgattacatagagaagactttgaaatattaaaggtgattggtcgaggagcttttggggaggttgctgtagtaaaactaaaaaatgcagataaagtgtttgccatgaaaatattgaataaatgggaaatgctgaaaagagctgagacagcatgttttcgtgaagaaagggatgtattagtgaatggagacaataaatggattacaaccttgcactatgctttccaggatgacaataacttatacctggttatggattattatgttggtggggatttgcttactctactcagcaaatttgaagatagattgcctgaagatatggctagattttacttggctgagatggtgatagcaattgactcagttcatcagctacattatgtacacagagacattaaacctgacaatatactgatggatatgaatggacatattcggttagcagattttggttcttgtctgaagctgatggaagatggaacggttcagtcctcagtggctgtaggaactccagattatatctctcctgaaatccttcaagccatggaagatggaaaagggagatatggacctgaatgtgactggtggtctttgggggtctgtatgtatgaaatgctttacggagaaacaccattttatgcagaatcgctggtggagacatacggaaaaatcatgaaccacaaagagaggtttcagtttccagcccaagtgactgatgtgtctgaaaatgctaaggatcttattcgaaggctcatttgtagcagagaacatcgacttggtcaaaatggaatagaagactttaagaaacacccatttttcagtggaattgattgggataatattcggaactgtgaagcaccttatattccagaagttagtagcccaacagatacatcgaattttgatgtagatgatgattgtttaaaaaattctgaaacgatgcccccaccaacacatactgcattttctggccaccatctgccatttgttggttttacatatactagtagctgtgtactttctgatcggagctgtttaagagttacggctggtcccacctcactggatcttgatgttaatgttcagaggactctagacaacaacttagcaactgaagcttatgaaagaagaattaagcgccttgagcaagaaaaacttgaactcagtagaaaacttcaagagtcaacacagactgtccaagctctgcagtattcaactgttgatggtccactaacagcaagcaaagatttagaaataaaaaacttaaaagaagaaattgaaaaactaagaaaacaagtaacagaatcaagtcatttggaacagcaacttgaagaagctaatgctgtgaggcaagaactagatgatgcttttagacaaatcaaggcttatgaaaaacaaatcaaaacgttacaacaagaaagagaagatctaaataaggaactagtccaggctagtgagcgattaaaaaaccaatccaaagagctgaaagacgcacactgtcagaggaaactggccatgcaggaattcatggagatcaatgagcggctaacagaattgcacacccaaaaacagaaacttgctcgccatgtccgagataaggaagaagaggtggacctggtgatgcaaaaagttgaaagcttaaggcaagaactgcgcagaacagaaagagccaaaaaagagctggaagttcatacagaagctctagctgctgaagcatctaaagacaggaagctacgtgaacagagtgagcactattctaagcaactggaaaatgaattggagggactgaagcaaaaacaaattagttactcaccaggagtatgcagcatagaacatcagcaagagataaccaaactaaagactgatttggaaaagaaaagtatcttttatgaagaagaattatctaaaagagaaggaatacatgcaaatgaaataaaaaatcttaagaaagaactgcatgattcagaaggtcagcaacttgctctcaacaaagaaattatgattttaaaagacaaattggaaaaaaccagaagagaaagtcaaagtgaaagggaggaatttgaaagtgagttcaaacaacaatatgaacgagaaaaagtgttgttaactgaagaaaataaaaagctgacgagtgaacttgataagcttactactttgtatgagaacttaagtatacacaaccagcagttagaagaagaggttaaagatctagcagacaagaaagaatcagttgcacattgggaagcccaaatcacagaaataattcagtgggtcagcgatgaaaaggatgcacgagggtatcttcaggccttagcttctaaaatgactgaagaattggaggcattaagaaattccagcttgggtacacgagcaacagatatgccctggaaaatgcgtcgttttgcgaaactggatatgtcagctagactggagttgcagtcggctctggatgcagaaataagagccaaacaggccatccaagaagagttgaataaagttaaagcatctaatatcataacagaatgtaaactaaaagattcagagaagaagaacttggaactactctcagaaatcgaacagctgataaaggacactgaagagcttagatctgaaaaggctagcaaaggcagacgtactgtagactccactccactttcagttcacacaccaaccttaaggaaaaaaggatgtcctggttcaactggctttccacctaagcgcaagactcaccagttttttgtaaaatcttttactactcctaccaagtgtcatcagtgtacctccttgatggtgggtttaataagacagggctgttcatgtgaagtgtgtggattctcatgccatataacttgtgtaaacaaagctccaaccacttgtccagttcctcctgaacagacaaaaggtcccctgggtatagatcctcagaaaggaataggaacagcatatgaaggtcatgtcaggattcctaagccagctggagtgaagaaagggtggcagagagcactggctatagtgtgtgacttcaaactctttctgtacgatattgctgaaggaaaagcatctcagcccagtgttgtcattagtcaagtgattgacatgagggatgaagaattttctgtgagttcagtcttggcttctgatgttatccatgcaagtcggaaagatataccctgtatatttagggtcacagcttcccagctctcagcatctaataacaaatgttcaatcctgatgctagcagacactgagaatgagaagaataagtgggtgggagtgctgagtgaattgcacaagattttgaagaaaaacaaattcagagaccgctcagtctatgttcccaaagaggcttatgacagcactctacccctcattaaaacaacccaggcagccgcaatcatagatcatgaaagaattgctttgggaaacgaagaagggttatttgttgtacatgtcaccaaagatgaaattattagagttggtgacaataagaagattcatcagattgaactcattccaaatgatcagcttgttgctgtgatctcaggacgaaatcgtcatgtacgactttttcctatgtcagcattggatgggcgagagaccgatttttacaagctgtcagaaactaaagggtgtcaaaccgtaacttctggaaaggtgcgccatggagctctcacatgcctgtgtgtggctatgaaaaggcaggtcctctgttatgaactatttcagagcaagacccgtcacagaaaatttaaagaaattcaagtcccatataatgtccagtggatggcaatcttcagtgaacaactctgtgtgggattccagtcaggatttctaagataccccttgaatggagaaggaaatccatacagtatgctccattcaaatgaccatacactatcatttattgcacatcaaccaatggatgctatctgcgcagttgagatctccagtaaagaatatctgctgtgttttaacagcattgggatatacactgactgccagggccgaagatctagacaacaggaattgatgtggccagcaaatccttcctcttgttgttacaatgcaccatatctctcggtgtacagtgaaaatgcagttgatatctttgatgtgaactccatggaatggattcagactcttcctctcaaaaaggttcgacccttaaacaatgaaggatcattaaatcttttagggttggagaccattagattaatatatttcaaaaataagatggcagaaggggacgaactggtagtacctgaaacatcagataatagtcggaaacaaatggttagaaacattaacaataagcggcgttattccttcagagtcccagaagaggaaaggatgcagcagaggagggaaatgctacgagatccagaaatgagaaataaattaatttctaatccaactaattttaatcacatagcacacatgggtcctggagatggaatacagatcctgaaagatctgcccatgaaccctcggcctcaggaaagtcggacagtattcagtggctcagtcagtattccatctatcaccaaatcccgccctgagccaggccgctccatgagtgctagcagtggcttgtcagcaaggtcatccgcacagaatggcagcgcattaaagagggaattctctggaggaagctacagtgccaagcggcagcccatgccctccccgtcagagggctctttgtcctctggaggcatggaccaaggaagtgatgccccagcgagggactttgacggagaggactctgactctccgaggcattccacagcttccaacagttccaacctaagcagccccccaagcccagcttcaccccgaaaaaccaagagcctctccctggagagcactgaccgcgggagctgggacccgtgagctgcctcagcactgggacctctcgctctcc

SEQ ID NO: 5249 - DNA, 6758 bp, Homo sapiens
  source 1..6758: mol_type = unassigned DNA
gggcggggctgagggcggcgggggcgggccgcccgagctgggagggcggcggcgccgaggggaggagagcggcccatggacccgcggggcccggcgccccagactctgcgccgtcgggacggagcccaagatgtcggcctaggccggggcgcgacgacgcggacggggcggcgaggaggcgccgctgctgccggggctcgcagccgccgagcccccgagggcgcgccctgacggactggccgagccggcggtgagaggccggcgcgtcgggagcgggccgcgcggcaccatgtcggccaaggtgcggctcaagaagctggagcagctgctcctggacgggccctggcgcaacgagagcgccctgagcgtggaaacgctgctcgacgtgctcgtctgcctgtacaccgagtgcagccactcggccctgcgccgcgacaagtacgtggccgagttcctcgagtgggctaaaccatttacacagctggtgaaagaaatgcagcttcatcgagaagactttgaaataattaaagtaattggaagaggtgcttttggtgaggttgctgttgtcaaaatgaagaatactgaacgaatttatgcaatgaaaatcctcaacaagtgggagatgctgaaaagagcagagaccgcgtgcttccgagaggagcgcgatgtgctggtgaacggcgactgccagtggatcaccgcgctgcactacgcctttcaggacgagaaccacctgtacttagtcatggattactatgtgggtggtgatttactgaccctgctcagcaaatttgaagacaagcttccggaagatatggcgaggttctacattggtgaaatggtgctggccattgactccatccatcagcttcattacgtgcacagagacattaaacctgacaatgtccttttggacgtgaatggtcatatccgcctggctgactttggatcatgtttgaagatgaatgatgatggcactgtgcagtcctccgtggccgtgggcacacctgactacatctcgccggagatcctgcaggcgatggaggacggcatgggcaaatacgggcctgagtgtgactggtggtctctgggtgtctgcatgtatgagatgctctatggagaaacgccgttttatgcggagtcactcgtggagacctatgggaagatcatgaaccatgaagagcgattccagttcccatcccatgtcacggatgtatctgaagaagcgaaggacctcatccagagactgatctgcagtagagaacgccggctggggcagaatggaatagaggatttcaaaaagcatgcgttttttgaaggtctaaattgggaaaatatacgaaacctagaagcaccttatattcctgatgtgagcagtccctctgacacatccaacttcgacgtggatgacgacgtgctgagaaacacggaaatattacctcctggttctcacacaggcttttctggattacatttgccattcattggttttacattcacaacggaaagctgtttttctgatcgaggctctctgaagagcataatgcagtccaacacattaaccaaagatgaggatgtgcagcgggacctggagcacagcctgcagatggaagcttacgagaggaggattcggaggctggaacaggagaagctggagctgagcaggaagctgcaagagtccacccagaccgtgcagtccctccacggctcatctcgggccctcagcaattcaaaccgagataaagaaatcaaaaagctaaatgaagaaatcgaacgcttgaagaataaaatagcagattcaaacaggctcgagcgacagcttgaggacacagtggcgcttcgccaagagcgtgaggactccacgcagcggctgcgggggctggagaagcagcaccgcgtggtccggcaggagaaggaggagctgcacaagcaactggttgaagcctcagagcggttgaaatcccaggccaaggaactcaaagatgcccatcagcagcgaaagctggccctgcaggagttctcggagctgaacgagcgcatggcagagctccgtgcccagaagcagaaggtgtcccggcagctgcgagacaaggaggaggagatggaggtggccacgcagaaggtggacgccatgcggcaggaaatgcggagagctgagaagctcaggaaagagctggaagctcagcttgatgatgctgttgctgaggcctccaaggagcgcaagcttcgtgagcacagcgagaacttctgcaagcaaatggaaagcgagctggaggccctcaaggtgaagcaaggaggccggggagcgggtgccaccttagagcaccagcaagagatttccaaaatcaaatccgagctggagaagaaagtcttattttatgaagaggaattggtcagacgtgaggcctcccatgtgctagaagtgaaaaatgtgaagaaggaggtgcatgattcagaaagccaccagctggccctgcagaaagaaatcttgatgttaaaagataagttagaaaagtcaaagcgagaacggcataacgagatggaggaggcagtaggtacaataaaagataaatacgaacgagaaagagcgatgctgtttgatgaaaacaagaagctaactgctgaaaatgaaaagctctgttcctttgtggataaactcacagctcaaaatagacagctggaggatgagctgcaggatctggcagccaagaaggagtcagtggcccactgggaagctcagattgcggaaatcattcagtgggtcagtgacgagaaagatgcccggggttaccttcaagctcttgcttccaagatgaccgaagagctcgaggctttgaggagttctagtctggggtcaagaacactggacccgctgtggaaggtgcgccgcagccagaagctggacatgtccgcgcggctggagctgcagtcggccctggaggcggagatccgggccaagcagcttgtccaggaggagctcaggaaggtcaaggacgccaacctcaccttggaaagcaaactaaaggattccgaagccaaaaacagagaattattagaagaaatggaaattttgaagaaaaagatggaagaaaaattcagagcagatactgggctcaaacttccagattttcaggattccatttttgagtatttcaacactgctcctcttgcacatgacctgacatttagaaccagctcagctagtgagcaagaaacacaagctccgaagccagaagcgtccccgtcgatgtctgtggctgcatcagagcagcaggaggacatggctcggcccccgcagaggccatccgctgtgccgttgcccaccacgcaggccctggctctggctggaccgaagccaaaagctcaccagttcagcatcaagtccttctccagccctactcagtgcagccactgcacctccctgatggttgggctgatccggcagggctacgcctgcgaggtgtgttcctttgcttgccacgtgtcctgcaaagacggtgccccccaggtgtgcccaatacctcccgagcagtccaagaggcctctgggcgtggacgtgcagcgaggcatcggaacagcctacaaaggccatgtcaaggtcccaaagcccacgggggtgaagaagggatggcagcgcgcatatgcagtcgtctgtgactgcaagctcttcctgtatgatctgcctgaaggaaaatccacccagcctggtgtcattgcgagccaagtcttggatctcagagatgacgagttttccgtgagctcagtcctggcctcagatgtcattcatgctacacgccgagatattccatgtatattcagggtgacggcctctctcttaggtgcaccttctaagaccagctcgctgctcattctgacagaaaatgagaatgaaaagaggaagtgggttgggattctagaaggactccagtccatccttcataaaaaccggctgaggaatcaggtcgtgcatgttcccttggaagcctacgacagctcgctgcctctcatcaaggccatcctgacagctgccatcgtggatgcagacaggattgcagtcggcctagaagaagggctctatgtcatagaggtcacccgagatgtgatcgtccgtgccgctgactgtaagaaggtacaccagatcgagcttgctcccagggagaagatcgtaatcctcctctgtggccggaaccaccatgtgcacctctatccgtggtcgtcccttgatggagcggaaggcagctttgacatcaagcttccggaaaccaaaggctgccagctcatggccacggccacactcaagaggaactctggcacctgcctgtttgtggccgtgaaacggctgatcctttgctatgagatccagagaacgaagccattccacagaaagttcaatgagattgtggctcccggcagcgtgcagtgcctggcggtgctcagggacaggctctgtgtgggctacccttctgggttctgcctgctgagcatccagggggacgggcagcctctaaacctggtaaatcccaatgacccctcgcttgcgttcctctcacaacagtcttttgatgccctttgtgctgtggagctcgaaagcgaggagtacctgctttgcttcagccacatgggactgtacgtggacccgcaaggccggagggcacgcgcgcaggagctcatgtggcctgcggctcctgtcgcctgtagttgcagccccacccacgtcacggtgtacagcgagtatggcgtggacgtctttgatgtgcgcaccatggagtgggtgcagaccatcggcctgcggaggataaggcccctgaactctgaaggcaccctcaacctcctcaactgcgagcctccacgcttgatctacttcaagagcaagttctcgggagcggttctcaacgtgccggacacctccgacaacagcaagaagcagatgctgcgcaccaggagcaaaaggcggttcgtcttcaaggtcccagaggaagagagactgcagcagaggcgagagatgcttagagacccagaattgagatccaaaatgatatccaacccaaccaacttcaaccacgtggcccacatgggcccaggcgacggcatgcaggtgctcatggacctgcctctgagtgctgtgcccccctcccaggaggaaaggccgggccccgctcccaccaacctggctcgccagcctccatccaggaacaagccctacatctcgtggccctcatcaggtggatcggagcctagcgtgactgtgcctctgagaagtatgtctgatccagaccaggactttgacaaagagcctgattcggactccaccaaacactcaactccatcgaatagctccaaccccagcggcccaccgagccccaactccccccacaggagccagctccccctcgaaggcctggagcagccggcctgtgacacctgaagccgccagctcgccacaggggccagggagctggagatggcctccagcgtcagtgccaagactgagcgggccctccagtgttgtccaaggaaatgtagaatcactttgtagatatggagatgaagaagacaaatctttattataatattgatcagttttatgccgcattgttcgtggcagtagaccacatctgttcgtctgcacagctgtgaggcgatgctgttccatctgcacatgaaggacccccatacagcctgtctcccacccctgacaacccgagagggcatatggggccctgccaacaccacttcctcagcagaaacccgtcatgacgcggctgcttcggaagcagacatctggggacacagcctcagtacccagtcttttccctagttcctgaaactttcctaggaccttaagagaatagtaggaggtcctatagcattcccagtgtcactagaattttgaagacaggaaagtggaggttagtctgtggcctttttttcatttagccattgcacagtcagctgcagaagtcctgctgaccacctagtcatggacaaaggcccaggaccagtgacaccctgcgtccctgtgtgcattaagttcattctgggtcgcagccatgaagtgtcaccagtatctactactgtgaagtcagctgtgctgttttccattcgcttccacggcttctgcctcctgccataaaaccagcgagtgtcgtggtgcaggcaggccctgtggcctgctgggctgagggaagtcagagccccagggcgccacgaagcagccactgggataccccaccccgccccgccctgcccgcccccccccccaccagtcctgcccccgcatggagcccccgtgattagtagcccgtatgatcacgtagacccacccaacacactcctgcacactggccccggcccacggcacagcaatcccctgcgcgtggatttcacctcaccctttgtaccagatgttgagtgaccagctctgtggccctgtgtcgtcagaggcttgtgattaactgtggcggcagacacagcttgtccacagcttgggccaggcttcccctgtcctcccaccggtcggctgcttggcaaggctgttcaggacgtgcacttccccaagtcggcactgagtggcccagcaccgcctagccctgccaccccactgccctcctgggccttctgctggatgggcacctggggggttctggtttttacttttttaatgtaagtctcagtctttgtaattaattattgaattgtgagaacatttttgaacaatttacctgtcaataaagcagaagacggcagttttaaagttc

SEQ ID NO: 5250 - DNA, 1592 bp, Homo sapiens
  source 1..1592: mol_type = unassigned DNA
ggaaggtgcgccgcagccagaagctggacatgtccgcgcggctggagctgcagtcggccctggaggcggagatccgggccaagcagcttgtccaggaggagctcaggaaggtcaaggacgccaacctcaccttggaaagcaaactaaaggattccgaagccaaaaacagagaattattagaagaaatggaaattttgaagaaaaagatggaagaaaaattcagagcagatactgggctcaaacttccagattttcaggattccatttttgagtatttcaacactgctcctcttgcacatgacctgacatttagaaccagctcagctagtgagcaagaaacacaagctccgaagccagaagcgtccccgtcgatgtctgtggctgcatcagagcagcaggagccaaaagctcaccagttcagcatcaagtccttctccagccctactcagtgcagccactgcacctccctgatggttgggctgatccggcagggctacgcctgcgaggtgtgttcctttgcttgccacgtgtcctgcaaagacggtgccccccaggtgtgcccaatacctcccgagcagtccaagaggcctctgggcgtggacgtgcagcgaggcatcggaacagcctacaaaggccatgtcaaggtcccaaagcccacgggggtgaagaagggatggcagcgcgcatatgcagtcgtctgtgactgcaagctcttcctgtatgatctgcctgaaggaaaatccacccagcctggtgtcattgcgagccaagtcttggatctcagagatgacgagttttccgtgagctcagtcctggcctcagatgtcattcatgctacacgccgagatattccatgtatattcagggtgacggcctctctcttaggtgcaccttctaagaccagctcgctgctcattctgacagaaaatgagaatgaaaagaggaagtgggttgggattctagaaggactccagtccatccttcataaaaaccggctgaggaatcaggtcgtgcatgttcccttggaagcctacgacagctcgctgcctctcatcaaggccatcctgacagctgccatcgtggatgcagacaggattgcagtcggcctagaagaagggctctatgtcatagaggtcacccgagatgtgatcgtccgtgccgctgactgtaagaaggtacaccagatcgagcttgctcccagggagaagatcgtaatcctcctctgtggccggaaccaccatgtgcacctctatccgtggtcgtcccttgatggagcggaaggcagctttgacatcaagcttccggaaaccaaaggctgccagctcatggccacggccacactcaagaggaactctggcacctgcctgtttgtggccgtgaaacggctgatcctttgctatgagatccagagaacgaagccattccacagaaagttcaatgagattgtggctcccggcagcgtgcagtgcctggcggtgctcagggacaggctctgtgtgggctacccttctgggttctgcctgctgagcatccagggggacgggcagcctctaaacctggtaaatcccaatgacccctcgcttgcgttcctc

SEQ ID NO: 5251 - DNA, 5742 bp, Homo sapiens
  source 1..5742: mol_type = unassigned DNA
atggagcggcggctgcgcgcgctggagcagctggcgcggggcgaggccggcggctgcccggggctcgacggcctcctagatctgctgctggcgctgcaccacgagctcagcagcggccccctacggcgggagcgcagcgtggcgcagttcctgagctgggccagccccttcgtatcaaaggtgaaagaactgcgtctgcagagagatgactttgagatcttgaaggtgatcggccgaggagcctttggggaggtcaccgtggtgaggcagagggacactgggcagatttttgccatgaaaatgctgcacaagtgggagatgctgaagagggctgagacagcctgtttccgggaggagcgggatgtgctcgtgaaaggggacagccgttgggtgaccactctgcactatgccttccaagacgaggagtacctgtaccttgtgatggactactatgctggtggggacctcctgacgctgctgagccgcttcgaggaccgtctcccgcccgagctggcccagttctacctggctgagatggtgctggccatccactcgctgcaccagctgggttatgtccacagggatgtcaagccagacaacgtcctgctggatgtgaacgggcacattcgcctggctgacttcggctcctgcctgcgtctcaacaccaacggcatggtggattcatcagtggcagtagggacgccggactatatctcccctgagatcctgcaggccatggaggagggcaagggccactacggcccacagtgtgactggtggtcgcttggagtctgcgcctatgagctgctctttggggagacgcccttctatgctgagtccttggtggaaacctacggcaagatcatgaaccacgaggaccacctgcagttccccccggacgtgcctgacgtgccagccagcgcccaagacctgatccgccagctgctgtgtcgccaggaagagcggctaggccgtggtgggctggatgacttccggaaccatcctttcttcgaaggcgtggactgggagcggctggcgagcagcacggccccctatattcctgagctgcgggggcccatggacacctccaactttgatgtggatgacgacaccctcaaccatccagggaccctgccaccgccctcccacggggccttctccggccatcacctgccattcgtgggcttcacctacacctcaggcagtcacagtcctgagagcagctctgaggcttgggctgccctggagcggaagctccagtgtctggagcaggagaaggtggagctgagcaggaagcaccaagaggccctgcacgcccccacagaccatcgggagctggagcagctacggaaggaagtgcagactctgcgggacaggctgccagagatgctgagggacaaggcctcattgtcccagacggatgggcccccagctggtagcccaggtcaggacagtgacctacggcaggagcttgaccgacttcaccgggagctggccgagggtcgggcagggctgcaggctcaggagcaggagctctgcagggcccaggggcagcaggaggagctgcttcagaggctacaggaggcccaggagagagaggcggccacagctagccagacccgggccctgagctcccagctggaggaagcccgggctgcccagagggagctggaggcccaggtgtcctccctgagccggcaggtgacgcagctgcagggacagtgggagcaacgccttgaggagtcgtcccaggccaagaccatccacacagcctctgagaccaacgggatgggaccccctgagggtgggcctcaggaggcccaactgaggaaggaggtggccgccctgcgagagcagctggagcaggcccacagccacaggccgagtggtaaggaggaggctctgtgccagctgcaggaggaaaaccggaggctgagccgggagcaggagcggctagaagcagagctggcccaggagcaggagagcaagcagcggctggagggtgagcggcgggagacggagagcaactgggaggcccagctcgccgacatcctcagctgggtgaatgatgagaaggtctcaagaggctacctgcaggccctggccaccaagatggcagaggagctggagtccttgaggaacgtaggcacccagacgctccctgcccggccactggaccaccagtggaaggcgcggcgactgcagaagatggaggcctcggccaggctggagctgcagtcagcgctggaggccgagatccgcgccaagcagggcctgcaggagcggctgacacaggtgcaggaggcccagctgcaggctgagcgccgtctgcaggaggccgagaagcagagccaggccctgcaacaggagctcgccatgctgcgggaggagctgcgggcccgagggccagtggacaccaagccctcaaactccctgattcccttcctgtccttccggagctcagagaaggattctgccaaggaccctggcatctcaggagaggccacaaggcatggaggagagccagatctgaggccggagggccgacgcagcctgcgcatgggggctgtgttccccagagcacccactgccaacacagcctctacagaaggtcttcctgctaagcccggctcacacacgctgcgcccccggagcttcccatccccgaccaagtgtctccgctgcacctcgctgatgctgggcctgggccgccagggcctgggttgtgatgcctgcggctacttttgtcacacaacctgtgccccacaggccccaccctgccccgtgccccctgacctcctccgcacagccctgggagtacaccccgaaacaggcacaggcactgcctatgagggctttctgtcggtgccgcggccctcaggtgtccggcggggctggcagcgcgtgtttgctgccctgagtgactcacgcctgctgctgtttgacgcccctgacctgaggctcagcccgcccagtggggccctcctgcaggtcctagatctgagggacccccagttctcggctacccctgtcctggcctctgatgttatccatgcccaatccagggacctgccacgcatctttagggtgacaacctcccagctggcagtgccgcccaccacgtgcactgtgctgctgctggcagagagcgagggggagcgggaacgctggctgcaggtgctgggtgagctgcagcggctgctgctggacgcgcggccaagaccccggcccgtgtacacactcaaggaggcttacgacaacgggctgccgctgctgcctcacacgctctgcgctgccatcctcgaccaggatcgacttgcgcttggcaccgaggaggggctctttgtcatccatctgcgcagcaacgacatcttccaggtgggggagtgccggcgcgtgcagcagctgaccttgagccccagtgcaggcctgctggtcgtgctgtgtggccgcggccccagcgtgcgtctctttgccctggcggagctggagaacatagaggtagcaggtgccaagatccccgagtctcgaggctgccaggtgctggcagctggaagcatcctgcaggcccgcaccccggtgctctgtgtagccgtcaagcgccaggtgctctgctaccagctgggcccgggccctgggccctggcagcgccgcatccgtgagctgcaggcacctgccactgtgcagagcctggggctgctgggcgaccggctatgtgtgggcgccgccggtggctttgcactctacccgctgctcaacgaggctgcgccgttggcgctgggggccggtttggtgcctgaggagctgccaccatcccgcgggggcctgggtgaggcactgggtgccgtggagcttagcctcagcgagttcctgctactcttcaccactgctggcatctacgtggatggcgcaggccgcaagtctcgtggccacgagctgttgtggccagcagcgcccatgggctgggggtatgcggccccctacctgacagtgttcagcgagaactccatcgatgtgtttgacgtgaggagggcagaatgggtgcagaccgtgccgctcaagaaggtgcggcccctcaatccagagggctccctgttcctctacggcaccgagaaggtccgcctgacctacctcaggaaccagctggcagagaaggacgagttcgacatcccggacctcaccgacaacagccggcgccagctgttccgcaccaagagcaagcgccgcttctttttccgcgtgtcggaggagcagcagaagcagcagcgcagggagatgctgaaggacccttttgtgcgctccaagctcatctcgccgcctaccaacttcaaccacctagtacacgtgggccctgccaacgggcggcccggcgccagggacaagtccccggctcccgaagagaagggccgagttgcccgcggctccggcccacagcggccccacagcttctccgaggcgttgcggcgcccagcctccatgggcagcgaaggcctcggtggagacgcagaccccatgaagaggaaaccctggacatccctgtccagcgagtctgtgtcctgcccccagggatcgctgagccctgcaacctccctaatgcaggtctcagaacggccccgaagcctccccctatcccctgaattggagagctctccttgatgccctctgttagggcccaccccaatcccagggcagaaggacatgagggagcaaagagcttgaggaatgccatactccggctggtccgggacatggaaattcggactcagggaggacccgggctgggcaatgactgggagacttgcctgggttcccaggacttgggggtcctgactcccagccctcatcctgccttacccctctgttcccagccccagcctttctaagccattgggaatagaatggccccttttgttctggtgtccaggggtgattgtgccaaagctcttatttccagtgccaagcccccagaggcttgtaagagttgggatgagggatggagagggactgggtctctgggaacaggttggaggtcttatctgtggactgtctgactcccagctgaggccaagatggggcatgtccccgtctctgcttagcgtctgggtgagaaaaacaggctgtgatccagaagaagggaagatagagaaggagggaaaggatgtaggcgaaggaggtgagagacaggataggaggaaggaagtggaggaggaggtgataggaattggaaggaggtagaagccgtgcagaggaagaggggagagggacgaaggaggagcgatgaagaagaggagggagacaaaaagagggatggaggagagagggagtctggagaacaaagggtcctttctctggggaggggtgcagtgggcggggctgacactgtcagccaatcctcccatcggggaagagaatcctggacagggacaggatggggagggtatttataagggctttttggtgggagatgggtacccagtgggggccactggagggtctccgggcacactctggcccttcccagaaagggggtcgtttttctcgaatcttcaaccagttgtgtattggaaactagggcgcattttactattgatcacagtcattatattgttattatattactatttttattaaacctccccccactgaagtgtggggggcaaaataagtatttatctcctcaaatgccacattcccaggagggacagaccctgatgctctgtgaggcgcaagaaaccaataaag

SEQ ID NO: 5252 - DNA, 2181 bp, Homo sapiens
  source 1..2181: mol_type = unassigned DNA
gatccagcccgcggagcccgcggccagggcggcgcagaccggcccagcgactctcccgggctgccagccgggacgcgcggccgccgccgctgcagacgacgagtccgccctcgtcccgcgcccccggggctcgcggagccaggtctccacctctgggcaggagagttgccgaccacctcgggggtgctttctctgcgcttgaacatctatagctgcttctgaggggctgggagccgggcccctgggagagacgagccatgaaccccccacagcctctgcatttggggacctcaccttaggagagtgccatttacagcttccgccagggcaaaggagctgagcagccatcccaagcccagcccacctccctcccccggcccctggtaggcatggactagcagctgtgagcagccagagctgatgcccggcccccaggggggcagaggcgccgccaccatgagcctgggcaagctctcgcctgtgggctgggtgtccagttcacagggaaagaggcggctgactgcagacatgatcagccacccactcggggacttccgccacaccatgcatgtgggccgtggcggggatgtcttcggggacacgtccttcctcagcaaccacggtggcagctccgggagcacccatcgctcaccccgcagcttcctggccaagaagctgcagctggtgcggagggtgggggcgcccccccggaggatggcatctccccctgcaccctccccggctccaccggccatctcccccatcatcaagaacgccatctccctgccccagctcaaccaggccgcctacgacagcctcgtggttggcaagctcagcttcgacagcagccccaccagctccacggacggccactccagctacggcctggactctgggttctgcaccatctcccgcctgccccgctcggaaaagccgcatgaccgagaccgggatggttccttcccctctgagcccgggcttcgccgctctgactctctcttgtccttccgcctggacctcgaccttgggccctcactcctcagcgagctgctaggggtcatgagcctcccagaagcccctgcagctgagactccagcccccgctgcaaaccccccagcccctactgcaaaccccacgggtcctgctgcaaaccccccagccactactgcaaaccccccagcgcctgctgcaaacccctcagcacctgccgcaacccccacgggtcctgctgcaaatcccccagcccctgccgcaagctccacaccccatggacactgtcccaatggggtaacagctgggttgggcccagtggctgaggtgaagtccagcccagtgggagggggtccccgaggacctgctggccctgccctcggcaggcactggggagcaggctgggatggcggccaccactacccagagatggatgcgcggcaggagcgggtggaggtgctgccccaagcccgggcctcctgggagagcctggacgaagagtggagggcgccccaggcaggcagcaggaccccagtgcccagcacagtgcaagcaaacacctttgaatttgcggatgctgaggaggatgatgaggtcaaggtgtgaggggctggggcacggtcccagggccccacctaggtgcagagccggcccctcacctaacagctggttcctaccagaccggagaggggagaagtcatgttgcccctaaacccctccccacctctgcaggacagacatgggagggaggacagggaaggccaggcttgctctgggacttttatgctcccagaggccctgccaaactgaccacctcccccgactgccactctggacctaatagctgttccttaggccccactccatgccacccccaccagctggaggacccagcctcacagtgtgtcctttgtgccagaccaagcggcccgtggggggtggggggcagggagtgtaccacacagggccattgtctcacctcccaaagggaccgcctgcccccagctcatcccagagcgtccctgctgcaaccctgacagccgtctcccaggccgcttccccaacatccccgccccagcctccctcttaccccagaaaggtcaggtatgacctcccggggaggaatcccacctgcctgtataccccagacttgcctctggggcctgattaaataaggctgttttgataaaa

SEQ ID NO: 5253 - DNA, 588 bp, Homo sapiens
  source 1..588: mol_type = unassigned DNA
agtattgagatttctatgcttggaggtggcagcaatggttttaaaaaaggaagaaggctgagccgcagacataggtgttcttaaggatcattattgacttttatcagctgaggtcccaggtctgtgtaggtctccacctctgggcaggagagttgccgaccacctcgggggtgctttctctgcgcttgaacatctatagctgcttctgaggggctgggagccgggcccctgggagagacgagccatgaaccccccacagcctctgcatttggggacctcaccttaggagagtgccatttacagcttccgccagggcaaaggagctgagcagccatcccaagcccagcccacctccctcccccggcccctggtaggcatggactagcagctgtgagcagccagagctgatgcccggcccccaggggggcagaggcgccgccaccatgagcctgggcaagctctcgcctgtgggctgggtgtccagttcacagggaaagaggcggctgactgcagacatgatcagccacccactcggggacttccgccacaccatgcatgtgggccgtggcggggatgtcttcggggaca

SEQ ID NO: 5254 - DNA, 720 bp, Homo sapiens
  source 1..720: mol_type = unassigned DNA
gcagaccggcccagcgactctcccgggctgccagccgggacgcgcggccgccgccgctgcagacgacgagtccgccctcgtcccgcgcccccggggctcgcggagccagacggaatgttgctcttgttgccgaggctggagtgccgtgatgtgatcttggctcactgcaacctctgcctccaaggttcaagtgattctcctgccacagcttcctgggtagctgggattacaggtctccacctctgggcaggagagttgccgaccacctcgggggtgctttctctgcgcttgaacatctatagctgcttctgaggggctgggagccgggcccctgggagagacgagccatgaaccccccacagcctctgcatttggggacctcaccttaggagagtgccatttacagcttccgccagggcaaaggagctgagcagccatcccaagcccagcccacctccctcccccggcccctggtaggcatggactagcagctgtgagcagccagagctgatgcccggcccccaggggggcagaggcgccgccaccatgagcctgggcaagctctcgcctgtgggctgggtgtccagttcacagggaaagaggcggctgactgcagacatgatcagccacccactcggggacttccgccacaccatgcatgtgggccgtggcggggatgtcttcggggacacgtccttcctcagcaaccacggtggcagc

SEQ ID NO: 5255 - DNA, 564 bp, Homo sapiens
  source 1..564: mol_type = unassigned DNA
ttgaatatgctcacgcatggaggaggcagctggaaaaagccacttttgaccacaggatccttattccaggaagctccttgaaggtggatggttcagaggaacctctgctctggctgtttacccagcttcacaaagctttggtctccacctctgggcaggagagttgccgaccacctcgggggtgctttctctgcgcttgaacatctatagctgcttctgaggggctgggagccgggcccctgggagagacgagccatgaaccccccacagcctctgcatttggggacctcaccttaggagagtgccatttacagcttccgccagggcaaaggagctgagcagccatcccaagcccagcccacctccctcccccggcccctggtaggcatggactagcagctgtgagcagccagagctgatgcccggcccccaggggggcagaggcgccgccaccatgagcctgggcaagctctcgcctgtgggctgggtgtccagttcacagggaaagaggcggctgactgcagacatgatcagccacccactcggggacttccgccacaccat

SEQ ID NO: 5256 - DNA, 2023 bp, Homo sapiens
  source 1..2023: mol_type = unassigned DNA
attggctccgcgggccggggcggggctgcggggtccgcggtgcactctgtaagttcaccgccggtcgggtccggccgccgcgctgtccagctcctgagaccttgctgtccgccggtctgccgtctgcgcgcctcacgctcctcagccctggaccggggacaagtaaccctcggtgacaagaccaaagtgcactgctgcccacacagttcctacctttctggcttcaattcttcagaagagtttgccgtcctttggggagaacgtgatttttgttatctcagcccactgacttcattgatctctaatcttttttaattccttgggccaactttgttcgtgcccccacactgtagccagaagcccgttggcgagctctggcacctgcaaaccaccccgtggaacgagtgtttcctctggctgagggttggagaggaggtgtggtctcagcaggcggcccgtagcctcacagccaggcctggtggtgaggtcaccatgtccaccaaggtgcccatctatctgaagcgtggcagtcgcaagggcaagaaggagaagcttcgggacctgctgtcctcggacatgatcagcccaccgctgggggacttccgccacaccattcatattggcagtggcggcggcagtgacatgtttggcgacatctccttcctgcagggcaagttccacctcctgccggggaccatggtggaggggcctgaagaagatggcaccttcgacctccccttccagttcacccgcaccgccaccgtgtgtgggcgggagctcccggacggcccatcccctctgctcaagaacgccatctccctcccggttatcggtggaccccaggctctcaccctgcccacagcccaggctccacccaagccccctcgcctgcacctggagacccctcagccttccccacaggagggagggagtgtggacatctggaggattccagagactggctcccccaacagtggactgaccccggagtcaggggccgaggagcccttcctgtccaatgccagctccctgctgtccctgcacgtggacctggggccttccatcctggatgatgtcctgcagatcatggatcaggacctggacagcatgcagatccccacataggacacgaggctgcctaggctggggtcccaggtggggcccagccaggaggtggggtgtggacccggccctggcggcggagtcagggtcccaagatcccacctgtatggtcgctggccagtgattctccttctgagccgtgtttcccctctccctccctctccacgtgggcagggcaggccccatcgctttcctctgataaccacatggacacatcctgaagtcagcccaggcgccctgagcatcttggggcacctggaccccatcacaatactccttcttccttcaggtccctgggtgaaggctttgctgaaaccgaccccccttttcacgtcccttctgcctctgccccgttggatgccctgactgggggcaggggaagagacagggcacagctggccacagggctcagccactgagcaggctgttccgggcctttggctttgcatcctggacggggagtgtcctgtcagggaccagatgtgtcctgcctcatccctagctccaatcccttccccacgtgaccggggattctggttgcaataaaacatgctgctgctggtggcggagctccctgtccctttgccccaggtttcctcccggaggcagacagtctcccagagctgagggcttgcctctggagaccccagccccagagggctttgtggaggacaggccttgccctcaagaacgtcgtacctgacgctgagcctgtcatgagaatgcaacaggagcaaaccaagtgttgctgtgacattgattcagatgtttggcaagaggtggctgagcactggggtgggcttggcactgtgccaagcctggggccaatccctgcccagtcagctggggtctggtgggggacacccaagaataaaagaataaccacaaagtgtgcaaggga

SEQ ID NO: 5257 - DNA, 1279 bp, Homo sapiens
  source 1..1279: mol_type = unassigned DNA
cgagcgacaaattgcatgtttgtcagcatggcccccaggcctggcatggttgacacaggatgaatgcgtgacgggattccaagacctcagggtgcccatgcgtccccacccttcccccagctccttgcaagctgagctggatttccgccacgggagagtcattcctttgtttcctgttaagctccaggtgctctgggagggctcctcagccctggaccggggacaagtaaccctcggtgacaagaccaaagtgcactgctgcccacacagttcctacctttctggcttcaattcttcagaagagtttgccgtcctttggggagaacgtgatttttgttatctcagcccactgacttcattgatctctaatcttttttaattccttgggccaactttgttcgtgcccccacactgtagccagaagcccgttggcgagctctggcacctgcaaaccaccccgtggaacgagtgtttcctctggctgagggttggagaggaggtgtggtctcagcaggcggcccgtagcctcacagccaggcctggtggtgaggtcaccatgtccaccaaggtgcccatctatctgaagcgtggcagtcgcaagggcaagaaggagaagcttcgggacctgctgtcctcggacatgatcagcccaccgctgggggacttccgccacaccattcatattggcagtggcggcggcagtgacatgtttggcgacatctccttcctgcagggcaagttccacctcctgccggggaccatggtggaggggcctgaagaagatggcaccttcgacctccccttccagttcacccgcaccgccaccgtgtgtgggcgggagctcccggacggcccatcccctctgctcaagaacgccatctccctcccggttatcggtggaccccaggctctcaccctgcccacagcccaggctccacccaagccccctcgcctgcacctggagacccctcagccttccccacaggagggagggagtgtggacatctggaggattccagagactggctcccccaacagtggactgaccccggagtcaggggccgaggagcccttcctgtccaatgccagctccctgctgtccctgcacgtggacctggggccttccatcctggatgatgtcctgcagatcatggatcaggacctggacagcatgcagatccccacataggacacgaggctgcctaggctggggtcccaggtggggcccagccaggaggtggggtgtggacccggccctggcggcggagtcagggtccca

SEQ ID NO: 5258 - DNA, 2128 bp, Homo sapiens
  source 1..2128: mol_type = unassigned DNA
aagctccaggtgctctgggaggggtaagatgtccggcctctgtggctcagtacgactgacccgggtgtccggtcctggggtggggtttcctgagcaagggcctcagctggtggggggaggggggcagttggactctgcttctcctgcatcctccttcctccttcctgctcccgcctcccaaccccctcacccccaccctcaccctgcccagaatgaaaactgaggcaaagaactggcaagagccacctttgctcctcagccctggaccggggacaagtaaccctcggtgacaagaccaaagtgcactgctgcccacacagttcctacctttctggcttcaattcttcagaagagtttgccgtcctttggggagaacgtgatttttgttatctcagcccactgacttcattgatctctaatcttttttaattccttgggccaactttgttcgtgcccccacactgtagccagaagcccgttggcgagctctggcacctgcaaaccaccccgtggaacgagtgtttcctctggctgagggttggagaggaggtgtggtctcagcaggcggcccgtagcctcacagccaggcctggtggtgaggtcaccatgtccaccaaggtgcccatctatctgaagcgtggcagtcgcaagggcaagaaggagaagcttcgggacctgctgtcctcggacatgatcagcccaccgctgggggacttccgccacaccattcatattggcagtggcggcggcagtgacatgtttggcgacatctccttcctgcagggcaagttccacctcctgccggggaccatggtggaggggcctgaagaagatggcaccttcgacctccccttccagttcacccgcaccgccaccgtgtgtgggcgggagctcccggacggcccatcccctctgctcaagaacgccatctccctcccggttatcggtggaccccaggctctcaccctgcccacagcccaggctccacccaagccccctcgcctgcacctggagacccctcagccttccccacaggagggagggagtgtggacatctggaggattccagagactggctcccccaacagtggactgaccccggagtcaggggccgaggagcccttcctgtccaatgccagctccctgctgtccctgcacgtggacctggggccttccatcctggatgatgtcctgcagatcatggatcaggacctggacagcatgcagatccccacataggacacgaggctgcctaggctggggtcccaggtggggcccagccaggaggtggggtgtggacccggccctggcggcggagtcagggtcccaagatcccacctgtatggtcgctggccagtgattctccttctgagccgtgtttcccctctccctccctctccacgtgggcagggcaggccccatcgctttcctctgataaccacatggacacatcctgaagtcagcccaggcgccctgagcatcttggggcacctggaccccatcacaatactccttcttccttcaggtccctgggtgaaggctttgctgaaaccgaccccccttttcacgtcccttctgcctctgccccgttggatgccctgactgggggcaggggaagagacagggcacagctggccacagggctcagccactgagcaggctgttccgggcctttggctttgcatcctggacggggagtgtcctgtcagggaccagatgtgtcctgcctcatccctagctccaatcccttccccacgtgaccggggattctggttgcaataaaacatgctgctgctggtggcggagctccctgtccctttgccccaggtttcctcccggaggcagacagtctcccagagctgagggcttgcctctggagaccccagccccagagggctttgtggaggacaggccttgccctcaagaacgtcgtacctgacgctgagcctgtcatgagaatgcaacaggagcaaaccaagtgttgctgtgacattgattcagatgtttggcaagaggtggctgagcactggggtgggcttggcactgtgccaagcctggggccaatccctgcccagtcagctggggtctggtgggggacacccaagaataaaagaataaccacaaagtg

SEQ ID NO: 5259 - DNA, 5700 bp, Homo sapiens
  source 1..5700: mol_type = unassigned DNA
ccggagcccgggctgagagggacctggggagctgcggcctggccggggcggcgcactcaggtggcctcgcttccctgcgggtcaccgcccgccactcgcacagctaggtcggcctgttgggatcgggagaggtgggcgcacgagttttagtgcgggagtccggggtgcgggcggagtcctattgtccccgtgcacccgggcggcagcacctccgggtccctctttaaaccgagcgtccggcgacctttctttgtgcttagggagtcgaaagcggcatcttctccgagagaagtcgcctactggggggtggcgctggggaggtaacaatgggcgcccattgtcctccgagggtccaacggtgacccccccccgcgcgcgcgcccggccaccggttggccccgggccagggcacaggtaccgcggctgggagggtcggccccgctgcccgcgccctccgccccgccccagtgagtccccgcgccgccggccccgccccgcgccgccccgccctccgcaggttcagtcctcgcgtccggccgccccgcgctcagtcgcgcgcaccttctctcgcggccgggggaccgcagcgcggggctagcccggagacccggccaccggcctggggcgccttcacgccgtctcggagcggataatgcggtgagcaggcaccacgccggcagactcggctggatctgcgcacagcggcagggattgcgtgcgcccgcgggaggcccggggcagcggctgggatcctcagcggcggccggtttgtcctggttgtggtcaagactggatgatgtaactggctctctaggaagcctcacttggccgtaacctcaggaaggttctctttgaccccatctcatttcgaagccacttctgaagccacttgagaaaaatgatgtgacagttcctatcaaaaaggattcagaaacatataccatctgtgaagaaagtggccctttctcccgcttgcaaaatagacattctcaaattccaaaatgccagccaagaccccaatttacctgaaagcagccaataacaagaaaggaaagaaatttaaactgagggacattctgtctcctgatatgatcagtcccccgcttggagactttcgccacaccatccacattggcaaagagggccagcacgatgtctttggagatatttcctttcttcaagggaactacgagcttttacctggaaaccaggagaaagcacacctgggccagttccctgggcataatgagttcttccgggccaacagcacctcggactctgtgttcacagaaacgccctccccggtgctcaaaaatgccatctccctcccgaccattggaggatcccaagctctcatgttgcccttattgtcaccagtgacatttaattccaaacaggagtccttcgggccagcaaagctgcccaggcttagctgcgagcccgtcatggaggaaaaagctcaggagaaaagcagtctgttggagaatgggacagtccaccagggagacacctcgtggggctccagcggttctgcatctcagtccagccaaggcagagacagccactcctccagcctgtccgaacagtaccccgactggccagccgaggacatgtttgaccatcccaccccatgcgagctcatcaagggaaagactaagtcagaggagtccctctctgaccttacaggttccctcctctccctgcagcttgatcttgggccctcacttttggatgaggtgctgaatgtaatggataaaaataagtaacaagatgccaacttttttcctttggggtaaaaggtacaaaaacaaactaaccacagttgaagagaagggcttccggagctgtatttgcagttttgtgttgggttttctaaaataatattcttacaaagtatttttttacctgttatgccctgtttgcaaaaacaatttagaaaaaaacaacaaagcaaaacctatcttggcaaaaaaaggaagtgagtcagagcccattttcaggaggcattggtgatgttcggctcacatattgtttgcagacacacaagaaatctggcttggccaggattggcactagctatgaagggctgagcgagtcacattaaggaacttcacggaactttatagcactccgacattttctgagcaagaggaagtcaaaatttatttaacacctaagcctttttgtagactcttttctatatattgcttaggctcaccatagcgaattctccagtgttaaaacttttctgttttcacatttgaactttatgggttttggggattttcttgtagttcttatatatccctatatattatatctatattgcaaaattttgactgtcagctacatgttggtaagacacaggcaaagtattactgtaactaagttatttttaaagttaaaatatatttttacgtgcctttggctttttattgcagagtctacattttatagattctacatcagatgttgtcacttatttccattgggattccattgtaagctgtgtatgtgcgtgtttggaaaagtgtattcatacttagtttttttttcttcatctgttatcatacttttaacagcaaccaataacggattgtaaagtgtaaaggcacaggttactcatgatgcttctgcagagactgtgggctacaccacatatgttatttggaaatataggtattttagtacagtacatacttgcattacataggtacttcaagcaacacaataaaaagtaaatgataaagtgaacttgcttgtttatagtaataaacaagaccataagagaataagtatagctagagaaattgcttctctgaaatgtacatgagcccttaaggtaagagatgatttccatctactctcattttgattacttccttatggtttgagaggctagaaactgagcctctctacttttggaaaaatgaacatgtgaggtcagatttttttttttttttttaagtcagcactgatgccaccctctcagtggtcatttctgagcatcttcctgacttgaacaccttctacagcaaactcttgcaagtccagtttcatccctgtaaggcaaatgtcttttcacgcagaaagtgccatatagacgagataaaggcagctaaaacgagggcagtagagagcacttacccgaccccaaggtgccagagatgccctgaggatggtggttaaggaaacaggagcaggaaatgtacacacagattcctgtccctttgccaactactccttccccatcaaagaaaaacacttgcacacagtaactaccagctccttctctcaaacttgtatttctcctggaaatgtatctcagaaatgacctcctctcccaaccacttcaacgattctttctttgggtttggggttcttgcagttctatcatctaaaataacctttggactgcaggtaaaatgcaattaggacaactaaccaagtagacgaaacaagttcccctaggcaggggtgtccaatattttagcttccctggaccgcattggaagaattttcttgggccacatgtaaaacacactaacactaaccatagttgatgagcttaaaaaaataaaaatagaaaattgcaaaaaaaaaaaaaaaaaaaaatctcagactgttttaagaaagtttaaaaatttgtgttggacttcatgcgggccacaggttggacaagcttgccctagggcattgtgtgctttccgtaacttctcagttgtatttcgttatccatgactctccagtgttttttctgttggaccacacccgtcacagttcacagttccaaagagaaatttcccagcctattctaaatcttgttaatgacgaagagtccaatgtatctcattatttgtagccaattttagactcttttcaatacctcccccccattttaattagtattgatcatattcagtctttcattttactcttcatctgtagcgtgacctcaaggtaaagatgaaactatttcatgaaaaggggaggagtatggctgtgcattagctctactccctctctggtaagtactggggagagaacagccctgccagtactgggtttgatagattctaaatattaatcacacatcctgcctacagttagccattttagtttctgggagttctttcatgtacattttcttccattaattgaattaggtataattgagatggcaataaatatgcccgtattagaaagaggaaacaaagctacatgcggcttatgattttgttgagtcacttctcccgaggcagcctttccaatgcctggtcccttcccctgagagcaggtggactgctggtggtggctttctttcctgcagagaggcactttagacccatacctgctgtgagctgaattgatgttctcatcctgtgaaccttctcccactttaacctaatttatctttacttgtttaaagataaggaaacccaagatgtactttatttgcaaactcaaagcaaatggcgagccacctgtgacccagtaaccagaaaagaaaccatgccatttgtataagtagagacacttcttgttgaggtaggcaaggctcttgtgagcgatttttttcccctagtgagacctaacaaaagacaagctatatcatttctgcctgaaattatctgcttgaaaagatcaaaatatcaggatacttagctcttcacaaatatgaagtcattatcacatttcactgagccagaaatcactgttaacagcacacacaaaagactacactggttgaacagcaaagagaaacccgggtctccagaatcacagtttagtccttctatattactgcaagtgacctgttttttctgaaggctccccgcaaatgaagtcctggaatggaaaaaatccataagtccataaattaacttgataaatattttagaacagacaaaagaaaatattgagtgatgtagttctaatcctcctaatatggaacctggcaagactgaatcattttactgtgaaatatataaacacaatagaatgagccaacatgatggtttctctccagtaagagtttttcttttggaaatgaggttaacctagccccaaatctagcaattctcataaaatccgattttagaattagcctcccagattaatctgaatgattgacttattttttcttaggcaagtcagtaagccacccactagacagccatatccagcaaaataagagaagtttccagatgccaaatgataagccaccatcaacccagcggggaagccttctggttggtttggctgtatgagattcaggaaggccagaatacccaaaattattcacacgacgttaacttattggtactggctaagcaatacatgtatttcctaaaggaggagatggtcttttggttgatttatggacacacttgtttcatctgactgtaaatatattgcatgctttattctgatggtgcactatttcatccagcaagcttttcatctgagaatgtttaatgttgaccttattcttagagcaagtagatctaaatatttttcagctgagttattagggagtcattattctgtggtacaatgctgcaaaaagcatcatgtggaagaatgggaactatgcttactttatgaagtgatgtataacacaatgaaatctgttttacaactactgtgctgcatttaattatcttccatttttgctgttaaaaaaaaaaaatccgttaa

SEQ ID NO: 5260 - DNA, 542 bp, Homo sapiens
  source 1..542: mol_type = unassigned DNA
gcagatcatgggggctcccttcgaattctgcctactgcatggaggatatagccttatcagtaatgtttcagaagtgttcccaagtgaaggcccagcctgtaatagagattcacaatgttttctctttgaagtgaagcagttttgttcatttcctcccatctcagaatgacttcaaatcctgacatcctcgacagcccaatactttgccacaacctgattacaactctagctctcttatttactggctatatgttattgagaaaaggtttgtcctggttgtggtcaagactggatgatgtaactggctctctaggaagcctcacttggccgtaacctcaggaaggttctctttgaccccatctcatttcgaagccacttctgaagccacttgagaaaaatgatgtgacagttcctatcaaaaaggattcagaaacatataccatctgtgaagaaagtggccctttctcccgcttgcaaaatagacattctcaaattccaaaatgccagccaagaccccaatttacctgaaagcagccaataac

SEQ ID NO: 5261 - DNA, 953 bp, Homo sapiens
  source 1..953: mol_type = unassigned DNA
ccacaagcaaggctttgcctatgttttctcctggctccttctgcctcctgaccaaccctggtgcttccccgtgtggacccctgtgacatggcatgcccttcttgggagctgcagaaacgagtaatgtgagagcctgcaattgtaatcttcataaagtatatcacataccgttcaaaaacatcaagtggcatgttaaataagcttttggagaataagttgagcgtgacaccacaagaagaaaaacagaatccatgacttctcaaaacatgatcttgcttcagatgagaaagctctgtgcttagtttgctgtgagtacttctttgtgtccattgtggcctcctatctaacataaggattcctttccccaagtggtggaacagtgggtaggagagtctgttcatatcccaaaggtgtgccaaaaggatttatcaagaaggggatgacggaggttgctcttccaaaagcgtccagagtcactgagacctgacctgtgtattttgtatcctatccatgtcagcacttctccttgctgccaccgtgtgaagaaggacgtgtttgcttccccttccaccatgattgtaagtttcctgaggcctccccagccatgctgaactgtttgtcctggttgtggtcaagactggatgatgtaactggctctctaggaagcctcacttggccgtaacctcaggaaggttctctttgaccccatctcatttcgaagccacttctgaagccacttgagaaaaatgatgtgacagttcctatcaaaaaggattcagaaacatataccatctgtgaagaaagtggccctttctcccgcttgcaaaatagacattctcaaattccaaaatgccagccaagaccccaatttacctgaaagcagccaataacaagaaaggaaagaaatttaaactgagggacattctgtctcctgatatgatcagtcccccgct

SEQ ID NO: 5262 - DNA, 997 bp, Homo sapiens
  source 1..997: mol_type = unassigned DNA
cgcgcccaccggagcccgggctgagagggacctggggagctgcggcctggccggggcggcgcactcaggtggcctcgcttccctgcgggtcaccgcccgccactcgcacagctaggtttgtcctggttgtggtcaagactggatgatgtaactggctctctaggaagcctcacttggccgtaacctcaggaaggttctctttgaccccatctcatttcgaagccacttctgaagccacttgagaaaaatgatgtgacagttcctatcaaaaaggattcagaaacatataccatctgtgaagaaagtggccctttctcccgcttgcaaaatagacattctcaaattccaaaatgccagccaagaccccaatttacctgaaagcagccaataacaagaaaggaaagaaatttaaactgagggacattctgtctcctgatatgatcagtcccccgcttggagactttcgccacaccatccacattggcaaagagggccagcacgatgtctttggagatatttcctttcttcaagggaactacgagcttttacctggaaaccaggagaaagcacacctgggccagttccctgggcataatgagttcttccgggccaacagcacctcggactctgtgttcacagaaacgccctccccggtgctcaaaaatgccatctccctcccgaccattggaggatcccaagctctcatgttgcccttattgtcaccagtgacatttaattccaaacaggagtccttcgggccagcaaagctgcccaggcttagctgcgagcccgtcatggaggaaaaagctcaggagaaaagcagtctgttggagaatgggacagtccaccagggagacacctcgtggggctccagcggttctgcatctcagtccagccaaggcagagacagccactcctccagcctgtccgaacagtaccccgactggccagccgaggacatgtttgaccatcccaccccatgcgagctcatcaaggg

SEQ ID NO: 5263 - DNA, 3100 bp, Homo sapiens
  source 1..3100: mol_type = unassigned DNA
gccagagggaaacaaacgccggcgctgacaggggccgccagcccctccgccgcgcggagcccacgaaggggacagcgcagccggcccagagctcgggtctccggggaccgagccttatgatctcctcattgcgtccccctctgcccactggacttggacttcagatctgaccccagacctgccggctacctcgggagggcccacctccccgcccatccagcaagatgccaatcctcaagcaactggtgtccagctcggtgcactccaagcgccgttcccgagcggacctcacggccgagatgatcagcgccccgctgggcgacttccgccacaccatgcacgttggccgggccggagacgcctttggggacacctccttcctcaatagcaaggctggcgagcccgacggcgagtccttggacgaacagccctcttcttcatcttccaaacgcagtctcctgtccaggaagttccggggcagcaagcggtcacagtcggtgaccaggggggagcgggagcagcgtgacatgctgggctccctgcgggactcggccctgtttgtcaagaatgccatgtccctgccccagctcaatgagaaggaggccgcggagaagggcaccagtaagctgcccaagagcctgtcatccagccccgtgaagaaggccaatgacggggagggcggcgatgaggaggcgggcacggaggaggcagtgccccgtcggaatggggccgcgggtccacattcccctgaccccctcctcgatgagcaggcctttggggatctgacagatctgcctgtcgtgcccaaggccacgtacgggctgaagcatgcggagtccatcatgtccttccacatcgacctggggccctccatgctgggtgacgtcctcagcatcatggacaaggaggagtgggaccccgaggagggggagggtggttaccatggcgatgagggcgccgctggcaccatcacccaggctcccccgtacgccgtggcggcccctcccctggcaaggcaggaaggcaaggctggcccagacttgccctccctcccctcccatgctctggaggatgaggggtgggcagcagcggcccccagccccggctcagcccgcagcatgggcagccacaccacacgggacagcagctccctctccagctgcacctcaggcatcctggaggagcgcagccctgccttccgggggccggacagggcccgggctgctgtctcaagacagccagacaaggagttctccttcatggatgaggaggaggaggatgaaatccgtgtgtgaggcggacagtgggtggccaccgggagctcttggctgcatcttctccctgcccccaccccactatgacctttgaccctacggcgcaggggcagccaggacccttgattcagaccatggaccctggaccttgtagatgagggacactggcctggccctcgggtcttcggaggacgtagggggctggcatgggtgccgactggctgcctgacttcatcatgctccctgcacttaggctgcgtgggacaagggctgtgttgtcacagcaggaataggttttcctctgttggcctccctttcctccaccctggcctcaaatggatgccagatgccaaccccagttctggccacgtacagccagcgggtcagcccagaggcagcctcagctccagggctaaggactctcggctcccattttctctgctggcgtttctgctgtgcccagcagtggctgctggggaagcagctgcagcaggagggagacggtcttgcctctcagcccctccctgccccaccccagctcctgccctggaaatctggagccccttggagctgagctggacggggggccagctgcgagcatgtgcactaaacgcagccctttccaggggaagagaacaggatggagaatggaaggaaagccccccaggcttcgtgaattgcaagaagggacccttccaggatgacactaggaacagggctagggcactcgctcagtccctaggggcttgtttgttctttattattgtgtttaaatccttatagagcaatatcaggatggtgttaataggtctgcctcagaatgagaatcaatccttttagaaaacctttatactaagcctcctcttcaaaattcacagtggcgattagcggactggagtctggtggcgattagcggactggagtctggggacatccgtggcaaagacaccagctcaactttagtgcttcccaactttatttagaatgacatggggtgggtgtctggtgtgtgtgttttccctacgcacctcccatagctattaacaactgaggaaggccagtgcagaatatttttggagaacgattttttttttaaataatatatcattcctatggggggaaagccttttttttctttttggctgagttattccctccctcccctcaataccctcagtactgactacttccctttcttttctcaggcctccccccaccgacttttgaggccagggttggccagatttagcaaaaccaaaacagagtgctgagttaaacgcaaatttcaggtaaacaaaagataattttctagcattaatatgccccacgcaatatttggaacacttatgtgaaaaatgatttgtttttctgaaattcacgtttctctctgagtcctgtaactgtccccgaggggattgagcagaagctcgggtatgagccctgaggttgactgccggttatttttctgtcctgggaacagcctgacccacctccctgtctccatgtagccagtgaggggagggggagacacagaaccaaccacagccaggggcgtccccatggcgactgtggcccggcccctcctctcttgcctgactctcctctcttgcctgactctagacactaacttagttccaggttcggtgccctgttggtgctcctgtttccaatagcttaggtcccatggtgggggaggaacctcaggggctatgcagcccccgccagctgccctcgaatcccgtccaggccaattccagattctaaactgatttttttcatgatattgtcaaaacagtgaggaaacattaaaaaaaaagccctaaagc

SEQ ID NO: 5264 - DNA, 2879 bp, Homo sapiens
  source 1..2879: mol_type = unassigned DNA
acaaacgccggcgctgacaggggccgccagcccctccgccgcgcggagcccacgaaggggacagcgcagccggcccagagctcgggtctccggggaccgagccttatgatctcctcattgcgtccccctctgcccactggacttggacttcagatctgaccccagacctgccggctacctcgggagggcccacctccccgcccatccagcaagatgccaatcctcaagcaactggtgtccagctcggtgcactccaagcgccgttcccgagcggacctcacggccgagatgatcagcgccccgctgggcgacttccgccacaccatgcacgttggccgggccggagacgcctttggggacacctccttcctcaatagcaaggccgcggagaagggcaccagtaagctgcccaagagcctgtcatccagccccgtgaagaaggccaatgacggggagggcggcgatgaggaggcgggcacggaggaggcagtgccccgtcggaatggggccgcgggtccacattcccctgaccccctcctcgatgagcaggcctttggggatctgacagatctgcctgtcgtgcccaaggccacgtacgggctgaagcatgcggagtccatcatgtccttccacatcgacctggggccctccatgctgggtgacgtcctcagcatcatggacaaggaggagtgggaccccgaggagggggagggtggttaccatggcgatgagggcgccgctggcaccatcacccaggctcccccgtacgccgtggcggcccctcccctggcaaggcaggaaggcaaggctggcccagacttgccctccctcccctcccatgctctggaggatgaggggtgggcagcagcggcccccagccccggctcagcccgcagcatgggcagccacaccacacgggacagcagctccctctccagctgcacctcaggcatcctggaggagcgcagccctgccttccgggggccggacagggcccgggctgctgtctcaagacagccagacaaggagttctccttcatggatgaggaggaggaggatgaaatccgtgtgtgaggcggacagtgggtggccaccgggagctcttggctgcatcttctccctgcccccaccccactatgacctttgaccctacggcgcaggggcagccaggacccttgattcagaccatggaccctggaccttgtagatgagggacactggcctggccctcgggtcttcggaggacgtagggggctggcatgggtgccgactggctgcctgacttcatcatgctccctgcacttaggctgcgtgggacaagggctgtgttgtcacagcaggaataggttttcctctgttggcctccctttcctccaccctggcctcaaatggatgccagatgccaaccccagttctggccacgtacagccagcgggtcagcccagaggcagcctcagctccagggctaaggactctcggctcccattttctctgctggcgtttctgctgtgcccagcagtggctgctggggaagcagctgcagcaggagggagacggtcttgcctctcagcccctccctgccccaccccagctcctgccctggaaatctggagccccttggagctgagctggacggggggccagctgcgagcatgtgcactaaacgcagccctttccaggggaagagaacaggatggagaatggaaggaaagccccccaggcttcgtgaattgcaagaagggacccttccaggatgacactaggaacagggctagggcactcgctcagtccctaggggcttgtttgttctttattattgtgtttaaatccttatagagcaatatcaggatggtgttaataggtctgcctcagaatgagaatcaatccttttagaaaacctttatactaagcctcctcttcaaaattcacagtggcgattagcggactggagtctggtggcgattagcggactggagtctggggacatccgtggcaaagacaccagctcaactttagtgcttcccaactttatttagaatgacatggggtgggtgtctggtgtgtgtgttttccctacgcacctcccatagctattaacaactgaggaaggccagtgcagaatatttttggagaacgattttttttttaaataatatatcattcctatggggggaaagccttttttttctttttggctgagttattccctccctcccctcaataccctcagtactgactacttccctttcttttctcaggcctccccccaccgacttttgaggccagggttggccagatttagcaaaaccaaaacagagtgctgagttaaacgcaaatttcaggtaaacaaaagataattttctagcattaatatgccccacgcaatatttggaacacttatgtgaaaaatgatttgtttttctgaaattcacgtttctctctgagtcctgtaactgtccccgaggggattgagcagaagctcgggtatgagccctgaggttgactgccggttatttttctgtcctgggaacagcctgacccacctccctgtctccatgtagccagtgaggggagggggagacacagaaccaaccacagccaggggcgtccccatggcgactgtggcccggcccctcctctcttgcctgactctcctctcttgcctgactctagacactaacttagttccaggttcggtgccctgttggtgctcctgtttccaatagcttaggtcccatggtgggggaggaacctcaggggctatgcagcccccgccagctgccctcgaatcccgtccaggccaattccagattctaaactgatttttttcatgatattgtcaaaacagtgaggaaacattaaaaaaaaagccctaaagc

SEQ ID NO: 5265 - DNA, 5413 bp, Homo sapiens
  source 1..5413: mol_type = unassigned DNA
gaagagggatagggccagcaaggcagggatcgaacgagtgtctggcagccgggagcccagcgaagagagcgagcaagcttaggaaaacgagcgaagtaaagggagtaggggagactgagactgaccggtagccaggcaggcggacggacgcacgcccggacagactgagcaggcgccggagaaccactcacaggttccccccgcctttccctttgaaagctaggattttgcctttcccgtggcgcccgagagagaatgctggactctgccgacttcagcgcaagctaagatttctcagctagggacaaacgatcagcccaatcctgagaaggggggaaccaagcaccccgtccccatccccctcccctcccccgactaaactcgggcgccaaacccagcccttctctaaccaccctacttcctcctctcctttctagcatggtggctgtatggacagtctgacagaacagagactgacatctcccaatctgccggccccccacctggaacactacagtgttctgcattgcaccatgaccctggatgtgcaaactgtagtcgtttttgccgtgattgtagtcctcctgcttgtcaatgtcatactcatgtttttcctgggaacgcgctgaatggagtccagccacctgagctgtcgcgaactctcgctttgatttcatcccgagagccaccgagaaaaaaaaaaaatcacagacagagacagggaaagagagagaaagaacaagctttcttactcaggggggaaaacgttttgagcttcaacatggcctcgctgtgatatgtatgacgttgctgatcactggagattccatcgttagtgctgaggcagtatgggatcacgtcaccatggccaaccgggagttggcatttaaagctggcgacgtcatcaaagtcttggatgcttccaacaaggattggtggtggggccagatcgacgatgaggagggatggtttcctgccagctttgtgaggctctgggtgaaccaggaggatgaggtggaggaggggcccagcgatgtgcagaacggacacctggaccccaattcagactgcctctgtctggggcggccactacagaaccgggaccagatgcgggccaatgtcatcaatgagataatgagcactgagcgtcactacatcaagcacctcaaggatatttgtgagggctatctgaagcagtgccggaagagaagggacatgttcagtgacgagcaactgaaggtaatctttgggaacattgaagatatctacagatttcagatgggctttgtgagagacctggagaaacagtataacaatgatgacccccacctcagcgagataggaccctgcttcctagagcaccaagatggattctggatatactctgagtattgtaacaaccacctggatgcttgcatggagctctccaaactgatgaaggacagccgctaccagcacttctttgaggcctgtcgcctcttgcagcagatgattgacattgctatcgatggtttccttttgactccagtgcagaagatctgcaagtatcccttacagttggctgagctcctaaagtatactgcccaagaccacagtgactacaggtatgtggcagctgctttggctgtcatgagaaatgtgactcagcagatcaacgaacgcaagcgacgtttagagaatattgacaagattgctcagtggcaggcttctgtcctagactgggagggcgaggacatcctagacaggagctcggagctgatctacactggggagatggcctggatctaccagccctacggccgcaaccagcagcgggtcttcttcctgtttgaccaccagatggtcctctgcaagaaggacctaatccggagagacatcctgtactacaaaggccgcattgacatggataaatatgaggtagttgacattgaggatggcagagatgatgacttcaatgtcagcatgaagaatgcctttaagcttcacaacaaggagactgaggagatacatctgttctttgccaagaagctggaggaaaaaatacgctggctcagggctttcagagaagagaggaaaatggtacaggaagatgaaaaaattggctttgaaatttctgaaaaccagaagaggcaggctgcaatgactgtgagaaaagtccctaagcaaaaaggtgtcaactctgcccgctcagttcctccttcctacccaccaccgcaggacccgttaaaccacggccagtacctggtccccgacggcatcgctcagtcgcaggtctttgagttcaccgaacccaagcgcagccagtcaccattctggcaaaacttcagcaggttaacccccttcaaaaaatgatacctacagggaggcagataattttaaaataaagtaaataaaattatatttatagatggaccttttttcggagaagcactgttgaaatttatacacacacacacacacagagacccttgagtacacatacacacacacacacacagacacacacacacacacacacacacacacacacacagagagataaggaacaaaagtgttttctgttgttttggggaagtgaaatatgtggttggtaggaagaggtaccaatgacttccaaacatgtgattccgtcttaaaagttttccatttttaccctgtcccccttccctttgctttcagaagttgacatttctattcattgcttttcttgttaagataatctctttactcccctgtgagtgattcactgccttgtcattattacgatagatgtgtttgtattgttttttttctgatgatactgatgttgatgaatttttaattttatttgatgtggtagagttgggaggtttcagggttttttcccctcttttactttccattgaggaagggaatgagctcctttctcctctccttcagccaatcattatcaaatgttccttcagccctgcagttgccccaaataaccttttttcagcatcctctgtcctcagtcatgccagtctggacatgctctgttgtgccctgtgacaaaactgctcagtattcctattgcttttactgtgttttaggtactgtgaagggatcaaaaaaccaaacagaagcaagggagtatcagactatgatgatgctggagtggacttctgttcagggaacattttgcattcaggctgtttcttctatcactggggtttcccatgttgcagcacttctgggtcgttgcaattttgcatctaggagttagtttgatcgagttattctcttttttcaagtcacttttgttataggtctccccctaggcctgtctctcccttagcccaaaagatctgaactggaagcagaggttgagattctgcctcccaggagagggatttacctgccccctagtaccagataggtttagggcagtgatctctacagcaatcagttcagtgtcctggttgtccctgctcccatttacagatgtttgggcagcattgatagaagtatggaggggttcaagacagagcccacctgatcaagatcatcagctaccttcaaattattgacctggacagggtccaagtctgatagtaaccttttacaagaaagaacagggatgggaatggaaagagatagccttgatccacagtattgtacctgcattttctaccaccctaaaattgtgtgagacttctcccattgttaacagattgcatggacaatcttccctggcttctttctttccctctctctttcttctttctcctgccatcctagcacaggaggatttttggtattgatatagttaaagctgttctggcactcaaagaaggccgtgtttccaacatcctctcatcccaggacatttggggcaagtgagttaggggcccaggggcaattttccctctgaataacgtgtctgaggcagggatgctaccctcaggctcgcttttggccagctttttgcttgggaaaatctaacttctttcacaaggaggcaggcttcctatggatgttggagtacctgtttttcctccacacatagcccttttcatggatagaccttgaacaacaaaaagggtataagggaataaggatgaactctgctgtgaagagcaagccactgtagtgaggaatgtggagactgggagtctgtcctaaaccccatgggagaagacttcatcatgacaggacttcagcttaccaagcagcagccatagctgtgtggaggcttcagcatagctagcatgtttactgctctatgcctcctgatccagaccaggcattgcccagcctgggaatcttttctttgtgggaatcaaattacaagctatttaagtttatattccatcacaaccaagtcagacttgtattataagtcaaggatgagcctgatctggggagagggccggggctcgggactggccaccactgttcagcacatgacctaactacgtaagcctctttggcaagggtcctggtgcccagcacccaggctaaaatatcctgtctggcagagtgttttggtagctatgcaggcctcccttcagtgtacctctttttccaacttctcactcctccttactaggcttggccttgacatgcttcttcgagggttggcagcacaccgggaggggatgcttggacaagtttctgggcctacatttcttgactaggccctctcatttcctccctccttggggcttctgcccagggctccaggatcagggatattacttctcaacccgcacttctcctctactgaacccactggcatcacctgatgccactaatttgtgaacaacaagaaatcatttccccattggttggagtattccctcagcctatagcatcaaagcagaccagtggccaacagccccaaggggagcccaattaaatacctgggttcagtatcctaacctgttatgtcctgacagcaatggtaaccccagtaattctgtaatgttgtaatttccgcatggccctgagctcccttttcctcaactcagtgaggccaggatttgctctccaaaaggctttgctagtgtgttcaatgggacctgctgtggggagtcctaagacagacatctaattattctctctttttccccccctctctatgtgtatatttctaatggatctataagaacagcaacaagagagttctaacaattctagtgtgaagccaaatagtgatcttttagtgctttggggatggggtgggctggggtggatggatgggcaacagtgactttgattacccttgctgctctgcatttgccagtttattcttttgtttcttttatctgactgactctgtcaaacaagtgtcaaagttgtgtgttaaaaaatgtttaacaaaaaaaatgttgtaatgacacaaagccttatgaaaatatttatggagttcaataaaagaagtaaaaagaca

SEQ ID NO: 5266 - DNA, 5251 bp, Homo sapiens
  source 1..5251: mol_type = unassigned DNA
aaaaaggcagcctatgggctgagcgggggatggggagagaagagggatagggccagcaaggcagggatcgaacgagtgtctggcagccgggagcccagcgaagagagcgagcaagcttaggaaaacgagcgaagtaaagggagtaggggagactgagactgaccggtagccaggcaggcggacggacgcacgcccggacagactgagcaggcgccggagaaccactcacaggttccccccgcctttccctttgaaagctaggattttgcctttcccgtggcgcccgagagagaatgctggactctgccgacttcagcgcaagctaagatttctcagctagggacaaacgatcagcccaatcctgagaaggggggaaccaagcaccccgtccccatccccctcccctcccccgactaaactcgggcgccaaacccagcccttctctaaccaccctacttcctcctctcctttctagcatggtggctgtatggacagtctgacagaacagagactgacatctcccaatctgccggccccccacctggaacactacagtgttctgcattgcaccatgaccctggatgtgcaaactgtagtcgtttttgccgtgattgtagtcctcctgcttgtcaatgtcatactcatgtttttcctgggaacgcgctgaatggagtccagccacctgagctgtcgcgaactctcgctttgatttcatcccgagagccaccgagaaaaaaaaaaaatcacagacagagacagggaaagagagagaaagaacaagctttcttactcaggggggaaaacgttttgagcttcaacatggcctcgctgtgatatctctgggtgaaccaggaggatgaggtggaggaggggcccagcgatgtgcagaacggacacctggaccccaattcagactgcctctgtctggggcggccactacagaaccgggaccagatgcgggccaatgtcatcaatgagataatgagcactgagcgtcactacatcaagcacctcaaggatatttgtgagggctatctgaagcagtgccggaagagaagggacatgttcagtgacgagcaactgaaggtaatctttgggaacattgaagatatctacagatttcagatgggctttgtgagagacctggagaaacagtataacaatgatgacccccacctcagcgagataggaccctgcttcctagagcaccaagatggattctggatatactctgagtattgtaacaaccacctggatgcttgcatggagctctccaaactgatgaaggacagccgctaccagcacttctttgaggcctgtcgcctcttgcagcagatgattgacattgctatcgatggtttccttttgactccagtgcagaagatctgcaagtatcccttacagttggctgagctcctaaagtatactgcccaagaccacagtgactacaggtatgtggcagctgctttggctgtcatgagaaatgtgactcagcagatcaacgaacgcaagcgacgtttagagaatattgacaagattgctcagtggcaggcttctgtcctagactgggagggcgaggacatcctagacaggagctcggagctgatctacactggggagatggcctggatctaccagccctacggccgcaaccagcagcgggtcttcttcctgtttgaccaccagatggtcctctgcaagaaggacctaatccggagagacatcctgtactacaaaggccgcattgacatggataaatatgaggtagttgacattgaggatggcagagatgatgacttcaatgtcagcatgaagaatgcctttaagcttcacaacaaggagactgaggagatacatctgttctttgccaagaagctggaggaaaaaatacgctggctcagggctttcagagaagagaggaaaatggtacaggaagatgaaaaaattggctttgaaatttctgaaaaccagaagaggcaggctgcaatgactgtgagaaaagtccctaagcaaaaaggtgtcaactctgcccgctcagttcctccttcctacccaccaccgcaggacccgttaaaccacggccagtacctggtccccgacggcatcgctcagtcgcaggtctttgagttcaccgaacccaagcgcagccagtcaccattctggcaaaacttcagcaggttaacccccttcaaaaaatgatacctacagggaggcagataattttaaaataaagtaaataaaattatatttatagatggaccttttttcggagaagcactgttgaaatttatacacacacacacacacagagacccttgagtacacatacacacacacacacacagacacacacacacacacacacacacacacacacacagagagataaggaacaaaagtgttttctgttgttttggggaagtgaaatatgtggttggtaggaagaggtaccaatgacttccaaacatgtgattccgtcttaaaagttttccatttttaccctgtcccccttccctttgctttcagaagttgacatttctattcattgcttttcttgttaagataatctctttactcccctgtgagtgattcactgccttgtcattattacgatagatgtgtttgtattgttttttttctgatgatactgatgttgatgaatttttaattttatttgatgtggtagagttgggaggtttcagggttttttcccctcttttactttccattgaggaagggaatgagctcctttctcctctccttcagccaatcattatcaaatgttccttcagccctgcagttgccccaaataaccttttttcagcatcctctgtcctcagtcatgccagtctggacatgctctgttgtgccctgtgacaaaactgctcagtattcctattgcttttactgtgttttaggtactgtgaagggatcaaaaaaccaaacagaagcaagggagtatcagactatgatgatgctggagtggacttctgttcagggaacattttgcattcaggctgtttcttctatcactggggtttcccatgttgcagcacttctgggtcgttgcaattttgcatctaggagttagtttgatcgagttattctcttttttcaagtcacttttgttataggtctccccctaggcctgtctctcccttagcccaaaagatctgaactggaagcagaggttgagattctgcctcccaggagagggatttacctgccccctagtaccagataggtttagggcagtgatctctacagcaatcagttcagtgtcctggttgtccctgctcccatttacagatgtttgggcagcattgatagaagtatggaggggttcaagacagagcccacctgatcaagatcatcagctaccttcaaattattgacctggacagggtccaagtctgatagtaaccttttacaagaaagaacagggatgggaatggaaagagatagccttgatccacagtattgtacctgcattttctaccaccctaaaattgtgtgagacttctcccattgttaacagattgcatggacaatcttccctggcttctttctttccctctctctttcttctttctcctgccatcctagcacaggaggatttttggtattgatatagttaaagctgttctggcactcaaagaaggccgtgtttccaacatcctctcatcccaggacatttggggcaagtgagttaggggcccaggggcaattttccctctgaataacgtgtctgaggcagggatgctaccctcaggctcgcttttggccagctttttgcttgggaaaatctaacttctttcacaaggaggcaggcttcctatggatgttggagtacctgtttttcctccacacatagcccttttcatggatagaccttgaacaacaaaaagggtataagggaataaggatgaactctgctgtgaagagcaagccactgtagtgaggaatgtggagactgggagtctgtcctaaaccccatgggagaagacttcatcatgacaggacttcagcttaccaagcagcagccatagctgtgtggaggcttcagcatagctagcatgtttactgctctatgcctcctgatccagaccaggcattgcccagcctgggaatcttttctttgtgggaatcaaattacaagctatttaagtttatattccatcacaaccaagtcagacttgtattataagtcaaggatgagcctgatctggggagagggccggggctcgggactggccaccactgttcagcacatgacctaactacgtaagcctctttggcaagggtcctggtgcccagcacccaggctaaaatatcctgtctggcagagtgttttggtagctatgcaggcctcccttcagtgtacctctttttccaacttctcactcctccttactaggcttggccttgacatgcttcttcgagggttggcagcacaccgggaggggatgcttggacaagtttctgggcctacatttcttgactaggccctctcatttcctccctccttggggcttctgcccagggctccaggatcagggatattacttctcaacccgcacttctcctctactgaacccactggcatcacctgatgccactaatttgtgaacaacaagaaatcatttccccattggttggagtattccctcagcctatagcatcaaagcagaccagtggccaacagccccaaggggagcccaattaaatacctgggttcagtatcctaacctgttatgtcctgacagcaatggtaaccccagtaattctgtaatgttgtaatttccgcatggccctgagctcccttttcctcaactcagtgaggccaggatttgctctccaaaaggctttgctagtgtgttcaatgggacctgctgtggggagtcctaagacagacatctaattattctctctttttccccccctctctatgtgtatatttctaatggatctataagaacagcaacaagagagttctaacaattctagtgtgaagccaaatagtgatcttttagtgctttggggatggggtgggctggggtggatggatgggcaacagtgactttgattacccttgctgctctgcatttgccagtttattcttttgtttcttttatctgactgactctgtcaaacaagtgtcaaagttgtgtgttaaaaaatgtttaacaaaaaaaatgttgtaatgacacaaagccttatgaaaatatttatggagttcaataaaagaagt

SEQ ID NO: 5267 - DNA, 2345 bp, Homo sapiens
  source 1..2345: mol_type = unassigned DNA
gggatagggccagcaaggcagggatcgaacgagtgtctggcagccgggagcccagcgaagagagcgagcaagcttaggaaaacgagcgaacatggtggctgtatggacagtctgacagaacagagactgacatctcccaatctgccggccccccacctggaacactacagtgttctgcattgcaccatgaccctggatgtgcaaactgtagtcgtttttgccgtgattgtagtcctcctgcttgtcaatgtcatactcatgtttttcctgggaacgcgctgaatggagtccagccacctgagctgtcgcgaactctcgctttgatttcatcccgagagccaccgagaaaaaaaaaaaatcacagacagagacagggaaagagagagaaagaacaagctttcttactcaggggggaaaacgttttgagcttcaacatggcctcgctgtgatatgtggtagcaggccatccagtgaaatgtggagcaggcagtaggaaatatgggactggaggtgagcgagaactgatgtcatgagaaggatgattcatctgaagaactaagtggagagaacaaaaagcaaaggtccctattgacttttgaatgcggcagtcaagggtttaagtgggaagcccacttctcaattttcccaggtagtctgactgtgttgccagcaatgcttgagtgagttatcttcaggaaaaagttctcatttttttgagcagaaagcagtaaaagcatcctatcaagcacaaagaaggctgatcactggagattccatcgttagtgctgaggcagtatgggatcacgtcaccatggccaaccgggagttggcatttaaagctggcgacgtcatcaaagtcttggatgcttccaacaaggattggtggtggggccagatcgacgatgaggagggatggtttcctgccagctttgtgaggctctgggtgaaccaggaggatgaggtggaggaggggcccagcgatgtgcagaacggacacctggaccccaattcagactgcctctgtctggggcggccactacagaaccgggaccagatgcgggccaatgtcatcaatgagataatgagcactgagcgtcactacatcaagcacctcaaggatatttgtgagggctatctgaagcagtgccggaagagaagggacatgttcagtgacgagcaactgaaggtaatctttgggaacattgaagatatctacagatttcagatgggctttgtgagagacctggagaaacagtataacaatgatgacccccacctcagcgagataggaccctgcttcctagagcaccaagatggattctggatatactctgagtattgtaacaaccacctggatgcttgcatggagctctccaaactgatgaaggacagccgctaccagcacttctttgaggcctgtcgcctcttgcagcagatgattgacattgctatcgatggtttccttttgactccagtgcagaagatctgcaagtatcccttacagttggctgagctcctaaagtatactgcccaagaccacagtgactacaggtatgtggcagctgctttggctgtcatgagaaatgtgactcagcagatcaacgaacgcaagcgacgtttagagaatattgacaagattgctcagtggcaggcttctgtcctagactgggagggcgaggacatcctagacaggagctcggagctgatctacactggggagatggcctggatctaccagccctacggccgcaaccagcagcgggtcttcttcctgtttgaccaccagatggtcctctgcaagaaggacctaatccggagagacatcctgtactacaaaggccgcattgacatggataaatatgaggtagttgacattgaggatggcagagatgatgacttcaatgtcagcatgaagaatgcctttaagcttcacaacaaggagactgaggagatacatctgttctttgccaagaagctggaggaaaaaatacgctggctcagggctttcagagaagagaggaaaatggtacaggaagatgaaaaaattggctttgaaatttctgaaaaccagaagaggcaggctgcaatgactgtgagaaaagtccctaagcaaaaaggtgtcaactctgcccgctcagttcctccttcctacccaccaccgcaggacccgttaaaccacggccagtacctggtccccgacggcatcgctcagtcgcaggtctttgagttcaccgaacccaagcgcagccagtcaccattctggcaaaacttcagcaggttaacccccttcaaaaaatgatacctacagggaggcagataattttaaaataaagtaaataaaatta

SEQ ID NO: 5268 - DNA, 2204 bp, Homo sapiens
  source 1..2204: mol_type = unassigned DNA
gcagcgggaggcaggcagaggtagcagctgccttctcctgggcgggcggaggctattcgcccccatcctctccctgcaccccacccccacagttctcaagccttggtgggggacaaaagcagcccattaggacccccccacactcgcacctctccctgccaagacctctaggagcagcagggcggagagacagagcctgccggttggcatggaacaaactgactgaaggcgaggtccggggcggaggggattgggttgtagggctgtggaggaggggcggcggagggggcgctggggctctcgcttgcttcagcccagcccttctagtcagcccgcgacaactcgcgccagctacggggcctcagagaagccggacttcgcaagcaccatgcagtggataaggggcggatcgggaatgctgatcactggagattccatcgttagtgctgaggcagtatgggatcacgtcaccatggccaaccgggagttggcatttaaagctggcgacgtcatcaaagtcttggatgcttccaacaaggattggtggtggggccagatcgacgatgaggagggatggtttcctgccagctttgtgaggctctgggtgaaccaggaggatgaggtggaggaggggcccagcgatgtgcagaacggacacctggaccccaattcagactgcctctgtctggggcggccactacagaaccgggaccagatgcgggccaatgtcatcaatgagataatgagcactgagcgtcactacatcaagcacctcaaggatatttgtgagggctatctgaagcagtgccggaagagaagggacatgttcagtgacgagcaactgaaggtaatctttgggaacattgaagatatctacagatttcagatgggctttgtgagagacctggagaaacagtataacaatgatgacccccacctcagcgagataggaccctgcttcctagagcaccaagatggattctggatatactctgagtattgtaacaaccacctggatgcttgcatggagctctccaaactgatgaaggacagccgctaccagcacttctttgaggcctgtcgcctcttgcagcagatgattgacattgctatcgatggtttccttttgactccagtgcagaagatctgcaagtatcccttacagttggctgagctcctaaagtatactgcccaagaccacagtgactacaggtatgtggcagctgctttggctgtcatgagaaatgtgactcagcagatcaacgaacgcaagcgacgtttagagaatattgacaagattgctcagtggcaggcttctgtcctagactgggagggcgaggacatcctagacaggagctcggagctgatctacactggggagatggcctggatctaccagccctacggccgcaaccagcagcgggtcttcttcctgtttgaccaccagatggtcctctgcaagaaggacctaatccggagagacatcctgtactacaaaggccgcattgacatggataaatatgaggtagttgacattgaggatggcagagatgatgacttcaatgtcagcatgaagaatgcctttaagcttcacaacaaggagactgaggagatacatctgttctttgccaagaagctggaggaaaaaatacgctggctcagggctttcagagaagagaggaaaatggtacaggaagatgaaaaaattggctttgaaatttctgaaaaccagaagaggcaggctgcaatgactgtgagaaaactcccttttcctcaactcagtgaggccaggatttgctctccaaaaggctttgctagtgtgttcaatgggacctgctgtggggagtcctaagacagacatctaattattctctctttttccccccctctctatgtgtatatttctaatggatctataagaacagcaacaagagagttctaacaattctagtgtgaagccaaatagtgatcttttagtgctttggggatggggtgggctggggtggatggatgggcaacagtgactttgattacccttgctgctctgcatttgccagtttattcttttgtttcttttatctgactgactctgtcaaacaagtgtcaaagttgtgtgttaaaaaatgtttaacaaaaaaaatgttgtaatgacacaaagccttatgaaaatatttatggagttcaataaaagaagtaaaaagaca

SEQ ID NO: 5269 - DNA, 1059 bp, Homo sapiens
  source 1..1059: mol_type = unassigned DNA
agccgctaccagcacttctttgaggcctgtcgcctcttgcagcagatgattgacattgctatcgatggtttccttttgactccagtgcagaagatctgcaagtatcccttacagttggctgagctcctaaagtatactgcccaagaccacagtgactacaggtatgtggcagctgctttggctgtcatgagaaatgtgactcagcagatcaacgaacgcaagcgacgtttagagaatattgacaagattgctcagtggcaggcttctgtcctagactgggaggacctaatccggagagacatcctgtactacaaaggccgcattgacatggataaatatgaggtagttgacattgaggatggcagagatgatgacttcaatgtcagcatgaagaatgcctttaagcttcacaacaaggagactgaggagatacatctgttctttgccaagaagctggaggaaaaaatacgctggctcagggctttcagagaagagaggaaaatggtacaggaagatgaaaaaattggctttgaaatttctgaaaaccagaagaggcaggctgcaatgactgtgagaaaagtccctaagcaaaaaggtgtcaactctgcccgctcagttcctccttcctacccaccaccgcaggacccgttaaaccacggccagtacctggtccccgacggcatcgctcagtcgcaggtctttgagttcaccgaacccaagcgcagccagtcaccattctggcaaaacttcagcaggttaacccccttcaaaaaatgatacctacagggaggcagataattttaaaataaagtaaataaaattatatttatagatggaccttttttcggagaagcactgttgaaatttatacacacacacacacacagagacccttgagtacacatacacacacacacacacagacacacacacacacacacacacacacacacacacagagagataaggaacaaaagtgttttctgttgttttggggaagtgaaatatgtggttggtaggaagaggtaccaatgacttccaaacatgtgattccgtctt

SEQ ID NO: 5270 - DNA, 4845 bp, Homo sapiens
  source 1..4845: mol_type = unassigned DNA
atctaactccagcgcagcgggaggcaggcagaggtagcagctgccttctcctgggcgggcggaggctattcgcccccatcctctccctgcaccccacccccacagttctcaagccttggtgggggacaaaagcagcccattaggacccccccacactcgcacctctccctgccaagacctctaggagcagcagggcggagagacagagcctgccggttggcatggaacaaactgactgaaggcgaggtccggggcggaggggattgggttgtagggctgtggaggaggggcggcggagggggcgctggggctctcgcttgcttcagcccagcccttctagtcagcccgcgacaactcgcgccagctacggggcctcagagaagccggacttcgcaagcaccatgcagtggataaggggcggatcgggaatgctctgggtgaaccaggaggatgaggtggaggaggggcccagcgatgtgcagaacggacacctggaccccaattcagactgcctctgtctggggcggccactacagaaccgggaccagatgcgggccaatgtcatcaatgagataatgagcactgagcgtcactacatcaagcacctcaaggatatttgtgagggctatctgaagcagtgccggaagagaagggacatgttcagtgacgagcaactgaaggtaatctttgggaacattgaagatatctacagatttcagatgggctttgtgagagacctggagaaacagtataacaatgatgacccccacctcagcgagataggaccctgcttcctagagcaccaagatggattctggatatactctgagtattgtaacaaccacctggatgcttgcatggagctctccaaactgatgaaggacagccgctaccagcacttctttgaggcctgtcgcctcttgcagcagatgattgacattgctatcgatggtttccttttgactccagtgcagaagatctgcaagtatcccttacagttggctgagctcctaaagtatactgcccaagaccacagtgactacaggtatgtggcagctgctttggctgtcatgagaaatgtgactcagcagatcaacgaacgcaagcgacgtttagagaatattgacaagattgctcagtggcaggcttctgtcctagactgggagggcgaggacatcctagacaggagctcggagctgatctacactggggagatggcctggatctaccagccctacggccgcaaccagcagcgggtcttcttcctgtttgaccaccagatggtcctctgcaagaaggacctaatccggagagacatcctgtactacaaaggccgcattgacatggataaatatgaggtagttgacattgaggatggcagagatgatgacttcaatgtcagcatgaagaatgcctttaagcttcacaacaaggagactgaggagatacatctgttctttgccaagaagctggaggaaaaaatacgctggctcagggctttcagagaagagaggaaaatggtacaggaagatgaaaaaattggctttgaaatttctgaaaaccagaagaggcaggctgcaatgactgtgagaaaagtccctaagcaaaaaggtgtcaactctgcccgctcagttcctccttcctacccaccaccgcaggacccgttaaaccacggccagtacctggtccccgacggcatcgctcagtcgcaggtctttgagttcaccgaacccaagcgcagccagtcaccattctggcaaaacttcagcaggttaacccccttcaaaaaatgatacctacagggaggcagataattttaaaataaagtaaataaaattatatttatagatggaccttttttcggagaagcactgttgaaatttatacacacacacacacacagagacccttgagtacacatacacacacacacacacagacacacacacacacacacacacacacacacacacagagagataaggaacaaaagtgttttctgttgttttggggaagtgaaatatgtggttggtaggaagaggtaccaatgacttccaaacatgtgattccgtcttaaaagttttccatttttaccctgtcccccttccctttgctttcagaagttgacatttctattcattgcttttcttgttaagataatctctttactcccctgtgagtgattcactgccttgtcattattacgatagatgtgtttgtattgttttttttctgatgatactgatgttgatgaatttttaattttatttgatgtggtagagttgggaggtttcagggttttttcccctcttttactttccattgaggaagggaatgagctcctttctcctctccttcagccaatcattatcaaatgttccttcagccctgcagttgccccaaataaccttttttcagcatcctctgtcctcagtcatgccagtctggacatgctctgttgtgccctgtgacaaaactgctcagtattcctattgcttttactgtgttttaggtactgtgaagggatcaaaaaaccaaacagaagcaagggagtatcagactatgatgatgctggagtggacttctgttcagggaacattttgcattcaggctgtttcttctatcactggggtttcccatgttgcagcacttctgggtcgttgcaattttgcatctaggagttagtttgatcgagttattctcttttttcaagtcacttttgttataggtctccccctaggcctgtctctcccttagcccaaaagatctgaactggaagcagaggttgagattctgcctcccaggagagggatttacctgccccctagtaccagataggtttagggcagtgatctctacagcaatcagttcagtgtcctggttgtccctgctcccatttacagatgtttgggcagcattgatagaagtatggaggggttcaagacagagcccacctgatcaagatcatcagctaccttcaaattattgacctggacagggtccaagtctgatagtaaccttttacaagaaagaacagggatgggaatggaaagagatagccttgatccacagtattgtacctgcattttctaccaccctaaaattgtgtgagacttctcccattgttaacagattgcatggacaatcttccctggcttctttctttccctctctctttcttctttctcctgccatcctagcacaggaggatttttggtattgatatagttaaagctgttctggcactcaaagaaggccgtgtttccaacatcctctcatcccaggacatttggggcaagtgagttaggggcccaggggcaattttccctctgaataacgtgtctgaggcagggatgctaccctcaggctcgcttttggccagctttttgcttgggaaaatctaacttctttcacaaggaggcaggcttcctatggatgttggagtacctgtttttcctccacacatagcccttttcatggatagaccttgaacaacaaaaagggtataagggaataaggatgaactctgctgtgaagagcaagccactgtagtgaggaatgtggagactgggagtctgtcctaaaccccatgggagaagacttcatcatgacaggacttcagcttaccaagcagcagccatagctgtgtggaggcttcagcatagctagcatgtttactgctctatgcctcctgatccagaccaggcattgcccagcctgggaatcttttctttgtgggaatcaaattacaagctatttaagtttatattccatcacaaccaagtcagacttgtattataagtcaaggatgagcctgatctggggagagggccggggctcgggactggccaccactgttcagcacatgacctaactacgtaagcctctttggcaagggtcctggtgcccagcacccaggctaaaatatcctgtctggcagagtgttttggtagctatgcaggcctcccttcagtgtacctctttttccaacttctcactcctccttactaggcttggccttgacatgcttcttcgagggttggcagcacaccgggaggggatgcttggacaagtttctgggcctacatttcttgactaggccctctcatttcctccctccttggggcttctgcccagggctccaggatcagggatattacttctcaacccgcacttctcctctactgaacccactggcatcacctgatgccactaatttgtgaacaacaagaaatcatttccccattggttggagtattccctcagcctatagcatcaaagcagaccagtggccaacagccccaaggggagcccaattaaatacctgggttcagtatcctaacctgttatgtcctgacagcaatggtaaccccagtaattctgtaatgttgtaatttccgcatggccctgagctcccttttcctcaactcagtgaggccaggatttgctctccaaaaggctttgctagtgtgttcaatgggacctgctgtggggagtcctaagacagacatctaattattctctctttttccccccctctctatgtgtatatttctaatggatctataagaacagcaacaagagagttctaacaattctagtgtgaagccaaatagtgatcttttagtgctttggggatggggtgggctggggtggatggatgggcaacagtgactttgattacccttgctgctctgcatttgccagtttattcttttgtttcttttatctgactgactctgtcaaacaagtgtcaaagttgtgtgttaaaaaatgtttaacaaaaaaaatgttgtaatgacacaaagccttatgaaaatatttatggagttcaataaaagaagt

SEQ ID NO: 5271 - DNA, 6423 bp, Homo sapiens
  source 1..6423: mol_type = unassigned DNA
tttcttccattctgttttggacatgcgcggggcgtaaggcgctttggccagagtggtttgatggttttgtgttagtcttcctgcagctgagcttccacaagacactttttccctttcagccacccaatatctcgcgagacttgctattctgcgccccctcccaccttgcgcttgcgcagatcttcaaagcagaaggtcgcgcttggaggaagtggcggctttgagtccggtggcccaatcgctgttactacttctctgaagctcctctcggctgcttgccgagacaccctgccgccaagatgcctcgaattatgatcaaggggggcgtatggaggaataccgaggatgaaattctgaaagcagcggtaatgaaatatgggaaaaatcagtggtctaggattgcctcattgctgcatagaaaatcagcaaagcagtgcaaagccagatggtatgaatggctggatccaagcattaagaagacagaatggtccagagaagaagaggaaaaactcttgcacttggccaagttgatgccaactcagtggaggaccattgctccaatcattggaagaacagcggcccagtgcttagaacactatgaatttcttctggataaagctgcccaaagagacaatgaagaggaaacaacagatgatccacgaaaacttaaacctggagaaatagatccaaatccagaaacaaaaccagcgcggcctgatccaattgatatggatgaggatgaacttgagatgctttctgaagccagagcccgcttggctaatactcagggaaagaaggccaagaggaaagcaagagagaaacaattggaagaagcaagacgtcttgctgccctccaaaaaagaagagaacttcgagcagctggcatagaaattcagaagaaaagaaaaaggaagagaggagttgattataatgccgaaatcccatttgaaaaaaagcctgcccttggtttttatgatacttctgaggaaaactaccaagctcttgacgcagatttcaggaaattaagacaacaggatcttgatggggagctaagatctgaaaaagaaggaagagatagaaaaaaagacaaacagcatttgaaaaggaaaaaagaatctgatttaccatcagctattcttcaaactagtggtgtttctgaatttactaaaaagagaagcaaactagtacttcctgcccctcagatttcagatgcagaactccaggaagttgtaaaagtaggccaagcgagtgaaattgcacgtcaaactgccgaggaatctggcataacaaattctgcttccagtacacttttgtctgagtacaatgtcaccaacaacagcgttgctcttagaacaccacgaacaccagcttcccaggacagaattctgcaggaagcccagaacctcatggccctcaccaatgtggacaccccattgaaaggtggacttaataccccattgcatgagagtgacttctcaggtgtaactccacagcgacaagttgtacagactccaaacacagttctctctactccattcaggactccttctaatggagctgaagggctgactccccggagtggaacaactcccaaaccagttattaactctactccgggtagaactcctcttcgagacaagttaaacattaatcccgaggatggaatggcagactatagtgatccctcttacgtgaagcagatggaaagagaatcccgagaacatctccgtttagggttgttgggccttcctgcccctaagaatgattttgaaattgttctaccagaaaatgccgagaaggagctggaagaacgtgaaatagatgatacttacattgaagatgctgctgatgtggatgctcgaaagcaggccatacgagatgcagagcgtgtaaaggaaatgaaacgaatgcataaagctgtccagaaagatctgccaagaccatcagaagtaaatgaaactattctaagacccttaaatgtagaaccgcctttaacagatttacagaaaagtgaagaactaatcaaaaaagaaatgatcacaatgcttcattatgaccttctacatcacccttatgaaccatctggaaataaaaaaggcaaaactgtagggtttggtaccaataattcagagcacattacctatctggaacataatccttatgaaaagttctccaaagaagagctgaaaaaggcccaggatgttttggtgcaggagatggaagtggttaaacaaggaatgagccatggagagctctcaagtgaagcttataaccaggtgtgggaagaatgctacagtcaagttttatatcttcctgggcagagccgctacacacgggccaatctggctagtaaaaaggacagaattgaatcacttgaaaagaggctcgagataaacaggggtcacatgacgacagaagccaagagggctgcaaagatggaaaagaagatgaaaattttgcttgggggttaccagtctcgtgctatggggctcatgaaacagttgaatgacttatgggaccaaattgaacaggctcacttggagttacgcacttttgaagaactcaagaaacatgaagattctgctattccccggaggctagagtgtctaaaagaagacgttcagcgacaacaagaaagagaaaaggaacttcaacatagatatgctgatttgctgctggagaaagagactttaaagtcaaaattctgaagtacagtttatattctgtcacaggattaattaattgccggttttcatactctagaaggctgaaactgatgtttatcttcattgacaaatttacccaccatctgtggtttttcagttgtttattttaaatgatatcgatcttacacattctgtgtataaagaccttaactccacaggacggacattttagagtttaaattattaaggctatcattcttttagtaatgtcatatttgcaaacttttttagttttggcctttaatttaaaaagcctaattttaaagtgctgcctgtgagtaactcttgaataaaaacaaaatataaaaaattgagaatgtagccttttgtttgaagtaattagatacttaagagtgcctgcaaaccagcagctatgtactctgtgtcatatttaatgagtaactcttgggtaatcaaaatggtgatgcagtatcttaaacacttaagaggcagttctttgtggctttgttagtttcagcaaagagtggtcatttctgtatacactgacaagttagattaactttttagtacctcaaattttttttttgttaatatcactttaaagaaggtctcttgtctgccagctacttaaataatttatgggtcagggcttaaaagatttaacttccttgccccattattttcttataagtattttttgacaaaggcattttaaaagttaatttcaagaaggccatcaaacttaaagctctatgtttagcctaagaagtcagttacatcagtgtagaatttggggaatggatagaggtggagatatttaattttatataattcatataaattgatttagttacagtatcagttggctacaagctcattatagactagcaatgttttgacatcaccaaaaacgtttgcccagtcttagaatactagggactataggaagggaagggattcattcattcattcgatattgaatgtataccctgtgccagagtcttagagagagaacaacaaacaaaataggcctagttcttgtttagtagagcttatagtcttttgagaatgacagacaattaaaatccaaatgtttatttggtgattcttatgtgtcagacacttaagtgttgggagataagcagttattaagacagagttcttgctctcatggaggtgacattagtggggaggagatactaagtatgtccagggaaagtatcagaccatgagttttagattctgtggaggaaattaaagtagggtgattatgagatagtgaatgagtggctattttagactggacgatcaaagagacctcttggaaggcagctatgctcaccactataccactgcactgtgccgcaccgtaccactataagctgcacggccaaagagacctcttaaagaagtaacatttaagataacatgtgattgacattttagaatgggctatccttgtgagattcaaggaaagaacatcctaggtggagtgaatagcaaacataaagcctcttttgtatgtttgaggaacaaaaaggacaatgcagctagagtgtcaagaatggcatttctgtatataagacctcgttgtatagagccacataaataaggctataataaggaatttggatcttactttaaatatgataagaatcgatgagaagatctaagcaaaggaatgacatgatcagatttggttttagaaacatcactatctccttagtgtgtaaaatctcaccaggctggagatagggaagccagtccaattaggagcctgatgcagtgatccagacaaaaaaataatagtgattctaactagagtccaggtaatagtagtggagatatgtggagagacatgataggtatatacttaatagtcttatcagacgataaattgatattttcctggtgtgtagtcacttaattcaaatacttttttcagtaagttctgggttttctaggaaaaacttcagtatcatcagtgaataatgatagtgtttcttctgatagttttatttcacttttattgcatgttttgttatctgaaatgtttaggacaatgttaacaataatgatgttagacatttttttttcttattttaatgggaatgtccatagttttaagtttgctgttgggagttagatagtctttatctgaaagacagtgtctctcttttagtttttaaagagtttgaattagaaatggctctggaactttaaacagtataccatttgggcatctattaaagcattcatataattgttctcatttgatgttttgatgaggtatattaatagattttcccacattaaatcatctttgcactcctggaatcaggtagattaatttttaaaagaaattttaaaggatttatagtttatttgcactttttgtagacttgaattatatggatttaaaagttgatctaatattaataaaggctcactttgttttcaaaatttgaagtaattcacatacttatagcctaaaaaaatcggcaggaattacaaaatttcaaaactggcacattgtaaactgcatatgcatttgccaggtagtggtgccacttgaaatggtgaacagacacactgttatcctttgtcagtatcctgtaaagcccaggattctttaccagcaccatacagcgattttggtgactattttaacattcacactgaggccaggggtggtgagtcatgcctgtaatcctagcactttgggaggccaaggtgggaggatcatttgagctcaggagttcaagattagcctgggtaacatagtgagaccctgtctctattaaaaaataataataaaaataacattcacattggtattgttcactaaggtattggttgttaaggcattcattaaggtattgttaaaacttgtgttaagcatgttaaagtctcagtaactttgggatagaaataaaatgtgataaaaagctgaaagaaaccaccacaagggagagtcctttttgaaatattagagacataatgctgtctaataaaaaacgacatcaaagaaaaactacactacagtgactgcagacttaatgttggccaaccatgcatcctccctagaaatgcatttgaatttgatttactaatcttttatttaggaaatttacatttttacattagtgagattggtcttttgggctattgtacttttttttttttttttttgagatggagtcttgctctctcacccaggctggagtgcagtagtgcaatcttggcccactgcaacctctgcctcctgggctcgagtgattctctgcctcagccttccaagtagctgggactacaggcatgtgccaccgcacctggctaatttttgtgtttttagtagagatggggttttgctatgttggccaggctggtcttgaattcctgacctcaggtgatccacctacctcggcctcccaaagtgctagaattacaggtgtgagccaccatgcccagcctggttattgtattttgatattgggattttgctagctctctaaagtaaataggataactgtatatctttttctgtgcattaagcagttataacatgggaatgatttgttcatgaaaggttgaaagtctgtacttacagaacttttgagttcacagtgctttctggaaataatttctttataactgtcagtttcttttgtgactattatgttacctatttttaaatttaagcaactttaaattaaaaaaattgtttttaaaatat

SEQ ID NO: 5272 - DNA, 1888 bp, Homo sapiens
  source 1..1888: mol_type = unassigned DNA
gtgttttcgagacgagtctcgacgcagcagctgtcagctccattttgttgttggtgcgcgacgcagtcagctgcgtgattcccgtgattgcgttacaagctttgtctccttcgacttggagtctttgtccaggacgatgagacactcaaagagaacttactgtcctgattgggatgacaaggattgggattatggaaaatggaggagcagcagcagtcataaaagaaggaagagatcacatagcagtgcccaggagaacaagcgctgcaaatacaatcactctaaaatgtgtgatagccattatttggaaagcaggtctataaatgagaaagattatcatagtcgacgctacattgatgagtacagaaatgactacactcaaggatgtgaacctggacatcgccaaagagaccatgaaagccggtatcagaaccatagtagcaagtcttctggtagaagtggaagaagtagttataaaagcaaacacaggattcaccacagtacttcacatcgtcgttcacatgggaagagtcaccgaaggaaaagaaccaggagtgtagaggatgatgaggagggtcacctgatctgtcagagtggagacgtactaagtgcaagatatgaaattgttgatactttaggtgaaggagcttttggaaaagttgtggagtgcatcgatcataaagcgggaggtagacatgtagcagtaaaaatagttaaaaatgtggatagatactgtgaagctgctcgctcagaaatacaagttctggaacatctgaatacaacagaccccaacagtactttccgctgtgtccagatgttggaatggtttgagcatcatggtcacatttgcattgtttttgaactattgggacttagtacttacgacttcattaaagaaaatggttttctaccatttcgactggatcatatcagaaagatggcatatcagatatgcaagtctgtgaattttttgcacagtaataagttgactcacacagacttaaagcctgaaaacatcttatttgtgcagtctgactacacagaggcgtataatcccaaaataaaacgtgatgaacgcaccttaataaatccagatattaaagttgtagactttggtagtgcaacatatgatgacgaacatcacagtacattggtatctacaagacattatagagcacctgaagttattttagccctagggtggtcccaaccatgtgatgtctggagcataggatgcattcttattgaatactatcttgggtttaccgtatttccaacacacgatagtaaggagcatttagcaatgatggaaaggattcttggacctctaccaaaacatatgatacagaaaaccaggaaacgtaaatattttcaccacgatcgattagactgggatgaacacagttctgccggcagatatgtttcaagacgctgtaaacctctgaaggaatttatgctttctcaagatgttgaacatgagcgtctctttgacctcattcagaaaatgttggagtatgatccagccaaaagaattactctcagagaagccttaaagcatcctttctttgaccttctgaagaaaagtatatagatctgtaattggacagctctctcgaagagatcttacagactgtatcagtctaatttttaaattttaagttattttgtacagctttgtaaattcttaacatttttatattgccatgtttattttgtttgggtaatttggttcattaagtacatagctaaggtaatgaacatctttttcagtaattgtaaagtgatttattcagaataaattttttgtgcttatgaagttgatatgtatctgaacagtttgttctaagtaccatttttcttcctacttctattaaagaatggacataga

SEQ ID NO: 5273 - DNA, 1843 bp, Homo sapiens
  source 1..1843: mol_type = unassigned DNA
gtgcatgacccgccccgcggcggagacgcgctcgctgcgtcatcagtgttttcgagacgagtctcgacgcagcagctgtcagctccattttgttgttggtgcgcgacgcagtcagctgcgtgattcccgtgattgcgttacaagctttgtctccttcgacttggagtctttgtccaggacgatgagacactcaaagagaacttactgtcctgattgggatgacaaggattgggattatggaaaatggaggagcagcagcagtcataaaagaaggaagagatcacatagcagtgcccaggagaacaagcgctgcaaatacaatcactctaaaatgtgtgatagccattatttggaaagcaggtctataaatgagaaagattatcatagtcgacgctacattgatgagtacagaaatgactacactcaaggatgtgaacctggacatcgccaaagagaccatgaaagccggtatcagaaccatagtagcaagtcttctggtagaagtggaagaagtagttataaaagcaaacacaggattcaccacagtacttcacatcgtcgttcacatggggatgaaattgttgatactttaggtgaaggagcttttggaaaagttgtggagtgcatcgatcataaagcgggaggtagacatgtagcagtaaaaatagttaaaaatgtggatagatactgtgaagctgctcgctcagaaatacaagttctggaacatctgaatacaacagaccccaacagtactttccgctgtgtccagatgttggaatggtttgagcatcatggtcacatttgcattgtttttgaactattgggacttagtacttacgacttcattaaagaaaatggttttctaccatttcgactggatcatatcagaaagatggcatatcagatatgcaagtctgtgaattttttgcacagtaataagttgactcacacagacttaaagcctgaaaacatcttatttgtgcagtctgactacacagaggcgtataatcccaaaataaaacgtgatgaacgcaccttaataaatccagatattaaagttgtagactttggtagtgcaacatatgatgacgaacatcacagtacattggtatctacaagacattatagagcacctgaagttattttagccctagggtggtcccaaccatgtgatgtctggagcataggatgcattcttattgaatactatcttgggtttaccgtatttccaacacacgatagtaaggagcatttagcaatgatggaaaggattcttggacctctaccaaaacatatgatacagaaaaccaggaaacgtaaatattttcaccacgatcgattagactgggatgaacacagttctgccggcagatatgtttcaagacgctgtaaacctctgaaggaatttatgctttctcaagatgttgaacatgagcgtctctttgacctcattcagaaaatgttggagtatgatccagccaaaagaattactctcagagaagccttaaagcatcctttctttgaccttctgaagaaaagtatatagatctgtaattggacagctctctcgaagagatcttacagactgtatcagtctaatttttaaattttaagttattttgtacagctttgtaaattcttaacatttttatattgccatgtttattttgtttgggtaatttggttcattaagtacatagctaaggtaatgaacatctttttcagtaattgtaaagtgatttattcagaataaattttttgtgcttatgaagttgatatgtatctgaacagtttgttctaagtaccatttttcttcctacttctattaaagaatggacataga

SEQ ID NO: 5274 - DNA, 2026 bp, Homo sapiens
  source 1..2026: mol_type = unassigned DNA
aagacgcaggagggagcggactaggtgacagggccgttcctgtgagcctcgcgggcgcctggcgatgcccccttttcctgcttgtttgctgcccgccgtccccggcgcgacgactgcctgctcccttcactcccaggctgcacagtggcggcgcgcccctctttcctgcgcggccgagcctgtcgccgccggatccggcctgcgggggtagttacggtgtttgctaggccggccgccctcttggagcttctgccctccgctgaggaagcggcgccgcctgacgcgggacggtcgggcgggcgccatgttgtgaaccgcctcggcggagctgtaagatggcggctgggcggaggccggcttcggccctgtggccggaaaggcgaggctccccgttgaggggggatttgctggggttccagaatgtgcgtgagccaagcagctgtggggaaacgttgtctggaatgagacactcaaagagaacttactgtcctgattgggatgacaaggattgggattatggaaaatggaggagcagcagcagtcataaaagaaggaagagatcacatagcagtgcccaggagaacaagcgctgcaaatacaatcactctaaaatgtgtgatagccattatttggaaagcaggtctataaatgagaaagattatcatagtcgacgctacattgatgagtacagaaatgactacactcaaggatgtgaacctggacatcgccaaagagaccatgaaagccggtatcagaaccatagtagcaagtcttctggtagaagtggaagaagtagttataaaagcaaacacaggattcaccacagtacttcacatcgtcgttcacatgggaagagtcaccgaaggaaaagaaccaggagtgtagaggatgatgaggagggtcacctgatctgtcagagtggagacgtactaagtgcaagatatgaaattgttgatactttaggtgaaggagcttttggaaaagttgtggagtgcatcgatcataaagcgggaggtagacatgtagcagtaaaaatagttaaaaatgtggatagatactgtgaagctgctcgctcagaaatacaagttctggaacatctgaatacaacagaccccaacagtactttccgctgtgtccagatgttggaatggtttgagcatcatggtcacatttgcattgtttttgaactattgggacttagtacttacgacttcattaaagaaaatggttttctaccatttcgactggatcatatcagaaagatggcatatcagatatgcaagtctgtgaattttttgcacagtaataagttgactcacacagacttaaagcctgaaaacatcttatttgtgcagtctgactacacagaggcgtataatcccaaaataaaacgtgatgaacgcaccttaataaatccagatattaaagttgtagactttggtagtgcaacatatgatgacgaacatcacagtacattggtatctacaagacattatagagcacctgaagttattttagccctagggtggtcccaaccatgtgatgtctggagcataggatgcattcttattgaatactatcttgggtttaccgtatttccaacacacgatagtaaggagcatttagcaatgatggaaaggattcttggacctctaccaaaacatatgatacagaaaaccaggaaacgtaaatattttcaccacgatcgattagactgggatgaacacagttctgccggcagatatgtttcaagacgctgtaaacctctgaaggaatttatgctttctcaagatgttgaacatgagcgtctctttgacctcattcagaaaatgttggagtatgatccagccaaaagaattactctcagagaagccttaaagcatcctttctttgaccttctgaagaaaagtatatagatctgtaattggacagctctctcgaagagatcttacagactgtatcagtctaatttttaaattttaagttattttgtacagctttgtaaattcttaacatttttatattg

SEQ ID NO: 5275 - DNA, 2120 bp, Homo sapiens
  source 1..2120: mol_type = unassigned DNA
cggcggcggcggagcggagaggccagagccggagaccgagctgggatcgggccccgggcgggggcggtgcgagcggcgccaagcagatcttaggggcggggacggagccggggcgggcgggactgaagcggagcccgggaacggggcgggaggtcccagggtcccgggttgggggggtggagcagcatttcgtcgccgcgggggtgccgggactccggccgcagtgtcgccgccatcacggacttcctgtgggacaagcgcacgggcctcgccgccagaacgatgccgcatcctcgaaggtaccactcctcagagcgaggcagccgggggagttaccgtgaacactatcggagccgaaagcataagcgacgaagaagtcgctcctggtcaagtagtagtgaccggacacgacggcgtcggcgagaggacagctaccatgtccgttctcgaagttatgatgatcgttcgtccgaccggagggtgtatgaccggcgatactgtggcagctacagacgcaacgattatagccgggatcggggagatgcctactatgacacagactatcggcattcctatgaatatcagcgggagaacagcagttaccgcagccagcgcagcagccggaggaagcacagacggcggaggaggcgcagccggacatttagccgctcatcttcgcacagcagccggagagccaagagtgtagaggacgacgctgagggccacctcatctaccacgtcggggactggctacaagagcgatatgaaatcgttagcaccttaggagaggggaccttcggccgagttgtacaatgtgttgaccatcgcaggggtggggctcgagttgccctgaagatcattaagaatgtggagaagtacaaggaagcagctcgacttgagatcaacgtgctagagaaaatcaatgagaaagaccctgacaacaagaacctctgtgtccagatgtttgactggtttgactaccatggccacatgtgtatctcctttgagcttctgggccttagcaccttcgatttcctcaaagacaacaactacctgccctaccccatccaccaagtgcgccacatggccttccagctgtgccaggctgtcaagttcctccatgataacaagctgacacatacagacctcaagcctgaaaatattctgtttgtgaattcagactatgagctcacctacaacctagagaagaagcgagatgagcgcagtgtgaagagcacagctgtgcgggtggtagactttggcagtgccacctttgaccatgagcaccatagcaccattgtctccactcgccattaccgagcaccagaagtcatccttgagttgggctggtcacagccttgtgatgtgtggagtataggctgcatcatctttgaatactatgtgggattcaccctcttccagacccatgacaacagagagcatctagccatgatggaaaggatcttgggtcctatcccttcccggatgatccgaaagacaagaaagcagaaatatttttaccggggtcgcctggattgggatgagaacacatcagctgggcgctatgttcgtgagaactgcaaaccgctgcggcggtatctgacctcagaggcagaggaacaccaccagctcttcgatctgattgaaagcatgctagagtatgaaccagctaagcggctgaccttgggtgaagcccttcagcatcctttcttcgcccgccttcgggctgagccgcccaacaagttgtgggactccagtcgggatatcagtcggtgacgatcaggccctgggcccccctgcatcttttatagcagtgggtgtccagtccaggacactggtgcttttttatacaagagaacgagccagagttcactccttcctcctggctctctatatacctgtgaatatgtgaaatagtgtaaatatgaaagaacttgtacctatcacttcaacccctgccttgtacataatactattccatccacacagtttccaccctcacctgccccctcatacggagttggatgggggccgagtgaggtaaccaggtggcatctaccccatgttttataaggaattttgtacagtctttgtgaaataaaataacgtgcttcatttga

SEQ ID NO: 5276 - DNA, 1934 bp, Homo sapiens
  source 1..1934: mol_type = unassigned DNA
ccgcgggggtgccgggactccggccgcagtgtcgccgccatcacggacttcctgtgggacaagcgcacgggcctcgccgccagaacgatgccgcatcctcgaaggtaccactcctcagagcgaggcagccgggggagttaccgtgaacactatcggagccgaaagcataagcgacgaagaagtcgctcctggtcaagtagtagtgaccggacacgacggcgtcggcgagaggacagctaccatgtccgttctcgaagcagttatgatgatcgttcgtccgaccggagggtgtatgaccggcgatactgtggcagctacagacgcaacgattatagccgggatcggggagatgcctactatgacacagactatcggcattcctatgaatatcagcgggagaacagcagttaccgcagccagcgcagcagccggaggaagcacagacggcggaggaggcgcagccggacatttagccgctcatcttcgcacagcagccggagagccaagagtgtagaggacgacgctgagggccacctcatctaccacgtcggggactggctacaagagcgatatgaaatcgttagcaccttaggagaggggaccttcggccgagttgtacaatgtgttgaccatcgcaggggtggggctcgagttgccctgaagatcattaagaatgtggagaagtacaaggaagcagctcgacttgagatcaacgtgctagagaaaatcaatgagaaagaccctgacaacaagaacctctgtgtccagatgtttgactggtttgactaccatggccacatgtgtatctcctttgagcttctgggccttagcaccttcgatttcctcaaagacaacaactacctgccctaccccatccaccaagtgcgccacatggccttccagctgtgccaggctgtcaagttcctccatgataacaagctgacacatacagacctcaagcctgaaaatattctgtttgtgaattcagactatgagctcacctacaacctagagaagaagcgagatgagcgcagtgtgaagagcacagctgtgcgggtggtagactttggcagtgccacctttgaccatgagcaccatagcaccattgtctccactcgccattaccgagcaccagaagtcatccttgagttgggctggtcacagccttgtgatgtgtggagtataggctgcatcatctttgaatactatgtgggattcaccctcttccagacccatgacaacagagagcatctagccatgatggaaaggatcttgggtcctatcccttcccggatgatccgaaagacaagaaagcagaaatatttttaccggggtcgcctggattgggatgagaacacatcagctgggcgctatgttcgtgagaactgcaaaccgctgcggcggtatctgacctcagaggcagaggaacaccaccagctcttcgatctgattgaaagcatgctagagtatgaaccagctaagcggctgaccttgggtgaagcccttcagcatcctttcttcgcccgccttcgggctgagccgcccaacaagttgtgggactccagtcgggatatcagtcggtgacgatcaggccctgggcccccctgcatcttttatagcagtgggtgtccagtccaggacactggtgcttttttatacaagagaacgagccagagttcactccttcctcctggctctctatatacctgtgaatatgtgaaatagtgtaaatatgaaagaacttgtacctatcacttcaacccctgccttgtacataatactattccatccacacagtttccaccctcacctgccccctcatacggagttggatgggggccgagtgaggtaaccaggtggcatctaccccatgttttataaggaattttgtacagtctttgtgaaataaaataacgtgcttcatttgaccccca

SEQ ID NO: 5277 - DNA, 2166 bp, Homo sapiens
  source 1..2166: mol_type = unassigned DNA
ggacgtcggtccgtgcgtacgtgctcgctcacggcggcggcggcggagcggagaggccagagccggagaccgagctgggatcgggccccgggcgggggcggtgcgagcggcgccaagcagatcttaggggcggggacggagccggggcgggcgggactgaagcggagcccgggaacggggcgggaggtcccagggtcccgggttgggggggtggagcagcatttcgtcgccgcgggggtgccgggactccggccgcagtgtcgccgccatcacggacttcctgtgggacaagcgcacgggcctcgccgccagaacgatgccgcatcctcgaaggtaccactcctcagagcgaggcagccgggggagttaccgtgaacactatcggagccgaaagcataagcgacgaagaagtcgctcctggtcaagtagtagtgaccggacacgacggcgtcggcgagaggacagctaccatgtccgttctcgaagcagttatgatgatcgttcgtccgaccggagggtgtatgaccggcgatactgtggcagctacagacgcaacgattatagccgggatcggggagatgcctactatgacacagactatcggcattcctatgaatatcagcgggagaacagcagttaccgcagccagcgcagcagccggaggaagcacagacggcggaggaggcgcagccggacatttagccgctcatcttcgcagcacagcagccggagagccaagagtgtagaggacgacgctgagggccacctcatctaccacgtcggggactggctacaagagcgatatgaaatcgttagcaccttaggagaggggaccttcggccgagttgtacaatgtgttgaccatcgcaggggtggggctcgagttgccctgaagatcattaagaatgtggagaagtacaaggaagcagctcgacttgagatcaacgtgctagagaaaatcaatgagaaagaccctgacaacaagaacctctgtgtccagatgtttgactggtttgactaccatggccacatgtgtatctcctttgagcttctgggccttagcaccttcgatttcctcaaagacaacaactacctgccctaccccatccaccaagtgcgccacatggccttccagctgtgccaggctgtcaagttcctccatgataacaagctgacacatacagacctcaagcctgaaaatattctgtttgtgaattcagactatgagctcacctacaacctagagaagaagcgagatgagcgcagtgtgaagagcacagctgtgcgggtggtagactttggcagtgccacctttgaccatgagcaccatagcaccattgtctccactcgccattaccgagcaccagaagtcatccttgagttgggctggtcacagccttgtgatgtgtggagtataggctgcatcatctttgaatactatgtgggattcaccctcttccagacccatgacaacagagagcatctagccatgatggaaaggatcttgggtcctatcccttcccggatgatccgaaagacaagaaagcagaaatatttttaccggggtcgcctggattgggatgagaacacatcagctgggcgctatgttcgtgagaactgcaaaccgctgcggcggtatctgacctcagaggcagaggaacaccaccagctcttcgatctgattgaaagcatgctagagtatgaaccagctaagcggctgaccttgggtgaagcccttcagcatcctttcttcgcccgccttcgggctgagccgcccaacaagttgtgggactccagtcgggatatcagtcggtgacgatcaggccctgggcccccctgcatcttttatagcagtgggtgtccagtccaggacactggtgcttttttatacaagagaacgagccagagttcactccttcctcctggctctctatatacctgtgaatatgtgaaatagtgtaaatatgaaagaacttgtacctatcacttcaacccctgccttgtacataatactattccatccacacagtttccaccctcacctgccccctcatacggagttggatgggggccgagtgaggtaaccaggtggcatctaccccatgttttataaggaattttgtacagtctttgtgaaataaaataacgtgcttcatttgaccccca

SEQ ID NO: 5278 - DNA, 1599 bp, Homo sapiens
  source 1..1599: mol_type = unassigned DNA
acggcggcggcggcggagcggagaggccagagccggagaccgagctgggatcgggcccccatcacggacttcctgtgggacaagcgcacgggcctcgccgccagaacgatgccgcatcctcgaaggtaccactcctcagagcgaggcagccgggggagttaccgtgaacactatcggagccgaaagcataagcgacgaagaagtcgctcctggtcaagtagtagtgaccggacacgacggcgtcggcgagaggacagctaccatgtccgttctcgaagcagttatgatgatcgttcgtccgaccggagggtgtatgaccggcgatactgtggcagctacagacgcaacgattatagccgggatcggggagatgcctactatgacacagactatcggcattcctatgaatatcagcgggagaacagcagttaccgcagccagcgcagcagccggaggaagcacagacggcggaggaggcgcagccggacatttagccgctcatcttcgatgaaatcgttagcaccttaggagaggggaccttcggccgagttgtacaatgtgttgaccatcgcaggggtggggctcgagttgccctgaagatcattaagaatgtggagaagtacaaggaagcagctcgacttgagatcaacgtgctagagaaaatcaatgagaaagaccctgacaacaagaacctctgtgtccagatgtttgactggtttgactaccatggccacatgtgtatctcctttgagcttctgggccttagcaccttcgatttcctcaaagacaacaactacctgccctaccccatccaccaagtgcgccacatggccttccagctgtgccaggctgtcaagttcctccatgataacaagctgacacatacagacctcaagcctgaaaatattctgtttgtgaattcagactatgagctcacctacaacctagagaagaagcgagatgagcgcagtgtgaagagcacagctgtgcgggtggtagactttggcagtgccacctttgaccatgagcaccatagcaccattgtctccactcgccattaccgagcaccagaagtcatccttgagttgggctggtcacagccttgtgatgtgtggagtataggctgcatcatctttgaatactatgtgggattcaccctcttccagacccatgacaacagagagcatctagccatgatggaaaggatcttgggtcctatcccttcccggatgatccgaaagacaagaaagcagaaatatttttaccggggtcgcctggattgggatgagaacacatcagctgggcgctatgttcgtgagaactgcaaaccgctgcggcggtatctgacctcagaggcagaggaacaccaccagctcttcgatctgattgaaagcatgctagagtatgaaccagctaagcggctgaccttgggtgaagcccttcagcatcctttcttcgcccgccttcgggctgagccgcccaacaagttgtgggactccagtcgggatatcagtcggtgacgatcaggccctgggcccccctgcatcttttatagcagtgggtgtccagtccaggacactggtgcttttttatacaaga

SEQ ID NO: 5279 - DNA, 1711 bp, Homo sapiens
  source 1..1711: mol_type = unassigned DNA
agatttggggatcggacctgaggccgcggtcgcaggcgggggagcaacgggaggcaccgcctccagtccaggggtcgccccttcgctggcccccgccgccggccgctgctctgcctccatggcgcccaccccgcttacacgctcggcctcctagagccctctgtggccatcagatgccgcatcctcgaaggtaccactcctcagagcgaggcagccgggggagttaccgtgaacactatcggagccgaaagcataagcgacgaagaagtcgctcctggtcaagtagtagtgaccggacacgacggcgtcggcgagaggacagctaccatgtccgttctcgaagcagttatgatgatcgttcgtccgaccggagggtgtatgaccggcgatactgtggcagctacagacgcaacgattatagccgggatcggggagatgcctactatgacacagactatcggcattcctatgaatatcagcgggagaacagcagttaccgcagccagcgcagcagccggaggaagcacagacggcggaggaggcgcagccggacatttagccgctcatcttcgcagcacagcagccggagagccaagagtgtagaggacgacgctgagggccacctcatctaccacgtcggggactggctacaagagcgatatgaaatcgttagcaccttaggagaggggaccttcggccgagttgtacaatgtgttgaccatcgcaggggtggggctcgagttgccctgaagatcattaagaatgtggagaagtacaaggaagcagctcgacttgagatcaacgtgctagagaaaatcaatgagaaagaccctgacaacaagaacctctgtgtccagatgtttgactggtttgactaccatggccacatgtgtatctcctttgagcttctgggccttagcaccttcgatttcctcaaagacaacaactacctgccctaccccatccaccaagtgcgccacatggccttccagctgtgccaggctgtcaagttcctccatgataacaagctgacacatacagacctcaagcctgaaaatattctgtttgtgaattcagactatgagctcacctacaacctagagaagaagcgagatgagcgcagtgtgaagagcacagctgtgcgggtggtagactttggcagtgccacctttgaccatgagcaccatagcaccattgtctccactcgccattaccgagcaccagaagtcatccttgagttgggctggtcacagccttgtgatgtgtggagtataggctgcatcatctttgaatactatgtgggattcaccctcttccagacccatgacaacagagagcatctagccatgatggaaaggatcttgggtcctatcccttcccggatgatccgaaagacaagaaagcagaaatatttttaccggggtcgcctggattgggatgagaacacatcagctgggcgctatgttcgtgagaactgcaaaccgctgcggcggtatctgacctcagaggcagaggaacaccaccagctcttcgatctgattgaaagcatgctagagtatgaaccagctaagcggctgaccttgggtgaagcccttcagcatcctttcttcgcccgccttcgggctgagccgcccaacaagttgtgggactccagtcgggatatcagtcggtgacgatcaggccctgggcccccctgcatcttttatagcag

SEQ ID NO: 5280 - DNA, 1846 bp, Homo sapiens
  source 1..1846: mol_type = unassigned DNA
ggggcactggtacctccaggacctggagtgtactggaagaaatggtgcagtccagatgcatcactgtaagcgataccgctcccctgaaccagacccgtacctgagctaccgatggaagaggaggaggtcctacagtcgggaacatgaagggagactgcgatacccgtcccgaagggagcctcccccacgaagatctcggtccagaagccatgaccgcctgccctaccagaggaggtaccgggagcgccgtgacagcgatacataccggtgtgaagagcggagcccatcctttggagaggactactatggaccttcacgttctcgtcatcgtcggcgatcgcgggagagggggccataccggacccgcaagcatgcccaccactgccacaaacgccgcaccaggtcttgtagcagcgcctcctcgagaagccaacagagcagtaagcgcagcagccggagtgtggaagatgacaaggagggtcacctggtgtgccggatcggcgattggctccaagagcgatatgagattgtggggaacctgggtgaaggcacctttggcaaggtggtggagtgcttggaccatgccagagggaagtctcaggttgccctgaagatcatccgcaacgtgggcaagtaccgggaggctgcccggctagaaatcaacgtgctcaaaaaaatcaaggagaaggacaaagaaaacaagttcctgtgtgtcttgatgtctgactggttcaacttccacggtcacatgtgcatcgcctttgagctcctgggcaagaacacctttgagttcctgaaggagaataacttccagccttaccccctaccacatgtccggcacatggcctaccagctctgccacgcccttagatttctgcatgagaatcagctgacccatacagacttgaaaccagagaacatcctgtttgtgaattctgagtttgaaaccctctacaatgagcacaagagctgtgaggagaagtcagtgaagaacaccagcatccgagtggctgactttggcagtgccacatttgaccatgagcaccacaccaccattgtggccacccgtcactatcgcccgcctgaggtgatccttgagctgggctgggcacagccctgtgacgtctggagcattggctgcattctctttgagtactaccggggcttcacactcttccagacccacgaaaaccgagagcacctggtgatgatggagaagatcctagggcccatcccatcacacatgatccaccgtaccaggaagcagaaatatttctacaaagggggcctagtttgggatgagaacagctctgacggccggtatgtgaaggagaactgcaaacctctgaagagttacatgctccaagactccctggagcacgtgcagctgtttgacctgatgaggaggatgttagaatttgaccctgcccagcgcatcacactggccgaggccctgctgcaccccttctttgctggcctgacccctgaggagcggtccttccacaccagccgcaacccaagcagatgacaggcacaggccaccgcatgaggagatggagggcgggactgggccgcccagccccttgactccagcctcgaccgccaggccccaggccagagccacccaatgaacagtgcaatgtgaaggaaggcaggagcctgcaggggagcagacttggtgcccagctgccagaaagcacagatttgacccaagctatttatatgttataaagttataataaagtgtttcttactgtttgtaacccctggtaccagtgtgtccatctccaggctccttgccttccccttacctgaccttattaataaagtctttcttagcagttca

SEQ ID NO: 5281 - DNA, 1634 bp, Homo sapiens
  source 1..1634: mol_type = unassigned DNA
agctgcagccggagcctgggagacgatgcatcactgtaagcgataccgctcccctgaaccagacccgtacctgagctaccgatggaagaggaggaggtcctacagtcgggaacatgaagggagactgcgatacccgtcccgaagggagcctcccccacgaagatctcggtccagaagccatgaccgcctgccctaccagaggaggtaccgggagcgccgtgacagcgatacataccggtgtgaagagcggagcccatcctttggagaggactactatggaccttcacgttctcgtcatcgtcggcgatcgcgggagagggggccataccggacccgcaagcatgcccaccactgccacaaacgccgcaccaggtcttgtagcagcgcctcctcgatgagattgtggggaacctgggtgaaggcacctttggcaaggtggtggagtgcttggaccatgccagagggaagtctcaggttgccctgaagatcatccgcaacgtgggcaagtaccgggaggctgcccggctagaaatcaacgtgctcaaaaaaatcaaggagaaggacaaagaaaacaagttcctgtgtgtcttgatgtctgactggttcaacttccacggtcacatgtgcatcgcctttgagctcctgggcaagaacacctttgagttcctgaaggagaataacttccagccttaccccctaccacatgtccggcacatggcctaccagctctgccacgcccttagatttctgcatgagaatcagctgacccatacagacttgaaaccagagaacatcctgtttgtgaattctgagtttgaaaccctctacaatgagcacaagagctgtgaggagaagtcagtgaagaacaccagcatccgagtggctgactttggcagtgccacatttgaccatgagcaccacaccaccattgtggccacccgtcactatcgcccgcctgaggtgatccttgagctgggctgggcacagccctgtgacgtctggagcattggctgcattctctttgagtactaccggggcttcacactcttccagacccacgaaaaccgagagcacctggtgatgatggagaagatcctagggcccatcccatcacacatgatccaccgtaccaggaagcagaaatatttctacaaagggggcctagtttgggatgagaacagctctgacggccggtatgtgaaggagaactgcaaacctctgaagagttacatgctccaagactccctggagcacgtgcagctgtttgacctgatgaggaggatgttagaatttgaccctgcccagcgcatcacactggccgaggccctgctgcaccccttctttgctggcctgacccctgaggagcggtccttccacaccagccgcaacccaagcagatgacaggcacaggccaccgcatgaggagatggagggcgggactgggccgcccagccccttgactccagcctcgaccgccaggccccaggccagagccacccaatgaacagtgcaatgtgaaggaaggcaggagcctgcaggggagcagacttggtgcccagctgccagaaagcacagatttgacccaagctatttatatgttataaagttataataaagtgtttcttactgtttgt

SEQ ID NO: 5282 - DNA, 1662 bp, Homo sapiens
  source 1..1662: mol_type = unassigned DNA
agctgcagccggagcctgggagacgatgcatcactgtaagcgataccgctcccctgaaccagacccgtacctgagctaccgatggaagaggaggaggtcctacagtcgggaacatgaagggagactgcgatacccgtcccgaagggagcctcccccacgaagatctcggtccagaagccatgaccgcctgccctaccagaggaggtaccgggagcgccgtgacagcgatacataccggtgtgaagagcggagcccatcctttggagaggactactatggaccttcacgttctcgtcatcgtcggcgatcgcgggagagggggccataccggacccgcaagcatgcccaccactgccacaaacgccgcaccaggtcttgtagcagcgcctcctcgagaagccaacagagcagtaagcgcagcagccggagtgtggaagatgacaaggagggtcacctggtgtgccggatcggcgattggctccaagagcgatggaagtctcaggttgccctgaagatcatccgcaacgtgggcaagtaccgggaggctgcccggctagaaatcaacgtgctcaaaaaaatcaaggagaaggacaaagaaaacaagttcctgtgtgtcttgatgtctgactggttcaacttccacggtcacatgtgcatcgcctttgagctcctgggcaagaacacctttgagttcctgaaggagaataacttccagccttaccccctaccacatgtccggcacatggcctaccagctctgccacgcccttagatttctgcatgagaatcagctgacccatacagacttgaaaccagagaacatcctgtttgtgaattctgagtttgaaaccctctacaatgagcacaagagctgtgaggagaagtcagtgaagaacaccagcatccgagtggctgactttggcagtgccacatttgaccatgagcaccacaccaccattgtggccacccgtcactatcgcccgcctgaggtgatccttgagctgggctgggcacagccctgtgacgtctggagcattggctgcattctctttgagtactaccggggcttcacactcttccagacccacgaaaaccgagagcacctggtgatgatggagaagatcctagggcccatcccatcacacatgatccaccgtaccaggaagcagaaatatttctacaaagggggcctagtttgggatgagaacagctctgacggccggtatgtgaaggagaactgcaaacctctgaagagttacatgctccaagactccctggagcacgtgcagctgtttgacctgatgaggaggatgttagaatttgaccctgcccagcgcatcacactggccgaggccctgctgcaccccttctttgctggcctgacccctgaggagcggtccttccacaccagccgcaacccaagcagatgacaggcacaggccaccgcatgaggagatggagggcgggactgggccgcccagccccttgactccagcctcgaccgccaggccccaggccagagccacccaatgaacagtgcaatgtgaaggaaggcaggagcctgcaggggagcagacttggtgcccagctgccagaaagcacagatttgacccaagctatttatatgttataaagttataataaagtgtttcttactgtttgt

SEQ ID NO: 5283 - DNA, 2621 bp, Homo sapiens
  source 1..2621: mol_type = unassigned DNA
agttttctcatctggaaagtggggcctcgtaatcctgtccgacccggcgcgggacagtaggtgtcagggattttggtgaccccacgctcgaggcctctgcaaaagggggctgtccagtggcccagagacgcagccggcggggcttttgtctagcgggggagtcttaactgagaggccacgcaggccggcaggaagccgctccacaggagggggctcaaggagaggggatctcctccctccagactccggccccgccagagtagctctagggtatcttcccagaaactgccccgcacgcactggcgagctgggagcgccaccacggctttcaaaaaacccgcacacaccaagataataatgtgtcgttcgctcgtttcgcgcaagcggagtcgcgtccgccttcccgagctccggcacacagacctcaggccgctctcgcgctctccggggccccgagaacaatgcccgtcctctccgcgcgcaggagggagttggcggaccacgcggggtcggggcgacggagcgggcccagccccacggccaggtcggggccccacctctcggctctgagagcccagccggcccgggccgcgcacctgtcaggtcgggggacctacgtgcgccgcgacacggcgggaggcgggccgggccaggctcgtcccctcggccctcccggaactagtctcctaggccgcggcgcccgccggagcggagagggctggtgccccggagccttcgagtcgggggctagagcggccaggcctccgagccgggtcgagccgaggctggcgacggctgcgtcacgcgagggggcggggctgccacgggcggaggtcgcagccggaagcggaagaggcgctcggagcggggagtggggcctagctgcagccggagcctgggagacgatgcatcactgtaagcgataccgctcccctgaaccagacccgtacctgagctaccgatggaagaggaggaggtcctacagtcgggaacatgaagggagactgcgatacccgtcccgaagggagcctcccccacgaagatctcggtccagaagccatgaccgcctgccctaccagaggaggtaccgggagcgccgtgacagcgatacataccggtgtgaagagcggagcccatcctttggagaggactactatggaccttcacgttctcgtcatcgtcggcgatcgcgggagagggggccataccggacccgcaagcatgcccaccactgccacaaacgccgcaccaggtcttgtagcagcgcctcctcgagaagccaacagagcagtaagcgcagcagccggagtgtggaagatgacaaggagggtcacctggtgtgccggatcggcgattggctccaagagcgatatgagattgtggggaacctgggtgaaggcacctttggcaaggtggtggagtgcttggaccatgccagagggaagtctcaggttgccctgaagatcatccgcaacgtgggcaagtaccgggaggctgcccggctagaaatcaacgtgctcaaaaaaatcaaggagaaggacaaagaaaacaagttcctgtgtgtcttgatgtctgactggttcaacttccacggtcacatgtgcatcgcctttgagctcctgggcaagaacacctttgagttcctgaaggagaataacttccagccttaccccctaccacatgtccggcacatggcctaccagctctgccacgcccttagatttctgcatgagaatcagctgacccatacagacttgaaaccagagaacatcctgtttgtgaattctgagtttgaaaccctctacaatgagcacaagagctgtgaggagaagtcagtgaagaacaccagcatccgagtggctgactttggcagtgccacatttgaccatgagcaccacaccaccattgtggccacccgtcactatcgcccgcctgaggtgatccttgagctgggctgggcacagccctgtgacgtctggagcattggctgcattctctttgagtactaccggggcttcacactcttccagacccacgaaaaccgagagcacctggtgatgatggagaagatcctagggcccatcccatcacacatgatccaccgtaccaggaagcagaaatatttctacaaagggggcctagtttgggatgagaacagctctgacggccggtatgtgaaggagaactgcaaacctctgaagagttacatgctccaagactccctggagcacgtgcagctgtttgacctgatgaggaggatgttagaatttgaccctgcccagcgcatcacactggccgaggccctgctgcaccccttctttgctggcctgacccctgaggagcggtccttccacaccagccgcaacccaagcagatgacaggcacaggccaccgcatgaggagatggagggcgggactgggccgcccagccccttgactccagcctcgaccgccaggccccaggccagagccacccaatgaacagtgcaatgtgaaggaaggcaggagcctgcaggggagcagacttggtgcccagctgccagaaagcacagatttgacccaagctatttatatgttataaagttataataaagtgtttcttactgtttgtaacccctggt

SEQ ID NO: 5284 - DNA, 2695 bp, Homo sapiens
  source 1..2695: mol_type = unassigned DNA
agttttctcatctggaaagtggggcctcgtaatcctgtccgacccggcgcgggacagtaggtgtcagggattttggtgaccccacgctcgaggcctctgcaaaagggggctgtccagtggcccagagacgcagccggcggggcttttgtctagcgggggagtcttaactgagaggccacgcaggccggcaggaagccgctccacaggagggggctcaaggagaggggatctcctccctccagactccggccccgccagagtagctctagggtatcttcccagaaactgccccgcacgcactggcgagctgggagcgccaccacggctttcaaaaaacccgcacacaccaagataataatgtgtcgttcgctcgtttcgcgcaagcggagtcgcgtccgccttcccgagctccggcacacagacctcaggccgctctcgcgctctccggggccccgagaacaatgcccgtcctctccgcgcgcaggagggagttggcggaccacgcggggtcggggcgacggagcgggcccagccccacggccaggtcggggccccacctctcggctctgagagcccagccggcccgggccgcgcacctgtcaggtcgggggacctacgtgcgccgcgacacggcgggaggcgggccgggccaggctcgtcccctcggccctcccggaactagtctcctaggccgcggcgcccgccggagcggagagggctggtgccccggagccttcgagtcgggggctagagcggccaggcctccgagccgggtcgagccgaggctggcgacggctgcgtcacgcgagggggcggggctgccacgggcggaggtcgcagccggaagcggaagaggcgctcggagcggggagtggggcctagctgcagccggagcctgggagacgatgcatcactgtaagcgataccgctcccctgaaccagacccgtacctgagctaccgatggaagaggaggaggtcctacagtcgggaacatgaagggagactgcgatacccgtcccgaagggagcctcccccacgaagatctcggtccagaagccatgaccgcctgccctaccagaggaggtaccgggagcgccgtgacagcgatacataccggtgtgaagagcggagcccatcctttggagaggactactatggaccttcacgttctcgtcatcgtcggcgatcgcgggagagggggccataccggacccgcaagcatgcccaccactgccacaaacgccgcaccaggtcttgtagcagcgcctcctcgagaagccaacagagcagtaagcgcagcagccggagtgtggaagatgacaaggagggtcacctggtgtgccggatcggcgattggctccaagagcgatatgagattgtggggaacctgggtgaaggcacctttggcaaggtggtggagtgcttggaccatgccagagggaagtctcaggttgccctgaagatcatccgcaacgtgggcaagtaccgggaggctgcccggctagaaatcaacgtgctcaaaaaaatcaaggagaaggacaaagaaaacaagttcctgtgtgtcttgatgtctgactggttcaacttccacggtcacatgtgcatcgcctttgagctcctgggcaagaacacctttgagttcctgaaggagaataacttccagccttaccccctaccacatgtccggcacatggcctaccagctctgccacgcccttagatttctgcatgagaatcagctgacccatacagacttgaaaccagagaacatcctgtttgtgaattctgagtttgaaaccctctacaatgagcacaagagctgtgaggagaagtcagtgaagaacaccagcatccgagtggctgactttggcagtgccacatttgaccatgagcaccacaccaccattgtggccacccgtcactatcgcccgcctgaggtgatccttgagctgggctgggcacagccctgtgacgtctggagcattggctgcattctctttgagtactaccggggcttcacactcttccagacccacgaaaaccgagagcacctggtgatgatggagaagatcctagggcccatcccatcacacatgatccaccgtaccaggaagcagaaatatttctacaaagggggcctagtttgggatgagaacagctctgacggccggtatgtgaaggagaactgcaaacctctgaagagttacatgctccaagactccctggagcacgtgcagctgtttgacctgatgaggaggatgttagaatttgaccctgcccagcgcatcacactggccgaggccctgctgcaccccttctttgctggcctgacccctgaggagcggtccttccacaccagccgcaacccaagcagatgacaggcacaggccaccgcatgaggagatggagggcgggactgggccgcccagccccttgactccagcctcgaccgccaggccccaggccagagccacccaatgaacagtgcaatgtgaaggaaggcaggagcctgcaggggagcagacttggtgcccagctgccagaaagcacagatttgacccaagctatttatatgttataaagttataataaagtgtttcttactgtttgtaacccctggtaccagtgtgtccatctccaggctccttgccttccccttacctgaccttattaataaagtctttcttagcagttc

SEQ ID NO: 5285 - DNA, 2479 bp, Homo sapiens
  source 1..2479: mol_type = unassigned DNA
ggagtccagacttccttatggccaggacagctccacgcatgctcagcacctaccagggtcgagctcacacacgtgcctacgacccgccgcggcgcctgcgcggtagcatcgcggagtcggtgctttagtacgccgctggcacctttactctcgccggccgcgcgaacccgtttgagctcggtatcctagtgcacacgccttgcaagcgacggcgccatgagtctgacttccagttccagcgtacgagttgaatggatcgcagcagttaccattgctgctgggacagctgcaattggttatctagcttacaaaagattttatgttaaagatcatcgaaataaagctatgataaaccttcacatccagaaagacaaccccaagatagtacatgcttttgacatggaggatttgggagataaagctgtgtactgccgttgttggaggtccaaaaagttcccattctgtgatggggctcacacaaaacataacgaagagactggagacaatgtgggccctctgatcatcaagaaaaaagaaacttaaatggacacttttgatgctgcaaatcagcttgtcgtgaagttacctgattgtttaattagaatgactaccacctctgtctgattcaccttcgctggattctaaatgtggtatattgcaaactgcagctttcacatttatggcatttgtcttgttgaaacatcgtggtgcacatttgtttaaacaaaaaaaaaaaaaaaaaggaaaaaccaacctgcatggcctgtgggttattttggtcttgtaaggatccatttctttaaaatactgacatatagagttgtaccttatatagaatatagttgtatcttgaagtcaacatattaaattattctcaaaattatgtatttgcagattgtacttgtaagtttcaaagaaaaattaccatcttttcatattgacctggaaactaaataggatgtgattcagctacattaatttcttaatacaatctaggaaagacctgttgtagccttgattttcttgacattggtaatgacactgagaaaatatggcttctgtttttcaccgttttcaatcaaaatgattgataaatgttattctgtttaatttcataagtcaggtcaataataaaggggtggtaacttcctcatatttatcttcacagatatttaatgaagatggatccattaaaggagccaatagtgaaaatttagttaaaggtgatattagatttaaattagtcatgaagaatgtcttaaaatctaatgttccagaattctggcccaaggaatggtaagcacttgaactgaggattttgaaggaattggaacatataatgtcaagtcttttgatcactaagccacatatcctgacagaaatagtagtcacaagattagatcaaaggcgtgggaagatttttttttttcccactctagctaatcaagcacatggcttttaaattgtatgatctttttcttaaaagcaaaaatttgaagacaagtgtttgtttatgtaatattcttcaaagactccgagcagaaacattgcattcattgttgattcagaaaaaagaaaatataaaaactgaaaataattagcaataaaagatttaagacaaatagttcataaatatttttaaagagattaggtttttgaatttcataggttagaaggaaaatcatggcaaaatttacagaaaattgggcaaacaattgaaattgataaagcaggtaaacatcatcatttattttagtatacatgaattctcagtagtagtcaatcacaaatttctacttgctaaaatccatttaccttgacaggaatcaaacctgacagcagcatatcctatgtaatatatgatcatggctatttttaaatatgtagttttgtgtattactgtagataaaagttggtaacaaaattgtacagtggttttaagaagcccatgtaactaacttggacatgtctttaagtcacatattcatcataaaatctaaaatcctacaaactgattctattagattcttagggtaaattttttctttgcccacctccttctttttaagataagtatgcatgtcagcaaaacagagcaatcatgcttttaaagatgaactgttttaaagaaaaataaatgcatcaactcccagtgtttctgataaagggacatccttctaacttaacagactattctttatcttgaatttgaaattatattgttagtcatgcatttttgtaatgtcagggggaacctggtaccagttctcaaaactataggattatatgagtgtgtgtatacatatggcaaaattataaatgaccaccttactgtgaaatatagatcttgagcattttgaaaggccaaaataattaggtaaatgtattttcaaggtcatgttaaaatgtttacatgcttttgaactagcattcatttatgattaaaacccttttcaggttatttgacctaaaaaccaaa

SEQ ID NO: 5286 - DNA, 2327 bp, Homo sapiens
  source 1..2327: mol_type = unassigned DNA
aggccgaggccgccagtgcccgccggccgcttccgctcccggcgcaggcgcggcagcttggccagagcggagggggctcgggagaggagtggacgccgctggccaggatggtgctggagagcgtggcccgtatcgtgaaggtgcagctccctgcatatctgaagcggctcccagtccctgaaagcattaccgggttcgctaggctcacagtttcagaatggcttcggttattgcctttccttggtgtactcgcacttcttggctaccttgcagttcgtccattcctcccgaagaagaaacaacagaaggatagcttgattaatcttaaaatacaaaaggaaaatccgaaagtagtgaatgaaataaacattgaagatttgtgtcttactaaagcagcttattgtaggtgttggcgttctaaaacgtttcctgcctgcgatggttcacataataaacacaatgaattgacaggagataatgtgggtccactaatactgaagaagaaagaagtataataataataacaatattttctcattctttgtgtatagaaaattttaaaatggtggtcttaattattactactggttgaacaattatttcttccaatttattttcttcctgcactactgtttgtatttgatcctttgtctattcagtcacttaattagaaattaaattgtcaagcctcttattctgacttcaaagaattaatgtatcttccaacaataaaatcacttctgattttaatctaggaaaacctaaattgtggctatggatccaaagctgtttgtttctttgaatatcaatattttcaacaggatcttgtatttaaaattcccacctacattgttaaatatgttattttttcatatctcttttggttttgataatctgaagtgtttttttctcgttttggccttccaaactgcatttggttaggtgaattaagaaaaatattgccatcaagaattacttgtgttttcacagagatagactctttgctttatagagattgttgtgtatttaatatgaatatcccagctttagaaaagaagtaaactggatacaaaaagttccattgaggaacagttatttacagtataaaagatttgtttactttacaaaaggcttgtgtctgtgtgtgtgtgtgtgtgtgtgtgtgtgtattttaaactgactcagtgacagctggggtggaatggcaagaacacttacaaccaaactcatgggctgctgcaatttgaagataattggtaataaacataagacattaattcatattaaaatagttcagtgttcaaaattgtgtttatgtggatatttttctctttttaacactataaaccattaaaatacagtcatcccttgtatacgctagggactggttccagggccacacatataccaaaatctgcccatactcaagtcccacagaaagtcttgcagaacccatatgtagaaaagttggccctccagttgaccctccgtacacatgagtttcacatcccatgcacaaatgctgatctgtgtgacctcacctgcatttgattgaaaaaagtatgcgcgtaattgtacccacccagttcaaacccgtgtgtaagggtcaactgtacaaaaaagtttgtgaaataaacgtactggagaatctttaaaatttttgtgctttttaatcctactattatgaatctttttagtttcatcttacattactactctcataatagctatccttagccaggtgccatggcacaggcctgtagtcccaactgctgggaagattgaggtgggaggatggctgcagtacaagagcccaggagttcaaggccaggctgggcaacctagtgctccgcctctgctgggctctgtagggaatcctttctgttgtaaaagagttaccatttaactcccttcactgagtgcgtttctgagaccttgctaggcactctggaaactgcttagttgagaaaagacaaatacaaaagcttttctttagtctatttaagatacagtttattcagttcactttgctttctttttataagaatgtacaagaggcagacagaggtaatccttctagaaataaaactaattgttattgggcacttgtatgtaccagacactacactaagcatggtacttgggtttttaatttattacatgtaatgtcagtaggttcaattatatgatcgtaacatcttcatgaccagcagcatgtattttagagttagaaatgtagtctggtttttgagaagttttacaaggtgtatgtccaaaattgttctttcctcacatgtcagtgggggataaatacagcattgctctca

SEQ ID NO: 5287 - DNA, 2636 bp, Homo sapiens
  source 1..2636: mol_type = unassigned DNA
gccgcggcgtcttccggggcctggcgggccggggaccgagggggcggggaggtgacccggcgggggcggagccagcgggcgggcgcggcgcgggaggcgaccatgcgcggcgcgggggcgatcctgcggccggcggcgcgtggtgcccgggacctgaacccgcggcgggacatctcctcctggctggcccagtggttccctagaaccccagccaggtccgtggtggccctgaagacccccatcaaggtggagctggtggcagggaaaacctacaggtggtgtgtgtgtggccgcagcaagaagcagcccttctgtgacggctcccacttcttccaacgcactggcctatctccactcaagttcaaggcccaagagacccgcatggtggcactctgtacctgcaaggccactcagaggcccccgtactgcgatggcacccacaggagtgagcgcgtgcagaaggcagaagtgggctccccactctgagggggctgctgctgtccagccacaggtggccttggctccaggcctctgacaggcacccccttctgtgggaaaggaaacaggtgctgagcccaagagactctggtacccactgctggctcatgaaggaagaattattccttataacctaaaagtctccagtctggggcaggcgggagtgggccctggttcaatgtttgctgatggggaagatggcaaaaacaagcctgcccaaccagactggtagtcctgcagtcactgctatgaggcccacgtgctgcctcctgctccagattttaacctctctgtgggctgggggcacctgaccagccacaggagagggcagttcagattcattctgtatggggtccccaagccaggctaaacccagagatgagaggcacccttcccttcttccctccaccccaaagaactacaggctccagaaagtatgcagcatttattacaaagccaagagatacagatgtcccagggcaaaggagggtacagtcacaggacctcagacacaggacaaggtgcaaacacagacaagcccatcagggggctcccaaccccacacacctacgctatgatggaatctcgagtctcgactcccgactcctctcagatctatgcacacttgaggaaatctcggtgggcagcgacctgccagggtctgtccctaaggaggtggtccgctgacctctcaaggggtgggggtggggtcagagcttacaggtttctgtcttcttgtgcttttagatgcagttgctctgtcctgaccaggtgaccgggcctcagctgggggtggaggggcaattggaaggctgtttgcctctggcaaagtctgggatctgtgcttgtgtgaggttaacccacccccacttccactctaggccccaggtgagactccaccaccagtcctgctagtgagggttccccggtgagggtaaggttggtgggggtgcagcgcttcacaatgctaaagccttagccctcctccaagagctgagacctctcagggcctgaatcttcttttccacaagataaatgatgcaaaggccacacacacaggaaaaaaaaaaaaagaggcagaactatctattctttgcacaaagtttccactgcaagaggaggaggtgatgcaggtgccacctccaccctgcacttgctcctcagaaccagggataaactgcatttgtaaaaggcactgttcttagcaatttctggacattcaacaacgtggggggcggccactggtcagaggcaggacagcagccaagatggggagagaaacggggagagaaagaaacgattctaactgactcctatatgcagccagttggaatcatgcctaaagctttgggtctgaaggggcccccaacacaccacctgccttgggaaacagcgaggatggtgcagagctttattgagactccagtggcccatccagttcatctccaggcacccccaaaaacagcaaattacacaagaccccccccaaaaaaaatgaacaccattttccacacatacacacacacataaagtttgtttcctgtggcatttaaattaatctggttggtccatagaaaataagtatgtatatttggtttttcctatgtacatatatatatatatttatttataaaacccgccccccacccccaaggtgggaagagctggggaaagtagaagaggtggaaaaaagggcccagaaaaagtggaaggagtggagaggcttggctggaagaagggagagggtccctggcctcaagttaaggggggcacgggagcgccgttgacagtcatcttgcgccccctgctggtggaggatggtgtctgcaggcagttcaagctacccccgttggcagctgtggtggccccactggctgtcgaagggggagtgggggaggtagggtgggtggctggaggcccatgggaactgggagagccatgggatggggtggctgggctgggcagggaggaggaggtggctggcagggtggcagggctgggagccttgtcgctgactgactcacactcggacgccccgctggtgttggtgccctcggagggggtgggcaccgtggctagggtgagccgcttgcaggctggctggacacggtacttgagggggagaggcccgttctgcg

SEQ ID NO: 5288 - DNA, 3272 bp, Homo sapiens
  source 1..3272: mol_type = unassigned DNA
aaataaacgtggcgggacgtatgtgtcatggcgctctccatctaaagtctgtgcagcttccggagagtggcgggttgattttctcactttggactggtttttacttcccgacttctggactcatctttcaagaggactttagactaattgcagataattaagagaatatgccttctgcatcctgtgatacactactggatgacatcgaagatatcgtgtctcaggaagattcaaaaccacaagataggcattttgtaagaaaggatgttgtcccgaaggtacgaaggcgaaatacccaaaaatatttgcaagaggaagaaaacagtccaccaagtgacagcactattccaggcatacagaaaatttggatacgaacatggggttgttctcataataattcagatggagaatatatggctggacagctagctgcttatggctataaaattacagaaaatgcatccgatgcagatttatggctcctgaacagttgcactgtaaaaaacccagctgaagaccactttagaaactcaattaaaaaagctcaagaggagaacaagaaaatcgtactggctggatgcgttcctcaagcccagcctcgccaggactaccttaagggactgagtatcattggggttcagcagatagatcgtgtggtagaagttgtggaggagacaattaaaggtcactctgtgagactgctgggtcagaaaaaggataatggaaggcggcttgggggagcacgattggatttgccgaagattaggaagaatccactgatagaaatcatttccatcaataccgggtgtctcaatgcttgtacctactgcaaaactaaacacgccagaggaaatttggccagttatccaattgatgaactagtagatagagccaaacaatcttttcaagagggtgtttgtgagatatggttgaccagtgaagacacgggggcttatggcagagatattggcaccaatctccccacactcctgtggaaactggttgaagtgattcctgagggagcaatgctgaggcttggcatgacaaatccgccctatattttagagcatctggaggaaatggcaaaaatccttaatcaccccagagtctacgcttttctgcacataccagtccagtctgcctccgacagcgtactcatggaaatgaaaagagaatactgtgtggctgacttcaaaagagtagtggattttctgaaagagaaagttcctggaataactattgctacagatattatctgtggttttcctggagaaacagatcaggattttcaagaaacagtgaaacttgttgaagagtacaaattcccaagcctgtttattaaccaattttacccaagaccaggaactcctgctgcaaaaatggaacaagttccagcacaagtgaaaaagcaaaggacaaaagatctttctcgggtgtttcattcttacagtccatatgatcacaagattggtgaaagacaacaagtgttagtaacagaagaatcttttgattccaagttttatgttgcacacaatcaattctatgagcaggttttagtgccaaagaaccctgcgttcatggggaagatggttgaagtggacatctatgaatcaggcaaacattttatgaaagggcagccagtatctgatgccaaagtgtacacgccctccatcagcaaaccgctagcaaagggagaagtctcgggtttgacaaaggacttcagaaatgggcttgggaaccagctgagttcaggatcccacacctctgctgcatctcagtgtgactcagcgagttccagaatggtgctgcccatgccaaggctacatcaagactgtgcgctgaggatgtccgtgggcttggctctgctgggtcttctttttgctttttttgtcaaggtctataattagaatacaactaatggaaacatctataaagaagaatacatttctaattaaaatcttcaatgaacaggaaagcgacatctccattctccaagggcaataatttgtactggtcatgctgcctccttctcagccactcttcttaatgaggctccccctgtctcacattgagttgggcccattggttatttgacctaaaacctaatcaccgctaccatagcacatccttcaaattaaactgcttttggtttacttttagcaagaaatgcaagcggttgcatttttttctgtttgtttcaatctctaatctttaagtcagaacctaattgtacagtggctctggccatcttttcctcatgtggaagaattttctatctttaataaactttttctttgttttttttttccagatggagtttcgctcttgtcccccaggctggagtggtgcagtggcacgatctcaggtcactgcaacctctgcctcctgggttcaaacgattctcctgcctcagcctcccaagtagctgggattacaggcatgcgccaccaagcccagacaatttttttgtgttttcagtagagacggagtttcaccatgttggccaggctagtctcgaactcctgacctcaagtgatccgcccgcctcggcctcccaaagtgctaggattacaggcgtgagccactgcgcccggcctctttaataaatatttttaagtgcatcttccccttcaggctttgtttggagtcccagtgctacaaacattgtatttttcacagcagatgtgttcctgaaaagtgtatagaaacctgttctgggaacctgaatgcttttggaatgcacggggagagtctgccagctaaaggactcctggcaacattctgtgaaatatgaaactggaaaactggatttgtcgaaaactaattgtgcccattttctcacatttttgatccattggggttttttttttgtttttgtttttttttttttttgagtcaaggtctcactctgtcaccctggctggagtgcaatggcactatcttggctcactgcagccttgacctcctggactcaagcagtcctcctacctcagcctccctaatagccaggggctacaggcatataccaccatgcccaactaattttttaattttttgtagagatgagtgtcactatgttgcccaggcttgcctggaactcctagcctcaagcagtcttcttgcctcagcctcccaaagtgctgggattacaggcgtgagccactccacccagcccagattaaatgtttttatttctacctgccatcattggtctttactaagtgaagtgacttctttctttaacaataaatagaattggtatactaagcaaa

SEQ ID NO: 5289 - DNA, 3115 bp, Homo sapiens
  source 1..3115: mol_type = unassigned DNA
ggtagagaatatgccttctgcatcctgtgatacactactggatgacatcgaagatatcgtgtctcaggaagattcaaaaccacaagataggcattttgtaagaaaggatgttgtcccgaaggtacgaaggcgaaatacccaaaaatatttgcaagaggaagaaaacagtccaccaagtgacagcactattccaggcatacagaaaatttggatacgaacatggggttgttctcataataattcagatggagaatatatggctggacagctagctgcttatggctataaaattacagaaaatgcatccgatgcagatttatggctcctgaacagttgcactgtaaaaaacccagctgaagaccactttagaaactcaattaaaaaagctcaagaggagaacaagaaaatcgtactggctggatgcgttcctcaagcccagcctcgccaggactaccttaagggactgagtatcattggggttcagcagatagatcgtgtggtagaagttgtggaggagacaattaaaggtcactctgtgagactgctgggtcagaaaaaggataatggaaggcggcttgggggagcacgattggatttgccgaagattaggaagaatccactgatagaaatcatttccatcaataccgggtgtctcaatgcttgtacctactgcaaaactaaacacgccagaggaaatttggccagttatccaattgatgaactagtagatagagccaaacaatcttttcaagagggtgtttgtgagatatggttgaccagtgaagacacgggggcttatggcagagatattggcaccaatctccccacactcctgtggaaactggttgaagtgattcctgagggagcaatgctgaggcttggcatgacaaatccgccctatattttagagcatctggaggaaatggcaaaaatccttaatcaccccagagtctacgcttttctgcacataccagtccagtctgcctccgacagcgtactcatggaaatgaaaagagaatactgtgtggctgacttcaaaagagtagtggattttctgaaagagaaagttcctggaataactattgctacagatattatctgtggttttcctggagaaacagatcaggattttcaagaaacagtgaaacttgttgaagagtacaaattcccaagcctgtttattaaccaattttacccaagaccaggaactcctgctgcaaaaatggaacaagttccagcacaagtgaaaaagcaaaggacaaaagatctttctcgggtgtttcattcttacagtccatatgatcacaagattggtgaaagacaacaagtgttagtaacagaagaatcttttgattccaagttttatgttgcacacaatcaattctatgagcaggttttagtgccaaagaaccctgcgttcatggggaagatggttgaagtggacatctatgaatcaggcaaacattttatgaaagggcagccagtatctgatgccaaagtgtacacgccctccatcagcaaaccgctagcaaagggagaagtctcgggtttgacaaaggacttcagaaatgggcttgggaaccagctgagttcaggatcccacacctctgctgcatctcagtgtgactcagcgagttccagaatggtgctgcccatgccaaggctacatcaagactgtgcgctgaggatgtccgtgggcttggctctgctgggtcttctttttgctttttttgtcaaggtctataattagaatacaactaatggaaacatctataaagaagaatacatttctaattaaaatcttcaatgaacaggaaagcgacatctccattctccaagggcaataatttgtactggtcatgctgcctccttctcagccactcttcttaatgaggctccccctgtctcacattgagttgggcccattggttatttgacctaaaacctaatcaccgctaccatagcacatccttcaaattaaactgcttttggtttacttttagcaagaaatgcaagcggttgcatttttttctgtttgtttcaatctctaatctttaagtcagaacctaattgtacagtggctctggccatcttttcctcatgtggaagaattttctatctttaataaactttttctttgttttttttttccagatggagtttcgctcttgtcccccaggctggagtggtgcagtggcacgatctcaggtcactgcaacctctgcctcctgggttcaaacgattctcctgcctcagcctcccaagtagctgggattacaggcatgcgccaccaagcccagacaatttttttgtgttttcagtagagacggagtttcaccatgttggccaggctagtctcgaactcctgacctcaagtgatccgcccgcctcggcctcccaaagtgctaggattacaggcgtgagccactgcgcccggcctctttaataaatatttttaagtgcatcttccccttcaggctttgtttggagtcccagtgctacaaacattgtatttttcacagcagatgtgttcctgaaaagtgtatagaaacctgttctgggaacctgaatgcttttggaatgcacggggagagtctgccagctaaaggactcctggcaacattctgtgaaatatgaaactggaaaactggatttgtcgaaaactaattgtgcccattttctcacatttttgatccattggggttttttttttgtttttgtttttttttttttttgagtcaaggtctcactctgtcaccctggctggagtgcaatggcactatcttggctcactgcagccttgacctcctggactcaagcagtcctcctacctcagcctccctaatagccaggggctacaggcatataccaccatgcccaactaattttttaattttttgtagagatgagtgtcactatgttgcccaggcttgcctggaactcctagcctcaagcagtcttcttgcctcagcctcccaaagtgctgggattacaggcgtgagccactccacccagcccagattaaatgtttttatttctacctgccatcattggtctttactaagtgaagtgacttctttctttaacaataaatagaattggtatactaagcaaa

SEQ ID NO: 5290 - DNA, 3096 bp, Homo sapiens
  source 1..3096: mol_type = unassigned DNA
aaataaacgtggcgggacgtatgtgtcatggcgctctccatctaaagtctgtgcagcttccggagagtggcgggttgattttctcactttggactggtttttacttcccgacttctggactcatctttcaagaggactttagactaattgcagataattaagagaatatgccttctgcatcctgtgatacactactggatgacatcgaagatatcgtgtctcaggaagattcaaaaccacaagataggcattttgtaagaaaggatgttgtcccgaaggtacgaaggcgaaatacccaaaaatatttgcaagaggaagaaaacagtccaccaagtgacagaaaatgcatccgatgcagatttatggctcctgaacagttgcactgtaaaaaacccagctgaagaccactttagaaactcaattaaaaaagctcaagaggagaacaagaaaatcgtactggctggatgcgttcctcaagcccagcctcgccaggactaccttaagggactgagtatcattggggttcagcagatagatcgtgtggtagaagttgtggaggagacaattaaaggtcactctgtgagactgctgggtcagaaaaaggataatggaaggcggcttgggggagcacgattggatttgccgaagattaggaagaatccactgatagaaatcatttccatcaataccgggtgtctcaatgcttgtacctactgcaaaactaaacacgccagaggaaatttggccagttatccaattgatgaactagtagatagagccaaacaatcttttcaagagggtgtttgtgagatatggttgaccagtgaagacacgggggcttatggcagagatattggcaccaatctccccacactcctgtggaaactggttgaagtgattcctgagggagcaatgctgaggcttggcatgacaaatccgccctatattttagagcatctggaggaaatggcaaaaatccttaatcaccccagagtctacgcttttctgcacataccagtccagtctgcctccgacagcgtactcatggaaatgaaaagagaatactgtgtggctgacttcaaaagagtagtggattttctgaaagagaaagttcctggaataactattgctacagatattatctgtggttttcctggagaaacagatcaggattttcaagaaacagtgaaacttgttgaagagtacaaattcccaagcctgtttattaaccaattttacccaagaccaggaactcctgctgcaaaaatggaacaagttccagcacaagtgattggtgaaagacaacaagtgttagtaacagaagaatcttttgattccaagttttatgttgcacacaatcaattctatgagcaggttttagtgccaaagaaccctgcgttcatggggaagatggttgaagtggacatctatgaatcaggcaaacattttatgaaagggcagccagtatctgatgccaaagtgtacacgccctccatcagcaaaccgctagcaaagggagaagtctcgggtttgacaaaggacttcagaaatgggcttgggaaccagctgagttcaggatcccacacctctgctgcatctcagtgtgactcagcgagttccagaatggtgctgcccatgccaaggctacatcaagactgtgcgctgaggatgtccgtgggcttggctctgctgggtcttctttttgctttttttgtcaaggtctataattagaatacaactaatggaaacatctataaagaagaatacatttctaattaaaatcttcaatgaacaggaaagcgacatctccattctccaagggcaataatttgtactggtcatgctgcctccttctcagccactcttcttaatgaggctccccctgtctcacattgagttgggcccattggttatttgacctaaaacctaatcaccgctaccatagcacatccttcaaattaaactgcttttggtttacttttagcaagaaatgcaagcggttgcatttttttctgtttgtttcaatctctaatctttaagtcagaacctaattgtacagtggctctggccatcttttcctcatgtggaagaattttctatctttaataaactttttctttgttttttttttccagatggagtttcgctcttgtcccccaggctggagtggtgcagtggcacgatctcaggtcactgcaacctctgcctcctgggttcaaacgattctcctgcctcagcctcccaagtagctgggattacaggcatgcgccaccaagcccagacaatttttttgtgttttcagtagagacggagtttcaccatgttggccaggctagtctcgaactcctgacctcaagtgatccgcccgcctcggcctcccaaagtgctaggattacaggcgtgagccactgcgcccggcctctttaataaatatttttaagtgcatcttccccttcaggctttgtttggagtcccagtgctacaaacattgtatttttcacagcagatgtgttcctgaaaagtgtatagaaacctgttctgggaacctgaatgcttttggaatgcacggggagagtctgccagctaaaggactcctggcaacattctgtgaaatatgaaactggaaaactggatttgtcgaaaactaattgtgcccattttctcacatttttgatccattggggttttttttttgtttttgtttttttttttttttgagtcaaggtctcactctgtcaccctggctggagtgcaatggcactatcttggctcactgcagccttgacctcctggactcaagcagtcctcctacctcagcctccctaatagccaggggctacaggcatataccaccatgcccaactaattttttaattttttgtagagatgagtgtcactatgttgcccaggcttgcctggaactcctagcctcaagcagtcttcttgcctcagcctcccaaagtgctgggattacaggcgtgagccactccacccagcccagattaaatgtttttatttctacctgccatcattggtctttactaagtgaagtgacttctttctttaacaataaatagaattggtatactaagcaaa

SEQ ID NO: 5291 - DNA, 5002 bp, Homo sapiens
  source 1..5002: mol_type = unassigned DNA
aggaagaagcgccgggaaagatggcggcgtctgtggtttgaattccagcggcgccgccagagtctgaacaagagctggggtggagggggcggggacctggggagcccggcgggtcgctatcgcggggggtactagtggcgccgccgccacagacaccaacgctgtcgccacctctgtagccatgatggacttggtgttggaagaggacgtcaccgtccctgggacgctcagcggctgcagtggccttgttcccagtgtaccagatgacctggatggcatcaaccccaatgctgggttgggaaatggtctgctcccaaatgtgtcagaagaaacagtgtctcccaccagagcacggaacatgaaggactttgaaaatcaaatcactgaattgaagaaagaaaactttaacctaaagctccgcatctatttccttgaggaaagaatgcaacaggaatttcatggccccactgaacatatctacaaaactaacattgagctcaaggtggaagtagaaagtctgaagcgggaactccaggagagagagcagctgctcatcaaagcctccaaagcagttgagagcttagctgaagcaggtggctctgaaatccagcgggtgaaagaagatgctcgaaagaaggtgcagcaggtggaagatctcctaactaaaagaatactccttttggaaaaggcaaaagatgtgacagccgcccaggcagaactggaaaaggcctttgcagggacagagacggagaaggctcttcggttgcgtttggaaagcaagctttcagagatgaagaagatgcacgagggggacttggcgatggctctggtcctggatgagaaagacagactgattgaggagttgaagctgtctttgaagagcaaagaagctttaattcagtgccttaaagaggagaaatctcagatggcatgtcctgatgagaatgtgtcatctggagagctccgaggactttgtgctgctccaagggaagaaaaggagagagaaactgaggctgcacaaatggagcatcagaaggagagaaacagctttgaagagaggatccaggcacttgaagaggacctgagagagaaggaaagagaaattgctacagagaagaaaaatagtctaaagagggataaagccattcagggtttaaccatggcattaaaatcaaaggaaaaaaaggttgaagaacttaactctgaaattgaaaagctcagtgctgcctttgctaaagccagagaggccctacagaaagcacagacccaggaatttcaggggtctgaagactatgagactgctctatcaggaaaggaagccctttcggctgcgctgcgctcacaaaacctcaccaagagtacagagaaccacagactgcgtagaagcattaagaagatcacccaggagctgagtgacttgcagcaggagagggagagactggagaaggacctggaggaagcccatcgagagaagagcaaaggagactgcaccatccgtgatcttagaaatgaagttgaaaaattacgcaatgaagtgaatgaaagagagaaagcaatggaaaatcgttacaagagtcttctgagtgaaagcaataaaaaattgcacaatcaagagcaagtgatcaaacatctaacagaaagtaccaatcagaaggacgtgttgcttcagaaattcaatgaaaaagatttggaagtaatacagcagaactgctatttaatggctgcagaggatcttgagctcaggagtgaaggcttaataacagaaaagtgctcttctcaacagccaccaggcagcaaaaccatcttctctaaggaaaagaaacaatcatcagactatgaagagctgattcaggtcttaaagaaagagcaggacatctatacccatctggtcaaatctctgcaggaatcagacagtatcaacaacctgcaggctgagttaaacaagatttttgccctgcggaagcaactggagcaggatgtgctttcatatcagaatttgcggaagaccttggaggagcagatcagcgaaattcggaggcgggaagaatcattttcactttatagtgatcaaacatcttatctaagtatttgccttgaagaaaacaatcggtttcaagtggaacatttttctcaagaagaacttaagaaaaaggtcagtgaccttatacagctagtgaaggagctgtatacagacaaccagcacctgaagaaaaccatttttgatctctcctgcatgggtttccagggaaatgggtttccagatagacttgcgtctacagaacaaacagaggaggctaagaagtcccgcttgccaatcctaataaaaccatcccggtcattaggaaatatgtatcgtctccctgccacccaggaggtggtgacgcagctgcagagccagatcttggagctgcagggggagctgaaggagtttaaaacttgtaataagcaacttcaccaaaagttaattctggctgaagcagtgatggaggggaggccaacgcccgacaaaacgttgctgaatgctcagccccctgtgggagcagcctaccaggacagcccaggagagcagaaaggaattaaaaccacatcttctgtctggagagacaaggaaatggacagtgatcagcaaagaagctacgagattgactctgagatttgcccacctgatgaccttgccagcttgccatcatgcaaagaaaatcctgaagatgttctgagcccaacttcagtagctacttacctgagttccaagagtcagccttctgctaaagtcagtgtgatggggactgatcagtcagagagcattaatacctcaaatgagacagaatacttaaaacagaaaatccatgacttggaaactgagctggaaggctaccagaatttcatatttcagcttcaaaagcactcccagtgcagtgaggccataattacagttttgtgtgggacagaaggggcccaggatggcttgagcaagcccaagaatggttctgatggggaagaaatgaccttttcaagtttgcaccaagtgcgatacgtgaaacacgtgaaaatcctcggtccgctggccccagagatgattgacagcagggtgctggagaacctcaaacagcagctggaggaacaggaatacaagctgcagaaggagcagaatttgaacatgcaacttttcagtgagatccataatctgcagaataagttcagagatctctcacctcccagatacgattcattagttcagtcccaagccagggagctctcccttcaacggcagcagattaaggatggccatggcatctgtgtcatctcccgtcaacacatgaacaccatgattaaggcatttgaggagttgctgcaggccagtgatgtggattactgtgtggccgagggtttccaggaacagctgaatcaatgtgctgagctgctggagaaattggaaaagctatttctcaacggaaaatcagttggagtggaaatgaacacccagaatgaactgatggagaggattgaggaagacaacttaacctaccaacatcttctgcctgaatctcctgagccttcagcctctcatgcgctctctgattatgaaacatctgaaaagtccttcttctcacgagaccagaagcaagataatgagacagagaagacttcagttatggtgaacagtttttctcaagacttactaatggaacacatacaggaaattcgaactttgagaaagcgtttagaagaatctattaaaacaaatgagaagctacggaaacagttggaacggcaaggatctgaatttgttcaaggttctacaagcatttttgcttctggttcagagcttcatagttctctaacatcagaaattcatttcttgaggaagcagaaccaggccctcaatgcaatgctcattaaaggatccagagataaacagaaggagaatgacaaattacgagagtccctctccaggaagaccgtgagcctggagcaccttcagcgggagtatgccagcgtgaaggaagaaaatgaaaggctgcagaaagaaggcagcgagaaggagagacacaaccagcagctgatccaggaggtccgctgcagcggccaggagctgagcagggtgcaggaggaggtgaagttgaggcagcagctgctctcacagaatgacaagctattgcagtctctccgagtggagctgaaggcgtatgagaagctggatgaagagcacaggagactgagagaggcgtcgggagaaggctggaaggggcaggatcctttcagggacctgcacagcctcctgatggagatccaggctctgcgcttgcaactagaaaggagcatcgaaaccagcagcactctgcagagcaggctcaaggaacagctggcaaggggggcagagaaggcacaggaaggagccctcactctggctgtccaagccgtgtccatccctgaggtgccccttcagcctgacaaacacgatggtgacaaatatcccatggaaagtgataattcatttgatctgtttgattcctcccaggcagtgacaccaaaatcagtttcagagactcctccactctctgggaatgacacggactccctctcctgcgacagtggcagttcggcaactagcactccgtgtgtgtcccgcctggtcactggccaccacctgtgggccagcaagaatggccgccatgtcctgggcctgattgaggactatgaggccctgctcaaacagatcagccagggacagaggctccttgctgaaatggacattcaaacccaagaggctcccagctccacaagtcaagagctgggaacaaagggtccacacccagcaccactgagcaagtttgtgagcagtgtgagcacggccaagctgaccctggaagaggcctacaggcggctgaagcttctctggagagtctcactccccgaggatggccagtgcccccttcactgtgagcagattggagaaatgaaggcagaggtcaccaaactacataaaaaattgaaaaagtca

SEQ ID NO: 5292 - DNA, 6228 bp, Homo sapiens
  source 1..6228: mol_type = unassigned DNA
ggaagaagcgccgggaaagatggcggcgtctgtggtttgaattccagcggcgccgccagagtctgaacaagagctggggtggagggggcggggacctggggagcccggcgggtcgctatcgcggggggtactagtggcgccgccgccacagacaccaacgctgtcgccacctctgtagccatgatggacttggtgttggaagaggacgtcaccgtccctgggacgctcagcggctgcagtggccttgttcccagtgtaccagatgacctggatggcatcaaccccaatgctgggttgggaaatggtctgctcccaaatgtgtcagaagaaacagtgtctcccaccagagcacggaacatgaaggactttgaaaatcaaatcactgaattgaagaaagaaaactttaacctaaagctccgcatctatttccttgaggaaagaatgcaacaggaatttcatggccccactgaacatatctacaaaactaacattgagctcaaggtggaagtagaaagtctgaagcgggaactccaggagagagagcagctgctcatcaaagcctccaaagcagttgagagcttagctgaagcaggtggctctgaaatccagcgggtgaaagaagatgctcgaaagaaggtgcagcaggtggaagatctcctaactaaaagaatactccttttggaaaaggatgtgacagccgcccaggcagaactggaaaaggcctttgcagggacagagacggagaaggctcttcggttgcgtttggaaagcaagctttcagagatgaagaagatgcacgagggggacttggcgatggctctggtcctggatgagaaagacagactgattgaggagttgaagctgtctttgaagagcaaagaagctttaattcagtgccttaaagaggagaaatctcagatggcatgtcctgatgagaatgtgtcatctggagagctccgaggactttgtgctgctccaagggaagaaaaggagagagaaactgaggctgcacaaatggagcatcagaaggagagaaacagctttgaagagaggatccaggcacttgaagaggacctgagagagaaggaaagagaaattgctacagagaagaaaaatagtctaaagagggataaagccattcagggtttaaccatggcattaaaatcaaaggaaaaaaaggttgaagaacttaactctgaaattgaaaagctcagtgctgcctttgctaaagccagagaggccctacagaaagcacagacccaggaatttcaggggtctgaagactatgagactgctctatcaggaaaggaagccctttcggctgcgctgcgctcacaaaacctcaccaagagtacagagaaccacagactgcgtagaagcattaagaagatcacccaggagctgagtgacttgcagcaggagagggagagactggagaaggacctggaggaagcccatcgagagaagagcaaaggagactgcaccatccgtgatcttagaaatgaagttgaaaaattacgcaatgaagtgaatgaaagagagaaagcaatggaaaatcgttacaagagtcttctgagtgaaagcaataaaaaattgcacaatcaagagcaagtgatcaaacatctaacagaaagtaccaatcagaaggacgtgttgcttcagaaattcaatgaaaaagatttggaagtaatacagcagaactgctatttaatggctgcagaggatcttgagctcaggagtgaaggcttaataacagaaaagtgctcttctcaacagccaccaggcagcaaaaccatcttctctaaggaaaagaaacaatcatcagactatgaagagctgattcaggtcttaaagaaagagcaggacatctatacccatctggtcaaatctctgcaggaatcagacagtatcaacaacctgcaggctgagttaaacaagatttttgccctgcggaagcaactggagcaggatgtgctttcatatcagaatttgcggaagaccttggaggagcagatcagcgaaattcggaggcgggaagaagaatcattttcactttatagtgatcaaacatcttatctaagtatttgccttgaagaaaacaatcggtttcaagtggaacatttttctcaagaagaacttaagaaaaaggtcagtgaccttatacagctagtgaaggagctgtatacagacaaccagcacctgaagaaaaccatttttgatctctcctgcatgggtttccagggaaatgggtttccagatagacttgcgtctacagaacaaacagagcttctggctagcaaggaggacgaggacacgatcaaaattggggaggatgacgagattaatttcctgagtgaccagcatttgcagcagagtaatgagattatgaaagacctttccaaaggaggctgcaaaaatggatacttaaggcacacggagtctaagatttcagattgtgatggggcccacgcacctggctgcctagaagaaggtgcattcataaacctgcttgcccctttgttcaatgagaaggccacattattactggaatccaggccagaccttctgaaagtggtacgggaactgcttctgggacaactattcttgacagagcaggaagtttctggagaacaccttgatggtaaaactgagaagacacctaagcaaaaaggtgaacttgtacattttgtccaaaccaactcattttccaagccacatgatgaactgaagttgtcttgtgaggcccagctagtaaaggcaggcgaagtgcccaaggtaggactgaaagatgcctcagtgcagactgtggccacggagggcgacctgctgagattcaagcatgaagcaacaagagaggcttgggaagagaaaccgatcaacactgcactcagcgcagagcatcggccagagaacctgcacggggtgcctgggtggcaggctgccctcctttccctccctggtattaccaacagagaggctaagaagtcccgcttgccaatcctaataaaaccatcccggtcattaggaaatatgtatcgtctccctgccacccaggaggtggtgacgcagctgcagagccagatcttggagctgcagggggagctgaaggagtttaaaacttgtaataagcaacttcaccaaaagttaattctggctgaagcagtgatggaggggaggccaacgcccgacaaaacgttgctgaatgctcagccccctgtgggagcagcctaccaggacagcccaggagagcagaaaggaattaaaaccacatcttctgtctggagagacaaggaaatggacagtgatcagcaaagaagctacgagattgactctgagatttgcccacctgatgaccttgccagcttgccatcatgcaaagaaaatcctgaagatgttctgagcccaacttcagtagctacttacctgagttccaagagtcagccttctgctaaagtcagtgtgatggggactgatcagtcagagagcattaatacctcaaatgagacagaatacttaaaacagaaaatccatgacttggaaactgagctggaaggctaccagaatttcatatttcagcttcaaaagcactcccagtgcagtgaggccataattacagttttgtgtgggacagaaggggcccaggatggcttgagcaagcccaagaatggttctgatggggaagaaatgaccttttcaagtttgcaccaagtgcgatacgtgaaacacgtgaaaatcctcggtccgctggccccagagatgattgacagcagggtgctggagaacctcaaacagcagctggaggaacaggaatacaagctgcagaaggagcagaatttgaacatgcaacttttcagtgagatccataatctgcagaataagttcagagatctctcacctcccagatacgattcattagttcagtcccaagccagggagctctcccttcaacggcagcagattaaggatggccatggcatctgtgtcatctcccgtcaacacatgaacaccatgattaaggcatttgaggagttgctgcaggccagtgatgtggattactgtgtggccgagggtttccaggaacagctgaatcaatgtgctgagctgctggagaaattggaaaagctatttctcaacggaaaatcagttggagtggaaatgaacacccagaatgaactgatggagaggattgaggaagacaacttaacctaccaacatcttctgcctgaatctcctgagccttcagcctctcatgcgctctctgattatgaaacatctgaaaagtccttcttctcacgagaccagaagcaagataatgagacagagaagacttcagttatggtgaacagtttttctcaagacttactaatggaacacatacaggaaattcgaactttgagaaagcgtttagaagaatctattaaaacaaatgagaagctacggaaacagttggaacggcaaggatctgaatttgttcaaggttctacaagcatttttgcttctggttcagagcttcatagttctctaacatcagaaattcatttcttgaggaagcagaaccaggccctcaatgcaatgctcattaaaggatccagagataaacagaaggagaatgacaaattacgagagtccctctccaggaagaccgtgagcctggagcaccttcagcgggagtatgccagcgtgaaggaagaaaatgaaaggctgcagaaagaaggcagcgagaaggagagacacaaccagcagctgatccaggaggtccgctgcagcggccaggagctgagcagggtgcaggaggaggtgaagttgaggcagcagctgctctcacagaatgacaagctattgcagtctctccgagtggagctgaaggcgtatgagaagctggatgaagagcacaggagactgagagaggcgtcgggagaaggctggaaggggcaggatcctttcagggacctgcacagcctcctgatggagatccaggctctgcgcttgcaactagaaaggagcatcgaaaccagcagcactctgcagagcaggctcaaggaacagctggcaaggggggcagagaaggcacaggaaggagccctcactctggctgtccaagccgtgtccatccctgaggtgccccttcagcctgacaaacacgatggtgacaaatatcccatggaaagtgataattcatttgatctgtttgattcctcccaggcagtgacaccaaaatcagtttcagagactcctccactctctgggaatgacacggactccctctcctgcgacagtggcagttcggcaactagcactccgtgtgtgtcccgcctggtcactggccaccacctgtgggccagcaagaatggccgccatgtcctgggcctgattgaggactatgaggccctgctcaaacagatcagccagggacagaggctccttgctgaaatggacattcaaacccaagaggctcccagctccacaagtcaagagctgggaacaaagggtccacacccagcaccactgagcaagtttgtgagcagtgtgagcacggccaagctgaccctggaagaggcctacaggcggctgaagcttctctggagagtctcactccccgaggatggccagtgcccccttcactgtgagcagattggagaaatgaaggcagaggtcaccaaactacataaaaaattgtttgaacaagaaaagaagttgcaaaacaccatgaagcttttgcagctgagcaagcgccaggaaaaagtcatctttgatcaattggtcgtaacccacaaaatccttcggaaggccagaggaaacctggagcttaggcctgggggagcccatccaggaacatgcagtcccagcagaccaggctcctgagaagaactttcagccaataaagcttgtgcttcccccaccgagctcacgctgtctctttgttccaagtgtggttcctatttattgaggaagaaagagctgtctggccaaaggaaatctattttttcccttcatgttttctctctgaaagttggcttgagagttgttgtcagaaaggtgcaggtgctccacaaacgggtggtaaaaaggcctcgagctcttggatgttgtatttcagatcaggggcaggcaccggagttgaggctgtgcgccttggtgggcttcacgtcttcccctggatttgcttagtactcagccagtgccacagtttgaagattctcattaaatgattcatttcatttcaccttg

SEQ ID NO: 5293 - DNA, 6107 bp, Homo sapiens
  source 1..6107: mol_type = unassigned DNA
aggaagaagcgccgggaaagatggcggcgtctgtggtttgaattccagcggcgccgccagagtctgaacaagagctggggtggagggggcggggacctggggagcccggcgggtcgctatcgcggggggtactagtggcgccgccgccacagacaccaacgctgtcgccacctctgtagccatgatggacttggtgttggaagaggacgtcaccgtccctgggacgctcagcggctgcagtggccttgttcccagtgtaccagatgacctggatggcatcaaccccaatgctgggttgggaaatggtctgctcccaaatgtgtcagaagaaacagtgtctcccaccagagcacggaacatgaaggactttgaaaatcaaatcactgaattgaagaaagaaaactttaacctaaagctccgcatctatttccttgaggaaagaatgcaacaggaatttcatggccccactgaacatatctacaaaactaacattgagctcaaggtggaagtagaaagtctgaagcgggaactccaggagagagagcagctgctcatcaaagcctccaaagcagttgagagcttagctgaagcaggtggctctgaaatccagcgggtgaaagaagatgctcgaaagaaggtgcagcaggtggaagatctcctaactaaaagaatactccttttggaaaaggatgtgacagccgcccaggcagaactggaaaaggcctttgcagggacagagacggagaaggctcttcggttgcgtttggaaagcaagctttcagagatgaagaagatgcacgagggggacttggcgatggctctggtcctggatgagaaagacagactgattgaggagttgaagctgtctttgaagagcaaagaagctttaattcagtgccttaaagaggagaaatctcagatggcatgtcctgatgagaatgtgtcatctggagagctccgaggactttgtgctgctccaagggaagaaaaggagagagaaactgaggctgcacaaatggagcatcagaaggagagaaacagctttgaagagaggatccaggcacttgaagaggacctgagagagaaggaaagagaaattgctacagagaagaaaaatagtctaaagagggataaagccattcagggtttaaccatggcattaaaatcaaaggaaaaaaaggttgaagaacttaactctgaaattgaaaagctcagtgctgcctttgctaaagccagagaggccctacagaaagcacagacccaggaatttcaggggtctgaagactatgagactgctctatcaggaaaggaagccctttcggctgcgctgcgctcacaaaacctcaccaagagtacagagaaccacagactgcgtagaagcattaagaagatcacccaggagctgagtgacttgcagcaggagagggagagactggagaaggacctggaggaagcccatcgagagaagagcaaaggagactgcaccatccgtgatcttagaaatgaagttgaaaaattacgcaatgaagtgaatgaaagagagaaagcaatggaaaatcgttacaagagtcttctgagtgaaagcaataaaaaattgcacaatcaagagcaagtgatcaaacatctaacagaaagtaccaatcagaaggacgtgttgcttcagaaattcaatgaaaaagatttggaagtaatacagcagaactgctatttaatggctgcagaggatcttgagctcaggagtgaaggcttaataacagaaaagtgctcttctcaacagccaccaggcagcaaaaccatcttctctaaggaaaagaaacaatcatcagactatgaagagctgattcaggtcttaaagaaagagcaggacatctatacccatctggtcaaatctctgcaggaatcagacagtatcaacaacctgcaggctgagttaaacaagatttttgccctgcggaagcaactggagcaggatgtgctttcatatcagaatttgcggaagaccttggaggagcagatcagcgaaattcggaggcgggaagaagaatcattttcactttatagtgatcaaacatcttatctaagtatttgccttgaagaaaacaatcggtttcaagtggaacatttttctcaagaagaacttaagaaaaaggtcagtgaccttatacagctagtgaaggagctgtatacagacaaccagcacctgaagaaaaccatttttgatctctcctgcatgggtttccagggaaatgggtttccagatagacttgcgtctacagaacaaacagagcttctggctagcaaggaggacgaggacacgatcaaaattggggaggatgacgagattaatttcctgagtgaccagcatttgcagcagagtaatgagattatgaaagacctttccaaaggaggctgcaaaaatggatacttaaggcacacggagtctaagatttcagattgtgatggggcccacgcacctggctgcctagaagaaggtgcattcataaacctgcttgcccctttgttcaatgagaaggccacattattactggaatccaggccagaccttctgaaagtggtacgggaactgcttctgggacaactattcttgacagagcaggaagtttctggagaacaccttgatggtaaaactgagaagacacctaagcaaaaaggtgaacttgtacattttgtccaaaccaactcattttccaagccacatgatgaactgaagttgtcttgtgaggcccagctagtaaaggcaggcgaagtgcccaaggtaggactgaaagatgcctcagtgcagactgtggccacggagggcgacctgctgagattcaagcatgaagcaacaagagaggcttgggaagagaaaccgatcaacactgcactcagcgcagagcatcggccagagaacctgcacggggtgcctgggtggcaggctgccctcctttccctccctggtattaccaacagagaggctaagaagtcccgcttgccaatcctaataaaaccatcccggtcattaggaaatatgtatcgtctccctgccacccaggaggtggtgacgcagctgcagagccagatcttggagctgcagggggagctgaaggagtttaaaacttgtaataagcaacttcaccaaaagttaattctggctgaagcagtgatggaggggaggccaacgcccgacaaaacgttgctgaatgactctgagatttgcccacctgatgaccttgccagcttgccatcatgcaaagaaaatcctgaagatgttctgagcccaacttcagtagctacttacctgagttccaagagtcagccttctgctaaagtcagtgtgatggggactgatcagtcagagagcattaatacctcaaatgagacagaatacttaaaacagaaaatccatgacttggaaactgagctggaaggctaccagaatttcatatttcagcttcaaaagcactcccagtgcagtgaggccataattacagttttgtgtgggacagaaggggcccaggatggcttgagcaagcccaagaatggttctgatggggaagaaatgaccttttcaagtttgcaccaagtgcgatacgtgaaacacgtgaaaatcctcggtccgctggccccagagatgattgacagcagggtgctggagaacctcaaacagcagctggaggaacaggaatacaagctgcagaaggagcagaatttgaacatgcaacttttcagtgagatccataatctgcagaataagttcagagatctctcacctcccagatacgattcattagttcagtcccaagccagggagctctcccttcaacggcagcagattaaggatggccatggcatctgtgtcatctcccgtcaacacatgaacaccatgattaaggcatttgaggagttgctgcaggccagtgatgtggattactgtgtggccgagggtttccaggaacagctgaatcaatgtgctgagctgctggagaaattggaaaagctatttctcaacggaaaatcagttggagtggaaatgaacacccagaatgaactgatggagaggattgaggaagacaacttaacctaccaacatcttctgcctgaatctcctgagccttcagcctctcatgcgctctctgattatgaaacatctgaaaagtccttcttctcacgagaccagaagcaagataatgagacagagaagacttcagttatggtgaacagtttttctcaagacttactaatggaacacatacaggaaattcgaactttgagaaagcgtttagaagaatctattaaaacaaatgagaagctacggaaacagttggaacggcaaggatctgaatttgttcaaggttctacaagcatttttgcttctggttcagagcttcatagttctctaacatcagaaattcatttcttgaggaagcagaaccaggccctcaatgcaatgctcattaaaggatccagagataaacagaaggagaatgacaaattacgagagtccctctccaggaagaccgtgagcctggagcaccttcagcgggagtatgccagcgtgaaggaagaaaatgaaaggctgcagaaagaaggcagcgagaaggagagacacaaccagcagctgatccaggaggtccgctgcagcggccaggagctgagcagggtgcaggaggaggtgaagttgaggcagcagctgctctcacagaatgacaagctattgcagtctctccgagtggagctgaaggcgtatgagaagctggatgaagagcacaggagactgagagaggcgtcgggagaaggctggaaggggcaggatcctttcagggacctgcacagcctcctgatggagatccaggctctgcgcttgcaactagaaaggagcatcgaaaccagcagcactctgcagagcaggctcaaggaacagctggcaaggggggcagagaaggcacaggaaggagccctcactctggctgtccaagccgtgtccatccctgaggtgccccttcagcctgacaaacacgatggtgacaaatatcccatggaaagtgataattcatttgatctgtttgattcctcccaggcagtgacaccaaaatcagtttcagagactcctccactctctgggaatgacacggactccctctcctgcgacagtggcagttcggcaactagcactccgtgtgtgtcccgcctggtcactggccaccacctgtgggccagcaagaatggccgccatgtcctgggcctgattgaggactatgaggccctgctcaaacagatcagccagggacagaggctccttgctgaaatggacattcaaacccaagaggctcccagctccacaagtcaagagctgggaacaaagggtccacacccagcaccactgagcaagtttgtgagcagtgtgagcacggccaagctgaccctggaagaggcctacaggcggctgaagcttctctggagagtctcactccccgaggatggccagtgcccccttcactgtgagcagattggagaaatgaaggcagaggtcaccaaactacataaaaaattgtttgaacaagaaaagaagttgcaaaacaccatgaagcttttgcagctgagcaagcgccaggaaaaagtcatctttgatcaattggtcgtaacccacaaaatccttcggaaggccagaggaaacctggagcttaggcctgggggagcccatccaggaacatgcagtcccagcagaccaggctcctgagaagaactttcagccaataaagcttgtgcttcccccaccgagctcacgctgtctctttgttccaagtgtggttcctatttattgaggaagaaagagctgtctggccaaaggaaatctattttttcccttcatgttttctctctgaaagttggcttgagagttgttgtcagaaaggtgcaggtgctccacaaacgggtggtaaaaaggcctcgagctcttggatgttgtatttcagatcaggggcaggcaccggagttgaggctgtgcgccttggtgggcttcacgtcttcccctggatttgcttagtactcagccagtgccacagtttgaagattctcattaaatgattcatttcatttcaccttga

SEQ ID NO: 5294 - DNA, 5985 bp, Homo sapiens
  source 1..5985: mol_type = unassigned DNA
ggaagaagcgccgggaaagatggcggcgtctgtggtttgaattccagcggcgccgccagagtctgaacaagagctggggtggagggggcggggacctggggagcccggcgggtcgctatcgcggggggtactagtggcgccgccgccacagacaccaacgctgtcgccacctctgtagccatgatggacttggtgttggaagaggacgtcaccgtccctgggacgctcagcggctgcagtggccttgttcccagtgtaccagatgacctggatggcatcaaccccaatgctgggttgggaaatggtctgctcccaaatgtgtcagaagaaacagtgtctcccaccagagcacggaacatgaaggactttgaaaatcaaatcactgaattgaagaaagaaaactttaacctaaagctccgcatctatttccttgaggaaagaatgcaacaggaatttcatggccccactgaacatatctacaaaactaacattgagctcaaggtggaagtagaaagtctgaagcgggaactccaggagagagagcagctgctcatcaaagcctccaaagcagttgagagcttagctgaagcaggtggctctgaaatccagcgggtgaaagaagatgctcgaaagaaggtgcagcaggtggaagatctcctaactaaaagaatactccttttggaaaaggatgtgacagccgcccaggcagaactggaaaaggcctttgcagggacagagacggagaaggctcttcggttgcgtttggaaagcaagctttcagagatgaagaagatgcacgagggggacttggcgatggctctggtcctggatgagaaagacagactgattgaggagttgaagctgtctttgaagagcaaagaagctttaattcagtgccttaaagaggagaaatctcagatggcatgtcctgatgagaatgtgtcatctggagagctccgaggactttgtgctgctccaagggaagaaaaggagagagaaactgaggctgcacaaatggagcatcagaaggagagaaacagctttgaagagaggatccaggcacttgaagaggacctgagagagaaggaaagagaaattgctacagagaagaaaaatagtctaaagagggataaagccattcagggtttaaccatggcattaaaatcaaaggaaaaaaaggttgaagaacttaactctgaaattgaaaagctcagtgctgcctttgctaaagccagagaggccctacagaaagcacagacccaggaatttcaggggtctgaagactatgagactgctctatcaggaaaggaagccctttcggctgcgctgcgctcacaaaacctcaccaagagtacagagaaccacagactgcgtagaagcattaagaagatcacccaggagctgagtgacttgcagcaggagagggagagactggagaaggacctggaggaagcccatcgagagaagagcaaaggagactgcaccatccgtgatcttagaaatgaagttgaaaaattacgcaatgaagtgaatgaaagagagaaagcaatggaaaatcgttacaagagtcttctgagtgaaagcaataaaaaattgcacaatcaagagcaagtgatcaaacatctaacagaaagtaccaatcagaaggacgtgttgcttcagaaattcaatgaaaaagatttggaagtaatacagcagaactgctatttaatggctgcagaggatcttgagctcaggagtgaaggcttaataacagaaaagtgctcttctcaacagccaccaggcagcaaaaccatcttctctaaggaaaagaaacaatcatcagactatgaagagctgattcaggtcttaaagaaagagcaggacatctatacccatctggtcaaatctctgcaggaatcagacagtatcaacaacctgcaggctgagttaaacaagatttttgccctgcggaagcaactggagcaggatgtgctttcatatcagaatttgcggaagaccttggaggagcagatcagcgaaattcggaggcgggaagaagaatcattttcactttatagtgatcaaacatcttatctaagtatttgccttgaagaaaacaatcggtttcaagtggaacatttttctcaagaagaacttaagaaaaaggtcagtgaccttatacagctagtgaaggagctgtatacagacaaccagcacctgaagaaaaccatttttgatctctcctgcatgggtttccagggaaatgggtttccagatagacttgcgtctacagaacaaacagagcttctggctagcaaggaggacgaggacacgatcaaaattggggaggatgacgagattaatttcctgagtgaccagcatttgcagcagagtaatgagattatgaaagacctttccaaaggaggctgcaaaaatggatacttaaggcacacggagtctaagatttcagattgtgatggggcccacgcacctggctgcctagaagaaggtgcattcataaacctgcttgcccctttgttcaatgagaaggccacattattactggaatccaggccagaccttctgaaagtggtacgggaactgcttctgggacaactattcttgacagagcaggaagtttctggagaacaccttgatggtaaaactgagaagacacctaagcaaaaaggtgaacttgtacattttgtccaaaccaactcattttccaagccacatgatgaactgaagttgtcttgtgaggcccagctagtaaaggcaggcgaagtgcccaaggtaggactgaaagatgcctcagtgcagactgtggccacggagggcgacctgctgagattcaagcatgaagcaacaagagaggcttgggaagagaaaccgatcaacactgcactcagcgcagagcatcggccagagaacctgcacggggtgcctgggtggcaggctgccctcctttccctccctggtattaccaacagagaggctaagaagtcccgcttgccaatcctaataaaaccatcccggtcattaggaaatatgtatcgtctccctgccacccaggaggtggtgacgcagctgcagagccagatcttggagctgcagggggagctgaaggagtttaaaacttgtaataagcaacttcaccaaaagttaattctggctgaagcagtgatggaggggaggccaacgcccgacaaaacgttgctgaatgctcagccccctgtgggagcagcctaccaggacagcccaggagagcagaaaggaattaaaaccacatcttctgtctggagagacaaggaaatggacagtgatcagcaaagaagctacgagattgactctgagatttgcccacctgatgaccttgccagcttgccatcatgcaaagaaaatcctgaagatgttctgagcccaacttcagtagctacttacctgagttccaagagtcagccttctgctaaagtcagtgtgatggggactgatcagtcagagagcattaatacctcaaatgagacagaatacttaaaacagaaaatccatgacttggaaactgagctggaaggctaccagaatttcatatttcagcttcaaaagcactcccagtgcagtgaggccataattacagttttgtgtgggacagaaggggcccaggatggcttgagcaagcccaagaatggttctgatggggaagaaatgaccttttcaagtttgcaccaagtgcgatacgtgaaacacgtgaaaatcctcggtccgctggccccagagatgattgacagcagggtgctggagaacctcaaacagcagctggaggaacaggaatacaagctgcagaaggagcagaatttgaacatgcaacttttcagtgagatccataatctgcagaataagttcagagatctctcacctcccagatacgattcattagttcagtcccaagccagggagctctcccttcaacggcagcagattaaggatggccatggcatctgtgtcatctcccgtcaacacatgaacaccatgattaaggcatttgaggagttgctgcaggccagtgatgtggattactgtgtggccgagggtttccaggaacagctgaatcaatgtgctgagctgctggagaaattggaaaagctatttctcaacggaaaatcagttggagtggaaatgaacacccagaatgaactgatggagaggattgaggaagacaacttaacctaccaacatcttctgcctgaatctcctgagccttcagcctctcatgcgctctctgattatgaaacatctgaaaagtccttcttctcacgagaccagaagcaagataatgagacagagaagacttcagttatggtgaacagtttttctcaagacttactaatggaacacatacaggaaattcgaactttgagaaagcgtttagaagaatctattaaaacaaatgagaagctacggaaacagttggaacggcaaggatctgaatttgttcaaggttctacaagcatttttgcttctggttcagagcttcatagttctctaacatcagaaattcatttcttgaggaagcagaaccaggccctcaatgcaatgctcattaaaggatccagagataaacagaaggagaatgacaaattacgagagtccctctccaggaagaccgtgagcctggagcaccttcagcgggagtatgccagcgtgaaggaagaaaatgaaaggctgcagaaagaaggcagcgagaaggagagacacaaccagcagctgatccaggaggtccgctgcagcggccaggagctgagcagggtgcaggaggaggtgaagttgaggcagcagctgctctcacagaatgacaagctattgcagtctctccgagtggagctgaaggcgtatgagaagctggatgaagagcacaggagactgagagatggtgacaaatatcccatggaaagtgataattcatttgatctgtttgattcctcccaggcagtgacaccaaaatcagtttcagagactcctccactctctgggaatgacacggactccctctcctgcgacagtggcagttcggcaactagcactccgtgtgtgtcccgcctggtcactggccaccacctgtgggccagcaagaatggccgccatgtcctgggcctgattgaggactatgaggccctgctcaaacagatcagccagggacagaggctccttgctgaaatggacattcaaacccaagaggctcccagctccacaagtcaagagctgggaacaaagggtccacacccagcaccactgagcaagtttgtgagcagtgtgagcacggccaagctgaccctggaagaggcctacaggcggctgaagcttctctggagagtctcactccccgaggatggccagtgcccccttcactgtgagcagattggagaaatgaaggcagaggtcaccaaactacataaaaaattgtttgaacaagaaaagaagttgcaaaacaccatgaagcttttgcagctgagcaagcgccaggaaaaagtcatctttgatcaattggtcgtaacccacaaaatccttcggaaggccagaggaaacctggagcttaggcctgggggagcccatccaggaacatgcagtcccagcagaccaggctcctgagaagaactttcagccaataaagcttgtgcttcccccaccgagctcacgctgtctctttgttccaagtgtggttcctatttattgaggaagaaagagctgtctggccaaaggaaatctattttttcccttcatgttttctctctgaaagttggcttgagagttgttgtcagaaaggtgcaggtgctccacaaacgggtggtaaaaaggcctcgagctcttggatgttgtatttcagatcaggggcaggcaccggagttgaggctgtgcgccttggtgggcttcacgtcttcccctggatttgcttagtactcagccagtgccacagtttgaagattctcattaaatgattcatttcatttc

SEQ ID NO: 5295 - DNA, 6134 bp, Homo sapiens
  source 1..6134: mol_type = unassigned DNA
aggaagaagcgccgggaaagatggcggcgtctgtggtttgaattccagcggcgccgccagagtctgaacaagagctggggtggagggggcggggacctggggagcccggcgggtcgctatcgcggggggtactagtggcgccgccgccacagacaccaacgctgtcgccacctctgtagccatgatggacttggtgttggaagaggacgtcaccgtccctgggacgctcagcggctgcagtggccttgttcccagtgtaccagatgacctggatggcatcaaccccaatgctgggttgggaaatggtctgctcccaaatgtgtcagaagaaacagtgtctcccaccagagcacggaacatgaaggactttgaaaatcaaatcactgaattgaagaaagaaaactttaacctaaagctccgcatctatttccttgaggaaagaatgcaacaggaatttcatggccccactgaacatatctacaaaactaacattgagctcaaggtggaagtagaaagtctgaagcgggaactccaggagagagagcagctgctcatcaaagcctccaaagcagttgagagcttagctgaagcaggtggctctgaaatccagcgggtgaaagaagatgctcgaaagaaggtgcagcaggtggaagatctcctaactaaaagaatactccttttggaaaaggatgtgacagccgcccaggcagaactggaaaaggcctttgcagggacagagacggagaaggctcttcggttgcgtttggaaagcaagctttcagagatgaagaagatgcacgagggggacttggcgatggctctggtcctggatgagaaagacagactgattgaggagttgaagctgtctttgaagagcaaagaagctttaattcagtgccttaaagaggagaaatctcagatggcatgtcctgatgagaatgtgtcatctggagagctccgaggactttgtgctgctccaagggaagaaaaggagagagaaactgaggctgcacaaatggagcatcagaaggagagaaacagctttgaagagaggatccaggcacttgaagaggacctgagagagaaggaaagagaaattgctacagagaagaaaaatagtctaaagagggataaagccattcagggtttaaccatggcattaaaatcaaaggaaaaaaaggttgaagaacttaactctgaaattgaaaagctcagtgctgcctttgctaaagccagagaggccctacagaaagcacagacccaggaatttcaggggtctgaagactatgagactgctctatcaggaaaggaagccctttcggctgcgctgcgctcacaaaacctcaccaagagtacagagaaccacagactgcgtagaagcattaagaagatcacccaggagctgagtgacttgcagcaggagagggagagactggagaaggacctggaggaagcccatcgagagaagagcaaaggagactgcaccatccgtgatcttagaaatgaagttgaaaaattacgcaatgaagtgaatgaaagagagaaagcaatggaaaatcgttacaagagtcttctgagtgaaagcaataaaaaattgcacaatcaagagcaagtgatcaaacatctaacagaaagtaccaatcagaaggacgtgttgcttcagaaattcaatgaaaaagatttggaagtaatacagcagaactgctatttaatggctgcagaggatcttgagctcaggagtgaaggcttaataacagaaaagtgctcttctcaacagccaccaggcagcaaaaccatcttctctaaggaaaagaaacaatcatcagactatgaagagctgattcaggtcttaaagaaagagcaggacatctatacccatctggtcaaatctctgcaggaatcagacagtatcaacaacctgcaggctgagttaaacaagatttttgccctgcggaagcaactggagcaggatgtgctttcatatcagaatttgcggaagaccttggaggagcagatcagcgaaattcggaggcgggaagaagaatcattttcactttatagtgatcaaacatcttatctaagtatttgccttgaagaaaacaatcggtttcaagtggaacatttttctcaagaagaacttaagaaaaaggtcagtgaccttatacagctagtgaaggagctgtatacagacaaccagcacctgaagaaaaccatttttgatctctcctgcatgggtttccagggaaatgggtttccagatagacttgcgtctacagaacaaacagagattatgaaagacctttccaaaggaggctgcaaaaatggatacttaaggcacacggagtctaagatttcagattgtgatggggcccacgcacctggctgcctagaagaaggtgcattcataaacctgcttgcccctttgttcaatgagaaggccacattattactggaatccaggccagaccttctgaaagtggtacgggaactgcttctgggacaactattcttgacagagcaggaagtttctggagaacaccttgatggtaaaactgagaagacacctaagcaaaaaggtgaacttgtacattttgtccaaaccaactcattttccaagccacatgatgaactgaagttgtcttgtgaggcccagctagtaaaggcaggcgaagtgcccaaggtaggactgaaagatgcctcagtgcagactgtggccacggagggcgacctgctgagattcaagcatgaagcaacaagagaggcttgggaagagaaaccgatcaacactgcactcagcgcagagcatcggccagagaacctgcacggggtgcctgggtggcaggctgccctcctttccctccctggtattaccaacagagaggctaagaagtcccgcttgccaatcctaataaaaccatcccggtcattaggaaatatgtatcgtctccctgccacccaggaggtggtgacgcagctgcagagccagatcttggagctgcagggggagctgaaggagtttaaaacttgtaataagcaacttcaccaaaagttaattctggctgaagcagtgatggaggggaggccaacgcccgacaaaacgttgctgaatgctcagccccctgtgggagcagcctaccaggacagcccaggagagcagaaaggaattaaaaccacatcttctgtctggagagacaaggaaatggacagtgatcagcaaagaagctacgagattgactctgagatttgcccacctgatgaccttgccagcttgccatcatgcaaagaaaatcctgaagatgttctgagcccaacttcagtagctacttacctgagttccaagagtcagccttctgctaaagtcagtgtgatggggactgatcagtcagagagcattaatacctcaaatgagacagaatacttaaaacagaaaatccatgacttggaaactgagctggaaggctaccagaatttcatatttcagcttcaaaagcactcccagtgcagtgaggccataattacagttttgtgtgggacagaaggggcccaggatggcttgagcaagcccaagaatggttctgatggggaagaaatgaccttttcaagtttgcaccaagtgcgatacgtgaaacacgtgaaaatcctcggtccgctggccccagagatgattgacagcagggtgctggagaacctcaaacagcagctggaggaacaggaatacaagctgcagaaggagcagaatttgaacatgcaacttttcagtgagatccataatctgcagaataagttcagagatctctcacctcccagatacgattcattagttcagtcccaagccagggagctctcccttcaacggcagcagattaaggatggccatggcatctgtgtcatctcccgtcaacacatgaacaccatgattaaggcatttgaggagttgctgcaggccagtgatgtggattactgtgtggccgagggtttccaggaacagctgaatcaatgtgctgagctgctggagaaattggaaaagctatttctcaacggaaaatcagttggagtggaaatgaacacccagaatgaactgatggagaggattgaggaagacaacttaacctaccaacatcttctgcctgaatctcctgagccttcagcctctcatgcgctctctgattatgaaacatctgaaaagtccttcttctcacgagaccagaagcaagataatgagacagagaagacttcagttatggtgaacagtttttctcaagacttactaatggaacacatacaggaaattcgaactttgagaaagcgtttagaagaatctattaaaacaaatgagaagctacggaaacagttggaacggcaaggatctgaatttgttcaaggttctacaagcatttttgcttctggttcagagcttcatagttctctaacatcagaaattcatttcttgaggaagcagaaccaggccctcaatgcaatgctcattaaaggatccagagataaacagaaggagaatgacaaattacgagagtccctctccaggaagaccgtgagcctggagcaccttcagcgggagtatgccagcgtgaaggaagaaaatgaaaggctgcagaaagaaggcagcgagaaggagagacacaaccagcagctgatccaggaggtccgctgcagcggccaggagctgagcagggtgcaggaggaggtgaagttgaggcagcagctgctctcacagaatgacaagctattgcagtctctccgagtggagctgaaggcgtatgagaagctggatgaagagcacaggagactgagagaggcgtcgggagaaggctggaaggggcaggatcctttcagggacctgcacagcctcctgatggagatccaggctctgcgcttgcaactagaaaggagcatcgaaaccagcagcactctgcagagcaggctcaaggaacagctggcaaggggggcagagaaggcacaggaaggagccctcactctggctgtccaagccgtgtccatccctgaggtgccccttcagcctgacaaacacgatggtgacaaatatcccatggaaagtgataattcatttgatctgtttgattcctcccaggcagtgacaccaaaatcagtttcagagactcctccactctctgggaatgacacggactccctctcctgcgacagtggcagttcggcaactagcactccgtgtgtgtcccgcctggtcactggccaccacctgtgggccagcaagaatggccgccatgtcctgggcctgattgaggactatgaggccctgctcaaacagatcagccagggacagaggctccttgctgaaatggacattcaaacccaagaggctcccagctccacaagtcaagagctgggaacaaagggtccacacccagcaccactgagcaagtttgtgagcagtgtgagcacggccaagctgaccctggaagaggcctacaggcggctgaagcttctctggagagtctcactccccgaggatggccagtgcccccttcactgtgagcagattggagaaatgaaggcagaggtcaccaaactacataaaaaattgtttgaacaagaaaagaagttgcaaaacaccatgaagcttttgcagctgagcaagcgccaggaaaaagtcatctttgatcaattggtcgtaacccacaaaatccttcggaaggccagaggaaacctggagcttaggcctgggggagcccatccaggaacatgcagtcccagcagaccaggctcctgagaagaactttcagccaataaagcttgtgcttcccccaccgagctcacgctgtctctttgttccaagtgtggttcctatttattgaggaagaaagagctgtctggccaaaggaaatctattttttcccttcatgttttctctctgaaagttggcttgagagttgttgtcagaaaggtgcaggtgctccacaaacgggtggtaaaaaggcctcgagctcttggatgttgtatttcagatcaggggcaggcaccggagttgaggctgtgcgccttggtgggcttcacgtcttcccctggatttgcttagtactcagccagtgccacagtttgaagattctcattaaatgattcatttcatttcaccttga

SEQ ID NO: 5296 - DNA, 1884 bp, Homo sapiens
  source 1..1884: mol_type = unassigned DNA
cggaggctcggccacaacgccactggattggtggtagggcggggcgggccacagtctccagcctgaagcggaagtggaggaaagatggaggaccatcagcacgtgcccatcgacatccagaccagcaagctgctcgattggctggtggacagaaggcactgcagcctgaaatggcagagtctggtgctgacgatccgcgagaagatcaatgctgccatccaggacatgccagagagcgaagagatcgcccagctgctgtctgggtcctacattcactactttcactgcctaagaatcctggaccttctcaaaggcacagaggcctccacgaagaatatttttggccgatactcttcacagcggatgaaggattggcaggagattatagctctgtatgagaaggacaacacctacttagtggaactctctagcctcctggttcggaatgtcaactatgagatcccctcactgaagaagcagattgccaagtgccagcagctgcagcaagaatacagccgcaaggaggaggagtgccaggcaggggctgccgagatgcgggagcagttctaccactcctgcaagcagtatggcatcacgggcgaaaatgtccgaggagaactgctggccctggtgaaggacctgccgagtcagctggctgagattggggcagcggctcagcagtccctgggggaagccattgacgtgtaccaggcgtctgtggggtttgtgtgtgagagccccacagagcaggtgttgccaatgctgcggttcgtgcagaagcggggaaactcaacggtgtacgagtggaggacagggacagagccctctgtggtggaacgaccccacctcgaggagcttcctgagcaggtggcagaagatgcgattgactggggcgactttggggtagaggcagtgtctgaggggactgactctggcatctctgccgaggctgctggaatcgactggggcatcttcccggaatcagattcaaaggatcctggaggtgatgggatagactggggagacgatgctgttgctttgcagatcacagtgctggaagcaggaacccaggctccagaaggtgttgccaggggcccagatgccctgacactgcttgaatacactgagacccggaatcagttccttgatgagctcatggagcttgagatcttcttagcccagagagcagtggagttgagtgaggaggcagatgtcctgtctgtgagccagttccagctggctccagccatcctgcagggccagaccaaagagaagatggttaccatggtgtcagtgctggaggatctgattggcaagcttaccagtcttcagctgcaacacctgtttatgatcctggcctcaccaaggtatgtggaccgagtgactgaattcctccagcaaaagctgaagcagtcccagctgctggctttgaagaaagagctgatggtgcagaagcagcaggaggcacttgaggagcaggcggctctggagcctaagctggacctgctactggagaagaccaaggagctgcagaagctgattgaagctgacatctccaagaggtacagcgggcgccctgtgaacctgatgggaacctctctgtgacaccctccgtgttcttgcctgcccatcttctccgcttttgggatgaagatgatagccagggctgttgttttggggcccttcaaggcaaaagaccaggctgactggaagatggaaagccacaggaaggaagcggcacctgatggtgatcttggcactctccatgttctctacaagaagctgtggtgattggccctgtggtctatcaggcgaaaaccacagattctccttctagttagtatagcggacttaataaaagaggaaaaaactcttgcttcagta

SEQ ID NO: 5297 - DNA, 1964 bp, Homo sapiens
  source 1..1964: mol_type = unassigned DNA
aatgtaggtgttctctttgggacgtctcaccgactctcttccttccccttccctgccctaatcgcccaacacgttgcaggtgctcaaccatgtctattagagaaactgaatgaggaggcaaagcatgacaagtgccacaagagacctgcacactgctctggatggtaaagcgacgcaaggagggaagaaggaccatcagcacgtgcccatcgacatccagaccagcaagctgctcgattggctggtggacagaaggcactgcagcctgaaatggcagagtctggtgctgacgatccgcgagaagatcaatgctgccatccaggacatgccagagagcgaagagatcgcccagctgctgtctgggtcctacattcactactttcactgcctaagaatcctggaccttctcaaaggcacagaggcctccacgaagaatatttttggccgatactcttcacagcggatgaaggattggcaggagattatagctctgtatgagaaggacaacacctacttagtggaactctctagcctcctggttcggaatgtcaactatgagatcccctcactgaagaagcagattgccaagtgccagcagctgcagcaagaatacagccgcaaggaggaggagtgccaggcaggggctgccgagatgcgggagcagttctaccactcctgcaagcagtatggcatcacgggcgaaaatgtccgaggagaactgctggccctggtgaaggacctgccgagtcagctggctgagattggggcagcggctcagcagtccctgggggaagccattgacgtgtaccaggcgtctgtggggtttgtgtgtgagagccccacagagcaggtgttgccaatgctgcggttcgtgcagaagcggggaaactcaacggtgtacgagtggaggacagggacagagccctctgtggtggaacgaccccacctcgaggagcttcctgagcaggtggcagaagatgcgattgactggggcgactttggggtagaggcagtgtctgaggggactgactctggcatctctgccgaggctgctggaatcgactggggcatcttcccggaatcagattcaaaggatcctggaggtgatgggatagactggggagacgatgctgttgctttgcagatcacagtgctggaagcaggaacccaggctccagaaggtgttgccaggggcccagatgccctgacactgcttgaatacactgagacccggaatcagttccttgatgagctcatggagcttgagatcttcttagcccagagagcagtggagttgagtgaggaggcagatgtcctgtctgtgagccagttccagctggctccagccatcctgcagggccagaccaaagagaagatggttaccatggtgtcagtgctggaggatctgattggcaagcttaccagtcttcagctgcaacacctgtttatgatcctggcctcaccaaggtatgtggaccgagtgactgaattcctccagcaaaagctgaagcagtcccagctgctggctttgaagaaagagctgatggtgcagaagcagcaggaggcacttgaggagcaggcggctctggagcctaagctggacctgctactggagaagaccaaggagctgcagaagctgattgaagctgacatctccaagaggtacagcgggcgccctgtgaacctgatgggaacctctctgtgacaccctccgtgttcttgcctgcccatcttctccgcttttgggatgaagatgatagccagggctgttgttttggggcccttcaaggcaaaagaccaggctgactggaagatggaaagccacaggaaggaagcggcacctgatggtgatcttggcactctccatgttctctacaagaagctgtggtgattggccctgtggtctatcaggcgaaaaccacagattctccttctagttagtatagcggacttaataaaagagg

SEQ ID NO: 5298 - DNA, 9138 bp, Homo sapiens
  source 1..9138: mol_type = unassigned DNA
gtctctccaagggaatgaaaggtgaggggagcgtgagtgcaggcatgatgggaatctccgtgacttgtgaaccaaggactgggttttgctctggaagcctgtcctgattgcttctgtaatctggcgctatgcatccggatcttggacccttatgtacactgctgtatgttactcttacaattctgtgctcttctgtgagttcagacttggcaccttattttacttctgagccgctctctgctgtccagaaacttggtggacctgtagtactgcattgttctgctcaacctgtgaccactcgtatctcatggctgcataacggaaaaacattggatggaaacctggaacatgttaagattcatcaggggactctgacaattctttctctcaactcctctcttttgggttactaccagtgccttgccaacaatagcatcggtgccattgtgagtggccctgcgacagtatctgtggcagttcttggtgattttggttcatccacaaagcatgttattacagcagaagaaaaaagtgctggtttcattggctgcagggtaccggagagtaaccccaaagctgaggtgcgctataaaatccggggaaaatggctggaacattccacagagaattacttaatccttccatcaggaaatcttcagattttgaatgtatccttagaggacaagggatcatacaaatgtgcagcttataatcctgtcacacatcaattaaaagttgaacctattggccgaaagctccttgtgagtcgtccttcttcagatgatgttcacattcttcaccccacccattcacaggcattagctgttctttctcgtagccctgtaaccttggagtgtgtggtgagtggggtcccggctcctcaagtgtattggctaaaggacgggcaggacattgcaccaggaagcaactggagaaggttgtattctcatcttgccactgatagcgttgacccggcggactccggaaactattcctgcatggcgggaaacaagtctggagatgtaaaatatgtgacttacatggttaatgtacttgaacatgcttccatttctaaaggactacaggatcagatagtgtctctgggtgccacagtacactttacctgcgacgttcatgggaacccagcccccaactgtacctggtttcacaatgcacagcctattcatccttctgcacgacatctaactgcaggaaacggactgaaaatcagtggggttactgtggaagatgttgggatgtatcagtgtgtagcagataatgggattggatttatgcactctactggaagacttgaaattgaaaatgacggtggattcaagccagttataattacggcaccagtaagtgcaaaggttgcagacggagactttgttactctgtcctgcaatgccagtgggctgccggttccggtcattcgttggtatgacagccatggattgataaccagccatccatctcaagtcctgagatcgaaatcccgaaaatcacagttatcaagacctgagggcttgaacctggagcctgtgtacttcgtcctgtcccaagctggtgcaagctctctccatattcaggctgtgactcaggaacatgcggggaaatacatctgcgaagctgcaaatgaacatggtaccacacaggcagaagcatctctcatggttgttccttttgaaacaaatacaaaagcagagacagtcacacttcctgatgctgctcagaatgatgacagaagtaagagagatggttcagaaactgggttactgagctcatttccggtgaaggtccatcccagtgcagtggaatcagcaccagagaaaaacgccagcggcatctctgttcctgatgcccccatcatactgagccccccacagacccacacaccagacacgtacaacctggtgtggagggcaggcaaggatggtgggctgcccatcaatgcttactttgtgaagtatcgaaagctggatgatggggttggcatgctgggaagctggcacacggttcgagtcccaggaagtgaaaatgagctccatttagctgagctggagccatctagtctttatgaagtcttgatggtagcaagaagcgcagcaggtgaaggccaacctgccatgcttaccttccgaaccagcaaagaaaaaacagcgtcatcaaaaaacacccaggcatcctctccacccgtgggcatccctaagtatcccgttgtttcagaggctgcaaacaacaattttggagtggtacttacagattcctctaggcacagtggagttccagaggcaccagatcggcctaccatctccactgcatcagagacatcagtctatgtcacttggattcctcgggcaaacgggggttctccaatcactgccttcaaagtcgaatataaacggatgaggaccagcaattggctggtggcagctgaagacatccctccttccaaactttcagtggaagttcgtagtttagaaccaggttcaacatacaaatttagggtcattgccatcaaccattatggtgagagttttcggagttcagcatctcgtccttatcaagtggttgggttccccaatcgcttttccagccgtccaataactggacctcacattgcatacacagaggctgtcagcgatactcagatcatgctaaagtggacgtacattccatcaagtaacaataacactcccattcaaggattttatatctattaccgaccaacagatagtgacaatgacagtgattacaagagggatgttgtagaaggttcaaagcagtggcacatgattggccacctgcagccagaaacctcctatgacattaaaatgcaatgcttcaatgaaggaggagaaagtgaatttagcaatgtgatgatctgcgagactaaagtgaaacgtgttcctggagcttctgaatatcctgtcaaagacttgagtacccctccaaattctttgggaagtggaggaaatgtggggcctgcaaccagccctgccagaagcagtgacatgttatatctgatcgttggctgtgtgctgggcgtcatggtcctcattctgatggttttcattgcaatgtgcctgtggaagaatcgccagcagaataccatacaaaaatatgacccaccaggatatctctaccaaggatcagatatgaacgggcagatggtggactacaccactctctcaggagcaagtcagataaatggaaatgttcacggaggcttcctaaccaatggcggtctcagcagtggctattcccaccttcaccataaggtccccaatgcagtcaatggaattgtgaatgggagcctaaatggagggctttactccgggcacagcaactctctaaccaggacacacgtggattttgaacatcctcatcatctagtgaatggtggtggaatgtacacggccgtgcctcagattgaccctctggagtgtgttaactgccgaaattgtcgaaacaacaataggtgtttcaccaaaaccaacagcactttcagcagcagccctcctcctgtggtccctgtggtagcaccttatcctcaggatggtttggaaatgaagcccctcagtcacgtgaaggtgcctgtatgcctgacttccgcagtccctgattgtggccagttgccggaggagagcgtcaaggacaatgtggaaccagtccctactcagcgtacctgctgtcaggacattgtaaatgacgtcagctctgatggctcagaagatccagcagagttcagcagaggtcaggaaggcatgatcaaccttaggattccagatcatcttcagttagctaagagctgtgtatgggaaggagacagctgtgcccattcagaaacagagatcaacattgtaagttggaatgctcttattttgccacctgtccccgagggctgtgctgagaagacaatgtggtctccacctggcattcctttagacagcccgacagaggtccttcagcagccccgggaaacctgaggacatgcaaacaaccagtcatgttccaacttcaagccggtaactgcacacaacaggcctgggagcgaactgtgtgaaggaccttaattcaaatcagagaaaatcattatttatttttttgtagtagtaatgtcatatgaatgtatcttaaaacgtgtgcccttttatattatttatgccttaaatgttttcttccccattccttcctccccctcggtaggaaacaaccttgttttgcatagtattcagtcacctggagggcagaggggtccttccatgttttctaacagctatagtgacagcaagagctcctcatgcaaaggatcccatctcttggctgcttcggctaggagggaatgcaggggcccgttgaaggttgccaccagctgggttttcaggtggaaaatggtctttcaatagtgtattctcagacttttttttgtttgttttttgagatggagtcttgctgtcatccaggctggagtgcaatggctcgatcttggctcactgcaacctccgcctcccaggttcaagcaattctcccgcctcagcctcctgagtagctgggactacaggcacctgccaccacgtccagctaattgtcttgtatttttattagagacaaggtttcaggctggttttgaactcctgacctcaagtgatccacccgcctccgcctcccaaagtgcgaggattacaggcgtgagccaccacgtctggcctgtattatcagacttcctgagaacactttgaaatcaactgcagttgtgacccatgtttataataacagacctggctgacggattttacaagagtgccttccacagaagtggtaatgtgacctgttgactttgtatctgcacgtgggcacgagtgatgttcagtttgctaggcactagtcatagtgttatggacgtggtggagtgtaaggtcttgatgaattacggcagtatgcagaaaaggaaccaaggccagagagacaaataatgcctcatgtcccactgctttaaaattacattaatttataaaatggccactatgggctctttttgactgtttctcggagtaggaacaaaataagacattaaatggtggcttgaagagaaagatacacattttcagaagaaagaaaggggagggctgcagggagcctgtcttggcgggagctctccagtctgttggattagcacagggacacgcttatggtgccatgacgccgaaactagtcatcccccatctccagcataggcaacggcctgcaggggtgagtgtcagaaaagacttactttggaagaaaagggtttttttttgtttgtttgttttttgtttttttttgtttgtttgttttgggtttttttcctgaaatttcctgatacctttttcagaatgtcacccttgtaaataggcacctaaagccaagttggtcagcagagctcctgaccacggctgcctctgcgtgacaaggacatttgcagctgcctttggaaggctcttcacattaaaaaacaataattatgtaagtgtgtttcatagcttgagtcaagctttcaaggatcactgctcctttgtgcattgtgcatccctttggggaaagaaacagaaaattattctctttctatagagtcaagcaattccagcagaagtgaagaaatgttagtttcccagaaatcgcagtggaatagaatacaatactgtgttaaccaactttctgtataaatgcatcagtattcccttacatatgtctatatattttataatagaactgttagtgaaaatgtgcttgtttaagctgggtcactatgcaagagttacttccagtagaatgtagtgaatgtaattccctagtcggatattagggatgctgtagacccaagttctacattccagatgtccgtgcctatagtatactggatttattcttcatgttgcttaaatgcagttagctctggagggggatagctgcatcccttacttctgtgactagcaaaggacaaagtcccagcgcacagaatatgaaaacataccctgtgttagccaatcaagttacagcaatgctgtcacaaagggagttttagaaaactggggagtcattgtccgtagacagccattttgatttaggaaacaggtgtattagcatgagccttaggtcatgaactgcttttaaagattgagtttgaatatgggatctgtccacgaggaagagaaaatggctttacctttaggacaatctcattgtggactgctttatttatattattagtaacgctgttttaagtgttattctttttattgtattttatttataaaaaatgcctttatatattgaaatatataaatatatatatataaacacacacacacacacacacacacacatatatatatatatatataattgcctttatatttaggcggtatgagttctccctaagcgtgagttggctctgccctgcacaggcacccaaacagtcctacctaatgtcacttcaccaggaaatgagaggacatggtacagtgtgggagacagcactaacacgtgctgaataactactgtgtaccaggcactgtgctcggtgcttgttactgttaactcatttaacccccacaactcatctacaaagttggcattaaaatccccaagtcactcagtgagccatgggacctgaatccgaacctagtttatctggagccataatctgggctcctcccatttttccatactgctttccaaaagcattgtggttcactctttggatggaaccagtcccgttccgtatgctgtgatctatccctgccgtggaattcctccgaggctccaactccgcagccagagaagctgctctctggcctccgcgggcagagctctgcttatgacttcgtcttccagaggtccacatttctccccttgacgccccctgtctaccacctccacctggaaatttgatctttactgtgctcagtgatcacgaaattggtcaagcctattcatgttccttctcatctagaattctgtgtgattgttttagcataaactgccccgctcccactgtatcatttcacgatctccttttaatgtttttctttcagttttgcactgacagtctggtgacaggtgctgccagggtgcaagttacattgcaatgttctaaaccttttgaagtgttcttagcaaaagcctttctttctgggtgtttttgtcgaatgagtctatgaagactcaatgcatccatcttgggctgatcatgccacagatctcattccagctatagtactgccaagaagtgaagtttatcattgaattttacctgtgttgctctcttttaaagtaatgactttgagatgcatgctttgtatcatattgaaaagtatgttttattttccttaaagttgtaatattgtgtgtgaaactgtacatattttaaatgatgtagctttggcaggttttatttggttgatatgattttatattaaaagagaaggctgctttcatatagcatagcccctgaaggtgggaatactccctgtttgtacaacgctgcttatagtttgtgattggggtgggcgaatgtcttcctctgaaattctttggaaccccccacccctgtcctcccctgaaactcccctgtgcacacccctctgttctgactgcagagatcaaggccctgaaggagcaggatcttgggcaagtgttttaggggacgctgagaacatacctgaccctgggggcgatgtggaggcaggcccacctcctcggggcaactttgcgtttccttggagggaagggaggtgggtaggagaggagcttgggaggatgaggaggagcggtcccgcctcacacattgtctatttttaccattaaccgagcgccacatgtttatgaacttcaggatagaaatttagcctccttgtgaaaacgttttgttttactgccctaagaaaatacacatctctaggcttgtctgaccagaaagccagcaaagtcttttgcatcgggtgtggcccttttgtattttatttcccatatttaaataagccttccttaaaccctagccccagtcctgagagctttgagggtagccgaaaccccttatctaataaagtctaactctgtgagaaccacagaatcttcttaagcttctcaattttctgtctcctttcaggcgccacgtcccttgtgctggcgggtcccccgttggctttcttgccgtttcttctcatctgtgtctcctgcagaggcggctcggagtcccgagtcttctagtcagttgaacaagcattcatttgtgttttcacccagattacagacacacacacaaacagacacacacacttggagctagtgagtcatgctggcagctgacattgtgactctggaacagccccggtgctctgtgggccagctcccccagcctgggggcgggaagctacatctgcagtacctctgctccgtatcttgtgggctgcgactcctggagtcggaccactgcagcgtcagtgatgttcgtaagctatggttgagcaaaggaacacacacctacacaccttgcttcttcccactagccaaacctgggacccagccatcagcctgtctctgtgggagtcgcaatggaagtagccctctattggcgtgaacatcagctctgatttatttaggaattgctccatccacagactttttttctggaagcagctagcttgctcatacttctatagcaccacagatccttcccagtaccatggctttcacttgccctcagacacccagagatccctgtctccccattgtgggtcctcttccttgtcctgccacctctgtcttccacaaggtgggccagggcttctcttgtaaccatgtcacttagggacactgcagctgggccttgtaccagttgtgaagactgggtattaagtgaaagtggtagttggtgtcttagctacgttggttttatgaccaaagtctgacagaagggctcttcccaaatcccacctgccctccctaagcctatttgcatcttcctctttgggccttatggtgttgcagtcactgtgatggtgacattcactggagaatccgtggtttcttgtgcaggatccaaacctggggtggtggttggtgtttcaaggcctatgaagagcatatgtgggc

SEQ ID NO: 5299 - DNA, 4186 bp, Homo sapiens
  source 1..4186: mol_type = unassigned DNA
gtctctccaagggaatgaaaggtgaggggagcgtgagtgcaggcatgatgggaatctccgtgacttgtgaaccaaggactgggttttgctctggaagcctgtcctgattgcttctgtaatctggcgctatgcatccggatcttggacccttatgtacactgctgtatgttactcttacaattctgtgctcttctgtgagttcagacttggcaccttattttacttctgagccgctctctgctgtccagaaacttggtggacctgtagtactgcattgttctgctcaacctgtgaccactcgtatctcatggctgcataacggaaaaacattggatggaaacctggaacatgttaagattcatcaggggactctgacaattctttctctcaactcctctcttttgggttactaccagtgccttgccaacaatagcatcggtgccattgtgagtggccctgcgacagtatctgtggcagttcttggtgattttggttcatccacaaagcatgttattacagcagaagaaaaaagtgctggtttcattggctgcagggtaccggagagtaaccccaaagctgaggtgcgctataaaatccggggaaaatggctggaacattccacagagaattacttaatccttccatcaggaaatcttcagattttgaatgtatccttagaggacaagggatcatacaaatgtgcagcttataatcctgtcacacatcaattaaaagttgaacctattggccgaaagctccttgtgagtcgtccttcttcagatgatgttcacattcttcaccccacccattcacaggcattagctgttctttctcgtagccctgtaaccttggagtgtgtggtgagtggggtcccggctcctcaagtgtattggctaaaggacgggcaggacattgcaccaggaagcaactggagaaggttgtattctcatcttgccactgatagcgttgacccggcggactccggaaactattcctgcatggcgggaaacaagtctggagatgtaaaatatgtgacttacatggttaatgtacttgaacatgcttccatttctaaaggactacaggatcagatagtgtctctgggtgccacagtacactttacctgcgacgttcatgggaacccagcccccaactgtacctggtttcacaatgcacagcctattcatccttctgcacgacatctaactgcaggaaacggactgaaaatcagtggggttactgtggaagatgttgggatgtatcagtgtgtagcagataatgggattggatttatgcactctactggaagacttgaaattgaaaatgacggtggattcaagccagttataattacggcaccagtaagtgcaaaggttgcagacggagactttgttactctgtcctgcaatgccagtgggctgccggttccggtcattcgttggtatgacagccatggattgataaccagccatccatctcaagtcctgagatcgaaatcccgaaaatcacagttatcaagacctgagggcttgaacctggagcctgtgtacttcgtcctgtcccaagctggtgcaagctctctccatattcaggctgtgactcaggaacatgcggggaaatacatctgcgaagctgcaaatgaacatggtaccacacaggcagaagcatctctcatggttgttccttttgaaacaaatacaaaagcagagacagtcacacttcctgatgctgctcagaatgatgacagaagtaagagagatggttcagaaactgggttactgagctcatttccggtgaaggtccatcccagtgcagtggaatcagcaccagagaaaaacgccagcggcatctctgttcctgatgcccccatcatactgagccccccacagacccacacaccagacacgtacaacctggtgtggagggcaggcaaggatggtgggctgcccatcaatgcttactttgtgaagtatcgaaagctggatgatggggttggcatgctgggaagctggcacacggttcgagtcccaggaagtgaaaatgagctccatttagctgagctggagccatctagtctttatgaagtcttgatggtagcaagaagcgcagcaggtgaaggccaacctgccatgcttaccttccgaaccagcaaagaaaaaacagcgtcatcaaaaaacacccaggcatcctctccacccgtgggcatccctaagtatcccgttgtttcagaggctgcaaacaacaattttggagtggtacttacagattcctctaggcacagtggagttccagaggcaccagatcggcctaccatctccactgcatcagagacatcagtctatgtcacttggattcctcgggcaaacgggggttctccaatcactgccttcaaagtcgaatataaacggatgaggaccagcaattggctggtggcagctgaagacatccctccttccaaactttcagtggaagttcgtagtttagaaccaggttcaacatacaaatttagggtcattgccatcaaccattatggtgagagttttcggagttcagcatctcgtccttatcaagtggttgggttccccaatcgcttttccagccgtccaataactggacctcacattgcatacacagaggctgtcagcgatactcagatcatgctaaagtggacgtacattccatcaagtaacaataacactcccattcaaggattttatatctattaccgaccaacagatagtgacaatgacagtgattacaagagggatgttgtagaaggttcaaagcagtggcacatgattggccacctgcagccagaaacctcctatgacattaaaatgcaatgcttcaatgaaggaggagaaagtgaatttagcaatgtgatgatctgcgagactaaagtgaaacgtgttcctggagcttctgaatatcctgtcaaagacttgagtacccctccaaattctttgggaagtggaggaaatgtggggcctgcaaccagccctgccagaagcagtgacatgttatatctgatcgttggctgtgtgctgggcgtcatggtcctcattctgatggttttcattgcaatgtgcctgtggaagaatcgccagcagaataccatacaaaaatatgacccaccaggatatctctaccaaggatcagatatgaacgggcagatggtggactacaccactctctcaggagcaagtcagataaatggaaatgttcacggaggcttcctaaccaatggcggtctcagcagtggctattcccaccttcaccataaggtccccaatgcagtcaatggaattgtgaatgggagcctaaatggagggctttactccgggcacagcaactctctaaccaggacacacgtggattttgaacatcctcatcatctagtgaatggtggtggaatgtacacggccgtgcctcagattgaccctctggagtgtgttaactgccgaaattgtcgaaacaacaataggtgtttcaccaaaaccaacagcactttcagcagcagccctcctcctgtggtccctgtggtagcaccttatcctcaggatggtttggaaatgaagcccctcagtcacgtgaaggtgcctgtatgcctgacttccgcagtccctgattgtggccagttgccggaggagagcgtcaaggacaatgtggaaccagtccctactcagcgtacctgctgtcaggacattgtaaatgacgtcagctctgatggctcagaagatccagcagagttcagcagaggagacagctgtgcccattcagaaacagagatcaacattgtaagttggaatgctcttattttgccacctgtccccgagggctgtgctgagaagacaatgtggtctccacctggcattcctttagacagcccgacagaggtccttcagcagccccgggaaacctgaggacatgcaaacaaccagtcatgttccaacttcaagccggtaactgcacacaacaggcctgggagcgaactgtgtgaaggaccttaattcaaatcagagaaaatcattatttatttttttgtagtagtaatgtcatatgaatgtatcttaaaacgtgtgcccttttatattatttatgccttaaatgttttcttccccattccttcctccccctcggtaggaaacaaccttgttttgcatagtattcagtcacctggagggca

SEQ ID NO: 5300 - DNA, 4461 bp, Homo sapiens
  source 1..4461: mol_type = unassigned DNA
gcggggcgggaggggcctgcgcggcggcgggagcccagagccgcgctaaagcgggtcaagcgtcctccttttctccccgccccttctcctcctcctacctgggcctctgcgtggagacgcgcacctggcaaccggaggccgcgtctccgccttctctgctcgcgcctggcgcccggagcctgcccgggacctccgccggagccgcgctcgctgcaggcggcctcgagcgctctctcgttgatgccgttttggaggtgaccggcgcggcggccgctctatggtggggccgcgttagtggctgcggctccgcgggactccagggcgcggctgcgaggtggcggggcgccccgcctgcagaaccctgcttgcagctcaggtttcggggtgcttgaggaggccgccacggcagcgcgggagcggaagatgttggagctgaggcaccggggaagctgccccggccccagggaagcggtgtcgccgccacaccgcgagggagaggcggccggcggcgaccacgaaaccgagagcaccagcgacaaagaaacagatattgatgacagatatggagatttggattccagaacagattctgatattccggaaattccaccatcctcagatagaacccctgagattctcaaaaaagctctatctggtttatcttcaaggtggaaaaactggtggatacgtggaattctcactctaactatgatctcgttgtttttcctgatcatctatatgggatccttcatgctgatgcttcttgttctgggcatccaagtgaaatgcttccatgaaattatcactataggttatagagtctatcattcttatgatctaccatggtttagaacactaagttggtactttctattgtgtgtaaactactttttctatggagagactgtagctgattattttgctacatttgttcaaagagaagaacaacttcagttcctcattcgctaccatagatttatatcatttgccctctatctggcaggtttctgcatgtttgtactgagtttggtgaagaaacattatcgtctgcagttttatatgttcgcatggactcatgtcactttactgataactgtcactcagtcacaccttgtcatccaaaatctgtttgaaggcatgatatggttccttgttccaatatcaagtgttatctgcaatgacataactgcttacctttttggatttttttttgggagaactccattaattaagttgtctcctaaaaagacttgggaaggattcattggtggtttcttttccacagttgtgtttggattcattgctgcctatgtgttatccaaataccagtactttgtctgcccagtggaataccgaagtgatgtaaactccttcgtgacagaatgtgagccctcagaacttttccagcttcagacttactcacttccaccctttctaaaggcagtcttgagacaggaaagagtgagcttgtaccctttccagatccacagcattgcactgtcaacctttgcatctttaattggcccatttggaggcttctttgctagtggattcaaaagagccttcaaaatcaaggattttgcaaataccattcctggacatggtgggataatggacagatttgattgtcagtatttgatggcaacttttgtacatgtgtacatcacaagttttataaggggcccaaatcccagcaaagtgctacagcagttgttggtgcttcaacctgaacagcagttaaatatatataaaaccctgaagactcatctcattgagaaaggaatcctacaacccaccttgaaggtataactggatccagagagggaaggactgacaagaaggaattattcagaaaaacactgacagatgttttataaattgtacagaaaaatagttaaaaatgcaataggttgaagttttggagatatgtttctctctgaaattactgtgaatatttaacaaacacttacttgatctatgttatgaaataagtagcaaattgccagcaaaatgtcttgtaccttttctaaagtgtattttctgatgtgaacttccttccccttacttgctaggtttcataatttaaaagactggtatttaaaagagtcaaacactataaaatgagtaagttgacgatgttttaagattgcacctggcagtgtgcctttttgcacaaatatttacttttgcacttggagctgcttttaattttagcaaaatgttttatgcaaggcacaataggaagtcagttctcctgcacttcctcctcatgtagtctggagtactttctaaagggcttagttggatttaaaaaaaaaaaaaaaagattgtctacttttcaaagaagtaaccatttgccaggggaaaacattctgcttttaggtagtttcaaaattcaggggagggagcctgaaatttttgccatgattggtttgttagaaagagcaggcatcagactacttctgataaaattgtttggaaggtcacgacctcgcaaaaacttttcaagagcaacaaggaagaattctgctgtgaagaacacagtgtacggatcctccgcatattatctcaacagaggacagtagctcaggaggcagcttcaaacggtgacctgtggcctgggccatctcttcgtcatgtgcttcacttttccctgtttccctgtgaactggcttccatggttctgtagggtagtgagtcggggttgtggctgcagcagagcaggagatgcttgcccgagtgggagcaacccacccccgtgtccccaatgcctcactcctggcttctagtgcagccctttgtagactcacctcgcaagaaggaagatctgcctggagacctgatcccagtccagctttttgaccataggtcatctttgtccccttgctcctttgcatcatgtcataaaatttgaggatatcagctgattattttttcttccaagaatgaaaatcaagcagaattgattcctacacgaaaaaaaagcacacgaatgccaaacctttcctttggtggactggacactaaccagatgagagtaaatttcttatccgtggacgtatgtaagctactgctgctgtgtgctctccacagccatatttattgtattaaacaatcagcactaaaccttcaaaaattgcccagtgttcctagttaaatgttcagaggggagaaatagatatattttaaataatgttttgctaatgaaaagagtaaatatttttgtttaaatcagcaaaaactttccattattttatatttccgtctactatacctaaaacaaaagattgccgttatacctgggttccactgatgcagtcagccagcacctcctcacatgcacacatgattagacataggtgcactcggtaccaagagtccattttatggtccagcatatactccattgattcatcatcactgcatgtgttcagccagtgtatctcacactatccatacaaatctaaaattgatactggaaatgttattataggaggcagtgatcgcatttaaaatcaggccacctacaagtttaattttcaacatctcatgtttttatttgtcccattacagcctcaaatgttggtcataaaaaaaatttaggctaccaaagtttaaagaataaaatgaaaattttataagaacttacattaaaaactcagtagtttgcatgagtaagaactccttgagatacacagatccccccacatttgtatttaaaataattggtgaggcattgaaatccagaattataagaaagcattactgaatatgtgtgttataaaatcaatattattataaacaaaataggaagctagaaatatttgggatcacagtaatagcttttctcaaatatacttttagaattgaatgtacattatcctatatgtaaaaaagcaaattattaattttaatggagctctcgattgacctttttagcatacttttatagcatgtatattaaaatagaatatattttagcaaaagattgccataaaaccctgacttggctcattttgatatttgcactgtgaagagggcttaaattccaatgtagcaatgtggtggcagacaaatgaaaaactaggaagttctttcacagtaatgcctagttgttccaaatttgctatatttggaggtgctctactggtacttcctgcttgactctctgacctgtgggatgcacattcttcctcagcgctttttccttgttgtggtgacgtacattcactatctgagagtgaaagaccacacacacccctctttttaaaattattgtatctcttccttttcactttggtttgaacaaagatagtgtcaccttgttccgtgaaaaagaaaaagcataaacagtgtatatttagggtatatgggtgatagcttatgatgtgtgtcaatcagttctctgaatcttttactgaaactgagacaggaaaataaaactgaaacaaatcatatttt

SEQ ID NO: 5301 - DNA, 1264 bp, Homo sapiens
  source 1..1264: mol_type = unassigned DNA
cgctcagagccgcgcgcctcccgggcggggcggggccggccgtgggagtccgcgcgtgcccgcgccgagctgcctgctccggcggcttcgctgctagctcgcggcgacgtcgggccgattttcccaggatgacagagctgaggcagagggtggcccatgagccggttgcgccacccgaggacaaggtactttctcctgtgtgtaaactatttcttctatggtgagacagtgacggattacttcttcaccctggtccagagagaagagcctttgcggattctcagtaaataccaccggttcatttcctttactctctatctaataggattctgcatgtttgtactgagtctggtcaagaagcattatcgactgcagttctacatgtttggctggacccatgtgacattgctgattgttgtaacacagtcacatcttgttatccacaacctatttgaaggaatgatctggttcattgtccccatatcttgtgtgatctgtaatgacatcatggcctatatgtttggctttttctttggtcggaccccactcatcaagctgtccccgaagaagacctgggaaggcttcattgggggcttctttgctactgtggtgtttggccttctgctgtcctatgtgatgtccgggtacagatgctttgtctgccctgtggagtacaacaatgacaccaacagcttcactgtggactgtgagccctcggacctgtttcgcctgcaggagtacaacattcctggggtgatccagtcagtcattggctggaaaacggtccggatgtaccccttccagattcacagcatcgctctctccacctttgcctcgctcattggcccctttggaggattcttcgcaagtggattcaaacgagcctttaaaatcaaagactttgccaataccattcctggccatggaggcatcatggatcgctttgactgccagtatctgatggccacctttgtcaatgtatacatcgccagttttatcagaggccctaacccaagcaaactgattcagcagttcctgactttacggccagatcagcagctccacatcttcaacacgctgcggtctcatctgatcgacaaagggatgctgacatccaccacagaggacgagtaggggccacccagggccaggagaacaggaacagaactgagcaggggcaggtctccaaggcaagcccagctggtgtgacttagacaatgacgaggcttcaactcactgtcttttttttttttttttggagggt

SEQ ID NO: 5302 - DNA, 945 bp, Homo sapiens
  source 1..945: mol_type = unassigned DNA
ccagggctggctgctgggctgctaagggaactgtgagccgctcagagccgcgcgcctcccgggcggggcggggccggccgtgggagtccgcgcgtgcccgcgccgagctgcctgctccggcggcttcgctgctagctcgcggcgacgtcgggccgattttcccaggatgacagagctgaggcagagggtggcccatgagccggttgcgccacccgaggacaagatggaagaactggtgggtgagaggcatcctgactttggccatgattgcatttttcttcatcatcatttacctgggaccaatggttttgatgataatcgtgatgtgcgttcagattaagtgtttccatgagataatcactattggctacaacgtctaccactcatatgatctgccctggttcaggacgctcagctggtactttctcctgtgtgtaaactatttcttctatggtgagacagtgacggattacttcttcaccctggtccagagagaagagcctttgcggattctcagtaaataccaccggttcatttcctttactctctatctaataggattctgcatgtttgtactgagtctggtcaagaagcattatcgactgcagttctacatgtttggctggacccatgtgacattgctgattgttgtaacacagtcacatcttgttatccacaacctatttgaaggaatgatctggttcattgtccccatatcttgtgtgatctgtaatgacatcatggcctatatgtttggctttttctttggtcggaccccactcatcaagctgtccccgaagaagacctgggaaggcttcattgggggcttctttgctactgtggtgtttggccttctgctgtcctatgtgatgtccgggtacagatgctttgtctgccctgtggagtacaacaatgacaccaacagcttcactgtggactgtgagc

SEQ ID NO: 5303 - DNA, 9298 bp, Homo sapiens
  source 1..9298: mol_type = unassigned DNA
gaccgtgatggtggcgctgcgcgtgcgcactcgctccgagccctgctcccgggagagggagctctcgggtcggggctagggaaggctgaccccgctcggcccgggtgaaagggcggtgacggcactgggtggggccgagctccagggctggctgctgggctgctaagggaactgtgagccgctcagagccgcgcgcctcccgggcggggcggggccggccgtgggagtccgcgcgtgcccgcgccgagctgcctgctccggcggcttcgctgctagctcgcggcgacgtcgggccgattttcccaggatgacagagctgaggcagagggtggcccatgagccggttgcgccacccgaggacaaggagtcagagtcagaagcaaaggtagatggagagactgcatcggacagtgagagccgggcagaatccgcacccctgccagtctctgcagatgataccccggaggtcctcaatagggccctttccaacttgtcttcaagatggaagaactggtgggtgagaggcatcctgactttggccatgattgcatttttcttcatcatcatttacctgggaccaatggttttgatgataatcgtgatgtgcgttcagattaagtgtttccatgagataatcactattggctacaacgtctaccactcatatgatctgccctggttcaggacgctcagctggtactttctcctgtgtgtaaactatttcttctatggtgagacagtgacggattacttcttcaccctggtccagagagaagagcctttgcggattctcagtaaataccaccggttcatttcctttactctctatctaataggattctgcatgtttgtactgagtctggtcaagaagcattatcgactgcagttctacatgtttggctggacccatgtgacattgctgattgttgtaacacagtcacatcttgttatccacaacctatttgaaggaatgatctggttcattgtccccatatcttgtgtgatctgtaatgacatcatggcctatatgtttggctttttctttggtcggaccccactcatcaagctgtccccgaagaagacctgggaaggcttcattgggggcttctttgctactgtggtgtttggccttctgctgtcctatgtgatgtccgggtacagatgctttgtctgccctgtggagtacaacaatgacaccaacagcttcactgtggactgtgagccctcggacctgtttcgcctgcaggagtacaacattcctggggtgatccagtcagtcattggctggaaaacggtccggatgtaccccttccagattcacagcatcgctctctccacctttgcctcgctcattggcccctttggaggattcttcgcaagtggattcaaacgagcctttaaaatcaaagactttgccaataccattcctggccatggaggcatcatggatcgctttgactgccagtatctgatggccacctttgtcaatgtatacatcgccagttttatcagaggccctaacccaagcaaactgattcagcagttcctgactttacggccagatcagcagctccacatcttcaacacgctgcggtctcatctgatcgacaaagggatgctgacatccaccacagaggacgagtaggggccacccagggccaggagaacaggaacagaactgagcaggggcaggtctccaaggcaagcccagctggtgtgacttagacaatgacgaggcttcaactcactgtcttttttttttttttttggagggtattttttatttgtgggttcaaaaaatctgtatatacagtctatgtgtttagaatttgtgttgtaagtaaactacagctttgagttggaaagaagtcacgggttgtaaaaccatttggatttttttaaaacaaaagtattaataatctggaagacagtgttgcccaggtcaggagtgttttcttggtggttccagcccccatcaattgaactgtttctgggctcagtcagacacagacattcatctgtgtctgaccaaatcaggggacttccccacctgtggtgggaggcacagcttagatgttttgtacacctggtcttttctagaaatccctgcttggagctgcagaagggttgccttctgtaggtcggaggaatggaggcttactaaccaggtaagccttctatgcatccacaccaaaatcctgcagaatgtaagtaagctctgctttataagatgggttcaccttcatcgcagactgaaagtttcagtttttatttttttcagaaagcacgaaaaattatttataatagtctggagaaaaaacacactgtaatatttcaagtgtatgcagtagaatgtactgtaactgagccctttcccacatgtctaggctccaatgtctcctgtaggtccacctaactgtgtgttttcagggacaatgccatccatgtttgtgctgtagacttgctgctgctgaatcctttctggggactttctcatcgggcagggagcagagggcttctcgttcatgcaccctttgcctgaacacccatgtagctgctgtgttgtgtatatattactcttaagaggagtgtgtgtgtctgtgtttgttttaaaagtcacttatttcttacagtgatttcaattgcaccatgacttcttcactaaaaccacaaagtcctgcttaaaactatggaaaacctaacctgattagagccttgactattttgaagattaaatgcacactttttatataatgtgaccagtttaaatgtagtttgtattgtactgggggacctttcgttgttgttgtttgcttaaactgtgattttttttcccctccctaatttcaggggtgagattgactttgggaagacagattagttctttgtcaggccaacaagtgatggagtgcgggagagagaacttggcacccaaatatatcaaactattccgtgccgtggatgttttcattgccaacgagggtgtaatgatttgcttctgcaccttggtctagtgctggtttgtggtgtttttgtttgtaaattagcctcactgcctccctgaaagtgcacagtcagcccaggtctctagagtgtccagcagaggatggagccctcgggatgtttcagctcacacatccttgagtgacttcccatatgtgtgtggggctgaagcggcttctttccgctgaacttttatttccatttcagcctcgtggcttctcttattcaggtccaaggccccttaaaaacaaaacatattatcgcaagggctttcatttcagtattggctgtgtcactggcaggatgcatcactctccagggcctctttttcggagctactcccaattccactcttctgtgattctggctgagcaagttcatgccggtagaggctcattaagtgaggtcctgggcaccccccaaacaggaagtgttttcaggcccttacatgcttatccttaaggtgagtaggtatctcagcagcacacccgaacagtaaaggtgatcaataacgaaactgtagttttcagattgaagaatgaacctggatcaccaaactagataccgaaagggctcctcatttgtctcttttgtcccattgtgggcatatggtgggctccttgagaggagggagtctcagctggggcctggctgcagagacctgctcttgaatagggctgcctttgggatcagggagccgagcatactgggcaaggctcatcatgttcctttgtggaagtggttacttggtgggggtggggtggggaaggggggtctaggaagccgaagctgagtgcgcactagagctgctagcaggcaggccagagggtcagcttgtgttttattttctgatttctcctgcatgctttctggagatgaggattttttgtcaggtagctaggagagcactgccaccttgtgtccatatagcacaatgtttctctttcctattcacagacaagattcaagaaaccatttttacgtgtgtacattcaaatcttcatgaatggcatcacttgctttagacccattttttttttattggtcagaaataaaatgtgactgcaactgtgtgccctcccttgtcgtgaattccctgtttatcacttccatgcatggttttatgcttctcatttgtttatgtattcatgaatactgcatagtcctgattcagagacttttgctttgctttccaacttgtatccctacattctcacaacagccttcttacctcgggtgagagtcatgagcaccttaccaggcagggagcttccccaggatagtgtggtggagtcaggactcactccatcctgcactttacccacaggacacctggagggtcccccagccctgcttgcttttgtgaacgtcgtgtgagtacaccgaggtgttgcagctttccttccctctagctcaggaggcctggcctgagccaggttggagcttaaattgctgttggctcctgcctggtggaacaagggggtcatagaaaccagggctgatgggcaccccccagcccctgggagctctgctcatgaccgctcacagggtaccgagtctttgccttttgtgtgtgcgcatgctgccctcttaactgcttttagtattcagaaaggttccatttatgttttactcctgaaagtgaaaccctcttaggcaacttgtttcatattctgggcattttagtagctacagtattttgcatttaaaatgtaattactcttagtattgtacagccctataatgtatgagaactagtttcacatcctttgaaactaatctctttcattggggaggatacaacttttgactttacacaggtggactttgaatccatttttatagaatttttttccactgtaacttgacctatattatgcaagaaaatcccaaaaatatgttttaagggagactacacagaccttgtgatttggtctgagctagttgctgagttgactggagccttatttgaatggatctttgagttgagatcttcacactgtcagtgagcccttggctcagcccttgtcacctgtttgtatggggaccatgtttcccaaagctcaggttcatctccactattgacagagtcgggtagtgggagagtataagtgacttgagacagagtgtccttgctcagaaaactgtgaagcaggggtcttgttagttacaaagccagtcctagttgcatgtccaagggggtagattttcatcaccctactaaatgtggtatgtcactgctgaagccttttcctgttttagtaatatcttaggcactattgtcttttgtcttccagagtaacatatctgggcccacctttcttgcacactgtgattatgtgctaagaaaagggtggagttgggaggacaatttcacttgaacaggtttctgttcttctgaggtcagggtggggaggatgtccaggtgacttttatggacacattgcaagacagtaagccgcggatggactctcacttgtgctttggaacactggactccaaagagcaggtggaacaaactctggcctgaagatgatggctaatactcaggcagagccccgtattcttccctgacttggtcaaaacaaacttccttttcccttgatcaccctgcacgcagctgcccagcttccagtttttaaagagatgaacagctctcacttcctgactcagtttctcttgttgggtgggggccttgtgccacaacctgcatggggtgctagggtttaaaccaagtggtcacgaaggattcttatctcagggctctgcctggcccaccttctcttgggcctggactctccttatccacatccctgcagaaggtgggccctattctcagaagagtcctggctgctgttgccatctgaatgcgcccttccctttcaggttgaccagcagtggccttacctggcctctcaggtggatggaggctgttctcatctggggctgtctcttgattaaggctgtcacctgtttgtatagggaccatgtttcccaacgcactttgagtgcagtttaggaggtatcctttggatgctgaagtgttgggattttgaggacatgcggatgatttatgagaatagaggggcagagtttgtgaagtctagggttttttgtccagtgggtttcaaatttgttggctgtttaaagaccctgtctcctcccccaccctccccttccttttcccatcaaatgcctacctactgaggcgccttctctttttattcttgagccaatgagatatcagtgtgtttattaataaggattgcaatagtatagtgcttaatatgtgccaggcatagtgctaagggtttacatacgttatcccttttaatccagaaaacagcctttgattaggtattgttgtctccattttatagatgaggaaactgaggcagtatgactgaggccgagagcagtggttaagacagactttgggatcaaatcaccctaggtgcgggcaggtttctaggctgctctaagcttctaccttgaaggcagttgggtctgataatagtaccttcttcctggggtggttgtgaggatataacgaggtaatgcatgtaagcatttagtaccatgcctggcacatagtaagcactcaataaatggtagttacttttgttgagctcagctggtagtttgacctccgttggtgcaatgccagagatgggattgtcagccaccacactgccaccaccctgcacacagtctgggtccctccgagagaagcacgccaaccttaacatcccctacagcatcttggtgcttcacacaccatttaggaggccaccctaacgaggcaagaggacatgggggtgtgcagaagttctgttcttagtgagaatggctggcctgagaatccagctcacctcctctgcccacagtctggactgcttgtgggaaggccatctcctcctgtctggtggtacctccactctgggcagggagggcctgtctgtgactcgctctggaccccacttcccgctctggccaagggctgtcttctgtgcacatagctcaggagcctgcagcagttccctgtatgggtggatgtcctcaggggccaagaagagaagaatggggacaacagaaacctgctttgtaggggattatgtagactaaaagcctagaagttctgcccacatccttatgacgcagccaatctggagcttcatgtttccttctaaaagtagtaaccgggtagaagtgggtgacccattgaggacacatgatgtgaggtatttctgccggattctaggttagcaaagactcaaatgggtgactcatgaatgaagggagaacaggcacaggacttaatgaaaagagtttcttgaacttagttttctgaatgggggtggggagttggggcacgtgtgtgtaaggggaggctgcctcactttgaaggaatggtgttggctaacaggatccatgaaattcctaggtcagttgaataataactgaactactggtttgactgtggattatttcctgggtattagtgggacccaacagcacattgctattaatagtatggaaataatggtccctctgtttcattgaattgctgaagtaatgataatgccatgaaccaggagaagatggttgtgggggtttctaggaagcagctgctgtgacaggccaatcccaggcttgcccccgagccctcctgtccttctgggtttgtgtttgccttgcctggtgcttcctccctcattgtgttgttgaatagacctaggcagccttgtatccatagaaagcctccactgctgggccggggagggggttgtggtaagggccctctggaaatcaagcagagaatgcctttgcagtggtctcccgggcattgggcagggcctagccttttgcagcccccagaggaccttgcctgcataaagcactcagaagggttagccacctggtgattttgtctctagtgaaactgtgtttgccgataatcatccacatagccacctctgtcctcgcagtttggatgcctttttttgacacctgcgctaggttcttgtatgctggcttttcttaaaggaacagcagagtagaaaagaggttgagaatgttttctagcaggcagaatgtgcatacatgttttcatgagtgtcctttgggtgctgtttcttttaaatcctctgtgcacagggctctggcctttagtaaactgtttttctgtcttacgtcatgctgactgggtgctaggggctgattacaaaggggaagagttgaacagacatcaggggccgatgaaaccaaaggactaggagtcaggagaacaagtcagggattaggagacagcggtttggtttattgttatccagctggaggactcctaggggcagcagcaggaggaataccagggccacggaggggccaggagtctcacagtggagggcagactctaacagatgccagctgaacgctcgctggccctggatgtcatacgagttggggaccagaaatctgggctcagagaacccgtccagggagatttgaagccatgggttatcttctagagttgatactgataatatattttaatttttattgatgtttaataccttctgaaacaggagggtaagatcagatgggaagcccctctgttgaaggatcttgggaaccttggtggttttttttttttttttggttttttttttttgatcgagctgtggacatccttcttaattcgattctgaggatttgtttaactaaaaagttcccaaacacagaaagggcctccccacctgctttggggagctgtctgtgctgggagtgccaggcatcccatgggacccatcactgccagtgtctgtgcctcccagaggtcagccgtgtctgccctggctctgtctcctctgtgacagggcagagcatttctggtcagtttctccatggtgcctcccacccctttgtaaagtggatggacatgatggaattcagttgtctcaccctgatagcctgggtgttgatattcactttacccgcactcagacacaggcgaccttgaagcagttctcggtgtgtagagtccacgtgacagtccccacagcctccccagatagctgtgtgcctgtgcgctactgctgtgccattttcccaacttggcgtttcactaaatgcagctgatctctctctctgtgcactcgtgatccatgttgaacaatacatgtaggttctttttccacgcaatgtaagaacatgatatactgtacgttggaaagcatttaccttatttatatacctgaatgttcctactacacaaataaacatatattaaattcta

SEQ ID NO: 5304 - DNA, 914 bp, Homo sapiens
  source 1..914: mol_type = unassigned DNA
ttctcctgtgtgtaaactatttcttctatggtgagacagtgacggattacttcttcaccctggtccagagagaagagcctttgcggattctcagtaaataccaccggttcatttcctttactctctatctaataggattctgcatgtttgtactgagtctggtcaagaagcattatcgactgcagttctacatgtttggctggacccatgtgacattgctgattgttgtaacacagtcacatcttgttatccacaacctatttgaaggaatgatctggttcattgtccccatatcttgtgtgatctgtaatgacatcatggcctatatgtttggctttttctttggtcggaccccactcatcaagctgtccccgaagaagacctgggaaggcttcattgggggcttctttgctactgtggtgtttggccttctgaaaacggtccggatgtaccccttccagattcacagcatcgctctctccacctttgcctcgctcattggcccctttggaggattcttcgcaagtggattcaaacgagcctttaaaatcaaagactttgccaataccattcctggccatggaggcatcatggatcgctttgactgccagtatctgatggccacctttgtcaatgtatacatcgccagttttatcagaggccctaacccaagcaaactgattcagcagttcctgactttacggccagatcagcagctccacatcttcaacacgctgcggtctcatctgatcgacaaagggatgctgacatccaccacagaggacgagtaggggccacccagggccaggagaacaggaacagaactgagcaggggcaggtctccaaggcaagcccagctggtgtgacttagacaatgacgaggcttcaactcactgtctttttttttttttttt

SEQ ID NO: 5305 - DNA, 8013 bp, Homo sapiens
  source 1..8013: mol_type = unassigned DNA
agggatcctacctcttttgaccggagatgttgaaaagcacgaccaaagtttttggcttggtctcttgctttccacaacgagataaagtctgaagcctgtaactctccctgtcccgcgggagcgtgcaaagggagggaagataagcggcgtgggtgaggggtggcggcgcagaacccaggaagggagcagaggcgagagccagcctccggcaggagggcgtagaccccggtgccagccagaacggctccagccttcccgcggccagagagccagcggcgggaggggacgggcgggacctccgcggacagccccgggtgcggaccagcgggcagcggccggcgagaccctccctggatccgcccagagcttaccggaccctgcgcgcccccgtcccggctcccggccggctcgggggagaaggcgcccgaggggaggcgccggacagatcgcgtttcggaggcggcgcaggtgctgtaaactgcaaaccataatcctgtcttaatactgcaaacaaatcatagtggaactaaggggaacttaatttactgtttccaggttaactaaggtctcagctgtaaaccaaaagtgagaggagacattaagattttcattcttaccgggttgtcttcttcctgaagagcaatggagccgcttttacttggaagaggactaatcgtatatctaatgttcctcctgttaaaattctcaaaagcaattgaaataccatcttcagttcaacaggttccaacaatcataaaacagtcaaaagtccaagttgcctttcccttcgatgagtattttcaaattgaatgtgaagctaaaggaaatccagaaccaacattttcgtggactaaggatggcaaccctttttatttcactgaccatcggataattccatcgaacaattcaggaacattcaggatcccaaacgaggggcacatatctcactttcaagggaaataccgctgctttgcttcaaataaactgggaatcgctatgtcagaagaaatagaatttatagttccaagtgttccaaaattcccaaaagaaaaaattgaccctcttgaagtggaggagggagatccaattgtcctcccatgcaatcctcccaaaggcctcccacctttacacatttattggatgaatattgaattagaacacatcgaacaagatgaaagagtatacatgagccaaaagggagatctatacttcgcaaacgtggaagaaaaggacagtcgcaatgactactgttgctttgctgcatttccaagattaaggactattgtacagaaaatgccaatgaaactaacagttaacagtttaaagcatgctaatgactcaagttcatccacagaaattggttccaaggcaaattccatcaagcaaagaaaacccaaactgctgttgcctcccactgagagtggcagtgagtcttcaattaccatcctcaaaggggaaatcttgctgcttgagtgttttgctgaaggcttgccaactccacaggttgattggaacaaaattggtggtgacttaccaaaggggagagaaacaaaagaaaattatggcaagactttgaagatagagaatgtctcctaccaggacaaaggaaattatcgctgcacagccagcaatttcttgggaacagccactcacgattttcacgttatagtagaagagcctcctcgctggacaaagaagcctcagagtgctgtgtatagcaccggaagcaatggcatcttgttatgtgaggctgaaggagaacctcaacccacaatcaagtggagagtcaatggctccccagttgacaatcatccatttgctggtgatgttgtcttccccagggaaatcagttttaccaaccttcaaccaaatcatactgctgtgtaccagtgtgaagcctcaaatgtccatggaactatccttgccaatgccaatattgatgttgtggatgtccgtccattgatacaaaccaaagatggagaaaattacgctacagtggttgggtacagtgctttcttacattgcgagttctttgcttcacctgaggcagtcgtgtcctggcagaaggtggaagaagtgaaacccctggagggcaggcggtatcatatctatgaaaatggcacattgcagatcaacagaaccaccgaagaagatgctgggtcttactcatgttgggtagaaaatgctataggaaaaactgcagtcacagccaatttggatattagaaatgctacaaaacttagagtttctcctaagaatcctcgtatccccaaattgcatatgcttgaattacattgtgaaagcaaatgtgactcacatttgaaacacagtttgaagttgtcctggagtaaagatggagaagcctttgaaattaatggcacagaagatggcaggataattattgatggagctaatttgaccatatctaatgtaactttagaggaccaaggtatttactgctgttcagctcatactgctctagacagtgctgccgatataactcaagtaactgttcttgatgttccggatccaccagaaaaccttcacttgtctgaaagacagaacaggagtgttcggctgacctgggaagctggagctgaccacaacagcaatattagcgagtatattgttgaatttgaaggaaacaaagaagagcctggaaggtgggaggaactgaccagagtccaaggaaagaaaaccacagttatcttacctttggctccatttgtgagataccagttcagggtcatagccgtgaacgaagtagggagaagtcagcctagccagccgtcagaccatcatgaaacaccaccagcagctccagataggaatccacaaaacataagggttcaagcctctcaacccaaggaaatgattataaagtgggagcctttgaaatccatggagcagaatggaccaggcctagagtacagagtgacctggaagccacagggagccccagtggagtgggaagaagaaacagtcacaaaccacacattgcgggtgatgacgcctgctgtctatgccccttatgatgtcaaggtccaggctatcaatcaactaggatctgggcctgaccctcagtcagtgactctctattctggagaagactatcctgatacagctccagtgatccatggggtggacgttataaacagtacattagttaaagttacctggtcaacagttccaaaggacagagtacatggacgtctgaaaggctatcagataaattggtggaaaacaaaaagtctgttggatggaagaacacatcccaaagaagtgaacattctaagattttcaggacaaagaaactctggaatggttccttccttagatgcctttagtgaatttcatttaacagtcttagcctataactctaaaggagctggtcctgaaagtgagccttatatatttcaaacaccagaaggagtacctgaacagccaacttttctaaaggtcatcaaagttgataaagacactgccactttatcttggggactacctaagaaattaaatggaaacttaactggctatcttttgcaatatcagataataaatgacacctacgagattggagaattaaatgatattaacattacaactccatcaaagcccagctggcacctctcaaacctgaatgcaactaccaagtacaaattctacttgagggcttgcacttcacagggctgtggaaaaccgatcacggaggaaagctccaccttaggagaagggagtaaaggtatcgggaagatatcaggagtaaatcttactcaaaagactcacccaatagaggtatttgagccgggagctgaacatatagttcgcctaatgactaagaattggggcgataatgatagcatttttcaagatgtaattgagacaagagggagagaatatgctggtttatatgatgacatctccactcaaggctggtttattggactgatgtgtgcgattgctcttctcacactactattattaactgtttgctttgtgaagaggaatagaggtggaaagtactcagttaaagaaaaggaagatttgcatccagacccagaaattcagtcagtaaaagatgaaacctttggtgaatacagtgacagtgatgaaaagcctctcaaaggaagccttcggtcccttaatagggatatgcagcctactgaaagtgctgacagcttagtcgaatacggagagggagaccatggtctcttcagtgaagatggatcatttattggtgcctacgctggatctaaggagaagggatctgttgaaagcaatggaagttctacagcaacttttccccttcgggcataaacacaacatatgtaagcaacgctactggttcaccccaaccttccatatttatctgttcaaaggagcaagaactttcatataggaatagaaacatgctggccgaagatttcatccagaagtcaacatcctgcaattatgttgaaaagagtagtactttcttcaaaatataaaatgccaagcacttcaggcctatgttttgcttatattgttttcaggtgctcaaaatgcaaaacacaaaacaaatcctgcatttagatacacctcaactaaatccaaagtccccattcagtatattccatatttgcctgattttactattcggtgtgtttgcatagatgttgctacttggtgggtttttctccgtatgcacattggtatacagtctctgagaactggcttggtgactttgcttcactacaggttaaaagaccataagcaaactggttatttaaaatgtaaaaaggaatatgaaagtcttattaaaacacttcattgaaaatatacagtctaaatttattatttaaattttactagcaaaagtcttaggtgaacaatcaactagtatttgttgagctcctatttgcccagagatggtcatatttaaacagaagtatacgtttttcagtttcaacatgaatttttttatttctgtcagttatgacatccacaagcatcactttttgtgtctgttttttttttttttcttggactaaattcaactgcatggaagcggtggtcagaaggttgttttatacgagaacaggcagaaagtgcccattgttcaggattctaatagctacatctacttaatatcttcatttctaaattgactgcttttacctttttctcatgtttatataatggtatgcttgcatatatttcatgaatacattgtacatattatgttaatatttacacaatttaaaatatagatgtgttttattttgaagtgagaaaatgaacattaacaggcatgtttgtacagctagaatatattagtaagatactgtttttcgtcattccagagctacaactaataacacgaggttccaaagctgaagactttgtataaagtatttgggttttgttcttgtattgctttctttcaacagtttcaaaataaaatatcatataaatattgagggaaatgttttcatatttttcaaaataggtttttattgttgaatgtacatctaccccagcccctcaaaagaaaaactgtttacatagaaattcctacacatacgtttgcgtatatgttattttaaacatctttgtggtgagaattttttccccgatattctccttctgtcaaagtcagaacaaattcagggaatttattttctggcagttgtgctccagtccttttaaaattgtacatgaacatgttttagaaacaatatggaggatgatgcatacatgtcggtcaagttcagcgctcgacattttatggaaagatttttttaaccttaccacgaaatacttaactactgtttaagtgaattgacttatttcactttagtttttgaactgtgattattggtatactgttatatcctcaacttggatttatggtaaccccttatagttcatggagaccaaaatttggggtatttataatagtcagcgcaggaatgcacatggaatatctacttgtccttttgaacctcacgagtcatccagaatgtatagacaggaaaagcatgtcttatttaaaactgtaatttatgggctcaggatctgaccgcagtcccgggagtaagcatttcaaagggggaaggcagtgtggtccctaccctgtgtgaatgtgaggatgtagacatccatcagtgcaactcgagctccatcctcctccgatttctaaggttccagttttctggagggacagtcatcatgttttgatttatctgggagaaaactgtggtgcacagcttgtgaggagggcaaggttgtgacgttcgagcttagttctggtgttattctgtctcctcttctttgtcatcagccaaaacgtggtttttaaagagagtcatgcaggttagaaataatgtcaaaaatatttaggaatttaataacctttaagtcagaaactaaaacaaatactgaaatattagctcttcctacacttcgtgttcccctttagctgcctgaaaatcaagattgctcctgctcagatcttctgagtggctaaaacttatggatatgaaaaatgagattgaatgatgactatgctttgctatcattgttacctttcctcaatactatttggcaactactgggactcttcagcacaaaaggaatagatctatgattgaccctgattttaattgtgaaattatatgattcatatattttatgaatcagaataaccttcaaataaaataaatctaagtcggttaaaatggatttcatgattttccctcagaaaatgagtaacagagtccacggcgtgcaatggtaattataaattggtgatgcttgtttgcaaattgcccactcgtgataagtcaacagccaatatttaaaactttgttcgttactggctttaccctaactttctctagtctactgtcaatatcattttaatgtaattgattgtatatagtctcaagaatggttggtgggcatgagttcctagagaactgtccaagggttgggaaaatccaaattctcttcctggttccagcactgattttgtacataaacattaggcaggttgcttaacctttttatttcaaactctctcaactctaaagtgctaataataatctcagttaccttatctttgtcacagggtgttcttttttatgaagaaaaatttgaaaatgataaaagctaagatgccttctaacttcataagcaaacctttaactaattatgtatctgaaagtcacccccacataccaactcaacttttttcctgtgaacacataaatatatttttatagaaaaacaaatctacataaaataaatctactgtttagtgagcagtatgatttgtacatgccattgaaaattattaatcagaagaaaattaagcagggtctttgctatacaaaagtgttttccactaattttgcatgcgtatttataagaaaaatgtgaatttggtggttttattctatcggtataaaggcattgatattttagatgcacccgtgtttgtaaaaatgtagagcacaatggaattatgctggaagtctcaaataatatttttttcctattttatactcatggaagagataagctaaagaggggacaataatgagaaatgttggtgtgcttttctaagcatttaaaacataattgccaattgaaaccctaaatatgtttacataccattaagatatgattcatgtaacaatgttaaattaattataatgggattgggtttgttatctgtggtagtatatatcctagtgttcctatagtgaaataagtagggttcagccaaagctttctttgttttgtaccttaaattgttcgattacgtcatcaaaagagatgaaaggtatgtagaacaggttcacgtgattacctttttcttttggcttggattaatattcatagtagaactttataaaacgtgtttgtattgtaggtggtgtttgtattatgcttatgactatgtatggtttgaaaatattttcattatacatgaaattcaactttccaaataaaagttctacttcatgt

SEQ ID NO: 5306 - DNA, 5235 bp, Homo sapiens
  source 1..5235: mol_type = unassigned DNA
caggaagggagcagaggcgagagccagcctccggcaggagggcgtagaccccggtgccagccagaacggctccagccttcccgcggccagagagccagcggcgggaggggacgggcgggacctccgcggacagccccgggtgcggaccagcgggcagcggccggcgagaccctccctggatccgcccagagcttaccggaccctgcgcgcccccgtcccggctcccggccggctcgggggagaaggcgcccgaggggaggcgccggacagatcgcgtttcggaggcggcgcaggtgctgtaaactgcaaaccataatcctgtcttaatactgcaaacaaatcatagtggaactaaggggaacttaatttactgtttccaggttaactaaggtctcagctgtaaaccaaaagtgagaggagacattaagattttcattcttaccgggttgtcttcttcctgaagagcaatggagccgcttttacttggaagaggactaatcgtatatctaatgttcctcctgttaaaattctcaaaagcaattgaaataccatcttcagttcaacaggttccaacaatcataaaacagtcaaaagtccaagttgcctttcccttcgatgagtattttcaaattgaatgtgaagctaaaggaaatccagaaccaacattttcgtggactaaggatggcaaccctttttatttcactgaccatcggataattccatcgaacaattcaggaacattcaggatcccaaacgaggggcacatatctcactttcaagggaaataccgctgctttgcttcaaataaactgggaatcgctatgtcagaagaaatagaatttatagttccaagtgttccaaaattcccaaaagaaaaaattgaccctcttgaagtggaggagggagatccaattgtcctcccatgcaatcctcccaaaggcctcccacctttacacatttattggatgaatattgaattagaacacatcgaacaagatgaaagagtatacatgagccaaaagggagatctatacttcgcaaacgtggaagaaaaggacagtcgcaatgactactgttgctttgctgcatttccaagattaaggactattgtacagaaaatgccaatgaaactaacagttaacagttcaaattccatcaagcaaagaaaacccaaactgctgttgcctcccactgagagtggcagtgagtcttcaattaccatcctcaaaggggaaatcttgctgcttgagtgttttgctgaaggcttgccaactccacaggttgattggaacaaaattggtggtgacttaccaaaggggagagaaacaaaagaaaattatggcaagactttgaagatagagaatgtctcctaccaggacaaaggaaattatcgctgcacagccagcaatttcttgggaacagccactcacgattttcacgttatagtagaagagcctcctcgctggacaaagaagcctcagagtgctgtgtatagcaccggaagcaatggcatcttgttatgtgaggctgaaggagaacctcaacccacaatcaagtggagagtcaatggctccccagttgacaatcatccatttgctggtgatgttgtcttccccagggaaatcagttttaccaaccttcaaccaaatcatactgctgtgtaccagtgtgaagcctcaaatgtccatggaactatccttgccaatgccaatattgatgttgtggatgtccgtccattgatacaaaccaaagatggagaaaattacgctacagtggttgggtacagtgctttcttacattgcgagttctttgcttcacctgaggcagtcgtgtcctggcagaaggtggaagaagtgaaacccctggagggcaggcggtatcatatctatgaaaatggcacattgcagatcaacagaaccaccgaagaagatgctgggtcttactcatgttgggtagaaaatgctataggaaaaactgcagtcacagccaatttggatattagaaatgctacaaaacttagagtttctcctaagaatcctcgtatccccaaattgcatatgcttgaattacattgtgaaagcaaatgtgactcacatttgaaacacagtttgaagttgtcctggagtaaagatggagaagcctttgaaattaatggcacagaagatggcaggataattattgatggagctaatttgaccatatctaatgtaactttagaggaccaaggtatttactgctgttcagctcatactgctctagacagtgctgccgatataactcaagtaactgttcttgatgttccggatccaccagaaaaccttcacttgtctgaaagacagaacaggagtgttcggctgacctgggaagctggagctgaccacaacagcaatattagcgagtatattgttgaatttgaaggaaacaaagaagagcctggaaggtgggaggaactgaccagagtccaaggaaagaaaaccacagttatcttacctttggctccatttgtgagataccagttcagggtcatagccgtgaacgaagtagggagaagtcagcctagccagccgtcagaccatcatgaaacaccaccagcagctccagataggaatccacaaaacataagggttcaagcctctcaacccaaggaaatgattataaagtgggagcctttgaaatccatggagcagaatggaccaggcctagagtacagagtgacctggaagccacagggagccccagtggagtgggaagaagaaacagtcacaaaccacacattgcgggtgatgacgcctgctgtctatgccccttatgatgtcaaggtccaggctatcaatcaactaggatctgggcctgaccctcagtcagtgactctctattctggagaagactatcctgatacagctccagtgatccatggggtggacgttataaacagtacattagttaaagttacctggtcaacagttccaaaggacagagtacatggacgtctgaaaggctatcagataaattggtggaaaacaaaaagtctgttggatggaagaacacatcccaaagaagtgaacattctaagattttcaggacaaagaaactctggaatggttccttccttagatgcctttagtgaatttcatttaacagtcttagcctataactctaaaggagctggtcctgaaagtgagccttatatatttcaaacaccagaaggagtacctgaacagccaacttttctaaaggtcatcaaagttgataaagacactgccactttatcttggggactacctaagaaattaaatggaaacttaactggctatcttttgcaatatcagataataaatgacacctacgagattggagaattaaatgatattaacattacaactccatcaaagcccagctggcacctctcaaacctgaatgcaactaccaagtacaaattctacttgagggcttgcacttcacagggctgtggaaaaccgatcacggaggaaagctccaccttaggagaagggagtaaaggtatcgggaagatatcaggagtaaatcttactcaaaagactcacccaatagaggtatttgagccgggagctgaacatatagttcgcctaatgactaagaattggggcgataatgatagcatttttcaagatgtaattgagacaagagggagagaatatgctggtttatatgatgacatctccactcaaggctggtttattggactgatgtgtgcgattgctcttctcacactactattattaactgtttgctttgtgaagaggaatagaggtggaaagtactcagttaaagaaaaggaagatttgcatccagacccagaaattcagtcagtaaaagatgaaacctttggtgaatacagtgacagtgatgaaaagcctctcaaaggaagccttcggtcccttaatagggatatgcagcctactgaaagtgctgacagcttagtcgaatacggagagggagaccatggtctcttcagtgaagatggatcatttattggtgcctacgctggatctaaggagaagggatctgttgaaagcaatggaagttctacagcaacttttccccttcgggcataaacacaacatatgtaagcaacgctactggttcaccccaaccttccatatttatctgttcaaaggagcaagaactttcatataggaatagaaacatgctggccgaagatttcatccagaagtcaacatcctgcaattatgttgaaaagagtagtactttcttcaaaatataaaatgccaagcacttcaggcctatgttttgcttatattgttttcaggtgctcaaaatgcaaaacacaaaacaaatcctgcatttagatacacctcaactaaatccaaagtccccattcagtatattccatatttgcctgattttactattcggtgtgtttgcatagatgttgctacttggtgggtttttctccgtatgcacattggtatacagtctctgagaactggcttggtgactttgcttcactacaggttaaaagaccataagcaaactggttatttaaaatgtaaaaaggaatatgaaagtcttattaaaacacttcattgaaaatatacagtctaaatttattatttaaattttactagcaaaagtcttaggtgaacaatcaactagtatttgttgagctcctatttgcccagagatggtcatatttaaacagaagtatacgtttttcagtttcaacatgaatttttttatttctgtcagttatgacatccacaagcatcactttttgtgtctgttttttttttttttcttggactaaattcaactgcatggaagcggtggtcagaaggttgttttatacgagaacaggcagaaagtgcccattgttcaggattctaatagctacatctacttaatatcttcatttctaaattgactgcttttacctttttctcatgtttatataatggtatgcttgcatatatttcatgaatacattgtacatattatgttaatatttacacaatttaaaatatagatgtgttttattttgaagtgagaaaatgaacattaacaggcatgtttgtacagctagaatatattagtaagatactgtttttcgtcattccagagctacaactaataacacgaggttccaaagctgaagactttgtataaagtatttgggttttgttcttgtattgctttctttcaacagtttcaaaataaaatatcatataaatattg

SEQ ID NO: 5307 - DNA, 543 bp, Homo sapiens
  source 1..543: mol_type = unassigned DNA
tcggacagctcggggtcagtcgacggagcacaccgggcgcccgaatccgccgggtcccactcacgcccgccggccgccggtgctgtaaactgcaaaccataatcctgtcttaatactgcaaacaaatcatagtggaactaaggggaacttaatttactgtttccaggttaactaaggtctcagctgtaaaccaaaagtgagaggagacattaagattttcattcttaccgggttgtcttcttcctgaagagcaatggagccgcttttacttggaagaggactaatcgtatatctaatgttcctcctgttaaaattctcaaaagcaattgaaataccatcttcagttcaacaggttccaacaatcataaaacagtcaaaagtccaagttgcctttcccttcgatgagtattttcaaattgaatgtgaagctaaaggaaatccagaaccaacattttcgtggactaaggatggcaaccctttttatttcactgaccatcggataattccatcgaacaattcaggaacattcaggatcccaaacga

SEQ ID NO: 5308 - DNA, 572 bp, Homo sapiens
  source 1..572: mol_type = unassigned DNA
agaggcgagagccagcctccggcaggagggcgtagaccccggtgccagccagaacggctccagccttcccgcggccagagagccagcggcgggaggggacgggcgggacctccgcggacagccccgggtgcggaccagcgggcagcggccggcgagaccctccctggatccgcccagagcttaccggaccctgcgcgcccccgtcccggctcccggccggctcgggggagaaggcgcccgaggggaggcgccggacagatcgcgtttcggaggcggcgcagtttccaggttaactaaggtctcagctgtaaaccaaaagtgagaggagacattaagattttcattcttaccgggttgtcttcttcctgaagagcaatggagccgcttttacttggaagaggactaatcgtatatctaatgttcctcctgttaaaattctcaaaagcaattgaaataccatcttcagttcaacaggttccaacaatcataaaacagtcaaaagtccaagttgcctttcccttcgatgagtattttcaaattgaatgtgaagctaaaggaaatccagaaccaac

SEQ ID NO: 5309 - DNA, 723 bp, Homo sapiens
  source 1..723: mol_type = unassigned DNA
gagccacagtgtctcagccaggggcagggccggggaactcctgcgaaaaaccacgggccggaggagcagcagccgcgcgggcccagtttccaggttaactaaggtctcagctgtaaaccaaaagtgagaggagacattaagattttcattcttaccgggttgtcttcttcctgaagagcaatggagccgcttttacttggaagaggactaatcgtatatctaatgttcctcctgttaaaattctcaaaagcaattgaaataccatcttcagttcaacaggttccaacaatcataaaacagtcaaaagtccaagttgcctttcccttcgatgagtattttcaaattgaatgtgaagctaaaggaaatccagaaccaacattttcgtggactaaggatggcaaccctttttatttcactgaccatcggataattccatcgaacaattcaggaacattcaggatcccaaacgaggggcacatatctcactttcaagggaaataccgctgctttgcttcaaataaactgggaatcgctatgtcagaagaaatagaatttatagttccaagtgttccaaaattcccaaaagaaaaaattgaccctcttgaagtggaggagggagatccaattgtcctcccatgcaatcctcccaaaggcctcccacctttacacatttattggatgaatattgaattagaacacatcgaacaagatgaaagagtatac

SEQ ID NO: 5310 - DNA, 1104 bp, Homo sapiens
  source 1..1104: mol_type = unassigned DNA
agtcagtgactctctattctggagaagactatcctgatacagctccagtgatccatggggtggacgttataaacagtacattagttaaagttacctggtcaacagttccaaaggacagagtacatggacgtctgaaaggctatcagataaattggtggaaaacaaaaagtctgttggatggaagaacacatcccaaagaagtgaacattctaagattttcaggacaaagaaactctggaatggttccttccttagatgcctttagtgaatttcatttaacagtcttagcctataactctaaaggagctggtcctgaaagtgagccttatatatttcaaacaccagaaggagtacctgaacagccaacttttctaaaggtcatcaaagttgataaagacactgccactttatcttggggactacctaagaaattaaatggaaacttaactggctatcttttgcaatatcagataataaatgacacctacgagattggagaattaaatgatattaacattacaactccatcaaagcccagctggcacctctcaaacctgaatgcaactaccaagtacaaattctacttgagggcttgcacttcacagggctgtggaaaaccgatcacggaggaaagctccaccttaggagaagggaaatatgctggtttatatgatgacatctccactcaaggctggtttattggactgatgtgtgcgattgctcttctcacactactattattaactgtttgctttgtgaagaggaatagaggtggaaagtactcagttaaagaaaaggaagatttgcatccagacccagaaattcagtcagtaaaagatgaaacctttggtgaatacagtgacagtgatgaaaagcctctcaaaggaagccttcggtcccttaatagggatatgcagcctactgaaagtgctgacagcttagtcgaatacggagagggagaccatggtctcttcagtgaagatggatcatttattggtgcctacgctggatctaaggagaagggatctgttgaaagcaatggaagttctacagcaacttttccccttcgggcataaacacaacatatgtaagcaacgctactgg

SEQ ID NO: 5311 - DNA, 594 bp, Homo sapiens
  source 1..594: mol_type = unassigned DNA
agaaagggaagaaggcaaacaggaaaagagccagaagagcagagttcccagcagaggggaagcaagtggagaggcggtgtggaggaatcaatttggccccatctggaatggacagaaggctagaacctgcagtgcagtgagtgtgggagaaaccagctggcacaaggtgctgtaaactgcaaaccataatcctgtcttaatactgcaaacaaatcatagtggaactaaggggaacttaatttactgtttccaggttaactaaggtctcagctgtaaaccaaaagtgagaggagacattaagattttcattcttaccgggttgtcttcttcctgaagagcaatggagccgcttttacttggaagaggactaatcgtatatctaatgttcctcctgttaaaattctcaaaagcaattgaaataccatcttcagttcaacaggttccaacaatcataaaacagtcaaaagtccaagttgcctttcccttcgatgagtattttcaaattgaatgtgaagctaaaggaaatccagaaccaacattttcgtggactaaggatggcaaccctttttatttcactgaccatcggataattcc

SEQ ID NO: 5312 - DNA, 1649 bp, Homo sapiens
  source 1..1649: mol_type = unassigned DNA
agtgcattgtgggaaactcccgagctctcctccgcgttcgcagccgccgtcatcccgcggaggagcgcgcagccccggggaggccggaggacgcgcccatagaatgcccaggggcgacaaactgtcctgagcccctctggtgcagccacctgcctgtcccatacgccccgcccaccatggagtccagagggaagtcagccagcagccccaagcccgacaccaaggtgccccaggtcaccaccgaggccaaggtacccccggcagccgatgggaaagcccccttgaccaagccctcgaagaaggaggccccggccgagaagcagcagccgccagcagcccccaccacggcacctgccaagaagacctcggccaaggccgaccctgcccttctcaacaaccacagcaacctgaagccagcccccacggtccccagcagtcccgatgcaaccccggagcccaagggtcctggggacggggcggaggaagatgaggctgccagtggggggcctgggggccgaggtccctggtcctgtgagaacttcaaccccctgctggtggctgggggtgtggccgtggcagccatagccctgattctcggtgtggccttcctggtccggaaaaaataatacctgggggccaggcggggggcacggagccacttcctgtacagacccgaggaagccagtgcatgcagagttcacccttacctattcgtacacacgcacattcattacacacctacatacgcccccaacacacgcgcacggtgaagaggacgcccgagcccacccctgctgacccaggacttccccaacctccagggcagaaagagcccaggctccggggtccacagcacaggatgtggggcgagggcacagctggggaacggcaagaaaggaatggaccctgtgtgtggccccccccacccctggcggctgggtgatcctgggcccccagggctggtctgagtgcaggtgggggtgccgggatgggttgggcctgggcccggccctcgtggggacattaaagggcgcggtggctccactcgccccatttctgctctttgcgtaccccccgggggtctgcctgggcgaatgcagtgggacggacctggggtgggcactcacctcagcagagcctcaatgccacctccccacaccacccaagcctagctgggtgggaagacggagccctgaagcctgcgtgtggagggggtgctgcccaagggtcgccttccccagcttgtgctccaggggagccccgacgccggcggggaggcagggatgtcgagggcccctcacagctgtgcccgccctgccccgctagactgcccctccagcttgcacccagcaccacctgagtctaaccagcgtataatgcaataacaggtagagtagaactgcttttggcggcgaccgtcacacactgtcctcagcccactgcacctggggaagcccctcgtgcagcccctccttagcacatccagtcccagcgtggcccttggcgcgcagcagcaggcgaactcccagaaggtggtggtgggcactgtgagaacgtggcctgccctcactggccagtggccacaggaaccccgggcctgagtggaggctgagtctgaaataaactctgtcgtctgaaggctgctcttg

SEQ ID NO: 5313 - DNA, 2730 bp, Homo sapiens
  source 1..2730: mol_type = unassigned DNA
ctctgggcggtggggtgggcggtgggttggggggtttcgttgtgcgcgcaaagccgcgcggggctgagggtcttgttctgccggcgcctgtccggacccgggcccctctccgctttcggccggcctcgggcaccgggcttctggagctcccggagccctgcctgttccctgtccatccaggccagcagctgaaggagcctcacctgcctcccttctctgagtagcacggatttgaggagaagcagcgaagatgtccagcgagcctccccctccttatcctgggggccccacagccccacttctggaagagaaaagtggagccccgcccaccccaggccgttcctccccagctgtgatgcagccccctccaggcatgccactgccccctgcggacattggccccccaccctatgagccgccgggtcacccaatgccccagcctggcttcatcccaccacacatgagtgcagatggcacctacatgcctccgggtttctaccctcctccaggcccccacccacccatgggctactaccccccagggccctacacgccagggccctaccctggccctgggggccacacagccacagtcctggtcccttcaggagctgccaccacggtgacagtgctgcagggagagatctttgagggagcgcctgtgcagacggtgtgtccccactgccagcaggccatcaccaccaagatctcctacgagattggcttgatgaatttcgtgctgggtttcttctgttgcttcatgggatgtgatctgggctgctgcctgatcccctgcctcatcaatgacttcaaggatgtgacgcacacatgccccagctgcaaagcctacatctacacgtacaagcgcctgtgctaacggagctgggactcgggactcccccgcctgtcagtctggccccctgtgctttgctccctgtgctcagtggtcactttcccgctcccacttggggctgggagccgtgccaccatcccctagaagtcctgtcctcttcaccctgccctacctgagccgctgactcttctggcaaaaattctgttgggatttaaggccaagggtcagtgggtggcagggggctgacaatgagcttgtgtgttgttggtctgcttggtgtgtgtgatcgggaagataagctgggaggggtctcctgctggggtcctgatgcctctgtttccaaacaaggtacaggttcagtccagactctttccccctgggaccaacagcagccagagcagttagccagttagtccccaggcctgtggccacaggcgtttctgacctgctgggccgagaatgggtaagttgtctggagtcaggtgggcccacgtaggacagggtcacaaagcctgggtttgtttctgggtactttgcgcctctggggtgctagaggtggggcatggtggctggaagtaaaactgccaactctggccctcagaactctcaggtatagaagcccaggatgtctaataccctgtcccagtgcccgagagctgcctggtgtcaggtagagaggacactgtacctgggtgaatgatcagaccctggtagctaagaaggaacttgtccctttgagtcagtgtgcagaccccctttcaggccatgcctctgtgaaccctgtattgctggggccggaaggagcccctgagcctagccccttcccgtctgccctgtgtcctcactgcgtgtgggtatgacctctgcctggtggctggtgtatcccaactgggcaagagatggcagagggtcccccttgtgggtgcgcttggatgtgcagagccttctccatggattttcttccctgtaagtgccgggcccctcaccccagctgacaggctgttgctgtgcctgctcacacctgctcctgcaggcacactgggctagggacgaggaaggagcagccacaagtggtagaactgccttggtggacaccagcctcgccctgtctttatttcctgaatggtttgtgaacttgctcacctggaccactgtatcctgccactgtccttcctggtctcgcactgccactgcatggcctcctgtcactgtgaatcgtggcccagtctcagtttgtagtttctcattaaattggccctttcactcccccgccctgggcctctgctctcttgcctggcttccttcttttttgagggaaagagggtggggctgcaggcagtctactggcaggacgggaggctgagtcctcagggtctcacaccctcagtgctgatgccatgccaactgcctgggacaacaccaacacgtaaggacctaattaaaccaaaccagagtcgggtgtagaccagccctgggatttccagctgtgactgggccagggcacacgttggtctcggcagtggctgtaaggtcaccttccttcctctgatgctggtttcaaccatctatatatggcatccacgcatgggatctgcaagctggagccctcctacccgcaggcttgagcacagcatcatccagccctggggaggcgcacccttaagcaacacagactgggctgaggctgacaggcagaagactaacagagcgcagtctgcacacgcaggttctgggcgacctctggccctggccatctctgcactaactcatctgaattatgaaggtggcagtcttggtcagtagtttaaagagtttccctactttttaaccctttttgaaataaaacttttacaggtagtagattcctattaataaaa

SEQ ID NO: 5314 - DNA, 1079 bp, Homo sapiens
  source 1..1079: mol_type = unassigned DNA
atgattggctggagtggcccgagtcgggaaaatggctgcgagtacctccatggtcccggtggctgtgacggcggcagtggcgcctgtcctgtccataaacagcgatttctcagatttgcgggaaattaaaaagcaactgctgcttattgcgggccttacccgggagcggggcctactacacagtagcaaatggtcggcggagttggctttctctctccctgcattgcctctggccgagctgcaaccgcctccgcctattacagaggaagatgcccaggatatggatgcctataccctggccaaggcctactttgacgttaaagagtatgatcgggcagcacatttcctgcatggctgcaatagcaagaaagcctattttctgtatatgtattccagatatctggtgagggccattttaaaatgtcattctgcctttagtgaaacatccatatttagaaccaatggaaaagttaaatcttttaaatagcttagcagtgggccactgaatgaatgtactttatacatagcaataataaaaaaaagatatcataaataaagttaaaaaggatggtagagaagaaaatattcttaggaatgactaacaggataagtaacaacctgattatttatttactttaggttatataaggttcttcatgcctgtgaattaatattattgtgtaagaattaagttaaaaagcctgggctgacttttaaatttataaattcatttatcatgtttatagtatatttattgtttttctttcatggctattaaaaagtatgactgtaaaggacaatgcaagtaaaccaacttaatactgtattgaataataagtacaatttattattttactttgaaacattatgaatttactttcctactttttcttagttgttatctatataaattgattaaaaaaacattttatgtacttctcatttcctagtacaggttgagtatcccttatttgaagtgcttgggaccaaaagtgtttcagatttcagatttttttcagattttggtatatttgcattatacttactggttgaaataaaaaatgctgcagtgagtgtca

SEQ ID NO: 5315 - DNA, 3153 bp, Homo sapiens
  source 1..3153: mol_type = unassigned DNA
atgattggctggagtggcccgagtcgggaaaatggctgcgagtacctccatggtcccggtggctgtgacggcggcagtggcgcctgtcctgtccataaacagcgatttctcagatttgcgggaaattaaaaagcaactgctgcttattgcgggccttacccgggagcggggcctactacacagtagcaaatggtcggcggagttggctttctctctccctgcattgcctctggccgagctgcaaccgcctccgcctattacagaggaagatgcccaggatatggatgcctataccctggccaaggcctactttgacgttaaagagtatgatcgggcagcacatttcctgcatggctgcaatagcaagaaagcctattttctgtatatgtattccagatatctgtctggagaaaaaaagaaggacgatgaaacagttgatagcttaggccccctggaaaaaggacaagtgaaaaatgaggcgcttagagaattgagagtggagctcagcaaaaaacaccaagctcgagaacttgatggatttggactttatctgtatggtgtggtgcttcgaaaactggacttggttaaagaggccattgatgtgtttgtggaagctactcatgttttgcccttgcattggggagcctggttagaactctgtaacctgatcacagacaaagagatgctgaagttcctgtctttgccagacacctggatgaaagagttttttctggctcatatatacacagagttgcagttgatagaggaggccctgcaaaagtatcagaatctcattgatgtgggcttctctaagagctcgtatattgtttcccaaattgcagttgcctatcacaatatcagagatattgacaaagccctctccatttttaatgagctaaggaaacaagacccttacaggattgaaaatatggacacattctccaaccttctttatgtcaggagcatgaaatcggagttgagttatctggctcataacctctgtgagattgataaatatcgtgtagaaacgtgctgtgtaattggcaattattacagtttacgttctcagcatgagaaagcagccttatatttccagagagccctgaaattaaatcctcggtatcttggtgcctggacactaatgggacatgagtacatggagatgaagaacacgtctgctgctatccaggcttatagacatgccattgaggtcaacaaacgggactacagagcttggtatggcctcgggcagacctatgaaatccttaagatgccattttactgcctttattattatagacgggcccaccagcttcgacccaatgattctcgcatgctggttgctttaggagaatgttacgagaaactcaatcaactagtggaagccaaaaagtgttattggagagcttacgccgtgggagatgtggagaaaatggctctggtgaaactggcaaagcttcatgaacagttgactgagtcagaacaggctgcccagtgttacatcaaatatatccaagatatctattcctgtggggaaatagtagaacacttggaggaaagcactgcctttcgctatctggcccagtactattttaagtgcaaactgtgggatgaagcttcaacttgtgcacaaaagtgttgtgcatttaatgatacccgggaagaaggtaaggccttactccggcaaatcctacagcttcggaaccaaggcgagactcctaccaccgaggtgcctgctccctttttcctacctgcttcactctctgctaacaatacccccacacgcagagtttctccactcaacttgtcttctgtcacgccatagttggctactctcaagccagcacattgttagacccatcttaattaagccttacctccatgtaaagaacagcacgtctgttccaaggacctcagctcttcttgtttctacagatggcaacagctccatagggacagcttgtataattaccttcagaggccaactgacagaatcctggcaggaacagacattatcttgccagttagaagtacttctgtctcacttatgtccaaagagtggctatagatcttggccttcttccctgaatgctttttttttttggcccccaagaaagtcccttttatagcactttagcacaggcaatgctacaggaacaaagtttcaatgctgctgagagtgaaagaaaggaggaaagtctgccactctaccctgagctggcagtagggcactgagtaccctaggaagaagtcagagcaatggatacaaatgaccttgctcttggatttgctgagcatgatccctattctgatgtcagagattaggtttaaatggaatagagctatccatttgttcttactctctagggagacaatcttccaaaacagttttgggggggtcttctaaagctttcaaattggaagtaactttattcaactagagttgaataaaagaagggcaaaaataatctcacagagcttggaactgctgatagcccttactgagggcaaaagatggctatattgttagctatactcctaccaaagcaagcaaggagataggattatagataatttcacggacatttggaaataacattggtgattatacagacaagaataaactcacttcaagctggtctgttttaataaattttcaacgtaattgtctatttttttccctcccatctgcaacagaatacatttttttcagcctttatctagatgaggtaaagggaatcattcttatggtgctcttggagagtttcaggcctgtgcatgtgtgtacagcaggaggtaatatgctataatgtctgctgtaatatatttgcacagtagatgctatggatcattctgagctcagggtccagactttattcttattcccagaattttgtgttacgtttttacctcctaacatatgacacttcatcttatattaaggaaggtttagaatatctaatacgacttgaattcatttgttactaagccttctcaggcaagctgtatactagttactggtctccactgccatgccttttcaaggttcccatggtccagaatgatgtttgattcttaatttttctgtcccttttataatttgttttaatgattttgctacatttggaattcaataaaaaatgtgaacaataa

SEQ ID NO: 5316 - DNA, 3783 bp, Homo sapiens
  source 1..3783: mol_type = unassigned DNA
gtcggcttggttttctgctacccggagctgggcaagcgggtgggagaacagcgaagacagcgtgagcctgggccgttgcctcgaggctctcgcccggcttctcttgccgacccgccacgtttgtttggatttaatcttcaggttgccggcgcccgcccgcccgctggcctcgcggtgtgagagggaagcacccgtgcctgtggctggtggctggcgcctggagggtccgcacacccgcccggccgcgccgcttgcccgcggcagccgcgtccctgaaccgcggagtcgtgtttgtgtttgacccgcgggcgccggtggcgcgcggccgaggccggtgtcggcggggcggggcggtcgcggcggaggcagaggaagagggagcgggagctctgcgaggccgggcgccgccatggaactgggcccggagcccccgcaccgccgccgcctgctcttcgcctgcagcccccctcccgcgtcgcagcccgtcgtgaaggcgctatttggcgcttcagccgccgggggactgtcgcctgtcaccaacctgaccgtcactatggaccagctgcagggtctgggcagtgattatgagcaaccactggaggtgaagaacaacagtaatctgcagagaatgggctcctccgagtcaacagattcaggtttctgtctagattctcctgggccattggacagtaaagaaaaccttgaaaatcctatgagaagaatacattccctacctcagaagctgttgggatgtagtccagctctgaagaggagccattctgattctcttgaccatgacatctttcagctcatcgacccagatgagaacaaggaaaatgaagcctttgagtttaagaagccagtaagacctgtatctcgtggctgcctgcactctcatggactccaggagggtaaagatctcttcacacagaggcagaactctgccccagctcggatgctttcctcaaatgaaagagatagcagtgaaccagggaatttcattcctctttttacaccccagtcacctgtgacagccactttgtctgatgaggatgatggcttcgtggaccttctcgatggagagaatctgaagaatgaggaggagaccccctcgtgcatggcaagcctctggacagctcctctcgtcatgagaactacaaaccttgacaaccgatgcaagctgtttgactccccttccctgtgtagctccagcactcggtcagtgttgaagagaccagaacgatctcaagaggagtctccacctggaagtacaaagaggaggaagagcatgtctggggccagccccaaagagtcaactaatccagagaaggcccatgagactcttcatcagtctttatccctggcatcttcccccaaaggaaccattgagaacattttggacaatgacccaagggaccttataggagacttctccaagggttatctctttcatacagttgctgggaaacatcaggatttaaaatacatctctccagaaattatggcatctgttttgaatggcaagtttgccaacctcattaaagagtttgttatcatcgactgtcgatacccatatgaatacgagggaggccacatcaagggtgcagtgaacttgcacatggaagaagaggttgaagacttcttattgaagaagcccattgtacctactgatggcaagcgtgtcattgttgtgtttcactgcgagttttcttctgagagaggtccccgcatgtgccggtatgtgagagagagagatcgcctgggtaatgaataccccaaactccactaccctgagctgtatgtcctgaaggggggatacaaggagttctttatgaaatgccagtcttactgtgagccccctagctaccggcccatgcaccacgaggactttaaagaagacctgaagaagttccgcaccaagagccggacctgggcaggggagaagagcaagagggagatgtacagtcgtctgaagaagctctgagggcggcaggaccagccagcagcagcccaagcttccctccatccccctttaccctctttgctgcagagaaacttaagcaaaggggacagctgtgtgacatttggagagggggcctgggacttccatgccttaaacctacctcccacactcccaaggttggagcccagggcatcttgctggctacgcctcttctgtccctgttagacgtcctccgtccatatcagaactgtgccacaatgcagttctgagcaccgtgtcaagctgctctgagccacagtgggatgaaccagccggggccttatcgggctccagccatctcatgaggggagaggagacggaggggagtagagaagttacacagaaatgctgctggccaaatagcaaagacaacctgggaaggaaaggtctttgtgggataatccatatgtttaatttattcaacttcatcaatcactttattttatttttttttctaactcctggagacttattttactgcttcattaggttgaaatactgccattctaggtagggttttattatcccagggactacctcggcttttaatttaaaaaaaaaaaagaagtgggtaagaaaatgcaaacctgttataagttatcggacagaaagctaggtgctctgtcacccccaggaggcgctgtggtactggggctgctgctatttaagccaagaactgaggtcctggtgagagcgttggacccaggcttggctgcctgacataagctaaatctcccagacccaccactggctaccgatatctatttggtgggaggtgtggccctgttcttcctcaccccagttccatgacattggctggtataggagccacagtcaggaaagcacttgaggcagcatctgttgggccacccccggctcagtgctggaatgttgcagtgtaggtttcccagggaaggggggtgggggtaggtgggctccacaggatgggggaggagcatgtccactgagtatcttccttatgttgctgtgatattgatagcttttattttctaatttttaaaaaatggtcatattatgagtcaaagagtatcaaatcagtgttggatggaccacccaagggtgaggagaggggctggaagccctgggcattaggagaagggagtgggtgctggcatggacatgactggatagaattttctcaggagggagcttggtggattttgaaggtaaaactttctgggtttatcatgttttaattttagagacagggagtgatgaatcatcaccggttgtccccttatctaactccataaaagtgggaatttcaaaagaacacctcatccaaggagctggggcagacttcattgattctagagagacctgtttcagtgcctactcatccctgccctctggtgccagcctccttaccatcacggcttcactgaggtgtaggtgggtttttcttaaacaggagacagtctctcccctcttacctcaacttcttggggtgggaatcagtgatactggagatggctagttgctgtgttacgggtttgagttacatttggctataaaacaatcttgttgggaaaaatgtgggggagaggacttcttcctacacgcgcattgagacagattccaactggttaatgatattgtttgtaagaaagagattctgttggttgactgcctaaagagaaaggtgggatggccttcagattataccagcttagctagcattactaaccaactgttggaagctctgaaaataaaagatcttgaacccatgctctctgcctagttcttgatggatttaagga

SEQ ID NO: 5317 - DNA, 3663 bp, Homo sapiens
  source 1..3663: mol_type = unassigned DNA
gtcggcttggttttctgctacccggagctgggcaagcgggtgggagaacagcgaagacagcgtgagcctgggccgttgcctcgaggctctcgcccggcttctcttgccgacccgccacgtttgtttggatttaatcttcaggttgccggcgcccgcccgcccgctggcctcgcggtgtgagagggaagcacccgtgcctgtggctggtggctggcgcctggagggtccgcacacccgcccggccgcgccgcttgcccgcggcagccgcgtccctgaaccgcggagtcgtgtttgtgtttgacccgcgggcgccggtggcgcgcggccgaggccggtgtcggcggggcggggcggtcgcggcggaggcagaggaagagggagcgggagctctgcgaggccgggcgccgccatggaactgggcccggagcccccgcaccgccgccgcctgctcttcgcctgcagcccccctcccgcgtcgcagcccgtcgtgaaggcgctatttggcgcttcagccgccgggggactgtcgcctgtcaccaacctgaccgtcactatggaccagctgcagggtctgggcagtgattatgagcaaccactggaggtgaagaacaacagtaatctgcagagaatgggctcctccgagtcaacagattcaggtttctgtctagattctcctgggccattggacagtaaagaaaaccttgaaaatcctatgagaagaatacattccctacctcagaagctgttgggatgtagtccagctctgaagaggagccattctgattctcttgaccatgacatctttcagctcatcgacccagatgagaacaaggaaaatctttcctcaaatgaaagagatagcagtgaaccagggaatttcattcctctttttacaccccagtcacctgtgacagccactttgtctgatgaggatgatggcttcgtggaccttctcgatggagagaatctgaagaatgaggaggagaccccctcgtgcatggcaagcctctggacagctcctctcgtcatgagaactacaaaccttgacaaccgatgcaagctgtttgactccccttccctgtgtagctccagcactcggtcagtgttgaagagaccagaacgatctcaagaggagtctccacctggaagtacaaagaggaggaagagcatgtctggggccagccccaaagagtcaactaatccagagaaggcccatgagactcttcatcagtctttatccctggcatcttcccccaaaggaaccattgagaacattttggacaatgacccaagggaccttataggagacttctccaagggttatctctttcatacagttgctgggaaacatcaggatttaaaatacatctctccagaaattatggcatctgttttgaatggcaagtttgccaacctcattaaagagtttgttatcatcgactgtcgatacccatatgaatacgagggaggccacatcaagggtgcagtgaacttgcacatggaagaagaggttgaagacttcttattgaagaagcccattgtacctactgatggcaagcgtgtcattgttgtgtttcactgcgagttttcttctgagagaggtccccgcatgtgccggtatgtgagagagagagatcgcctgggtaatgaataccccaaactccactaccctgagctgtatgtcctgaaggggggatacaaggagttctttatgaaatgccagtcttactgtgagccccctagctaccggcccatgcaccacgaggactttaaagaagacctgaagaagttccgcaccaagagccggacctgggcaggggagaagagcaagagggagatgtacagtcgtctgaagaagctctgagggcggcaggaccagccagcagcagcccaagcttccctccatccccctttaccctctttgctgcagagaaacttaagcaaaggggacagctgtgtgacatttggagagggggcctgggacttccatgccttaaacctacctcccacactcccaaggttggagcccagggcatcttgctggctacgcctcttctgtccctgttagacgtcctccgtccatatcagaactgtgccacaatgcagttctgagcaccgtgtcaagctgctctgagccacagtgggatgaaccagccggggccttatcgggctccagccatctcatgaggggagaggagacggaggggagtagagaagttacacagaaatgctgctggccaaatagcaaagacaacctgggaaggaaaggtctttgtgggataatccatatgtttaatttattcaacttcatcaatcactttattttatttttttttctaactcctggagacttattttactgcttcattaggttgaaatactgccattctaggtagggttttattatcccagggactacctcggcttttaatttaaaaaaaaaaaagaagtgggtaagaaaatgcaaacctgttataagttatcggacagaaagctaggtgctctgtcacccccaggaggcgctgtggtactggggctgctgctatttaagccaagaactgaggtcctggtgagagcgttggacccaggcttggctgcctgacataagctaaatctcccagacccaccactggctaccgatatctatttggtgggaggtgtggccctgttcttcctcaccccagttccatgacattggctggtataggagccacagtcaggaaagcacttgaggcagcatctgttgggccacccccggctcagtgctggaatgttgcagtgtaggtttcccagggaaggggggtgggggtaggtgggctccacaggatgggggaggagcatgtccactgagtatcttccttatgttgctgtgatattgatagcttttattttctaatttttaaaaaatggtcatattatgagtcaaagagtatcaaatcagtgttggatggaccacccaagggtgaggagaggggctggaagccctgggcattaggagaagggagtgggtgctggcatggacatgactggatagaattttctcaggagggagcttggtggattttgaaggtaaaactttctgggtttatcatgttttaattttagagacagggagtgatgaatcatcaccggttgtccccttatctaactccataaaagtgggaatttcaaaagaacacctcatccaaggagctggggcagacttcattgattctagagagacctgtttcagtgcctactcatccctgccctctggtgccagcctccttaccatcacggcttcactgaggtgtaggtgggtttttcttaaacaggagacagtctctcccctcttacctcaacttcttggggtgggaatcagtgatactggagatggctagttgctgtgttacgggtttgagttacatttggctataaaacaatcttgttgggaaaaatgtgggggagaggacttcttcctacacgcgcattgagacagattccaactggttaatgatattgtttgtaagaaagagattctgttggttgactgcctaaagagaaaggtgggatggccttcagattataccagcttagctagcattactaaccaactgttggaagctctgaaaataaaagatcttgaacccatgctctctgcctagttcttgatggatttaagga

SEQ ID NO: 5318 - DNA, 730 bp, Homo sapiens
  source 1..730: mol_type = unassigned DNA
ccgcgaaaggccggcctggctgcgacagcctgggttgccggcgcccgcccgcccgctggcctcgcggtgtgagagggaagcacccgtgcctgtggctggtggctggcgcctggagggtccgcacacccgcccggccgcgccgcttgcccgcggcagccgcgtccctgaaccgcggagtcgtgtttgtgtttgacccgcgggcgccggtggcgcgcggccgaggccggtgtcggcggggcggggcggtcgcggcggaggcagaggaagagggagcgggagctctgcgaggccgggcgccgccatggaactgggcccggagcccccgcaccgccgccgcctgctcttcgcctgcagcccccctcccgcgtcgcagcccgtcgtgaaggcgctatttggcgcttcagccgccgggggactgtcgcctgtcaccaacctgaccgtcactatggaccagctgcagggtctgggcagtgattatgagcaaccactggaggtgaagaacaacagtaatctgcagagaatgggctcctccgagtcaacagattcaggtttctgtctagattctcctgggccattggacagtaaagaaaaccttgaaaatcctatgagaagaatacattccctacctcagaagctgttgggatgtagtccagctctgaagaggagccattctgattctcttgaccatgacatctttcagctcatcgacccagatgagaacaaggaaaat

SEQ ID NO: 5319 - DNA, 3594 bp, Homo sapiens
  source 1..3594: mol_type = unassigned DNA
gcgtgaccttgattgagttaatgaacttcacgcctcagcgtccaggtctgtaaaatggggtgtctaacgcagaccgtacagcccagctgggtttagcaaacttccgggagccagttggagcctctccccatccctagcggtgatcccaggtgacgacatgccgcggggggtcctgcggaggccaccctagggcgttgctgctgcctttgggagtgtggagctccaaaccatgtcgcgagaggcggattttgggaggccgggatcctcgcgccagggggatgtgcgagggtgtgggataaatcttaattcctccggcccacccaaagcctggaaatccagcctccgcgcctcttgccctgcgggccccgccctcagtcccgccctcatctaacccgctaccccattggtggcgtccggcggcgcggctgctgttatttttcgaatatataaggaggtggaagtggcagctgcaactagaggcttccctggctggtgcctgagcccggcgtccctcgccccccgccctccccgcatccctctcctccctcgcgcctggccctgtggctcttcctccctccctccttccccccccccccacccctcgcccgctgcctccctcggcccagccagctgtgccggcgtttgttggctgccctgcgcccggccctccagccagccttctgccggccccgccgcgatggaggtgccccagccggagcccgcgccaggctcggctctcagtccagcaggcgtgtgcggtggcgcccagcgtccgggccacctcccgggcctcctgctgggatctcatggcctcctggggtccccggtgcgggcggccgcttcctcgccggtcaccaccctcacccagaccatgcacgacctcgccgggctcggcagcgaaaccccaaagagtcaggtagggaccctgctcttccgcagccgcagccgcctgacgcacctatccctgtctcgacgggcatccgaatcctccctgtcgtctgaatcctccgaatcttctgatgcaggtctctgcatggattcccccagccctatggacccccacatggcggagcagacgtttgaacaggccatccaggcagccagccggatcattcgaaacgagcagtttgccatcagacgcttccagtctatgccggtgaggctgctgggccacagccccgtgcttcggaacatcaccaactcccaggcgcccgacggccggaggaagagcgaggcgggcagtggagctgccagcagctctggggaagacaaggagaatgatggatttgtcttcaagatgccatggaagcccacacatcccagctccacccatgctctggcagagtgggccagccgcagggaagcctttgcccagagacccagctcggcccccgacctgatgtgtctcagtcctgaccggaagatggaagtggaggagctcagccccctggccctaggtcgcttctctctgacccctgcagagggggatactgaggaagatgatggatttgtggacatcctagagagtgacttaaaggatgatgatgcagttcccccaggcatggagagtctcattagtgccccactggtcaagaccttggaaaaggaagaggaaaaggacctcgtcatgtacagcaagtgccagcggctcttccgctctccgtccatgccctgcagcgtgatccggcccatcctcaagaggctggagcggccccaggacagggacacgcccgtgcagaataagcggaggcggagcgtgacccctcctgaggagcagcaggaggctgaggaacctaaagcccgcgtcctccgctcaaaatcactgtgtcacgatgagatcgagaacctcctggacagtgaccaccgagagctgattggagattactctaaggccttcctcctacagacagtagacggaaagcaccaagacctcaagtacatctcaccagaaacgatggtggccctattgacgggcaagttcagcaacatcgtggataagtttgtgattgtagactgcagatacccctatgaatatgaaggcgggcacatcaagactgcggtgaacttgcccctggaacgcgacgccgagagcttcctactgaagagccccatcgcgccctgtagcctggacaagagagtcatcctcattttccactgtgaattctcatctgagcgtgggccccgcatgtgccgtttcatcagggaacgagaccgtgctgtcaacgactaccccagcctctactaccctgagatgtatatcctgaaaggcggctacaaggagttcttccctcagcacccgaacttctgtgaaccccaggactaccggcccatgaaccacgaggccttcaaggatgagctaaagaccttccgcctcaagactcgcagctgggctggggagcggagccggcgggagctctgtagccggctgcaggaccagtgaggggcctgcgccagtcctgctacctcccttgcctttcgaggcctgaagccagctgccctatgggcctgccgggctgagggcctgctggaggcctcaggtgctgtccatgggaaagatggtgtgggtgtcctgcctgtctgccccagcccagattcccctgtgtcatcccatcattttccatatcctggtgccccccacccctggaagagcccagtctgttgagttagttaagttgggttaataccagcttaaaggcagtattttgtgtcctccaggagcttcttgtttccttgttagggttaacccttcatcttcctgtgtcctgaaacgctcctttgtgtgtgtgtcagctgaggctgggggagagccgtggtccctgaggatgggtcagagctaaactccttcctggcctgagagtcagctctctgccctgtgtacttcccgggccagggctgcccctaatctctgtaggaaccgtggtatgtctgccatgttgcccctttctcttttcccctttcctgtcccaccatacgagcacctccagcctgaacagaagctcttactctttcctatttcagtgttacctgtgtgcttggtctgtttgactttacgcccatctcaggacacttccgtagactgtttaggttcccctgtcaaatatcagttacccactcggtcccagttttgttgccccagaaagggatgttattatccttgggggctcccagggcaagggttaaggcctgaatcatgagcctgctggaagcccagcccctactgctgtgaaccctggggcctgactgctcagaacttgctgctgtcttgttgcggatggatggaaggttggatggatgggtggatggccgtggatggccgtggatgcgcagtgccttgcatacccaaaccaggtgggagcgttttgttgagcatgacagcctgcagcaggaatatatgtgtgcctatttgtgtggacaaaaatatttacacttagggtttggagctattcaagaggaaatgtcacagaagcagctaaaccaaggactgagcaccctctggattctgaatctcaagatgggggcagggctgtgcttgaaggccctgctgagtcatctgttagggccttggttcaataaagcactgagcaagttgagaaa

SEQ ID NO: 5320 - DNA, 1978 bp, Homo sapiens
  source 1..1978: mol_type = unassigned DNA
acccctcgcccgctgcctccctcggcccagccagctgtgccggcgtttgttggctgccctgcgcccggccctccagccagccttctgccggccccgccgcgatggaggtgccccagccggagcccgcgccaggctcggctctcagtccagcaggcgtgtgcggtggcgcccagcgtccgggccacctcccgggcctcctgctgggatctcatggcctcctggggtccccggtgcgggcggccgcttcctcgccggtcaccaccctcacccagaccatgcacgacctcgccgggctcggcagcgaaaccccaaagagtcaggtagggaccctgctcttccgcagccgcagccgcctgacgcacctatccctgtctcgacgggcatccgaatcctccctgtcgtctgaatcctccgaatcttctgatgcaggtctctgcatggattcccccagccctatggacccccacatggcggagcagacgtttgaacaggccatccaggcagccagccggatcattcgaaacgagcagtttgccatcagacgcttccagtctatgccggatggatttgtcttcaagatgccatggaagcccacacatcccagctccacccatgctctggcagagtgggccagccgcagggaagcctttgcccagagacccagctcggcccccgacctgatgtgtctcagtcctgaccggaagatggaagtggaggagctcagccccctggccctaggtcgcttctctctgacccctgcagagggggatactgaggaagatgatggatttgtggacatcctagagagtgacttaaaggatgatgatgcagttcccccaggcatggagagtctcattagtgccccactggtcaagaccttggaaaaggaagaggaaaaggacctcgtcatgtacagcaagtgccagcggctcttccgctctccgtccatgccctgcagcgtgatccggcccatcctcaagaggctggagcggccccaggacagggacacgcccgtgcagaataagcggaggcggagcgtgacccctcctgaggagcagcaggaggctgaggaacctaaagcccgcgtcctccgctcaaaatcactgtgtcacgatgagatcgagaacctcctggacagtgaccaccgagagctgattggagattactctaaggccttcctcctacagacagtagacggaaagcaccaagacctcaagtacatctcaccagaaacgatggtggccctattgacgggcaagttcagcaacatcgtggataagtttgtgattgtagactgcagatacccctatgaatatgaaggcgggcacatcaagactgcggtgaacttgcccctggaacgcgacgccgagagcttcctactgaagagccccatcgcgccctgtagcctggacaagagagtcatcctcattttccactgtgaattctcatctgagcgtgggccccgcatgtgccgtttcatcagggaacgagaccgtgctgtcaacgactaccccagcctctactaccctgagatgtatatcctgaaaggcggctacaaggagttcttccctcagcacccgaacttctgtgaaccccaggactaccggcccatgaaccacgaggccttcaaggatgagctaaagaccttccgcctcaagactcgcagctgggctggggagcggagccggcgggagctctgtagccggctgcaggaccagtgaggggcctgcgccagtcctgctacctcccttgcctttcgaggcctgaagccagctgccctatgggcctgccgggctgagggcctgctggaggcctcaggtgctgtccatgggaaagatggtgtgggtgtcctgcctgtctgccccagcccagattcccctgtgtcatcccatcattttccatatcctggtgccccccacccctggaagagcccagtctgttgagttagttaagttgggttaataccagcttaaaggca

SEQ ID NO: 5321 - DNA, 2291 bp, Homo sapiens
  source 1..2291: mol_type = unassigned DNA
gacccggcagcgacgcgggcggggacgcggtgcatcgctactgcgcccggcggacagcgacttgctgctcaaaaagaataagaaccagggtttttgtttgttttttttttttttaattaaggtaaaaataacgcacttttttttttgcggaacctgaaaaattcaagaagttgaaaaacgcttttcacgtcacctggagagatgcacagcgaaaccccaaagagtcaggtagggaccctgctcttccgcagccgcagccgcctgacgcacctatccctgtctcgacgggcatccgaatcctccctgtcgtctgaatcctccgaatcttctgatgcaggtctctgcatggattcccccagccctatggacccccacatggcggagcagacgtttgaacaggccatccaggcagccagccggatcattcgaaacgagcagtttgccatcagacgcttccagtctatgccggtgaggctgctgggccacagccccgtgcttcggaacatcaccaactcccaggcgcccgacggccggaggaagagcgaggcgggcagtggagctgccagcagctctggggaagacaaggagaatgatggatttgtcttcaagatgccatggaagcccacacatcccagctccacccatgctctggcagagtgggccagccgcagggaagcctttgcccagagacccagctcggcccccgacctgatgtgtctcagtcctgaccggaagatggaagtggaggagctcagccccctggccctaggtcgcttctctctgacccctgcagagggggatactgaggaagatgatggatttgtggacatcctagagagtgacttaaaggatgatgatgcagttcccccaggcatggagagtctcattagtgccccactggtcaagaccttggaaaaggaagaggaaaaggacctcgtcatgtacagcaagtgccagcggctcttccgctctccgtccatgccctgcagcgtgatccggcccatcctcaagaggctggagcggccccaggacagggacacgcccgtgcagaataagcggaggcggagcgtgacccctcctgaggagcagcaggaggctgaggaacctaaagcccgcgtcctccgctcaaaatcactgtgtcacgatgagatcgagaacctcctggacagtgaccaccgagagctgattggagattactctaaggccttcctcctacagacagtagacggaaagcaccaagacctcaagtacatctcaccagaaacgatggtggccctattgacgggcaagttcagcaacatcgtggataagtttgtgattgtagactgcagatacccctatgaatatgaaggcgggcacatcaagactgcggtgaacttgcccctggaacgcgacgccgagagcttcctactgaagagccccatcgcgccctgtagcctggacaagagagtcatcctcattttccactgtgaattctcatctgagcgtgggccccgcatgtgccgtttcatcagggaacgagaccgtgctgtcaacgactaccccagcctctactaccctgagatgtatatcctgaaaggcggctacaaggagttcttccctcagcacccgaacttctgtgaaccccaggactaccggcccatgaaccacgaggccttcaaggatgagctaaagaccttccgcctcaagactcgcagctgggctggggagcggagccggcgggagctctgtagccggctgcaggaccagtgaggggcctgcgccagtcctgctacctcccttgcctttcgaggcctgaagccagctgccctatgggcctgccgggctgagggcctgctggaggcctcaggtgctgtccatgggaaagatggtgtgggtgtcctgcctgtctgccccagcccagattcccctgtgtcatcccatcattttccatatcctggtgccccccacccctggaagagcccagtctgttgagttagttaagttgggttaataccagcttaaaggcagtattttgtgtcctccaggagcttcttgtttccttgttagggttaacccttcatcttcctgtgtcctgaaacgctcctttgtgtgtgtgtcagctgaggctgggggagagccgtggtccctgaggatgggtcagagctaaactccttcctggcctgagagtcagctctctgccctgtgtacttcccgggccagggctgcccctaatctctgtaggaaccgtggtatgtctgccatgttgcccctttctcttttcccctttcctgtcccaccatacgagcacc

SEQ ID NO: 5322 - DNA, 1756 bp, Homo sapiens
  source 1..1756: mol_type = unassigned DNA
gctactgcgcccggcggacagcgacttgctgctcaaaaagaataagaaccagggtttttgtttgttttttttttttttaattaaggtaaaaataacgcacttttttttttgcggaacctgaaaaattcaagaagttgaaaaacgcttttcacgtcacctggagagatgcacagcgaaaccccaaagagtcaggtagggaccctgctcttccgcagccgcagccgcctgacgcacctatccctgtctcgacgggcatccgaatcctccctgtcgtctgaatcctccgaatcttctgatgcaggtctctgcatggattcccccagccctatggacccccacatggcggagcagacgtttgaacaggccatccaggcagccagccggatcattcgaaacgagcagtttgccatcagacgcttccagtctatgccggtgaggctgctgggccacagccccgtgcttcggaacatcaccaactcccaggcgcccgacggccggaggaagagcgaggcgggcagtggagctgccagcagctctggggaagacaaggagaatgatggatttgtcttcaagatgccatggaagcccacacatcccagctccacccatgctctggcagagtgggccagccgcagggaagcctttgcccagagacccagctcggcccccgacctgatgtgtctcagtcctgaccggaagatggaagtggaggagctcagccccctggccctaggtcgcttctctctgacccctgcagagggggatactgaggaagatgatggatttgtggacatcctagagagtgacttaaaggacctcgtcatgtacagcaagtgccagcggctcttccgctctccgtccatgccctgcagcgtgatccggcccatcctcaagaggctggagcggccccaggacagggacacgcccgtgcagaataagcggaggcggagcgtgacccctcctgaggagcagcaggaggctgaggaacctaaagcccgcgtcctccgctcaaaatcactgtgtcacgatgagatcgagaacctcctggacagtgaccaccgagagctgattggagattactctaaggccttcctcctacagacagtagacggaaagcaccaagacctcaagtacatctcaccagaaacgatggtggccctattgacgggcaagttcagcaacatcgtggataagtttgtgattgtagactgcagatacccctatgaatatgaaggcgggcacatcaagactgcggtgaacttgcccctggaacgcgacgccgagagcttcctactgaagagccccatcgcgccctgtagcctggacaagagagtcatcctcattttccactgtgaattctcatctgagcgtgggccccgcatgtgccgtttcatcagggaacgagaccgtgctgtcaacgactaccccagcctctactaccctgagatgtatatcctgaaaggcggctacaaggagttcttccctcagcacccgaacttctgtgaaccccaggactaccggcccatgaaccacgaggccttcaaggatgagctaaagaccttccgcctcaagactcgcagctgggctggggagcggagccggcgggagctctgtagccggctgcaggaccagtgaggggcctgcgccagtcctgctacctcccttgcctttcgaggcctgaagccagctgccctatgggcctgccgggctgagggcctgctggaggcctcaggtgctgtccatgggaaagatggtg

SEQ ID NO: 5323 - DNA, 3096 bp, Homo sapiens
  source 1..3096: mol_type = unassigned DNA
ggaagtggcagctgcaactagaggcttccctggctggtgcctgagcccggcgtccctcgccccccgccctccccgcatccctctcctccctcgcgcctggccctgtggctcttcctccctccctccttccccccccccccacccctcgcccgctgcctccctcggcccagccagctgtgccggcgtttgttggctgccctgcgcccggccctccagccagccttctgccggccccgccgcgatggaggtgccccagccggagcccgcgccaggctcggctctcagtccagcaggcgtgtgcggtggcgcccagcgtccgggccacctcccgggcctcctgctgggatctcatggcctcctggggtccccggtgcgggcggccgcttcctcgccggtcaccaccctcacccagaccatgcacgacctcgccgggctcggcagccgcagccgcctgacgcacctatccctgtctcgacgggcatccgaatcctccctgtcgtctgaatcctccgaatcttctgatgcaggtctctgcatggattcccccagccctatggacccccacatggcggagcagacgtttgaacaggccatccaggcagccagccggatcattcgaaacgagcagtttgccatcagacgcttccagtctatgccggtgaggctgctgggccacagccccgtgcttcggaacatcaccaactcccaggcgcccgacggccggaggaagagcgaggcgggcagtggagctgccagcagctctggggaagacaaggagaatgatggatttgtcttcaagatgccatggaagcccacacatcccagctccacccatgctctggcagagtgggccagccgcagggaagcctttgcccagagacccagctcggcccccgacctgatgtgtctcagtcctgaccggaagatggaagtggaggagctcagccccctggccctaggtcgcttctctctgacccctgcagagggggatactgaggaagatgatggatttgtggacatcctagagagtgacttaaaggatgatgatgcagttcccccaggcatggagagtctcattagtgccccactggtcaagaccttggaaaaggaagaggaaaaggacctcgtcatgtacagcaagtgccagcggctcttccgctctccgtccatgccctgcagcgtgatccggcccatcctcaagaggctggagcggccccaggacagggacacgcccgtgcagaataagcggaggcggagcgtgacccctcctgaggagcagcaggaggctgaggaacctaaagcccgcgtcctccgctcaaaatcactgtgtcacgatgagatcgagaacctcctggacagtgaccaccgagagctgattggagattactctaaggccttcctcctacagacagtagacggaaagcaccaagacctcaagtacatctcaccagaaacgatggtggccctattgacgggcaagttcagcaacatcgtggataagtttgtgattgtagactgcagatacccctatgaatatgaaggcgggcacatcaagactgcggtgaacttgcccctggaacgcgacgccgagagcttcctactgaagagccccatcgcgccctgtagcctggacaagagagtcatcctcattttccactgtgaattctcatctgagcgtgggccccgcatgtgccgtttcatcagggaacgagaccgtgctgtcaacgactaccccagcctctactaccctgagatgtatatcctgaaaggcggctacaaggagttcttccctcagcacccgaacttctgtgaaccccaggactaccggcccatgaaccacgaggccttcaaggatgagctaaagaccttccgcctcaagactcgcagctgggctggggagcggagccggcgggagctctgtagccggctgcaggaccagtgaggggcctgcgccagtcctgctacctcccttgcctttcgaggcctgaagccagctgccctatgggcctgccgggctgagggcctgctggaggcctcaggtgctgtccatgggaaagatggtgtgggtgtcctgcctgtctgccccagcccagattcccctgtgtcatcccatcattttccatatcctggtgccccccacccctggaagagcccagtctgttgagttagttaagttgggttaataccagcttaaaggcagtattttgtgtcctccaggagcttcttgtttccttgttagggttaacccttcatcttcctgtgtcctgaaacgctcctttgtgtgtgtgtcagctgaggctgggggagagccgtggtccctgaggatgggtcagagctaaactccttcctggcctgagagtcagctctctgccctgtgtacttcccgggccagggctgcccctaatctctgtaggaaccgtggtatgtctgccatgttgcccctttctcttttcccctttcctgtcccaccatacgagcacctccagcctgaacagaagctcttactctttcctatttcagtgttacctgtgtgcttggtctgtttgactttacgcccatctcaggacacttccgtagactgtttaggttcccctgtcaaatatcagttacccactcggtcccagttttgttgccccagaaagggatgttattatccttgggggctcccagggcaagggttaaggcctgaatcatgagcctgctggaagcccagcccctactgctgtgaaccctggggcctgactgctcagaacttgctgctgtcttgttgcggatggatggaaggttggatggatgggtggatggccgtggatggccgtggatgcgcagtgccttgcatacccaaaccaggtgggagcgttttgttgagcatgacagcctgcagcaggaatatatgtgtgcctatttgtgtggacaaaaatatttacacttagggtttggagctattcaagaggaaatgtcacagaagcagctaaaccaaggactgagcaccctctggattctgaatctcaagatgggggcagggctgtgcttgaaggccctgctgagtcatctgttagggccttggttcaataaagcactgagcaagttgagaaa

SEQ ID NO: 5324 - DNA, 5801 bp, Homo sapiens
  source 1..5801: mol_type = unassigned DNA
tcgctggtgagtttaaatgagcaggggctggccgggccggagccgctacagggggggcctgaggcactgcagaaagtgggcctgagcctcgaggatgacggtgctgcaggaacccgtccaggctgctatatggcaagcactaaaccactatgcttaccgagatgcggttttcctcgcagaacgcctttatgcagaagtacactcagaagaagccttgtttttactggcaacctgttattaccgctcaggaaaggcatataaagcatatagactcttgaaaggacacagttgtactacaccgcaatgcaaatacctgcttgcaaaatgttgtgttgatctcagcaagcttgcagaaggggaacaaatcttatctggtggagtgtttaataagcagaaaagccatgatgatattgttactgagtttggtgattcagcttgctttactctttcattgttgggacatgtatattgcaagacagatcggcttgccaaaggatcagaatgttaccaaaagagccttagtttaaatcctttcctctggtctccctttgaatcattatgtgaaataggtgaaaagccagatcctgaccaaacatttaaattcacatctttacagaactttagcaactgtctgcccaactcttgcacaacacaagtacctaatcatagtttatctcacagacagcctgagacagttcttacggaaacaccccaggacacaattgaattaaacagattgaatttagaatcttccaattcaaagtactccttgaatacagattcctcagtgtcttatattgattcagctgtaatttcacctgatactgtcccactgggaacaggaacttccatattatctaaacaggttcaaaataaaccaaaaactggtcgaagtttattaggaggaccagcagctcttagtccattaaccccaagttttgggattttgccattagaaaccccaagtcctggagatggatcctatttacaaaactacactaatacacctcctgtaattgatgtgccatccaccggagccccttcaaaaaagtctgttgccagaatcggccaaactggaacaaagtctgtcttctcacagagtggaaatagccgagaggtaactccaattcttgcacaaacacaaagttctggtccacaaacaagtacaacacctcaggtattgagccccactattacatctcccccaaacgcactgcctcgaagaagttcacgactctttactagtgacagctccacaaccaaggagaatagcaaaaaattaaaaatgaagtttccacctaaaatcccaaacagaaaaacaaaaagtaaaactaataaaggaggaataactcaacctaacataaatgatagcctggaaattacaaaattggactcttccatcatttcagaagggaaaatatccacaatcacacctcagattcaggcctttaatctacaaaaagcagcagcagaaggtttgatgagccttcttcgtgaaatggggaaaggttatttagctttgtgttcatacaactgcaaagaagctataaatattttgagccatctaccttctcaccactacaatactggttgggtactgtgccaaattggaagggcctattttgaactttcagagtacatgcaagctgaaagaatattctcagaggttagaaggattgagaattatagagttgaaggcatggagatctactctacaacactttggcatcttcaaaaagatgttgctctttcagttctgtcaaaagacttaacagacatggataaaaattcgccagaggcctggtgtgctgcagggaactgtttcagtctgcaacgggaacatgatattgcaattaaattcttccagagagctatccaagttgatccaaattacgcttatgcctatactctattagggcatgagtttgtcttaactgaagaattggacaaagcattagcttgttttcgaaatgctatcagagtcaatcctagacattataatgcatggtatggtttaggaatgatttattacaagcaagaaaaattcagccttgcagaaatgcatttccaaaaagcgcttgatatcaaccctcaaagttcagttttactttgccacattggagtagttcaacatgcactgaaaaaatcagagaaggctttggataccctaaacaaagccattgtcattgatcccaagaaccctctatgcaaatttcacagagcctcagttttatttgcaaatgaaaaatataagtctgctttacaagaacttgaagaattgaaacaaattgttcccaaagaatccctcgtttacttcttaataggaaaggtttacaagaagttaggtcaaacgcacctcgccctgatgaatttctcttgggctatggatttagatcctaaaggagccaataaccagattaaagaggcaattgataagcgttatcttccagatgatgaggagccaataacccaagaagaacagatcatgggaacagatgaatcccaggagagcagcatgacagatgcggatgacacacaacttcatgcagctgaaagtgatgaattttaacttctggaaatcagacttttacaactggatgtgtgactagtgctgacgtgtttcttgtccctctgtatactgagtctttactcttgagctggcggtgtcatcgtccgtcacttataccatgagtgtgccactttcattggaccctgactgtatacagaatgaaaggcagtgcaatatttagctgctaacaagactggctcttttaccagtatgaatgacaatttatggggggtagggtggggaactttcttttctgtttttctttaatctccctttgttggaaagtatcatgaaaggaagagttatgctttatcttgaaggaaccattagatatggaaaatagtgatgaaccagagtttcttggttgctttttcaaaaatttgtttttatttggttctgttcctgataaacagagtaactgaccttcatttctaggttcttcaagaatggtgtttgcaagtgccagatggaacaataaaagacgttgcctataacagtgacttgattgccaaggaatgtaaattaccttaaacttgcagtatctcccataaacaaatgtaatgggcatattgggactcgtatgtaggaatcaaatatccctccatacagtgtactcttattcttggcaagaatgctttaatgtctaaccaagaattttaatttattcatcttgcttcaaagtgttgatcattgttgtcttggtattgcaaactttaaaattgtttcttaccatattgcctcttctctttgagctctgtgggatcacctttaacattcagagatgatagagtggttccccactgagaagccaaaacaaggcccttaataaccccttaagttcaccatatgaatcagaaggagaacactaaagtggagagacttttaagagatcatgatagtgaaagccttaatataatcagaattgtaccataaccttgaatctatatttgttcaaaacatccctttgacttttctaagtgtttgcttaagcagagtgtaagaatgtgtggttacctttggttgagatcctttccattctttttgactctctgcttcagattttttcagtagtgtgagtcaccaaaacatttactaagagtaattgggtttaggatgttggaaatttttagcttgggggaaaaaacattcttatgaaggagataggttctcttctgagtttgtcataatatagattggtgtctttggaaaatggccacaattttaagaattcaattatgcatataaaatgataattattggaattccacagtaacagatttaaacagtcttaaattgtttatctcctttactgtaatgtattgaaatttttagagaaattttagttgttaacattttattaagtgccagtgtcagaatataacaaattatagtttcttatgaatgacaggcctacagttattattctggattatttgatggaggacaaacttacctgtatttgttagtcaagctgtgaaaataaggtggattacaaaagatgtgaaaaaaattttagtctgtagactcagtaattttctataatttactgttaatctcatttgaacatggattaggtacaatttataaattaattcaagtcagggtctttaggtatcaggtgccagagagatatttaacagatttccctacctaaatttatgtatatgtactgtctaaaacaatacttttttaaaaaaaaggaacagttgggagaaaataaatataatgaaaaattcccagaggctagcacttggattctaacacgtatgctattgtattatccattagttctgtaatatttaattttagattcttttatttttttaattggcaaagcacaaggtgctgtataacagtgtcatttagagttttatagaaagcttcaacctgagttctgcgttataaagcctggagaaagctaagcttagaacataacttgctgaagtataattatctttttgtagcaggaatttatgtgccagaggtgagagtctttctggtactgattttttgagaccaaggataaaaggatcgttttgtaagacatgccatggcaatggctggttgggggacagtttccgcccaagcttggcctattttatttttcctcatacctactttcaaagtcatttaggtatttgaagccttatttcccacgtagtaacactttctggcttttgcagtttctttttttgtttggttttgttttttgcatggaatggggatcaaacaacccgaagaagaacacattttgatcaagcaaaatgtttgcttcaaatttcagaagtttattttacagaaattaaattaagtagtttgacatccttttctctgtttcacacatatattaggttggtgcataagtaattgtggtttttgccatgacttttatggcaaaacctgcaattacttttgcaccaacttaatacatctatatacatatatatatacgcgcacacacttgttcagaagttatgttgtggccttggatttgtttttccccttggaaatggttcttaactctgggattttagaaggttagaatattttttcaagagaacagtggtactcaaaagaatgaaaggtggtccctacattttctgtattcatcacttaaaatttttaatttttccgagaactacaagtaacatttgaaccatgctgctgttgtaccttaaacaaaaactcagtgataaccagtatttagtctattaaaaatgctctttttgaagaaaaaagtttggaagtctctgattagccagagtatagtatgagtcttcactgagaaatatggtgacccattttctttgtgaaaacctgggaaaatgcaagtgtgggtatgaagtgtgtgttctgtttgcattgaaacaatgtaattttgtgtcttctttttgctttaactgacttatttcagaaattgtacagtgttgagggggaaagtcttttctgttaatatatttgcaattcattaaaggatatggaaaatccaaataagttacttttgaaagcaatttataatcaagttgttaaagctatatgaaagctgtgccatctgtattttaataagaaggcacagaaaaacagagatacagttttatgtttcacaaaaaactagagcaatgtttatctaattttttaaaacttacactcttaatatatttatatttttaaacggtcatactcttttttagtattatttggaatatcaaaataaatactatgacaaaaacaa

SEQ ID NO: 5325 - DNA, 2570 bp, Homo sapiens
  source 1..2570: mol_type = unassigned DNA
aatgagcaggggctggccgggccggagccgctacagggggggcctgaggcactgcagaaagtgggcctgagcctcgaggatgacggtgctgcaggaacccgtccaggctgctatatggcaagcactaaaccactatgcttaccgagatgcggttttcctcgcagaacgcctttatgcagaaggcttgcagaaggggaacaaatcttatctggtggagtgtttaataagcagaaaagccatgatgatattgttactgagtttggtgattcagcttgctttactctttcattgttgggacatgtatattgcaagacagatcggcttgccaaaggatcagaatgttaccaaaagagccttagtttaaatcctttcctctggtctccctttgaatcattatgtgaaataggtgaaaagccagatcctgaccaaacatttaaattcacatctttacagaactttagcaactgtctgcccaactcttgcacaacacaagtacctaatcatagtttatctcacagacagcctgagacagttcttacggaaacaccccaggacacaattgaattaaacagattgaatttagaatcttccaattcaaagtactccttgaatacagattcctcagtgtcttatattgattcagctgtaatttcacctgatactgtcccactgggaacaggaacttccatattatctaaacaggttcaaaataaaccaaaaactggtcgaagtttattaggaggaccagcagctcttagtccattaaccccaagttttgggattttgccattagaaaccccaagtcctggagatggatcctatttacaaaactacactaatacacctcctgtaattgatgtgccatccaccggagccccttcaaaaaagtctgttgccagaatcggccaaactggaacaaagtctgtcttctcacagagtggaaatagccgagaggtaactccaattcttgcacaaacacaaagttctggtccacaaacaagtacaacacctcaggtattgagccccactattacatctcccccaaacgcactgcctcgaagaagttcacgactctttactagtgacagctccacaaccaaggagaatagcaaaaaattaaaaatgaagtttccacctaaaatcccaaacagaaaaacaaaaagtaaaactaataaaggaggaataactcaacctaacataaatgatagcctggaaattacaaaattggactcttccatcatttcagaagggaaaatatccacaatcacacctcagattcaggcctttaatctacaaaaagcagcagcagaaggtttgatgagccttcttcgtgaaatggggaaaggttatttagctttgtgttcatacaactgcaaagaagctataaatattttgagccatctaccttctcaccactacaatactggttgggtactgtgccaaattggaagggcctattttgaactttcagagtacatgcaagctgaaagaatattctcagaggttagaaggattgagaattatagagttgaaggcatggagatctactctacaacactttggcatcttcaaaaagatgttgctctttcagttctgtcaaaagacttaacagacatggataaaaattcgccagaggcctggtgtgctgcagggaactgtttcagtctgcaacgggaacatgatattgcaattaaattcttccagagagctatccaagttgatccaaattacgcttatgcctatactctattagggcatgagtttgtcttaactgaagaattggacaaagcattagcttgttttcgaaatgctatcagagtcaatcctagacattataatgcatggtatggtttaggaatgatttattacaagcaagaaaaattcagccttgcagaaatgcatttccaaaaagcgcttgatatcaaccctcaaagttcagttttactttgccacattggagtagttcaacatgcactgaaaaaatcagagaaggctttggataccctaaacaaagccattgtcattgatcccaagaaccctctatgcaaatttcacagagcctcagttttatttgcaaatgaaaaatataagtctgctttacaagaacttgaagaattgaaacaaattgttcccaaagaatccctcgtttacttcttaataggaaaggtttacaagaagttaggtcaaacgcacctcgccctgatgaatttctcttgggctatggatttagatcctaaaggagccaataaccagattaaagaggcaattgataagcgttatcttccagatgatgaggagccaataacccaagaagaacagatcatgggaacagatgaatcccaggagagcagcatgacagatgcggatgacacacaacttcatgcagctgaaagtgatgaattttaacttctggaaatcagacttttacaactggatgtgtgactagtgctgacgtgtttcttgtccctctgtatactgagtctttactcttgagctggcggtgtcatcgtccgtcacttataccatgagtgtgccactttcattggaccctgactgtatacagaatgaaa

SEQ ID NO: 5326 - DNA, 2579 bp, Homo sapiens
  source 1..2579: mol_type = unassigned DNA
ccgctacagggggggcctgaggcactgcagaaagtgggcctgagcctcgaggatgacggtgctgcaggaacccgtccaggctgctatatggcaagcactaaaccactatgcttaccgagatgcggttttcctcgcagaacgcctttatgcagaagtacactcagaagaagccttgtttttactggcaacctgttattaccgctcaggaaaggcatataaagcatatagactcttgaaaggacacagttgtactacaccgcaatgcaaatacctgcttgcaaaatgttgtgttgatctcagcaagcttgcagaaggggaacaaatcttatctggtggagtgtttaataagcagaaaagccatgatgatattgttactgagtttggtgattcagcttgctttactctttcattgttgggacatgtatattgcaagacagatcggcttgccaaaggatcagaatgttaccaaaagagccttagtttaaatcctttcctctggtctccctttgaatcattatgtgaaataggtgaaaagccagatcctgaccaaacatttaaattcacatctttacagaactttagcaactgtctgcccaactcttgcacaacacaagtacctaatcatagtttatctcacagacagcctgagacagttcttacggaaacaccccaggacacaattgaattaaacagattgaatttagaatcttccaattcaaagtactccttgaatacagattcctcagtgtcttatattgattcagctgtaatttcacctgatactgtcccactgggaacaggaacttccatattatctaaacaggttcaaaataaaccaaaaactggtcgaagtttattaggaggaccagcagctcttagtccattaaccccaagttttgggattttgccattagaaaccccaagtcctggagatggatcctatttacaaaactacactaatacacctcctgtaattgatgtgccatccaccggagccccttcaaaaaagtctgttgccagaatcggccaaactggaacaaagtctgtcttctcacagagtggaaatagccgagaggtaactccaattcttgcacaaacacaaagttctggtccacaaacaagtacaacacctcaggtattgagccccactattacatctcccccaaacgcactgcctcgaagaagttcacgactctttactagtgacagctccacaaccaaggagaatagcaaaaaattaaaaatgaagtttccacctaaaatcccaaacagaaaaacaaaaagtaaaactaataaaggaggaataactcaacctaacataaatgatagcctggaaattacaaaattggactcttccatcatttcagaagggaaaatatccacaatcacacctcagattcaggcctttaatctacaaaaagcagcagcaggtttgatgagccttcttcgtgaaatggggaaaggttatttagctttgtgttcatacaactgcaaagaagctataaatattttgagccatctaccttctcaccactacaatactggttgggtactgtgccaaattggaagggcctattttgaactttcagagtacatgcaagctgaaagaatattctcagaggttagaaggattgagaattatagagttgaaggcatggagatctactctacaacactttggcatcttcaaaaagatgttgctctttcagttctgtcaaaagacttaacagacatggataaaaattcgccagaggcctggtgtgctgcagggaactgtttcagtctgcaacgggaacatgatattgcaattaaattcttccagagagctatccaagttgatccaaattacgcttatgcctatactctattagggcatgagtttgtcttaactgaagaattggacaaagcattagcttgttttcgaaatgctatcagagtcaatcctagacattataatgcatggtatggtttaggaatgatttattacaagcaagaaaaattcagccttgcagaaatgcatttccaaaaagcgcttgatatcaaccctcaaagttcagttttactttgccacattggagtagttcaacatgcactgaaaaaatcagagaaggctttggataccctaaacaaagccattgtcattgatcccaagaaccctctatgcaaatttcacagagcctcagttttatttgcaaatgaaaaatataagtctgctttacaagaacttgaagaattgaaacaaattgttcccaaagaatccctcgtttacttcttaataggaaaggtttacaagaagttaggtcaaacgcacctcgccctgatgaatttctcttgggctatggatttagatcctaaaggagccaataaccagattaaagaggcaattgataagcgttatcttccagatgatgaggagccaataacccaagaagaacagatcatgggaacagatgaatcccaggagagcagcatgacagatgcggatgacacacaacttcatgcagctgaaagtgatgaattttaacttctggaaatcagacttttacaactggatgtgtgactagtgctgacgtgtttct

SEQ ID NO: 5327 - DNA, 3177 bp, Homo sapiens
  source 1..3177: mol_type = unassigned DNA
gaggatgacggtgctgcaggaacccgtccaggctgctatatggcaagcactaaaccactatgcttaccgagatgcggttttcctcgcagaacgcctttatgcagaagtacactcagaagaagccttgtttttactggcaacctgttattaccgctcaggaaaggcatataaagcatatagactcttgaaaggacacagttgtactacaccgcaatgcaaatacctgcttgcaaaatgttgtgttgatctcagcaagcttgcagaaggggaacaaatcttatctggtggagtgtttaataagcagaaaagccatgatgatattgttactgagtttggtgattcagcttgctttactctttcattgttgggacatgtatattgcaagacagatcggcttgccaaaggatcagaatgttaccaaaagagccttagtttaaatcctttcctctggtctccctttgaatcattatgtgaaataggtgaaaagccagatcctgaccaaacatttaaattcacatctttacagaactttagcaactgtctgcccaactcttgcacaacacaagtacctaatcatagtttatctcacagacagcctgagacagttcttacggaaacaccccaggacacaattgaattaaacagattgaatttagaatcttccaattcaaagtactccttgaatacagattcctcagtgtcttatattgattcagctgtaatttcacctgatactgtcccactgggaacaggaacttccatattatctaaacaggttcaaaataaaccaaaaactggtcgaagtttattaggaggaccagcagctcttagtccattaaccccaagttttgggattttgccattagaaaccccaagtcctggagatggatcctatttacaaaactacactaatacacctcctgtaattgatgtgccatccaccggagccccttcaaaaaagacttttcgtgttttacagtctgttgccagaatcggccaaactggaacaaagtctgtcttctcacagagtggaaatagccgagaggtaactccaattcttgcacaaacacaaagttctggtccacaaacaagtacaacacctcaggtattgagccccactattacatctcccccaaacgcactgcctcgaagaagttcacgactctttactagtgacagctccacaaccaaggagaatagcaaaaaattaaaaatgaagtttccacctaaaatcccaaacagaaaaacaaaaagtaaaactaataaaggaggaataactcaacctaacataaatgatagcctggaaattacaaaattggactcttccatcatttcagaagggaaaatatccacaatcacacctcagattcaggcctttaatctacaaaaagcagcagcagaaggtttgatgagccttcttcgtgaaatggggaaaggttatttagctttgtgttcatacaactgcaaagaagctataaatattttgagccatctaccttctcaccactacaatactggttgggtactgtgccaaattggaagggcctattttgaactttcagagtacatgcaagctgaaagaatattctcagaggttagaaggattgagaattatagagttgaaggcatggagatctactctacaacactttggcatcttcaaaaagatgttgctctttcagttctgtcaaaagacttaacagacatggataaaaattcgccagaggcctggtgtgctgcagggaactgtttcagtctgcaacgggaacatgatattgcaattaaattcttccagagagctatccaagttgatccaaattacgcttatgcctatactctattagggcatgagtttgtcttaactgaagaattggacaaagcattagcttgttttcgaaatgctatcagagtcaatcctagacattataatgcatggtatggtttaggaatgatttattacaagcaagaaaaattcagccttgcagaaatgcatttccaaaaagcgcttgatatcaaccctcaaagttcagttttactttgccacattggagtagttcaacatgcactgaaaaaatcagagaaggctttggataccctaaacaaagccattgtcattgatcccaagaaccctctatgcaaatttcacagagcctcagttttatttgcaaatgaaaaatataagtctgctttacaagaacttgaagaattgaaacaaattgttcccaaagaatccctcgtttacttcttaataggaaaggtttacaagaagttaggtcaaacgcacctcgccctgatgaatttctcttgggctatggatttagatcctaaaggagccaataaccagattaaagaggcaattgataagcgttatcttccagatgatgaggagccaataacccaagaagaacagatcatgggaacagatgaatcccaggagagcagcatgacagatgcggatgacacacaacttcatgcagctgaaagtgatgaattttaacttctggaaatcagacttttacaactggatgtgtgactagtgctgacgtgtttcttgtccctctgtatactgagtctttactcttgagctggcggtgtcatcgtccgtcacttataccatgagtgtgccactttcattggaccctgactgtatacagaatgaaaggcagtgcaatatttagctgctaacaagactggctcttttaccagtatgaatgacaatttatggggggtagggtggggaactttcttttctgtttttctttaatctccctttgttggaaagtatcatgaaaggaagagttatgctttatcttgaaggaaccattagatatggaaaatagtgatgaaccagagtttcttggttgctttttcaaaaatttgtttttatttggttctgttcctgataaacagagtaactgaccttcatttctaggttcttcaagaatggtgtttgcaagtgccagatggaacaataaaagacgttgcctataacagtgacttgattgccaaggaatgtaaattaccttaaacttgcagtatctcccataaacaaatgtaatgggcatattgggactcgtatgtaggaatcaaatatccctccatacagtgtactcttattcttggcaagaatgctttaatgtctaaccaagaattttaatttattcatcttgcttcaaa

SEQ ID NO: 5328 - DNA, 3848 bp, Homo sapiens
  source 1..3848: mol_type = unassigned DNA
ctccgcagaagatttgttgccgtcatgtcggctgcgattgcagctctggccgcttcctatggttcgggttcagggtccgaatcggactcggacagtgagagcagtcggtgtccgctgccagccgccgactccctcatgcacttgactaaatcgccttcatcaaagccgtctctagcagtggcagtggactcggctccggaggtggcagttaaggaagatttggagactggagttcaccttgaccctgccgtcaaagaagttcagtataatcctacctatgagaccatgtttgctcctgagtttggaccagaaaatccctttaggacacagcaaatggctgcccctagaaatatgctttctggatatgccgaaccagctcatatcaatgatttcatgtttgagcagcaaaggagaacttttgcaacatatggttatgcattagacccttcattagataatcatcaagtgtctgctaaatatattggttctgtagaagaagctgaaaaaaatcaaggtttaactgtatttgaaactggtcagaagaaaacagaaaagaggaaaaagtttaaagaaaatgatgcatccaatattgatggttttttgggaccatgggcaaaatatgtggatgaaaaagatgtagccaaaccttcagaagaagagcaaaaagaattggatgaaatcacagcaaagaggcagaaaaaaggaaaacaggaagaagagaaacctggggaggagaagacaatcttacatgttaaagaaatgtatgactatcaaggcaggtcctatcttcacatacctcaggatgttggtgttaatctacggtcaactatgccacctgagaagtgttatcttcccaaaaaacaaattcatgtgtggtctggacacacaaagggcgtcagtgcagtcagattgtttcctctctctggccatttattgctgtcttgttccatggactgtaaaattaagctatgggaggtttatggagaacggcgctgtctgagaacatttattggtcacagtaaggctgttagggatatctgcttcaatactgcaggaacacagttcctcagtgcagcctatgacaggtatcttaagctctgggacactgagacaggacagtgtatatcaagatttacaaaccgaaaagtaccttattgtgtcaaattcaatcctgatgaagataagcaaaatctctttgtggctgggatgtctgataagaagattgtgcaatgggacattcgaagtggagaaattgtgcaggaatatgatcggcatttgggagctgtcaacaccattgtttttgtggatgagaataggagatttgtgagcacatctgatgataaaagcctaagagtttgggaatgggatatccctgtggatttcaagtacatagcagaacccagtatgcactcaatgcctgcagtgactttgtctccaaatggaaaatggctagcatgccaatcaatggacaaccaaatcttaatttttggagcacagaacagatttagattaaataagaaaaaaatttttaagggccatatggtagcaggctatgcttgtcaggtggacttttcaccagacatgagttatgtgatttcaggagatggaaatggaaaattaaacatttgggactggaagaccacaaaactctacagtcgatttaaagctcatgataaagtgtgtataggtgcagtgtggcatcctcatgaaacttctaaggtcataacatgtggttgggatggtctcattaaattgtgggattaatgagattaatccttaaactagctgggatcatttttgatccattgtcatatttatatttaattattaaatgtatctgatgataacttgatttacagataatgttgatgacattgaccctttgtttaaaaaaagaaactgtaaatttgacataatttcatttgcaacttcattttgttttttataaatgttatttatacagaaagtggctattgactttctatttgacaagtagttataattggcaagcagtttgagtttatactcatgacatactgaaagcatctctttggggtcaagaaagaatccctagtggatttgggattctagaggaggtgttataattaattattcagaaaaatgcatgtatttacctcttcaaccaaaagggcagtaaagaatagggataatatattttaatgtaaatttggaagaaggataaaatcacccacagttactctccctattattttcactgggtcaagttttaatcttttggcttcatgagttccactccctttgatgatatatgttgtatatttttagttgtaaagcagtaatctttaactgtagcattcctctaattataaacagtgaaaaatcaaaatcagtccagagttcttttgttgacttaattcctgatcagtatagacaggactatatatatttaatcagagaattacattatatctgaagatggagctcaggagaatgcaccaagactttgaattgtatttacattcactgtcagtaaagacctggctacgctttgagaaatcaggatctcctaggtcattgcttcgcagctgtgattactgaaatcctcctcataggagataaagtacgaggggtagagtccaagatgtcaacttgtaatttctttgaagtcatatgttttatctttaaaattattcttattttacctgtgaatatatacaacagaactttttaagattaaaaaatttttaaacctctatgtctgaaaaaaaaaatgacactcctggaagatggctagggttccccagtttgagaagcagtggccatggtgaaaaatagtttttgaaaacatcagattataaaatcaagatagtccggacgcggtggcacatgcctgtaatcccagcactttgggaggctgaggcaggtgaatcacctgaggtcaggagttcaagaccagcctggccaacatagtgaaaccccgtctctactaaaaacacaaaaattagccaggcttggtggctggcgcctgtaattccagctactcagaaggctgaggcagggagaattgcttgaacccaggagtggaggttgcagtgagctgagatcatgccactgcactccagcctgggcgacagagcgagactccacctcaaaaaataaaatcaagataacctcttgaatgtaatagctcatagcactttaatttggcaagccatttttcctgttttattataaatctatattagatgtttgaatatggtttgaaatatttcactaccgtgctgaaaaaggttggttgatagcagcttggagtgctaactggaagatcaaaatcatgtctcttgctgataacctaagagcattaagctctgagtccagtgaggtcatagcagtgtatgctccttgcccttacggagtgtctgtttttagaaatttagattttaaaaggcgtgggacatacgaccaggccctatagccacataaatataaatttcatagaaaaagaataaaagcggagatatattttttgacacagaggcacccaaagaaatacaaacattgcctagctgctgccatttctgtaactgcccagaagggtgacagatttctgaaggggaaaggattcagatatgaccttttctttagtcccaaccactagttttaacaaatgtgaattattgaaatgtgaagggacaaaaagaatcatacatttaaactgtcttgttcagcataccaatattgtatgttacaaatcatcatttctaaatctggattgattctgttgtgtttttgactgtttctaaagtaagtgtgtataaaagtctcctttttaaaaagatcatatttttaaataaagcattttttgt

SEQ ID NO: 5329 - DNA, 1977 bp, Homo sapiens
  source 1..1977: mol_type = unassigned DNA
ctccgcagaagatttgttgccgtcatgtcggctgcgattgcagctctggccgcttcctatggttcgggttcagggtccgaatcggactcggacagtgagagcagtcggtgtccgctgccagccgccgactccctcatgcacttgactaaatcgccttcatcaaagccgtctctagcagtggcagtggactcggctccggaggtggcagttaaggaagatttggagactggagttcaccttgaccctgccgtcaaagaagttcagtataatcctacctatgagaccatgtttgctcctgagtttggaccagaaaatccctttaggacacagcaaatggctgcccctagaaatatgctttctggatatgccgaaccagctcatatcaatgatttcatgtttgagcagcaaaggagaacttttgcaacatatggttatgcattagacccttcattagataatcatcaagtgtctgctaaatatattggttctgtagaagaagctgaaaaaaatcaaggtttaactgtatttgaaactggtcagaagaaaacagaaaagaggaaaaagtttaaagaaaatgatgcatccaatattgatggttttttgggaccatgggcaaaatatgtggatgaaaaagatgtagccaaaccttcagaagaagagcaaaaagaattggatgaaatcacagcaaagaggcagaaaaaaggaaaacaggaagaagagaaacctggggaggagaagacaatcttacatgttaaagaaatgtatgactatcaaggcaggtcctatcttcacatacctcaggatgttggtgttaatctacggtcaactatgccacctgagaagtgttatcttcccaaaaaacaaattcatgtgtggtctggacacacaaagggcgtcagtgcagtcagattgtttcctctctctggccatttattgctgtcttgttccatggactgtaaaattaagctatgggaggtttatggagaacggcgctgtctgagaacatttattggtcacagtaaggctgttagggatatctgcttcaatactgcaggaacacagttcctcagtgcagcctatgacaggtatcttaagctctgggacactgagacaggacagtgtatatcaagatttacaaaccgaaaagtaccttattgtgtcaaattcaatcctgatgaagataagcaaaatctctttgtggctgggatgtctgataagaagattgtgcaatgggacattcgaagtggagaaattgtgcaggaatatgatcggcatttgggagctgtcaacaccattgtttttgtggatgagaataggagatttgtgagcacatctgatgataaaagcctaagagtttgggaatgggatatccctgtggatttcaagtacatagcagaacccagtatgcactcaatgcctgcagtgactttgtctccaaatggaaaatggctagcatgccaatcaatggacaaccaaatcttaatttttggagcacagaacagatttagattaaataagaaaaaaatttttaagggccatatggtagcaggctatgcttgtcaggtggacttttcaccagacatgagagtccctcagagctttcagaatctgaaggaggtgactgcaggtccccaggaggggtgaggaggatggcaagtgggtgaaggtccagacctcaactcaagagcagctcccctttgatctccttgacatatttggaatccctcacaaatttgcatttgggaaaagagctctcctgcttaaaaaaaatatgaaagcctctatcaataatttattcttaacagcttttgtaatgatttaatttatttaatcagtcctccttctggtggccatatagatattttcccaaatggatgatgttacaaactgatgttatcaacaaactgggcaactaagtttgtgtgtgtgttctgtcattttgtaaaacagaattctgaaaagaagtgttgtaaatga

SEQ ID NO: 5330 - DNA, 3927 bp, Homo sapiens
  source 1..3927: mol_type = unassigned DNA
cgcgctgcacgctgggagtgcaggaccgcgaggcctcaaggacctgggagcctcttcttcttccgccctggcagggtctccgcagaagatttgttgccgtcatgtcggctgcgattgcagctctggccgcttcctatggttcgggttcagggtccgaatcggactcggacagtgagagcagtcggtgtccgctgccagccgccgactccctcatgcacttgactaaatcgccttcatcaaagccgtctctagcagtggcagtggactcggctccggaggtggcagttaaggaagatttggagactggagttcaccttgaccctgccgtcaaagaagttcagtataatcctacctatgagaccatgtttgctcctgagtttggaccagaaaatccctttaggacacagcaaatggctgcccctagaaatatgctttctggatatgccgaaccagctcatatcaatgatttcatgtttgagcagcaaaggagaacttttgcaacatatggttatgcattagacccttcattagataatcatcaagtgtctgctaaatatattggttctgtagaagaagctgaaaaaaatcaaggtttaactgtatttgaaactggtcagaagaaaacagaaaagaggaaaaagtttaaagaaaatgatgcatccaatattgatggttttttgggaccatgggcaaaatatgtggatgaaaaagatgtagccaaaccttcagaagaagagcaaaaagaattggatgaaatcacagcaaagaggcagaaaaaaggaaaacaggaagaagagaaacctggggaggagaagacaatcttacatgttaaagaaatgtatgactatcaaggcaggtcctatcttcacatacctcaggatgttggtgttaatctacggtcaactatgccacctgagaagtgttatcttcccaaaaaacaaattcatgtgtggtctggacacacaaagggcgtcagtgcagtcagattgtttcctctctctggccatttattgctgtcttgttccatggactgtaaaattaagctatgggaggtttatggagaacggcgctgtctgagaacatttattggtcacagtaaggctgttagggatatctgcttcaatactgcaggaacacagttcctcagtgcagcctatgacaggtatcttaagctctgggacactgagacaggacagtgtatatcaagatttacaaaccgaaaagtaccttattgtgtcaaattcaatcctgatgaagataagcaaaatctctttgtggctgggatgtctgataagaagattgtgcaatgggacattcgaagtggagaaattgtgcaggaatatgatcggcatttgggagctgtcaacaccattgtttttgtggatgagaataggagatttgtgagcacatctgatgataaaagcctaagagtttgggaatgggatatccctgtggatttcaagtacatagcagaacccagtatgcactcaatgcctgcagtgactttgtctccaaatggaaaatggctagcatgccaatcaatggacaaccaaatcttaatttttggagcacagaacagatttagattaaataagaaaaaaatttttaagggccatatggtagcaggctatgcttgtcaggtggacttttcaccagacatgagttatgtgatttcaggagatggaaatggaaaattaaacatttgggactggaagaccacaaaactctacagtcgatttaaagctcatgataaagtgtgtataggtgcagtgtggcatcctcatgaaacttctaaggtcataacatgtggttgggatggtctcattaaattgtgggattaatgagattaatccttaaactagctgggatcatttttgatccattgtcatatttatatttaattattaaatgtatctgatgataacttgatttacagataatgttgatgacattgaccctttgtttaaaaaaagaaactgtaaatttgacataatttcatttgcaacttcattttgttttttataaatgttatttatacagaaagtggctattgactttctatttgacaagtagttataattggcaagcagtttgagtttatactcatgacatactgaaagcatctctttggggtcaagaaagaatccctagtggatttgggattctagaggaggtgttataattaattattcagaaaaatgcatgtatttacctcttcaaccaaaagggcagtaaagaatagggataatatattttaatgtaaatttggaagaaggataaaatcacccacagttactctccctattattttcactgggtcaagttttaatcttttggcttcatgagttccactccctttgatgatatatgttgtatatttttagttgtaaagcagtaatctttaactgtagcattcctctaattataaacagtgaaaaatcaaaatcagtccagagttcttttgttgacttaattcctgatcagtatagacaggactatatatatttaatcagagaattacattatatctgaagatggagctcaggagaatgcaccaagactttgaattgtatttacattcactgtcagtaaagacctggctacgctttgagaaatcaggatctcctaggtcattgcttcgcagctgtgattactgaaatcctcctcataggagataaagtacgaggggtagagtccaagatgtcaacttgtaatttctttgaagtcatatgttttatctttaaaattattcttattttacctgtgaatatatacaacagaactttttaagattaaaaaatttttaaacctctatgtctgaaaaaaaaaatgacactcctggaagatggctagggttccccagtttgagaagcagtggccatggtgaaaaatagtttttgaaaacatcagattataaaatcaagatagtccggacgcggtggcacatgcctgtaatcccagcactttgggaggctgaggcaggtgaatcacctgaggtcaggagttcaagaccagcctggccaacatagtgaaaccccgtctctactaaaaacacaaaaattagccaggcttggtggctggcgcctgtaattccagctactcagaaggctgaggcagggagaattgcttgaacccaggagtggaggttgcagtgagctgagatcatgccactgcactccagcctgggcgacagagcgagactccacctcaaaaaataaaatcaagataacctcttgaatgtaatagctcatagcactttaatttggcaagccatttttcctgttttattataaatctatattagatgtttgaatatggtttgaaatatttcactaccgtgctgaaaaaggttggttgatagcagcttggagtgctaactggaagatcaaaatcatgtctcttgctgataacctaagagcattaagctctgagtccagtgaggtcatagcagtgtatgctccttgcccttacggagtgtctgtttttagaaatttagattttaaaaggcgtgggacatacgaccaggccctatagccacataaatataaatttcatagaaaaagaataaaagcggagatatattttttgacacagaggcacccaaagaaatacaaacattgcctagctgctgccatttctgtaactgcccagaagggtgacagatttctgaaggggaaaggattcagatatgaccttttctttagtcccaaccactagttttaacaaatgtgaattattgaaatgtgaagggacaaaaagaatcatacatttaaactgtcttgttcagcataccaatattgtatgttacaaatcatcatttctaaatctggattgattctgttgtgtttttgactgtttctaaagtaagtgtgtataaaagtctcctttttaaaaagatcatatttttaaataaagcattttttgtag

SEQ ID NO: 5331 - DNA, 2063 bp, Homo sapiens
  source 1..2063: mol_type = unassigned DNA
cgcgctgcacgctgggagtgcaggaccgcgaggcctcaagatctgtcaggacctgggagcctcttcttcttccgccctggcagggtctccgcagaagatttgttgccgtcatgtcggctgcgattgcagctctggccgcttcctatggttcgggttcagggtccgaatcggactcggacagtgagagcagtcggtgtccgctgccagccgccgactccctcatgcacttgactaaatcgccttcatcaaagccgtctctagcagtggcagtggactcggctccggaggtggcagttaaggaagatttggagactggagttcaccttgaccctgccgtcaaagaagttcagtataatcctacctatgagaccatgtttgctcctgagtttggaccagaaaatccctttaggacacagcaaatggctgcccctagaaatatgctttctggatatgccgaaccagctcatatcaatgatttcatgtttgagcagcaaaggagaacttttgcaacatatggttatgcattagacccttcattagataatcatcaagtgtctgctaaatatattggttctgtagaagaagctgaaaaaaatcaaggtttaactgtatttgaaactggtcagaagaaaacagaaaagaggaaaaagtttaaagaaaatgatgcatccaatattgatggttttttgggaccatgggcaaaatatgtggatgaaaaagatgtagccaaaccttcagaagaagagcaaaaagaattggatgaaatcacagcaaagaggcagaaaaaaggaaaacaggaagaagagaaacctggggaggagaagacaatcttacatgttaaagaaatgtatgactatcaaggcaggtcctatcttcacatacctcaggatgttggtgttaatctacggtcaactatgccacctgagaagtgttatcttcccaaaaaacaaattcatgtgtggtctggacacacaaagggcgtcagtgcagtcagattgtttcctctctctggccatttattgctgtcttgttccatggactgtaaaattaagctatgggaggtttatggagaacggcgctgtctgagaacatttattggtcacagtaaggctgttagggatatctgcttcaatactgcaggaacacagttcctcagtgcagcctatgacaggtatcttaagctctgggacactgagacaggacagtgtatatcaagatttacaaaccgaaaagtaccttattgtgtcaaattcaatcctgatgaagataagcaaaatctctttgtggctgggatgtctgataagaagattgtgcaatgggacattcgaagtggagaaattgtgcaggaatatgatcggcatttgggagctgtcaacaccattgtttttgtggatgagaataggagatttgtgagcacatctgatgataaaagcctaagagtttgggaatgggatatccctgtggatttcaagtacatagcagaacccagtatgcactcaatgcctgcagtgactttgtctccaaatggaaaatggctagcatgccaatcaatggacaaccaaatcttaatttttggagcacagaacagatttagattaaataagaaaaaaatttttaagggccatatggtagcaggctatgcttgtcaggtggacttttcaccagacatgagagtccctcagagctttcagaatctgaaggaggtgactgcaggtccccaggaggggtgaggaggatggcaagtgggtgaaggtccagacctcaactcaagagcagctcccctttgatctccttgacatatttggaatccctcacaaatttgcatttgggaaaagagctctcctgcttaaaaaaaatatgaaagcctctatcaataatttattcttaacagcttttgtaatgatttaatttatttaatcagtcctccttctggtggccatatagatattttcccaaatggatgatgttacaaactgatgttatcaacaaactgggcaactaagtttgtgtgtgtgttctgtcattttgtaaaacagaattctgaaaagaagtgttgtaaatga

SEQ ID NO: 5332 - DNA, 400 bp, Homo sapiens
  source 1..400: mol_type = unassigned DNA
aaatatgctttctggatatgccgaaccagctcatatcaatgatttcatgtttgagcagcaaaggagaacttttgcaacatatggttatgcattagacccttcattagataatcatcaagtgtctgctaaatatattggttctgtagaagaagctgaaaaaaatcaaggtttaactgtatttgaaactggtcagaagaaaacagaaaagaggaaaaagtttaaagaaaatgatgcatccaatattgatggttttttgggaccatgggcaaaatatgtggatgaaaaagatgtagccaaaccttcagaagtaagctttgatgtttttaattgtcaattcaggtatacgctgtatctctatgaaggatatctacattaataaacttgagatttctttagagaa

SEQ ID NO: 5333 - DNA, 1119 bp, Homo sapiens
  source 1..1119: mol_type = unassigned DNA
gaagatttgttgccgtcatgtcggctgcgattgcagctctggccgcttcctatggttcgggttcagggtccgaatcggactcggacagtgagagcagtcggtgtccgctgccagccgccgactccctcatgcacttgactaaatcgccttcatcaaagccgtctctagcagtggcagtggactcggctccggaggtggcagttaaggaagatttggagactggagttcaccttgaccctgccgtcaaagaagttcagtataatcctacctatgagaccatgtttgctcctgagtttggaccagaaaatccctttaggacacagcaaatggctgcccctagaaatatgctttctggatatgccgaaccagctcatatcaatgatttcatgtttgagcagcaaaggagaacttttgcaacatatggttatgcattagacccttcattagataatcatcaagtgtctgctaaatatattggttctgtagaagaagctgaaaaaatcaaggtttaactgtatttgaaactggtcagaagaaaacagaaaagaggaaaaagtttaaagaaaatgatgcatccaatattgatggttttttgggaccatgggcaaaatatgtggatgaaaaagatgtagccaaaccttcagaagaagagcaaaaagaattggatgaaatcacagcaaagaggcagaaaaaaggaaaacaggaagaagagaaacctggggaggagaagacaatcttacatgttaaagaaatgtatgactatcaaggcaggtcctatcttcacatacctcaggatgttggtgttaatctacggtcaactatgccacctgagaagtgttatcttcccaaaaaacaaattcatgtgtggtctggacacacaaagggcgtcagtgcagtcagattgtttcctctctctggccatttattgctgtcttgttccatggactgtaaaattaagctatgggaggtttatggagaacggcgctgtctgagaacatttattggtcacagtaaggctgttagggatatctgcttcaatactgcaggaacacagttcctcagtgcagcctatgacaggtatcttaagctctgggacactgagacaggacagtgtatatc

SEQ ID NO: 5334 - DNA, 306 bp, Homo sapiens
  source 1..306: mol_type = unassigned DNA
aagagctgagtcctgctaagtagcgttcgctgccttcctctgttaatattcaatgtctttaagtttggaccagaaaatccctttaggacacagcaaatggctgcccctagaaatatgctttctggatatgccgaaccagctcatatcaatgatttcatgtttgagcagcaaaggagaacttttgcaacatatggttatgcattagacccttcattagataatcatcaagtgtctgctaaatatattggttctgtagaagaagctgaaaaaaatcaaggtttaactgtatttgaaactggtcagaag

SEQ ID NO: 5335 - DNA, 3173 bp, Homo sapiens
  source 1..3173: mol_type = unassigned DNA
ttggagacggcgacccaggcatctggggagccacagaagtcgtactcccttaaaccctgctttgctccccctgtggatgtaaccccttagctggcattttgcatctcaattggcttgtgatggaggcgtctttggggattcagatggatgagccaatggctttttctccccagcgtgaccggtttcaggctgaaggctctttaaaaaaaaacgagcagaattttaaacttgcaggtgttaaaaaagatattgagaagctttatgaagctgtaccacagcttagtaatgtgtttaagattgaggacaaaattggagaaggcactttcagctctgtttatttggccacagcacagttacaagtaggacctgaagagaaaattgctctaaaacacttgattccaacaagtcatcctataagaattgcagctgaacttcagtgcctaacagtggctggggggcaagataatgtcatgggagttaaatactgctttaggaagaatgatcatgtagttattgctatgccatatctggagcatgagtcgtttttggacattctgaattctctttcctttcaagaagtacgggaatatatgcttaatctgttcaaagctttgaaacgcattcatcagtttggtattgttcaccgtgatgttaagcccagcaattttttatataataggcgcctgaaaaagtatgccttggtagactttggtttggcccaaggaacccatgatacgaaaatagagcttcttaaatttgtccagtctgaagctcagcaggaaaggtgttcacaaaacaaatcccacataatcacaggaaacaagattccactgagtggcccagtacctaaggagctggatcagcagtccaccacaaaagcttctgttaaaagaccctacacaaatgcacaaattcagattaaacaaggaaaagacggaaaggagggatctgtaggcctttctgtccagcgctctgtttttggagaaagaaatttcaatatacacagctccatttcacatgagagccctgcagtgaaactcatgaagcagtcaaagactgtggatgtactgtctagaaagttagcaacaaaaaagaaggctatttctacaaaagttatgaatagtgctgtgatgaggaaaactgccagttcttgcccagctagcctgacctgtgactgctatgcaacagataaagtttgtagtatttgcctttcaaggcgtcagcaggttgcccctagggcaggtacaccaggattcagagcaccagaggtcttgacaaagtgccccaatcaaactacagcaattgacatgtggtctgcaggtgtcatatttctttctttgcttagtggacgatatccattttataaagcaagtgatgatttaactgctttggcccaaattatgacaattaggggatccagagaaactatccaagctgctaaaacttttgggaaatcaatattatgtagcaaagaagttccagcacaagacttgagaaaactctgtgagagactcaggggtatggattctagcactcccaagttaacaagtgatatacaagggcatgcttctcatcaaccagctatttcagagaagactgaccataaagcttcttgcctcgttcaaacacctccaggacaatactcagggaattcatttaaaaagggggatagtaatagctgtgagcattgttttgatgagtataataccaatttagaaggctggaatgaggtacctgatgaagcttatgacctgcttgataaacttctagatctaaatccagcttcaagaataacagcagaagaagctttgttgcatccattttttaaagatatgagcttgtgataatggatcttcatttaatgtttactgttatgaggtagaataaaaaagaatactttgtaatagccacaagttcttgtttagagaccagagcaggattaataatttattttaacattttagtgtttggtggcacattctaaaatatagattaagaatacttaaaatgcctgggatagttcttgggactaacaacatgatcttctttgagttaaacctacctaagtagattttaggtgggttcctattaggtcagatttttagcttccctaattacctttcactgacatatacagaaaaaggagcagttttagttttaattaattaaaattaacagatgtgatgaggattaaatgaatcaaaagacttaatttgtagattcttttagagttatgagctaggtatagtttggggaaactcaacctggtgctggtgctcttaacaattttgtaaataaagaagataatttccttttctagaggtacatattaggccttttatgaacactaaaacaatgaggaaatgttggtcatggggcaaagtatcacttaaaattgaattcatccatttttaaaaaacacttcatgaaagcattctggtgtgaattgccatttttttcttactggcttctcaattttcttccttctctgcccctacctaaaacattctcctcggaaattacatggtgctgaccacaaagtttctggatgttttattaaatattgtacgtgtttacagttgggaatttaaaataatacatacactggttgataaagggaagctgcaggaccaaggtgaagattgatagtccaaatgcttttcttttttgagttgtatattttttcacaccatcttagatataattaggtagctgctgaaaggaaaagtgaatacagaattgacggtattattggagatttttcctctgcgtagagccatccagatctctgtatcctgttttgactaagtcttaggtgggttgggaagacagataatgaagtaggcaaagagaaaaggacccaagatagaggtttatattcagaaatggtatatatcaatgacagcatatcaaacttcctatgggaaaaagtctggtgggtggtcagctgacagatttcccatttagtagtcatagaatacagaaatagtttagggacatgtattcattttgttattttgagcattgataggtcagtatatctacctaatctgtttggtaagtataggatatataaaccattaccattgatctgtcttatgccataatcttaaaaaaaatttgaatgctcttgaatttgtatattcaataaagttatccttttatatttttta

SEQ ID NO: 5336 - DNA, 3069 bp, Homo sapiens
  source 1..3069: mol_type = unassigned DNA
aagtgttgcgcaggcgcatccgatcgactcggtaggtggggatctcttggagacggcgacccaggcatctggggagccacagaagtcgtactcccttaaaccctgctttgctccccctgtggatgtaaccccttagctggcattttgcatctcaattggcttgtgatggaggcgtctttggggattcagatggatgagccaatggctttttctccccagcgtgaccggtttcaggctgaaggctctttaaaaaaaaacgagcagaattttaaacttgcaggtgttaaaaaagatattgagaagctttatgaagctgtaccacagcttagtaatgtgtttaagattgaggacaaaattggagaaggcactttcagctctgtttatttggccacagcacagttacaagtaggacctgaagagaaaattgctctaaaacacttgattccaacaagtcatcctataagaattgcagctgaacttcagtgcctaacagtggctggggggcaagataatgtcatgggagttaaatactgctttaggaagaatgatcatgtagttattgctatgccatatctggagcatgagtcgtttttggacattctgaattctctttcctttcaagaagtacgggaatatatgcttaatctgttcaaagctttgaaacgcattcatcagtttggtattgttcaccgtgatgttaagcccagcaattttttatataataggcgcctgaaaaagtatgccttggtagactttggtttggcccaaggaacccatgatacgaaaatagagcttcttaaatttgtccagtctgaagctcagcaggaaaggtgttcacaaaacaaatcccacataatcacaggaaacaagattccactgagtggcccagtacctaaggagctggatcagcagtccaccacaaaagcttctgttaaaagaccctacacaaatgcacaaattcagattaaacaaggaaaagacggaaaggagggatctgtaggcctttctgtccagcgctctgtttttggagaaagaaatttcaatatacacagctccatttcacatgagagccctgcagtgaaactcatgaagcagtcaaagactgtggatgtactgtctagaaagttagcaacaaaaaagaaggctatttctacaaaagttatgaatagtgctgtgatgaggaaaactgccagttcttgcccagctagcctgacctgtgactgctatgcaacagataaagtttgtagtatttgcctttcaaggcgtcagcaggttgcccctagggcaggtacaccaggattcagagcaccagaggtcttgacaaagtgccccaatcaaactacagggaaatcaatattatgtagcaaagaagttccagcacaagacttgagaaaactctgtgagagactcaggggtatggattctagcactcccaagttaacaagtgatatacaagggcatgcttctcatcaaccagctatttcagagaagactgaccataaagcttcttgcctcgttcaaacacctccaggacaatactcagggaattcatttaaaaagggggatagtaatagctgtgagcattgttttgatgagtataataccaatttagaaggctggaatgaggtacctgatgaagcttatgacctgcttgataaacttctagatctaaatccagcttcaagaataacagcagaagaagctttgttgcatccattttttaaagatatgagcttgtgataatggatcttcatttaatgtttactgttatgaggtagaataaaaaagaatactttgtaatagccacaagttcttgtttagagaccagagcaggattaataatttattttaacattttagtgtttggtggcacattctaaaatatagattaagaatacttaaaatgcctgggatagttcttgggactaacaacatgatcttctttgagttaaacctacctaagtagattttaggtgggttcctattaggtcagatttttagcttccctaattacctttcactgacatatacagaaaaaggagcagttttagttttaattaattaaaattaacagatgtgatgaggattaaatgaatcaaaagacttaatttgtagattcttttagagttatgagctaggtatagtttggggaaactcaacctggtgctggtgctcttaacaattttgtaaataaagaagataatttccttttctagaggtacatattaggccttttatgaacactaaaacaatgaggaaatgttggtcatggggcaaagtatcacttaaaattgaattcatccatttttaaaaaacacttcatgaaagcattctggtgtgaattgccatttttttcttactggcttctcaattttcttccttctctgcccctacctaaaacattctcctcggaaattacatggtgctgaccacaaagtttctggatgttttattaaatattgtacgtgtttacagttgggaatttaaaataatacatacactggttgataaagggaagctgcaggaccaaggtgaagattgatagtccaaatgcttttcttttttgagttgtatattttttcacaccatcttagatataattaggtagctgctgaaaggaaaagtgaatacagaattgacggtattattggagatttttcctctgcgtagagccatccagatctctgtatcctgttttgactaagtcttaggtgggttgggaagacagataatgaagtaggcaaagagaaaaggacccaagatagaggtttatattcagaaatggtatatatcaatgacagcatatcaaacttcctatgggaaaaagtctggtgggtggtcagctgacagatttcccatttagtagtcatagaatacagaaatagtttagggacatgtattcattttgttattttgagcattgataggtcagtatatctacctaatctgtttggtaagtataggatatataaaccattaccattgatctgtcttatgccataatcttaaaaaaaatttgaatgctcttgaatttgtatattcaataaagttatccttttatatttttta

SEQ ID NO: 5337 - DNA, 701 bp, Homo sapiens
  source 1..701: mol_type = unassigned DNA
cggtccttcccggctgagctcgcggccagcgctggccggcggattcccattcattcacccttctcctcctccgcccagtactcgtggccagggtcgtatcagttctccgtcaacttgcttggggccttggacgagcctcctggcgcttcctgtcagtggcgaaaagctgctttgctccccctgtggatgtaaccccttagctggcattttgcatctcaattggcttgtgatggaggcgtctttggggattcagatggatgagccaatggctttttctccccagcgtgaccggtttcaggctgaaggctctttaaaaaaaaacgagcagaattttaaacttgcaggtgttaaaaaagatattgagaagctttatgaagctgtaccacagcttagtaatgtgtttaagattgaggacaaaattggagaaggcactttcagctctgtttatttggccacagcacagttacaagtaggacctgaagagaaaattgctctaaaacacttgattccaacaagtcatcctataagaattgcagctgaacttcagtgcctaacagtggctggggggcaagataatgtcatgggagttaaatactgctttaggaagaatgatcatgtagttattgctatgccatatctggagcatgagtcgtttttggacattctgaattctctttcctttcaagaagtacgggaatata

SEQ ID NO: 5338 - DNA, 3313 bp, Homo sapiens
  source 1..3313: mol_type = unassigned DNA
atctggttcggtctctggcccgagggaagccggtccttcccggctgagctcgcggccagcgctggccggcggattcccattcattcacccttctcctcctccgcccagtactcgtggccagggtcgtatcagttctccgtcaacttgcttggggccttggacgagcctcctggcgcttcctgtcagtggcgaaaagctgctttgctccccctgtggatgtaaccccttagctggcattttgcatctcaattggcttgtgatggaggcgtctttggggattcagatggatgagccaatggctttttctccccagcgtgaccggtttcaggctgaaggctctttaaaaaaaaacgagcagaattttaaacttgcaggtgttaaaaaagatattgagaagctttatgaagctgtaccacagcttagtaatgtgtttaagattgaggacaaaattggagaaggcactttcagctctgtttatttggccacagcacagttacaagtaggacctgaagagaaaattgctctaaaacacttgattccaacaagtcatcctataagaattgcagctgaacttcagtgcctaacagtggctggggggcaagataatgtcatgggagttaaatactgctttaggaagaatgatcatgtagttattgctatgccatatctggagcatgagtcgtttttggacattctgaattctctttcctttcaagaagtacgggaatatatgcttaatctgttcaaagctttgaaacgcattcatcagtttggtattgttcaccgtgatgttaagcccagcaattttttatataataggcgcctgaaaaagtatgccttggtagactttggtttggcccaaggaacccatgatacgaaaatagagcttcttaaatttgtccagtctgaagctcagcaggaaaggtgttcacaaaacaaatcccacataatcacaggaaacaagattccactgagtggcccagtacctaaggagctggatcagcagtccaccacaaaagcttctgttaaaagaccctacacaaatgcacaaattcagattaaacaaggaaaagacggaaaggagggatctgtaggcctttctgtccagcgctctgtttttggagaaagaaatttcaatatacacagctccatttcacatgagagccctgcagtgaaactcatgaagcagtcaaagactgtggatgtactgtctagaaagttagcaacaaaaaagaaggctatttctacaaaagttatgaatagtgctgtgatgaggaaaactgccagttcttgcccagctagcctgacctgtgactgctatgcaacagataaagtttgtagtatttgcctttcaaggcgtcagcaggttgcccctagggcaggtacaccaggattcagagcaccagaggtcttgacaaagtgccccaatcaaactacagcaattgacatgtggtctgcaggtgtcatatttctttctttgcttagtggacgatatccattttataaagcaagtgatgatttaactgctttggcccaaattatgacaattaggggatccagagaaactatccaagctgctaaaacttttgggaaatcaatattatgtagcaaagaagttccagcacaagacttgagaaaactctgtgagagactcaggggtatggattctagcactcccaagttaacaagtgatatacaagggcatgcttctcatcaaccagctatttcagagaagactgaccataaagcttcttgcctcgttcaaacacctccaggacaatactcagggaattcatttaaaaagggggatagtaatagctgtgagcattgttttgatgagtataataccaatttagaaggctggaatgaggtacctgatgaagcttatgacctgcttgataaacttctagatctaaatccagcttcaagaataacagcagaagaagctttgttgcatccattttttaaagatatgagcttgtgataatggatcttcatttaatgtttactgttatgaggtagaataaaaaagaatactttgtaatagccacaagttcttgtttagagaccagagcaggattaataatttattttaacattttagtgtttggtggcacattctaaaatatagattaagaatacttaaaatgcctgggatagttcttgggactaacaacatgatcttctttgagttaaacctacctaagtagattttaggtgggttcctattaggtcagatttttagcttccctaattacctttcactgacatatacagaaaaaggagcagttttagttttaattaattaaaattaacagatgtgatgaggattaaatgaatcaaaagacttaatttgtagattcttttagagttatgagctaggtatagtttggggaaactcaacctggtgctggtgctcttaacaattttgtaaataaagaagataatttccttttctagaggtacatattaggccttttatgaacactaaaacaatgaggaaatgttggtcatggggcaaagtatcacttaaaattgaattcatccatttttaaaaaacacttcatgaaagcattctggtgtgaattgccatttttttcttactggcttctcaattttcttccttctctgcccctacctaaaacattctcctcggaaattacatggtgctgaccacaaagtttctggatgttttattaaatattgtacgtgtttacagttgggaatttaaaataatacatacactggttgataaagggaagctgcaggaccaaggtgaagattgatagtccaaatgcttttcttttttgagttgtatattttttcacaccatcttagatataattaggtagctgctgaaaggaaaagtgaatacagaattgacggtattattggagatttttcctctgcgtagagccatccagatctctgtatcctgttttgactaagtcttaggtgggttgggaagacagataatgaagtaggcaaagagaaaaggacccaagatagaggtttatattcagaaatggtatatatcaatgacagcatatcaaacttcctatgggaaaaagtctggtgggtggtcagctgacagatttcccatttagtagtcatagaatacagaaatagtttagggacatgtattcattttgttattttgagcattgataggtcagtatatctacctaatctgtttggtaagtataggatatataaaccattaccattgatctgtcttatgccataatcttaaaaaaaatttgaatgctcttgaatttgtatattcaataaagttatccttttatatttttta

SEQ ID NO: 5339 - DNA, 1866 bp, Homo sapiens
  source 1..1866: mol_type = unassigned DNA
gttgcgcaggcgcatccgatcgactcggtaggtggggatctcttggagacggcgacccaggcatctggggagccacagaagtcgtactcccttaaaccctgctttgctccccctgtggatgtaaccccttagctggcattttgcatctcaattggcttgtgatggaggcgtctttggggattcagatggatgagccaatggctttttctccccagcgtgaccggtttcaggctgaaggctctttaaaaaaaaacgagcagaattttaaacttgcaggcactttcagctctgtttatttggccacagcacagttacaagtaggacctgaagagaaaattgctctaaaacacttgattccaacaagtcatcctataagaattgcagctgaacttcagtgcctaacagtggctggggggcaagataatgtcatgggagttaaatactgctttaggaagaatgatcatgtagttattgctatgccatatctggagcatgagtcgtttttggacattctgaattctctttcctttcaagaagtacgggaatatatgcttaatctgttcaaagctttgaaacgcattcatcagtttggtattgttcaccgtgatgttaagcccagcaattttttatataataggcgcctgaaaaagtatgccttggtagactttggtttggcccaaggaacccatgatacgaaaatagagcttcttaaatttgtccagtctgaagctcagcaggaaaggtgttcacaaaacaaatcccacataatcacaggaaacaagattccactgagtggcccagtacctaaggagctggatcagcagtccaccacaaaagcttctgttaaaagaccctacacaaatgcacaaattcagattaaacaaggaaaagacggaaaggagggatctgtaggcctttctgtccagcgctctgtttttggagaaagaaatttcaatatacacagctccatttcacatgagagccctgcagtgaaactcatgaagcagtcaaagactgtggatgtactgtctagaaagttagcaacaaaaaagaaggctatttctacaaaagttatgaatagtgctgtgatgaggaaaactgccagttcttgcccagctagcctgacctgtgactgctatgcaacagataaagtttgtagtatttgcctttcaaggcgtcagcaggttgcccctagggcaggtacaccaggattcagagcaccagaggtcttgacaaagtgccccaatcaaactacagcaattgacatgtggtctgcaggtgtcatatttctttctttgcttagtggacgatatccattttataaagcaagtgatgatttaactgctttggcccaaattatgacaattaggggatccagagaaactatccaagctgctaaaacttttgggaaatcaatattatgtagcaaagaagttccagcacaagacttgagaaaactctgtgagagactcaggggtatggattctagcactcccaagttaacaagtgatatacaagggcatgcttctcatcaaccagctatttcagagaagactgaccataaagcttcttgcctcgttcaaacacctccaggacaatactcagggaattcatttaaaaagggggatagtaatagctgtgagcattgttttgatgagtataataccaatttagaaggctggaatgaggtacctgatgaagcttatgacctgcttgataaacttctagatctaaatccagcttcaagaataacagcagaagaagctttgttgcatccattttttaaagatatgagcttgtgataatggatcttcatttaatgtttactgttatgaggtagaataaaaaagaatactttgtaatagc

SEQ ID NO: 5340 - DNA, 4683 bp, Homo sapiens
  source 1..4683: mol_type = unassigned DNA
gaagttggcgcatgcgcctaaagctgacgggtttgaaatggcttcgatgttagccgggacccgactcagatcgatgctatagaagacaaacaagggaaggttttttttccttttgcatcatggctcaatttggaggacagaagaatccgccatgggctactcagtttacagccactgcagtatcacagccagctgcactgggtgttcaacagccatcactccttggagcatctcctaccatttatacacagcaaactgcattggcagcagcaggccttaccacacaaactccagcaaactatcagttaacacaaactgctgcattgcagcaacaagccgcagctgcagcagctgcattacaacagcaatattcacaacctcagcaggccctgtatagtgtgcaacaacagttacagcaaccccagcaaaccctcttaacacagccagctgttgcactgcctacaagccttagcctgtctactcctcagccaacagcacaaataactgtatcatatccaacaccaaggtccagtcaacagcaaacccagcctcagaagcagcgtgttttcacaggggtggttacaaaactacatgatacgtttggatttgtggatgaagatgtattctttcagcttagtgctgtcaaagggaaaaccccccaagtaggtgacagagtattggttgaagctacttataatcctaatatgccttttaaatggaatgcacagagaattcaaacactaccaaatcagaatcagtcgcaaacccagccattactgaagactcctcctgctgtacttcagccaattgcaccacagacaacatttggtgttcagactcagccccagccccagtcactgctgcaggcacagatttcagcagcttctattacaccactattgcagactcaaccacagcccttattacagcagcctcagcaaaaagctggtttattgcagcctcctgttcgtatagtttcacagccacaaccggcacgacgattagatcccccatcccgattttcaggaagaaatgacagaggggatcaagtgcctaacagaaaagatgatcgaagtcgtgagagagagagagaaagacgtagatcgagagaaagatcacctcagaggaaacgttcccgggaaagatctccacgaagagagcgagagcgatcacctcggagagttcgacgtgttgttccacgttacacagttcagttttcaaagttttctttagattgtcccagttgtgacatgatggaactaaggcgccgttatcaaaatttgtatatacctagtgacttttttgatgctcaatttacatgggtggatgctttccctttgtcaagaccatttcagctgggaaattactgcaatttttatgtaatgcacagagaagtagagtccttagaaaaaaatatggccattcttgatccaccagatgctgaccacttatacagtgcaaaggtaatgctgatggctagccctagtatggaagatttatatcataagtcatgtgctcttgctgaggacccacaagaacttcgagatggattccaacatcctgctagacttgttaagtttttagtgggcatgaaaggcaaggatgaagctatggccattggaggccactggtctccttcgttggatggaccagacccagaaaaagatccctctgtgttgattaagactgctattcgttgttgtaaggctctgacaggcattgatctaagtgtgtgcacacaatggtaccgttttgcagagattcgctaccatcgccctgaggagacccacaaggggcgtacagttccagctcatgtggagacagtggttttatttttcccggatgtttggcattgccttcccacccgctcagagtgggaaaccctctcccgaggatacaagcagcagctggtcgagaagcttcagggtgaacgcaaggaggctgatggagaacaggatgaagaagagaaggatgatggtgaagctaaagaaatttctacacctacccattggtctaaacttgatccaaagacaatgaaggtaaatgacctccgaaaagaattagaaagtcgagctcttagttccaaaggattaaaatcccagttaatagcccgattgacaaaacagcttaaagtagaggaacaaaaagaagaacagaaggagttagagaaatctgaaaaagaagaggatgaggatgatgataggaaatctgaagacgataaagaggaagaagaaaggaaacgtcaagaggaaatagaacgccagcgtcgagaaagaagatatattttgcctgatgaaccggccatcattgtacatccaaattgggctgcaaaaagtggcaagtttgattgtagcatcatgtctttgagtgtcctattggactacagattagaggataataaagaacattcatttgaggtttcattgtttgcggaacttttcaacgaaatgcttcaaagagattttggtgtccgtatatacaaatcattactgtctcttcctgagaaagaggacaaaaaagaaaaggataaaaaaagcaaaaaagatgagagaaaagataaaaaagaagaaagagatgatgaaactgatgaaccaaaacccaaacggagaaaatcaggcgatgataaagataaaaaagaagatagagatgaaaggaagaaagaagataaaagaaaagatgattctaaagatgatgatgaaactgaagaagataacaatcaagatgaatatgaccctatggaagcagaagaagctgaggatgaagaagatgatagggatgaggaagaaatgaccaaacgagatgacaaaagagatatcaacagatactgcaaggagaggccctctaaagataaggaaaaagaaaagactcaaatgatcacaattaacagagatctgttaatggcttttgtttattttgatcaaagtcattgtggttaccttcttgaaaaggatttggaagaaatactttatactcttggactacatctttctcgggctcaggtaaagaagcttcttaataaagtagtgctccgtgaatcttgcttttaccggaaattaacagacacctcaaaagatgaagagaaccatgaagagtctgagtcattgcaggaagatatgctaggaaacagattattacttccaacaccaacagtaaagcaggaatcaaaggatgtggaagaaaatgttggcctcattgtgtacaatggtgcaatggtagatgtaggaagcctcttgcaaaaattggaaaagagcgaaaaagtaagagctgaggtagaacagaagctgcagttactagaagaaaaaacagatgaagatgaaaaaaccatattaaatttggagaattccaacaaaagcctctctggtgaactcagagaagttaaaaaggaccttagtcagttacaagaaaacttaaagatttcggaaaacatgaatttacaatttgaaaaccaaatgaataagacaatcagaaacttatctacggtaatggatgaaatccacactgttctcaagaaggataatgtaaagaatgaagacaaagatcaaaaatccaaggagaatggtgccagtgtatgataaaatccatgtagtgatgaggaatggtgttaaataatgtaatatataaaaatcatgatataagaatgtttgaaggtgatgcatgtttgattttagtagtataaatgtattttagttcaaatgatgtataaagttttatgaatgtgagtttctgcttttgaaaattgcttgtaattcctagccttcaaattattaaacactccttgagtgaaataattttgcattgcaaagtgttttaggatgaactttgttatagttttaactccaataaagttcatcagtttaattgactgtagtatttaattaccaaatttcttttattaaaatgcctagaaatttttaatttatagaattattaggttttaaaatttttagttcatctgttaaaatttcagtcaaaatcataaaatagcatgatgcttaatttttgcaagttttttgaaactttttgttttttttactcatcaccaaaaaatcccctcttgatcagtctctaaaagcattcattaaaaattcagttcaggccgggcacggtggctcacacctgtaatcccaacactttgggaggccgaggcaggtggatcacctgaggttaggagttcgagaccagcctggccaacatggtgaaacccggtctctactaaaaatataaaaattagctgggcatggtggtgggtgcctgtaatcccagctacttgggaggctgaggcaggagaatcgcttgaacccaggaggcggaggttgcagtcactcaggatcatgcagctacactccagcctgggcgacaagagtgaaactccatctcaaaaagaaaaaaaaaaaaaatcagtttatttgaaagacagtatatcagaaagaaagaagcaatagagaactagtattgttctttatgggttagactttacataatattagttgtcctgatgtcaatgttactgctttcaattaatttttctactttcccagaatagcatctatattccttttaattttgagggtttaaaaaaaaatgcagtgtatgtcaaatttacagtttagtaccaagccagtagatgtcagtatgatgccttaaattaagtcttctttaattaaagatatttttttaaattaa

SEQ ID NO: 5341 - DNA, 3813 bp, Homo sapiens
  source 1..3813: mol_type = unassigned DNA
gaagttggcgcatgcgcctaaagctgacgggtttgaaatggcttcgatgttagccgggacccgactcagatcgatgctatagaagacaaacaagggaaggttttttttccttttgcatcatggctcaatttggaggacagaagaatccgccatgggctactcagtttacagccactgcagtatcacagccagctgcactgggtgttcaacagccatcactccttggagcatctcctaccatttatacacagcaaactgcattggcagcagcaggccttaccacacaaactccagcaaactatcagttaacacaaactgctgcattgcagcaacaagccgcagctgcagcagctgcattacaacagttacagcaaccccagcaaaccctcttaacacagccagctgttgcactgcctacaagccttagcctgtctactcctcagccaacagcacaaataactgtatcatatccaacaccaaggtccagtcaacagcaaacccagcctcagaagcagcgtgttttcacaggggtggttacaaaactacatgatacgtttggatttgtggatgaagatgtattctttcagcttagtgctgtcaaagggaaaaccccccaagtaggtgacagagtattggttgaagctacttataatcctaatatgccttttaaatggaatgcacagagaattcaaacactaccaaatcagaatcagtcgcaaacccagccattactgaagactcctcctgctgtacttcagccaattgcaccacagacaacatttggtgttcagactcagccccagccccagtcactgctgcaggcacagatttcagcagcttctattacaccactattgcagactcaaccacagcccttattacagcagcctcagcaaaaagctggtttattgcagcctcctgttcgtatagtttcacagccacaaccggcacgacgattagatcccccatcccgattttcaggaagaaatgacagaggggatcaagtgcctaacagaaaagatgatcgaagtcgtgagagagagagagaaagacgtagatcgagagaaagatcacctcagaggaaacgttcccgggaaagatctccacgaagagagcgagagcgatcacctcggagagttcgacgtgttgttccacgttacacagttcagttttcaaagttttctttagattgtcccagttgtgacatgatggaactaaggcgccgttatcaaaatttgtatatacctagtgacttttttgatgctcaatttacatgggtggatgctttccctttgtcaagaccatttcagctgggaaattactgcaatttttatgtaatgcacagagaagtagagtccttagaaaaaaatatggccattcttgatccaccagatgctgaccacttatacagtgcaaaggtaatgctgatggctagccctagtatggaagatttatatcataagtcatgtgctcttgctgaggacccacaagaacttcgagatggattccaacatcctgctagacttgttaagtttttagtgggcatgaaaggcaaggatgaagctatggccattggaggccactggtctccttcgttggatggaccagacccagaaaaagatccctctgtgttgattaagactgctattcgttgttgtaaggctctgacaggcattgatctaagtgtgtgcacacaatggtaccgttttgcagagattcgctaccatcgccctgaggagacccacaaggggcgtacagttccagctcatgtggagacagtggttttatttttcccggatgtttggcattgccttcccacccgctcagagtgggaaaccctctcccgaggatacaagcagcagctggtcgagaagcttcagggtgaacgcaaggaggctgatggagaacaggatgaagaagagaaggatgatggtgaagctaaagaaatttctacacctacccattggtctaaacttgatccaaagacaatgaaggtaaatgacctccgaaaagaattagaaagtcgagctcttagttccaaaggattaaaatcccagttaatagcccgattgacaaaacagcttaaagtagaggaacaaaaagaagaacagaaggagttagagaaatctgaaaaagaagaggatgaggatgatgataggaaatctgaagacgataaagaggaagaagaaaggaaacgtcaagaggaaatagaacgccagcgtcgagaaagaagatatattttgcctgatgaaccggccatcattgtacatccaaattgggctgcaaaaagtggcaagtttgattgtagcatcatgtctttgagtgtcctattggactacagattagaggataataaagaacattcatttgaggtttcattgtttgcggaacttttcaacgaaatgcttcaaagagattttggtgtccgtatatacaaatcattactgtctcttcctgagaaagaggacaaaaaagaaaaggataaaaaaagcaaaaaagatgagagaaaagataaaaaagaagaaagagatgatgaaactgatgaaccaaaacccaaacggagaaaatcaggcgatgataaagataaaaaagaagatagagatgaaaggaagaaagaagataaaagaaaagatgattctaaagatgatgatgaaactgaagaagataacaatcaagatgaatatgaccctatggaagcagaagaagctgaggatgaagaagatgatagggatgaggaagaaatgaccaaacgagatgacaaaagagatatcaacagatactgcaaggagaggccctctaaagataaggaaaaagaaaagactcaaatgatcacaattaacagagatctgttaatggcttttgtttattttgatcaaagtcattgtggttaccttcttgaaaaggatttggaagaaatactttatactcttggactacatctttctcgggctcaggtaaagaagcttcttaataaagtagtgctccgtgaatcttgcttttaccggaaattaacagacacctcaaaagatgaagagaaccatgaagagtctgagtcattgcaggaagatatgctaggaaacagattattacttccaacaccaacagtaaagcaggaatcaaaggatgtggaagaaaatgttggcctcattgtgtacaatggtgcaatggtagatgtaggaagcctcttgcaaaaattggaaaagagcgaaaaagtaagagctgaggtagaacagaagctgcagttactagaagaaaaaacagatgaagatgaaaaaaccatattaaatttggagaattccaacaaaagcctctctggtgaactcagagaagttaaaaaggaccttagtcagttacaagaaaacttaaagatttcggaaaacatgaatttacaatttgaaaaccaaatgaataagacaatcagaaacttatctacggtaatggatgaaatccacactgttctcaagaaggataatgtaaagaatgaagacaaagatcaaaaatccaaggagaatggtgccagtgtatgataaaatccatgtagtgatgaggaatggtgttaaataatgtaatatataaaaatcatgatataagaatgtttgaaggtgatgcatgtttgattttagtagtataaatgtattttagttcaaatgatgtataaagttttatgaatgtgagtttctgcttttgaaaattgcttgtaattcctagccttcaaattattaaacactccttgagtgaaataattttgcattgcaaagtgttttaggatgaactttgttatagttttaactccaataaagttcatcagtttaa

SEQ ID NO: 5342 - DNA, 552 bp, Homo sapiens
  source 1..552: mol_type = unassigned DNA
cttcagagcaagcgcaagacatatagccccgctcattgttaagcgaggccaaggcaacccttaggcgcgctctatttcccctttcgtagcgaaagggccaggcgtattgagcggtcaggggagcgcgcacgcagaacgtcagccaatcgatgctatagaagacaaacaagggaaggttttttttccttttgcatcatggctcaatttggaggacagaagaatccgccatgggctactcagtttacagccactgcagtatcacagccagctgcactgggtgttcaacagccatcactccttggagcatctcctaccatttatacacagcaaactgcattggcagcagcaggccttaccacacaaactccagcaaactatcagttaacacaaactgctgcattgcagcaacaagccgcagctgcagcagctgcattacaacagcaatattcacaacctcagcaggccctgtatagtgtgcaacaacagttacagcaaccccagcaaaccctcttaacacagccagctgttgcactgcctacaagccttagcctg

SEQ ID NO: 5343 - DNA, 754 bp, Homo sapiens
  source 1..754: mol_type = unassigned DNA
agttggcgcatgcgcctaaagctgacgggtttgaaatggcttcgatgttagccgggacccgactcaggtgaaggtctggtccccgtagttggagcagtgggcggccaagccgggtctcttaacatcttgtcgaatctgtggaagggccgggagcgatcttttgggtagcccggcggccccgggcggcgacgatcgatgctatagaagacaaacaagggaaggttttttttccttttgcatcatggctcaatttggaggacagaagaatccgccatgggctactcagtttacagccactgcagtatcacagccagctgcactgggtgttcaacagccatcactccttggagcatctcctaccatttatacacagcaaactgcattggcagcagcaggccttaccacacaaactccagcaaactatcagttaacacaaactgctgcattgcagcaacaagccgcagctgcagcagctgcattacaacagcaatattcacaacctcagcaggccctgtatagtgtgcaacaacagttacagcaaccccagcaaaccctcttaacacagccagctgttgcactgcctacaagccttagcctgtctactcctcagccaacagcacaaataactgtatcatatccaacaccaaggtccagtcaacagcaaacccagcctcagaagcagcgtgttttcacaggggtggttacaaaactacatgatacgtttggatttgtggatgaagatgtattctttcag

SEQ ID NO: 5344 - DNA, 3224 bp, Homo sapiens
  source 1..3224: mol_type = unassigned DNA
gacgggtttgaaatggcttcgatgttagccgggacccgactcagatcgatgctatagaagacaaacaagggaaggttttttttccttttgcatcatggctcaatttggaggacagaagaatccgccatgggctactcagtttacagccactgcagtatcacagccagctgcactgggtgttcaacagccatcactccttggagcatctcctaccatttatacacagcaaactgcattggcagcagcaggccttaccacacaaactccagcaaactatcagttaacacaaactgctgcattgcagcaacaagccgcagctgcagcagctgcattacaacagttacagcaaccccagcaaaccctcttaacacagccagctgttgcactgcctacaagccttagcctgtctactcctcagccaacagcacaaataactgtatcatatccaacaccaaggtccagtcaacagcaaacccagcctcagaagcagcgtgttttcacaggggtggttacaaaactacatgatacgtttggatttgtggatgaagatgtattctttcagcttagtgctgtcaaagggaaaaccccccaagtaggtgacagagtattggttgaagctacttataatcctaatatgccttttaaatggaatgcacagagaattcaaacactaccaaatcagaatcagtcgcaaacccagccattactgaagactcctcctgctgtacttcagccaattgcaccacagacaacatttggtgttcagactcagccccagccccagtcactgctgcaggcacagatttcagcagcttctattacaccactattgcagactcaaccacagcccttattacagcagcctcagcaaaaagctggtttattgcagcctcctgttcgtatagtttcacagccacaaccggcacgacgattagatcccccatcccgattttcaggaagaaatgacagaggggatcaagtgcctaacagaaaagatgatcgaagtcgtgagagagagagagaaagacgtagatcgagagaaagatcacctcagaggaaacgttcccgggaaagatctccacgaagagagcgagagcgatcacctcggagagttcgacgtgttgttccacgttacacagttcagttttcaaagttttctttagattgtcccagttgtgacatgatggaactaaggcgccgttatcaaaatttgtatatacctagtgacttttttgatgctcaatttacatgggtggatgctttccctttgtcaagaccatttcagctgggaaattactgcaatttttatgtaatgcacagagaagtagagtccttagaaaaaaatatggccattcttgatccaccagatgctgaccacttatacagtgcaaaggtaatgctgatggctagccctagtatggaagatttatatcataagtcatgtgctcttgctgaggacccacaagaacttcgagatggattccaacatcctgctagacttgttaagtttttagtgggcatgaaaggcaaggatgaagctatggccattggaggccactggtctccttcgttggatggaccagacccagaaaaagatccctctgtgttgattaagactgctattcgttgttgtaaggctctgacaggcattgatctaagtgtgtgcacacaatggtaccgttttgcagagattcgctaccatcgccctgaggagacccacaaggggcgtacagttccagctcatgtggagacagtggttttatttttcccggatgtttggcattgccttcccacccgctcagagtgggaaaccctctcccgaggatacaagcagcagctggtcgagaagcttcagggtgaacgcaaggaggctgatggagaacaggatgaagaagagaaggatgatggtgaagctaaagaaatttctacacctacccattggtctaaacttgatccaaagacaatgaaggtaaatgacctccgaaaagaattagaaagtcgagctcttagttccaaaggattaaaatcccagttaatagcccgattgacaaaacagcttaaagtagaggaacaaaaagaagaacagaaggagttagagaaatctgaaaaagaagaggatgaggatgatgataggaaatctgaagacgataaagaggaagaagaaaggaaacgtcaagaggaaatagaacgccagcgtcgagaaagaagatatattttgcctgatgaaccggccatcattgtacatccaaattgggctgcaaaaagtggcaagtttgattgtagcatcatgtctttgagtgtcctattggactacagattagaggataataaagaacattcatttgaggtttcattgtttgcggaacttttcaacgaaatgcttcaaagagattttggtgtccgtatatacaaatcattactgtctcttcctgagaaagaggacaaaaaagaaaaggataaaaaaagcaaaaaagatgagagaaaagataaaaaagaagaaagagatgatgaaactgatgaaccaaaacccaaacggagaaaatcaggcgatgataaagataaaaaagaagatagagatgaaaggaagaaagaagataaaagaaaagatgattctaaagatgatgatgaaactgaagaagataacaatcaagatgaatatgaccctatggaagcagaagaagctgaggatgaagaagatgatagggatgaggaagaaatgaccaaacgagatgacaaaagagatatcaacagatactgcaaggagaggccctctaaagataaggaaaaagaaaagactcaaatgatcacaattaacagagatctgttaatggcttttgtttattttgatcaaagtcattgtggttaccttcttgaaaaggatttggaagaaatactttatactcttggactacatctttctcgggctcaggtaaagaagcttcttaataaagtagtgctccgtgaatcttgcttttaccggaaattaacagacacctcaaaagatgaagagaaccatgaagagtctgagtcattgcaggaagatatgctaggaaacagattattacttccaacaccaacagtaaagcaggaatcaaaggatgtggaagaaaatgttggcctcattgtgtacaatggtgcaatggtagatgtaggaagcctcttgcaaaaattggaaaagagcgaaaaagtaagagctgaggtagaacagaagctgcagttactag

SEQ ID NO: 5345 - DNA, 2513 bp, Homo sapiens
  source 1..2513: mol_type = unassigned DNA
agcgcagcgtcgaccctttgtggacgccgagtggcggtcgctcgccccgccccgcgccgtcgggcgctccttcctcagcggcgggaagctggcggcagcggcggtggcggtggctgagcagaggacccggcgggcggcctcgcgggtcaggacacaatgtttgcacgaggactgaagaggaaatgtgttggccacgaggaagacgtggagggagccctggccggcttgaagacagtgtcctcatacagcctgcagcggcagtcgctcctggacatgtctctggtgaagttgcagctttgccacatgcttgtggagcccaacctgtgccgctcagtcctcattgccaacacggtccggcagatccaagaggagatgacgcaggatgggacgtggcgcacagtggcaccccaggctgcagagcgggcgccgctcgaccgcttggtctccacggagatcctgtgccgtgcagcgtgggggcaagagggggcacatcctgctcctggcttgggggacggccacacacagggtccagtttctgacctttgcccagtcacctcagcacaggcaccaaggcacctgcagagcagcgcctgggagatggatggccctcgagaaaacagaggaagctttcacaagtcacttgatcagatatttgaaacgctggagactaaaaaccccagctgcatggaagagctgttctcagacgtggacagcccctactacgacctggacacagtactgacaggcatgatggggggtgccaggccgggcccctgcgaagggctcgagggcttggctccggccaccccaggccctagctccagctgcaagtccgacctgggcgagctggaccacgtggtggagatcctggtggagacctgagcaggagccctgagtgctcacagccgcctctgacgcattgacacgtgagcactggctcccacggagggtgcgcctgccgccagcggcccagccttgctgccctgtctgctgattctgagaaatcccagaacagcccattaccagtggggctgcagccctaggcccgtcccactcacctcccccctgtggagcgccaggcagaggctgttctggaaggcttcttgtcttctgacgtccccacagccctgggcccctcgtgtctctttgtgtcccccactgtagaggacggtgagccgcagctgcatcaacctccttttacctttagataggtgaatttttacaattcagttttacatgttttgggcagtattttgtcttaagatatattttttaaactttttataccttatctctttagattttttcagctattttcttaaaagtatattttttctataaacatcctttgctgctacattagaacttttatagcctaaacaattgcagttggtgtgtttcatttttttaaggtttaaataagggttttttgttttgttttgttttttgcagtgagcatcactacagtctcagtcaacagtgtgaatgtatcatgttttactttaaatgtgtgtgtgatacttcttcattatgtcctgcgctgcagtgagacctgggtgaaaatcaggagccgcacacagccacatcttcctagacctaagagtaaattatggaggattttatttatgtctatttatatgtaaatgtcattgaagacaaaggtcaaatatttgtctgtttgtagatcacaggcaccagttggtcttcagggacctcatagcccctcggtggtgccttctcaaggcagtgttcctggaggctcccatcagggtcagcccatgcacctgccctgggtgaggaagtagcattgctgctggatgagaaacgcctgcgctgctctgttagactggtgctgaaacaaaaggttaaggctaggttgaagtctagaatgaaagaaatctgaatccatgtcattcataaccccttgatctgtagtgtcatgggtgctgccgcaggcagggagtgagctgggggtgcctgcagccttccactcctgccccgcctcaccccacatgctccctgtttctcatgctttctctaacttcctcaccccttaaccaaaaaggtgtgttttcttttgtgcatatagccattcttaaatatcagtgatgtaaacctcactttattaaaaaattatccagcaaacaaaatgggaatgtggtgttagttacgaccacggcctgaccctccagcaacctttctgcaggatcagttctgctgtattatctggtggtgctttctaaggtggggaaaggaattgcacttggctgcattaaatggacgctgggttacttttatttcccccccccacagggttgcagagcaaattctttttacattgttcagcgcccggctggagttgggggtgtccacgacctctgacagcccccgatgtcgaaagttaatcctcatggaccctagtttaaagggtatgtgttttataggaataaatctaaagcactattttgtttctgtatagcatttttatcttttagaaacatcatttgttcagc

SEQ ID NO: 5346 - DNA, 1536 bp, Homo sapiens
  source 1..1536: mol_type = unassigned DNA
ctggcggcagcggcggtggcggtggctgagcagaggacccggcgggcggcctcgcgggtcaggacacaatgtttgcacgaggactgaagaggaaatgtgttggccacgaggaagacgtggagggagccctggccggcttgaagacagtgtcctcatacagcctgcagcggcagtcgctcctggacatgtctctggtgaagttgcagctttgccacatgcttgtggagcccaacctgtgccgctcagtcctcattgccaacacggtccggcagatccaagaggagatgacgcaggatgggacgtggcgcacagtggcaccccaggctgcagagcgggcgccgctcgaccgcttggtctccacggagatcctgtgccgtgcagcgtgggggcaagagggggcacatcctgctcctggcttgggggacggccacacacagggtccagtttctgacctttgcccagtcacctcagcacaggcaccaaggcacctgcagagcagcgcctgggagatggatggccctcgagaaaacagaggaagctttcacaagtcacttgatcagatatttgaaacgctggagactaaaaaccccagctgcatggaagagctgttctcagacgtggacagcccctactacgacctggacacagtactgacaggcatgatggggggtgccaggccgggcccctgcgaagggctcgagggcttggctccggccaccccaggccctagctccagctgcaagtccgacctgggcgagctggaccacgtggtggagatcctggtggagacctgagcaggagccctgagtgctcacagccgcctctgacgcattgacactgagcatcactacagtctcagtcaacagtgtgaatgtatcatgttttactttaaatgtgtgtgtgatacttcttcattatgtcctgcgctgcagtgagacctgggtgaaaatcaggagccgcacacagccacatcttcctagacctaagagtaaattatggaggattttatttatgtctatttatatgtaaatgtcattgaagacaaaggtcaaatatttgtctgtttgtagatcacaggcaccagttggtcttcagggacctcatagcccctcggtggtgccttctcaaggcagtgttcctggaggctcccatcagggtcagcccatgcacctgccctgggtgaggaagtagcattgctgctggatgagaaacgcctgcgctgctctgttagactggtgctgaaacaaaaggttaaggctaggttgaagtctagaatgaaagaaatctgaatccatgtcattcataaccccttgatctgtagtgtcatgggtgctgccgcaggcagggagtgagctgggggtgcctgcagccttccactcctgccccgcctcaccccacatgctccctgtttctcatgctttctctaacttcctcaccccttaaccaaaaaggtgtgttttcttttgtgcatatagccattcttaaatatcagtgatgtaaacctcactttattaaaaaattatccagcaaacaaaa

SEQ ID NO: 5347 - DNA, 2587 bp, Homo sapiens
  source 1..2587: mol_type = unassigned DNA
gacgggtggaaaagactcggggttccgagggccgcagaccgctagccctacgtcacttccgcttcctttcccgcagggcgggtaattcgaacgttttttgcagcgagtggccttcccggttggcgcgcgcccggggcggcggcgctggaggagctcgagacggagcctaagttatgtctgggaggcgaacgcggtccggaggagccgctcagcgctccgggccaagggccccatctcctactaagcctctgcggaggtcccagcggaaatcaggctctgaactcccgagcatcctccctgaaatctggccgaagacacccagtgcggctgcagtcagaaagcccatcgtcttaaagaggatcgtggcccatgctgtagaggtcccagctgtccaatcacctcgcaggagccctaggatttcctttttcttggagaaagaaaacgagccccctggcagggagcttactaaggaggaccttttcaagacacacagcgtccctgccacccccaccagcactcctgtgccgaaccctgaggccgagtccagctccaaggaaggagagctggacgccagagacttggaaatgtctaagaaagtcaggcgttcctacagccggctggagaccctgggctctgcctctacctccaccccaggccgccggtcctgctttggcttcgaggggctgctgggggcagaagacttgtccggagtctcgccagtggtgtgctccaaactcaccgaggtccccagggtttgtgcaaagccctgggccccagacatgactctccctggaatctccccaccacccgagaaacagaaacgtaagaagaagaaaatgccagagatcttgaaaacggagctggatgagtgggctgcggccatgaatgccgagtttgaagctgctgagcagtttgatctcctggttgaatgagatgcagtggggggtgcacctggccagactctccctcctgtcctgtacatagccacctccctgtggagaggacacttagggtcccctcccctggtcttgttacctgtgtgtgtgctggtgctgcgcatgaggactgtctgcctttgagggcttgggcagcagcggcagccatcttggttttaggaaatggggccgcctggcccagccactcactggtgtcctgtctcttgtcgtcctgtccttcctatctccccaaagtaccatagccagtttccagatgggccacagactggggaggagaatcagtggcccagccagaagttaaagggctgagggttgaggtgagaggcacctctgctcttgttgggaggggtggctgcttggaaataggcccaggggctctgccagcctcggcctctccctcctgagttgccttctgttggtggctttcttcttgaacccacctgtgtaaagaggttttcagttccgtgggtttcccctttgattctgtaaatagtcccagagagaattcgtgggctgagggcaattctgtcttggaggaagaagctggacattcagcctgtggagtctgagttttgaaggatgtagggagccttagttgggtctcagaccataagtgtgtactacacagaagctgtgttttctagttctggtctgctgttgagatgtttggtaaatgccaggttgatagggcgctggctgcttggagcaaagggtgcatttcagggtgtggccaccaggtgctgtgagtttctgtggctcatggcctctgggctggtcccttgcacagggcccacgctggagtcttaccactctgctgcaggggtggaaggtggcccctcttgtcacccatacccatttcttacaaaataagttacaccgagtctacttggccctagaagagaaagttgaagagtcccagacctactagcattttgcaactatgcttgtaaagtcctcggaaagtttcctcgcgtaccagacagcggcgggggctgatagcaattttagtttttggcctccctatcctctcacatgagaacactgcctggatgcatctcatgatctctggagaatttccccatctttctcttctttccatcgtgtggattcaatagtgtggatttgaaggctgccctgcccccgactctcctgccgcacccctggccattgtaccttttgatgtttagaagttcgtggaagtagacgctgaggtgtgcagaggagctggtggataacagagaatgccagggaagatgagtgctgggtcagggtacttggatgaaacggtgcaggccaggcgggccctaataaaaccctctgccaggtctgggagtcccaggccatctgctcaacgctctgtggtttgtcagacctgcaagcaagccccctgctggggaagcctaggtgtccttgagctgaaccgcactgaagaactcttgtcctcactggctgatgcagcagaactcttgggaaatgtcttagtcctgcagaatcaggagtcaccagatgatgcagagttgagatcatcattgcaaagttctctgttcctgaggaactaaatttaaggaaaaaatgggattttgttttagagttggaaaaaaagcctgattaaagagtttctgcctgttcat

SEQ ID NO: 5348 - DNA, 217 bp, Homo sapiens
  source 1..217: mol_type = unassigned DNA
accagttcttagatcaggaggactggggcccccagcggacctcaaaggagatcaggcagttgcagaatgactgcatgaggcttcgggagtcactgaacaccacccaagtgcacaacctggccctgggggagaagctgcagaacctgcccaccttattgtataagagcctgaaggagggagcccaggccatccaggaggaggcccaggccatccagga

SEQ ID NO: 5349 - DNA, 2789 bp, Homo sapiens
  source 1..2789: mol_type = unassigned DNA
ctgccagccgcgctgctgctgctcctcctgctgtgggaccgctgaccgcgcggctgctccgctctccccgctccaagcgccgatctgggcacccgccaccagcatggacgctcgccgcgtgccgcagaaagatctcagagtaaagaagaacttaaagaaattcagatatgtgaagttgatttccatggaaacctcgtcatcctctgatgacagttgtgacagctttgcttctgataattttgcaaacacgaaacctaaattcaggtcagatatcagtgaagaactggcaaatgttttttatgaggactctgataatgaatctttctgcggcttttcagaaagtgaggtgcaagatgtattagaccattgtggatttttacagaaaccaaggccagatgtcactaacgaactggccggtatttttcatgccgactctgacgatgaatcattttgcggtttctcagagagtgagatacaagatggaatgaggctgcagtcagttcgggaaggctgtaggacccgcagccagtgcaggcactctggacctctcagggtggcgatgaagtttccagcgcggagtaccaggggagcaaccaacaaaaaagcagagtcccgccagccctcagagaattctgtgactgattccaactccgattcagaagatgaaagtggaatgaattttttggagaaaagggctttaaatataaagcaaaacaaagcaatgcttgcaaaactcatgtctgaattagaaagcttccctggctcgttccgtggaagacatcccctcccaggctccgactcacaatcaaggagaccgcgaaggcgtacattcccgggtgttgcttccaggagaaaccctgaacggagagctcgtcctcttaccaggtcaaggtcccggatcctcgggtcccttgacgctctacccatggaggaggaggaggaagaggataagtacatgttggtgagaaagaggaagaccgtggatggctacatgaatgaagatgacctgcccagaagccgtcgctccagatcatccgtgacccttccgcatataattcgcccagtggaagaaattacagaggaggagttggagaacgtctgcagcaattctcgagagaagatatataaccgttcactgggctctacttgtcatcaatgccgtcagaagactattgataccaaaacaaactgcagaaacccagactgctggggcgttcgaggccagttctgtggcccctgccttcgaaaccgttatggtgaagaggtcagggatgctctgctggatccgaactggcattgcccgccttgtcgaggaatctgcaactgcagtttctgccggcagcgagatggacggtgtgcgactggggtccttgtgtatttagccaaatatcatggctttgggaatgtgcatgcctacttgaaaagcctgaaacaggaatttgaaatgcaagcataatatctggaaaatttgctgcctgccttctacttctcaaatctttcttgtaaaagtttccaattttttcactgaaacctgagttaaaaatcttgatgatcagcctgtttcataagaaactccaatcaagttaatcttagcagacatgtgtttctggagcatcacagaaggtatattgctagttacactttgccctcctgcagtttcttctctgctcccaacccccatctcacagcatccccctctatttccaatgctcctctccaaccgcttagtttctgaatttcttttaaattacagttttatgaaagcatattttatttacttggtgttgaaatagccctcataaaacctaagcacttggaaacacaataatagtattaactaactagatctattgaatttcagagaagagccttctaacttgtttacacaaaaacgagtatgatttagcattcatactagttgaaatttttaatagaatcaaggcacaaaagtcttaaaaccatgtggaaaaattaggtaattattgcagattgatgtctctcaatcccatgtattgcgcttatgttacaagttgttgtcacagttgagacttaatttctcctaatttcttctgcccgaagggtaagtggtgcgtccagcttacacaatcataattcaaaggttggtgggcaatgtaatacttaattaaaataatgatggaagagctatctggagattatgagtaagctgatttgaattttcagtataaaactttagtataattgtagtttgcaaagtttatttcagttcacatgtaaggtattgcaaataaattcttggacaattttgtatggaaacttgatattaaaaactagtctgtggttctttgcagtttcttgtaaatttataaaccaggcacaaggttcaagtttagattttaagcacttttataacaatgataagtgcctttttggagatgtaacttttagcagtttgttaacctgacatctctgccagtctagtttctgggcaggtttcctgtgtcagtattccccctcctctttgcattaatcaaggtatttggtagaggtggaatctaagtgtttgtatgtccaatttacttgcatatgtaaaccattgctgtgccattcaatgtttgatgcataattggaccttgaatcgataagtgtaaatacagcttttgatctgtaatgcttttatacaaaagtttattttaataataaaatgtttgttctaacttgtctgcttttttaaaaataatcttactgtacttaattctaattttttcctcatatttaaataaaaggccatttccaccttttctaaaaaa

SEQ ID NO: 5350 - DNA, 2500 bp, Homo sapiens
  source 1..2500: mol_type = unassigned DNA
cccgagccccgcccctccgggcccgggtcggcgcgcccagcctgccagccgcgctgctgctgctcctcctgctgtgggaccgctgaccgcgcggctgctccgctctccccgctccaagcgccgatctgggcacccgccaccagcatggacgctcgccgcgtgccgcagaaagatctcagagtaaagaagaacttaaagaaattcagatatgtgaagttgatttccatggaaacctcgtcatcctctgatgacagttgtgacagctttgcttctgataattttgcaaacacgaggctgcagtcagttcgggaaggctgtaggacccgcagccagtgcaggcactctggacctctcagggtggcgatgaagtttccagcgcggagtaccaggggagcaaccaacaaaaaagcagagtcccgccagccctcagagaattctgtgactgattccaactccgattcagaagatgaaagtggaatgaattttttggagaaaagggctttaaatataaagcaaaacaaagcaatgcttgcaaaactcatgtctgaattagaaagcttccctggctcgttccgtggaagacatcccctcccaggctccgactcacaatcaaggagaccgcgaaggcgtacattcccgggtgttgcttccaggagaaaccctgaacggagagctcgtcctcttaccaggtcaaggtcccggatcctcgggtcccttgacgctctacccatggaggaggaggaggaagaggataagtacatgttggtgagaaagaggaagaccgtggatggctacatgaatgaagatgacctgcccagaagccgtcgctccagatcatccgtgacccttccgcatataattcgcccagtggaagaaattacagaggaggagttggagaacgtctgcagcaattctcgagagaagatatataaccgttcactgggctctacttgtcatcaatgccgtcagaagactattgataccaaaacaaactgcagaaacccagactgctggggcgttcgaggccagttctgtggcccctgccttcgaaaccgttatggtgaagaggtcagggatgctctgctggatccgaactggcattgcccgccttgtcgaggaatctgcaactgcagtttctgccggcagcgagatggacggtgtgcgactggggtccttgtgtatttagccaaatatcatggctttgggaatgtgcatgcctacttgaaaagcctgaaacaggaatttgaaatgcaagcataatatctggaaaatttgctgcctgccttctacttctcaaatctttcttgtaaaagtttccaattttttcactgaaacctgagttaaaaatcttgatgatcagcctgtttcataagaaactccaatcaagttaatcttagcagacatgtgtttctggagcatcacagaaggtatattgctagttacactttgccctcctgcagtttcttctctgctcccaacccccatctcacagcatccccctctatttccaatgctcctctccaaccgcttagtttctgaatttcttttaaattacagttttatgaaagcatattttatttacttggtgttgaaatagccctcataaaacctaagcacttggaaacacaataatagtattaactaactagatctattgaatttcagagaagagccttctaacttgtttacacaaaaacgagtatgatttagcattcatactagttgaaatttttaatagaatcaaggcacaaaagtcttaaaaccatgtggaaaaattaggtaattattgcagattgatgtctctcaatcccatgtattgcgcttatgttacaagttgttgtcacagttgagacttaatttctcctaatttcttctgcccgaagggtaagtggtgcgtccagcttacacaatcataattcaaaggttggtgggcaatgtaatacttaattaaaataatgatggaagagctatctggagattatgagtaagctgatttgaattttcagtataaaactttagtataattgtagtttgcaaagtttatttcagttcacatgtaaggtattgcaaataaattcttggacaattttgtatggaaacttgatattaaaaactagtctgtggttctttgcagtttcttgtaaatttataaaccaggcacaaggttcaagtttagattttaagcacttttataacaatgataagtgcctttttggagatgtaacttttagcagtttgttaacctgacatctctgccagtctagtttctgggcaggtttcctgtgtcagtattccccctcctctttgcattaatcaaggtatttggtagaggtggaatctaagtgtttgtatgtccaatttacttgcatatgtaaaccattgctgtgccattcaatgtttgatgcataattggaccttgaatcgataagtgtaaatacagcttttgatctgtaatgcttttatacaaaagtttattttaataataaaatgtttgttctaa

SEQ ID NO: 5351 - DNA, 2405 bp, Homo sapiens
  source 1..2405: mol_type = unassigned DNA
gcgcccagcctgccagccgcgctgctgctgctcctcctgctgtgggaccgctgaccgcgcggctgctccgctctccccgctccaagcgccgatctgggcacccgccaccagcatggacgctcgccgcgtgccgcagaaagatctcagagtaaagaagaacttaaagaaattcagatatgtgaagttgatttccatggaaacctcgtcatcctctgatgacagttgtgacagctttgcttctgataattttgcaaacacgaggctgcagtcagttcgggaaggctgtaggacccgcagccagtgcaggcactctggacctctcagggtggcgatgaagtttccagcgcggagtaccaggggagcaaccaacaaaaaagcagagtcccgccagccctcagagaattctgtgactgattccaactccgattcagaagatgaaagtggaatgaattttttggagaaaagggctttaaatataaagcaaaacaaagcaatgcttgcaaaactcatgtctgaattagaaagcttccctggctcgttccgtggaagacatcccctcccaggctccgactcacaatcaaggagaccgcgaaggcgtacattcccgggtgttgcttccaggagaaaccctgaacggagagctcgtcctcttaccaggtcaaggtcccggatcctcgggtcccttgacgctctacccatggaggaggaggaggaagaggataagtacatgttggtgagaaagaggaagaccgtggatggctacatgaatgaagatgacctgcccagaagccgtcgctccagatcatccgtgacccttccgcatataattcgcccagtggaagaaattacagaggaggagttggagaacgtctgcagcaattctcgagagaagatatataaccgttcactgaactggcattgcccgccttgtcgaggaatctgcaactgcagtttctgccggcagcgagatggacggtgtgcgactggggtccttgtgtatttagccaaatatcatggctttgggaatgtgcatgcctacttgaaaagcctgaaacaggaatttgaaatgcaagcataatatctggaaaatttgctgcctgccttctacttctcaaatctttcttgtaaaagtttccaattttttcactgaaacctgagttaaaaatcttgatgatcagcctgtttcataagaaactccaatcaagttaatcttagcagacatgtgtttctggagcatcacagaaggtatattgctagttacactttgccctcctgcagtttcttctctgctcccaacccccatctcacagcatccccctctatttccaatgctcctctccaaccgcttagtttctgaatttcttttaaattacagttttatgaaagcatattttatttacttggtgttgaaatagccctcataaaacctaagcacttggaaacacaataatagtattaactaactagatctattgaatttcagagaagagccttctaacttgtttacacaaaaacgagtatgatttagcattcatactagttgaaatttttaatagaatcaaggcacaaaagtcttaaaaccatgtggaaaaattaggtaattattgcagattgatgtctctcaatcccatgtattgcgcttatgttacaagttgttgtcacagttgagacttaatttctcctaatttcttctgcccgaagggtaagtggtgcgtccagcttacacaatcataattcaaaggttggtgggcaatgtaatacttaattaaaataatgatggaagagctatctggagattatgagtaagctgatttgaattttcagtataaaactttagtataattgtagtttgcaaagtttatttcagttcacatgtaaggtattgcaaataaattcttggacaattttgtatggaaacttgatattaaaaactagtctgtggttctttgcagtttcttgtaaatttataaaccaggcacaaggttcaagtttagattttaagcacttttataacaatgataagtgcctttttggagatgtaacttttagcagtttgttaacctgacatctctgccagtctagtttctgggcaggtttcctgtgtcagtattccccctcctctttgcattaatcaaggtatttggtagaggtggaatctaagtgtttgtatgtccaatttacttgcatatgtaaaccattgctgtgccattcaatgtttgatgcataattggaccttgaatcgataagtgtaaatacagcttttgatctgtaatgcttttatacaaaagtttattttaataataaaatgtttgttctaacttgtctgcttttttaaaaataatcttactgtacttaattctaattttttcctcatatttaaataaaaggccatttccaccttttct

SEQ ID NO: 5352 - DNA, 2915 bp, Homo sapiens
  source 1..2915: mol_type = unassigned DNA
ggtgcgccgggccgtggtgagtccgggctcccgtggccgcgtgctgggaggagactggagcccggttaggaagaatggagttggcgactcgctaccagagcacttcgcaggcatagtttggaagtcatcagggctggttcttttccttccagatccctaaagaagtggctgacatctttaacgcccccagtgatgatgaagagtttgttggcttccgagatgatgttcccatggaaaccctctcgtcagaggagagctgcgatagttttgactcactagagtcagggaaacagcaggatgtgcgctttcattccaaatacttcacagaagagctaagaagaatttttatagaggacactgactcagagactgaggattttgcaggatttacgcagagtgatctgaatggaaagactaacccagaagtaatggtcgtggagtcagatttgagtgatgatggcaaagcatctttggtgagcgaggaagaggaagatgaagaagaagataaggctacccctagaagaagcaggtctagaagaagtagtattggtcttcgagtagcctttcagttccccaccaagaagctggccaacaaaccagataaaaacagttcttccgagcagttgttttctagcgcacgcttacagaatgagaaaaaaacaattcttgaaagaaagaaagactgtagacaggtgatacaaagggaagattctacctctgagtctgaggatgactctcgggatgagagccaggagagttcagatgctttgctgaaaaggaccatgaacatcaaggagaacaaagccatgcttgcccagttattggcggaattgaactcgatgccagatttcttcccagtacgaaccccaacctcagcttctaggaagaagacagtgaggcgggccttctcggagggacagatcacgcggcgtatgaacccaacccggagtgcgcggcctcctgagaagtttgctctagagaacttcactgtctcagccgctaaatttgcggaagagttttacagcttccgaagaaggaagacaattggggggaaatgccgggagtacagacgacgtcaccgtatatcttcttttcggccagtggaggatatcaccgaagaggacttagaaaatgttgccataactgttcgagataaaatctatgataaagttctgggtaacacgtgccatcagtgtcgacaaaagaccatcgacaccaagacagtgtgtcggaaccagggttgctgtggtgtgcgaggacagttctgtggaccatgcctgcggaaccgctatggggaggatgtcagatcggcattgctggacccggattgggtgtgtcccccctgtcgtgggatctgcaattgcagctactgtcggaagcgtgacggccgctgtgccacaggaatcctcattcatctggccaagttttatggttatgacaatgttaaggaatatctggagagcttacaaaaggagctggtagaagacaattaagaggaaaacaaacagaaccagccacctcaccatagagtactccaacaagacatgcataccattggtgcctaagaaagatttttttacagttgtgtttttatacagaaattctttgtagaaattactattttttgttaaagattgtttatatgcttacaaagatttctcaggaagacagcagagcagaggaatctatatagatgtatgcacagacctgtctgtatgctgaactttgttaaaaatatctgccagttattaaaaagcacagtttaaatggggtggggttaaagttcaggtaagtaagttagagagaaaacattgtatgatcagctcctgcacttgatctatctatctttggcttcccaaacagtaactcactccaggccaagtgtgccttagcacgagtgaccacagtttaatagaccacacacatcgtttaacctgctcttggtcattggaaatttacactgaacaaagtgcaattaactgtagaacagttttatttttattaaaacttgactgaacaaaaggggaccatcaacattgtagacactggacactggaggccttacagagtgctagcctcttccttcaggactcacctggggcctgctgcttttatattttgaaagagtttaagggctaataatttaatttgttgtttgttaaaaattaaaatctccgttctttccggctgcattgcttttgcatgttcacatatgatgtacttttatgatgtacttttttttttttgagatggagtcttgttctgttgcccaggagggagtgcagtggtgcaacctcggctcactgcaacctttgcctcctaggttcaagtgattctcctacctcctgagtaactgggattacagtcgtgtgccaccacgctcagccctgagttagtttctagtatttttttctgactttcactctaaggatagcgttgaaaaaagaatgcacgtgtgagttactaaaaagttagaataatgtgcatgggaacagtgcagcaacatgctagaaaatcctcactgcactccagcagaggctagaggaatgccagtgttaccttacgcttctagaagcagagccactccagccagaacccattttgcagtcttctcttcgctcttcagcctgaaggtccagatgtagctggggcctctcagtttggttctatacacagggcactcgtaggtctgtttggtttcttgtctgtccacgggggtggcttttgcaaagatgaccggcatagggcatgccagctccttgagacgggcttcaacaatggttcctgcttgggtgtcccagcgggcgcctatggcaaaaacacagcggttgcaattgtgtggcagcttgctactaatgataatgatcaagtaagttgtttgatgcaataaacattcaacattctggttttgtcat

SEQ ID NO: 5353 - DNA, 1830 bp, Homo sapiens
  source 1..1830: mol_type = unassigned DNA
gttcttggtgcgccgggccgtggtgagtccgggctcccgtggccgcgtgctgggaggagactggagcccggttaggaagaatggagttggcgactcgctaccagatccctaaagaagtggctgacatctttaacgcccccagtgatgatgaagagtttgttggcttccgagatgatgttcccatggaaaccctctcgtcagaggagagctgcgatagttttgactcactagagtcagggaaacaggtcgtggagtcagatttgagtgatgatggcaaagcatctttggtgagcgaggaagaggaagatgaagaagaagataaggctacccctagaagaagcaggtctagaagaagtagtattggtcttcgagtagcctttcagttccccaccaagaagctggccaacaaaccagataaaaacagttcttccgagcagttgttttctagcgcacgcttacagaatgagaaaaaaacaattcttgaaagaaagaaagactgtagacaggtgatacaaagggaagattctacctctgagtctgaggatgactctcgggatgagagccaggagagttcagatgctttgctgaaaaggaccatgaacatcaaggagaacaaagccatgcttgcccagttattggcggaattgaactcgatgccagatttcttcccagtacgaaccccaacctcagcttctaggaagaagacagtgaggcgggccttctcggagggacagatcacgcggcgtatgaacccaacccggagtgcgcggcctcctgagaagtttgctctagagaacttcactgtctcagccgctaaatttgcggaagagttttacagcttccgaagaaggaagacaattggggggaaatgccgggagtacagacgacgtcaccgtatatcttcttttcggccagtggaggatatcaccgaagaggacttagaaaatgttgccataactgttcgagataaaatctatgataaagttctgggtaacacgtgccatcagtgtcgacaaaagaccatcgacaccaagacagtgtgtcggaaccagggttgctgtggtgtgcgaggacagttctgtggaccatgcctgcggaaccgctatggggaggatgtcagatcggcattgctggacccggattgggtgtgtcccccctgtcgtgggatctgcaattgcagctactgtcggaagcgtgacggccgctgtgccacaggaatcctcattcatctggccaagttttatggttatgacaatgttaaggaatatctggagagcttacaaaaggagctggtagaagacaattaagaggaaaacaaacagaaccagccacctcaccatagagtactccaacaagacatgcataccattggtgcctaagaaagatttttttacagttgtgtttttatacagaaattctttgtagaaattactattttttgttaaagattgtttatatgcttacaaagatttctcaggaagacagcagagcagaggaatctatatagatgtatgcacagacctgtctgtatgctgaactttgttaaaaatatctgccagttattaaaaagcacagtttaaatggggtggggttaaagttcaggtaagtaagttagagagaaaacattgtatgatcagctcctgcacttgatctatctatctttggcttcccaaacagtaactcactccaggccaagtgtgccttagcacgagtgaccacagtttaatagaccacacacatcgtttaacctgctcttggtcattggaaatttacactgaacaaagtgcaattaactgtagaacagttttatttttattaaaacttgactga

SEQ ID NO: 5354 - DNA, 3066 bp, Homo sapiens
  source 1..3066: mol_type = unassigned DNA
aactgcagccccctctcgcgccgcctgcgaagacaaggtcagtggccgcgaagttggaacgtgatcggagccacgaggcccagtgaggcggcaccgagggggcagcgcaacgcgctccccctgtccagggcgtcaagtgcgcccctcccggggcccgcctgtgctccgggcggagcgcgctagctgctcgggcgcggggcgttcttggtgcgccgggccgtggtgagtccgggctcccgtggccgcgtgctgggaggagactggagcccggttaggaagaatggagttggcgactcgctaccagatccctaaagaagtggctgacatctttaacgcccccagtgatgatgaagagtttgttggcttccgagatgatgttcccatggaaaccctctcgtcagaggagagctgcgatagttttgactcactagagtcagggaaacagcaggatgtgcgctttcattccaaatacttcacagaagagctaagaagaatttttatagaggacactgactcagagactgaggattttgcaggatttacgcagagtgatctgaatggaaagactaacccagaagtaatggtcgtggagtcagatttgagtgatgatggcaaagcatctttggtgagcgaggaagaggaagatgaagaagaagataaggctacccctagaagaagcaggtctagaagaagtagtattggtcttcgagtagcctttcagttccccaccaagaagctggccaacaaaccagataaaaacagttcttccgagcagttgttttctagcgcacgcttacagaatgagaaaaaaacaattcttgaaagaaagaaagactgtagacaggtgatacaaagggaagattctacctctgagtctgaggatgactctcgggatgagagccaggagagttcagatgctttgctgaaaaggaccatgaacatcaaggagaacaaagccatgcttgcccagttattggcggaattgaactcgatgccagatttcttcccagtacgaaccccaacctcagcttctaggaagaagacagtgaggcgggccttctcggagggacagatcacgcggcgtatgaacccaacccggagtgcgcggcctcctgagaagtttgctctagagaacttcactgtctcagccgctaaatttgcggaagagttttacagcttccgaagaaggaagacaattggggggaaatgccgggagtacagacgacgtcaccgtatatcttcttttcggccagtggaggatatcaccgaagaggacttagaaaatgttgccataactgttcgagataaaatctatgataaagttctgggtaacacgtgccatcagtgtcgacaaaagaccatcgacaccaagacagtgtgtcggaaccagggttgctgtggtgtgcgaggacagttctgtggaccatgcctgcggaaccgctatggggaggatgtcagatcggcattgctggacccggattgggtgtgtcccccctgtcgtgggatctgcaattgcagctactgtcggaagcgtgacggccgctgtgccacaggaatcctcattcatctggccaagttttatggttatgacaatgttaaggaatatctggagagcttacaaaaggagctggtagaagacaattaagaggaaaacaaacagaaccagccacctcaccatagagtactccaacaagacatgcataccattggtgcctaagaaagatttttttacagttgtgtttttatacagaaattctttgtagaaattactattttttgttaaagattgtttatatgcttacaaagatttctcaggaagacagcagagcagaggaatctatatagatgtatgcacagacctgtctgtatgctgaactttgttaaaaatatctgccagttattaaaaagcacagtttaaatggggtggggttaaagttcaggtaagtaagttagagagaaaacattgtatgatcagctcctgcacttgatctatctatctttggcttcccaaacagtaactcactccaggccaagtgtgccttagcacgagtgaccacagtttaatagaccacacacatcgtttaacctgctcttggtcattggaaatttacactgaacaaagtgcaattaactgtagaacagttttatttttattaaaacttgactgaacaaaaggggaccatcaacattgtagacactggacactggaggccttacagagtgctagcctcttccttcaggactcacctggggcctgctgcttttatattttgaaagagtttaagggctaataatttaatttgttgtttgttaaaaattaaaatctccgttctttccggctgcattgcttttgcatgttcacatatgatgtacttttatgatgtacttttttttttttgagatggagtcttgttctgttgcccaggagggagtgcagtggtgcaacctcggctcactgcaacctttgcctcctaggttcaagtgattctcctacctcctgagtaactgggattacagtcgtgtgccaccacgctcagccctgagttagtttctagtatttttttctgactttcactctaaggatagcgttgaaaaaagaatgcacgtgtgagttactaaaaagttagaataatgtgcatgggaacagtgcagcaacatgctagaaaatcctcactgcactccagcagaggctagaggaatgccagtgttaccttacgcttctagaagcagagccactccagccagaacccattttgcagtcttctcttcgctcttcagcctgaaggtccagatgtagctggggcctctcagtttggttctatacacagggcactcgtaggtctgtttggtttcttgtctgtccacgggggtggcttttgcaaagatgaccggcatagggcatgccagctccttgagacgggcttcaacaatggttcctgcttgggtgtcccagcgggcgcctatggcaaaaacacagcggttgcaattgtgtggcagcttgctactaatgataatgatcaagtaagttgtttgatgcaataaacattcaacattctggttttgtca

SEQ ID NO: 5355 - DNA, 563 bp, Homo sapiens
  source 1..563: mol_type = unassigned DNA
acttgttttattgagagtcgcgagactcactgcttccaccttgcttccgactggtgtttactttcctccacctgcgtgcctggcccgggagaaggggaggcggggccgccagcgttggaaggcgcagagtgcccggcgcccgagcccaaaccgctgtcacctgcccgagtctggcggcaaagactgagccactaacgatccctaaagaagtggctgacatctttaacgcccccagtgatgatgaagagtttgttggcttccgagatgatgttcccatggaaaccctctcgtcagaggagagctgcgatagttttgactcactagagtcagggaaacagcaggatgtgcgctttcattccaaatacttcacagaagagctaagaagaatttttatagaggacactgactcagagactgaggattttgcaggatttacgcagagtgatctgaatggaaagactaacccagaagtaatggtcgtggagtcagatttgagtgatgatggcaaagcatctttggtgagcgaggaagaggaagatgaagaagaagataaggctacccct

SEQ ID NO: 5356 - DNA, 2303 bp, Homo sapiens
  source 1..2303: mol_type = unassigned DNA
gtgactgtggagtttgaattgggtggcggttgactgtagagccgctctctctcactggcacagcgaggttttgctcagcccttgtctcgggaccgcagcctccgccgagcgccatggctcctaggaagggcagtagtcgggtggccaagaccaactccttacggaggcggaagctcgcctcctttctgaaagacttcgaccgtgaagtggaaatacgaatcaagcaaattgagtcagacaggcagaacctcctcaaggaggtggataacctctacaacatcgagatcctgcggctccccaaggctctgcgcgagatgaactggcttgactacttcgcccttggaggaaacaaacaggccctggaagaggcggcaacagctgacctggatatcaccgaaataaacaaactaacagcagaagctattcagacacccctgaaatctgccaaaacacgaaaggtaatacaggtagatgaaatgatagtggaagaggaagaagaagaagaaaatgaacgtaagaatcttcaaactgcaagagtcaaaaggtgtcctccatccaagaagagaactcagtccatacaaggaaaaggaaaagggaaaaggtcaagccgtgctaacactgttaccccagccgtgggccgattggaggtgtccatggtcaaaccaactccaggcctgacacccaggtttgactcaagggtcttcaagacccctggcctgcgtactccagcagcaggagagcggatttacaacatctcagggaatggcagccctcttgctgacagcaaagagatcttcctcactgtgccagtgggcggcggagagagcctgcgattattggccagtgacttgcagaggcacagtattgcccagctggatccagaggccttgggaaacattaagaagctctccaaccgtctcgcccaaatctgcagcagcatacggacccacaaatgagacaccaaagttgacaggatggacttttaatgggcacttctgggaccctgaagagacttcttcccttcaggcttattgtttgagtgtgaagttccagagcaaggagccatgttcctctaagggaattcaggaattcagacgtgctagtcccacaccagttaggtagagctgtctgttcaccctcccatcccagctgatcccagtcactgcttgctggggccatgccatggaagcttcccatcagtctcccagctgaatcctccctgctctctgagctgctgccttttgcctcctgcaactcaacatcctcttcaccctgccctgcctgcagttgagggggcgaagaagaaccctgtgttctcaggaagactgcctccaccaccgctacccagagaacctctgcatctggcatttctgctctctatgcttgagaccgggaggtttaggctcagataagtgagctctgggccatgagagggtaggtccagaaggtggggggaactgtacagatcagcagagcaggacagttggcagcagtgacctcagtagggaacatgtccgtctaccctctcgcactcatgacacctccccctaccagccctcctcttcctcctcctcctcctcctgtgggaggtggtcagtgggacttagggatctttcacctgctgtgcccagtagttctgaagtctgcttgtggagcagtgttttatgtttatccctgtttactgaagaccaaatactggtttggagacaacttccatgtcttgctcttctacctccctagttagtggaaatttggataagggaactgtagggcccagattctggaggttttatgtcattggccacagaataactgtctctaagctatccatggtccagtggtccctgccaagtctgtagacttcagagagcacttctctcttatggggttcatgggaacaggggtgggtgtgacttgcttggtggcctcattccatgtgtgcctgtgcctggggcatggactttgttaagcagagtcagcagtgaggtcctcattctccagccagcctctctgccctggagaatcatgtgctatgttctaagaatttgagaactagagtcctcatccccaggcttgaaggcacatggctttctcatgtagggctctctgtggtatttgttattattttgcaacaagaccattttagtaaaacagtcctgttcaagttgtattcttttaagttcttttattctcctttccctgagatttttgtatatattgttctgagtaatggtatctttgagctgattgttctaatcagagctggtacctactttcaataaattctggttttgtgttttctt

SEQ ID NO: 5357 - DNA, 2469 bp, Homo sapiens
  source 1..2469: mol_type = unassigned DNA
gggccggcaggaacttgcttgtgattggatgttgtgggacggcggcttctcattcgtcagcctgtgactgtggagtttgaattgggtggcggttgactgtagagccgctctctctcactggcacagcgaggttttgctcagcccttgtctcgggaccgcaggtacgtgcctggcgacttcttcgggtggtccccgtccgccctcctcgtccctacccagtttcttgcttccctgccccatctccgccgctccccgcagcctccgccgagcgccatggctcctaggaagggcagtagtcgggtggccaagaccaactccttacggaggcggaagctcgcctcctttctgaaagacttcgaccgtgaagtggaaatacgaatcaagcaaattgagtcagacaggcagaacctcctcaaggaggtggataacctctacaacatcgagatcctgcggctccccaaggctctgcgcgagatgaactggcttgactacttcgcccttggaggaaacaaacaggccctggaagaggcggcaacagctgacctggatatcaccgaaataaacaaactaacagcagaagctattcagacacccctgaaatctgccaaaacacgaaaggtaatacaggtagatgaaatgatagtggaagaggaagaagaagaagaaaatgaacgtaagaatcttcaaactgcaagagtcaaaaggtgtcctccatccaagaagagaactcagtccatacaaggaaaaggaaaagggaaaaggtcaagccgtgctaacactgttaccccagccgtgggccgattggaggtgtccatggtcaaaccaactccaggcctgacacccaggtttgactcaagggtcttcaagacccctggcctgcgtactccagcagcaggagagcggatttacaacatctcagggaatggcagccctcttgctgacagcaaagagatcttcctcactgtgccagtgggcggcggagagagcctgcgattattggccagtgacttgcagaggcacagtattgcccagctggatccagaggccttgggaaacattaagaagctctccaaccgtctcgcccaaatctgcagcagcatacggacccacaaatgagacaccaaagttgacaggatggacttttaatgggcacttctgggaccctgaagagacttcttcccttcaggcttattgtttgagtgtgaagttccagagcaaggagccatgttcctctaagggaattcaggaattcagacgtgctagtcccacaccagttaggtagagctgtctgttcaccctcccatcccagctgatcccagtcactgcttgctggggccatgccatggaagcttcccatcagtctcccagctgaatcctccctgctctctgagctgctgccttttgcctcctgcaactcaacatcctcttcaccctgccctgcctgcagttgagggggcgaagaagaaccctgtgttctcaggaagactgcctccaccaccgctacccagagaacctctgcatctggcatttctgctctctatgcttgagaccgggaggtttaggctcagataagtgagctctgggccatgagagggtaggtccagaaggtggggggaactgtacagatcagcagagcaggacagttggcagcagtgacctcagtagggaacatgtccgtctaccctctcgcactcatgacacctccccctaccagccctcctcttcctcctcctcctcctcctgtgggaggtggtcagtgggacttagggatctttcacctgctgtgcccagtagttctgaagtctgcttgtggagcagtgttttatgtttatccctgtttactgaagaccaaatactggtttggagacaacttccatgtcttgctcttctacctccctagttagtggaaatttggataagggaactgtagggcccagattctggaggttttatgtcattggccacagaataactgtctctaagctatccatggtccagtggtccctgccaagtctgtagacttcagagagcacttctctcttatggggttcatgggaacaggggtgggtgtgacttgcttggtggcctcattccatgtgtgcctgtgcctggggcatggactttgttaagcagagtcagcagtgaggtcctcattctccagccagcctctctgccctggagaatcatgtgctatgttctaagaatttgagaactagagtcctcatccccaggcttgaaggcacatggctttctcatgtagggctctctgtggtatttgttattattttgcaacaagaccattttagtaaaacagtcctgttcaagttgtattcttttaagttcttttattctcctttccctgagatttttgtatatattgttctgagtaatggtatctttgagctgattgttctaatcagagctggtacctactttcaataaattctggttttgtgttttcttttgtaa

SEQ ID NO: 5358 - DNA, 772 bp, Homo sapiens
  source 1..772: mol_type = unassigned DNA
aaggcgcgcagcgctgggcgcaaagcgccagtctccgccttgcgagctcagagtgtgcccgctgcgccgccgctgtccgtacctgccgccgccgccaccgccaccatgcccaacttcgccggcacctggaagatgcgcagcagcgagaatttcgacgagctgctcaaggcactgggtgtgaacgccatgctgaggaaagtggccgtagcggctgcgtccaagccgcacgtggagatccgccaggacggggatcagttctacatcaagacatccaccacggtgcgcaccactgagatcaacttcaaggtcggagaaggctttgaggaggagaccgtggacggacgcaagtgcaggagtttagccacttgggagaatgagaacaagatccactgcacgcaaactcttcttgaaggggacggccccaaaacctactggacccgtgagctggccaacgatgaacttatcctgacgtttggcgccgatgacgtggtctgcaccagaatttatgtccgagagtgaaggcagctggcttgctcctactttcaggaagggatgcaggctcccctgaggaatatgtcatagttctgagctgccagtggaccgcccttttcccctaccaatattaggtgatcccgttttccccatgacaatgttgtagtgtcccccacccccaccccccaggccttggtgcctcttgtatccctagtgctccatagtttggcatttgcacggtttcgaagtcattaaactggttagacgtgtctcaaccttt

SEQ ID NO: 5359 - DNA, 456 bp, Homo sapiens
  source 1..456: mol_type = unassigned DNA
gattcaagtgctggctttgcgtccgcttccccatccacttactagcgcaggagaaggctatctcggtccccagagaagcctggacccacacgcgggctagatccagagaacctgacgacccggcgacggcgacgtctcttttgactaaaagacagtgtccagtgctccagcctaggagtctacggggaccgcctcccgcgccgccaccatgcccaacttctctggcaactggaaaatcatccgatcggaaaacttcgaggaattgctcaaagtgctgggggtgaatgtgatgctgaggaagattgctgtggctgcagcgtccaagccagcagtggagatcaaacaggagggagacactttctacatcaaaacctccaccaccgtgcgcaccacagagattaacttcaaggttggggaggagtttgaggagcagactgtggatgggaggccctgtaa

SEQ ID NO: 5360 - DNA, 783 bp, Homo sapiens
  source 1..783: mol_type = unassigned DNA
ccagagaagcctggacccacacgcgggctagatccagagacagtgtccagtgctccagcctaggagtctacggggaccgcctcccgcgccgccaccatgcccaacttctctggcaactggaaaatcatccgatcggaaaacttcgaggaattgctcaaagtgctgggggtgaatgtgatgctgaggaagattgctgtggctgcagcgtccaagccagcagtggagatcaaacaggagggagacactttctacatcaaaacctccaccaccgtgcgcaccacagagattaacttcaaggttggggaggagtttgaggagcagactgtggatgggaggccctgtaagagcctggtgaaatgggagagtgagaataaaatggtctgtgagcagaagctcctgaagggagagggccccaagacctcgtggaccagagaactgaccaacgatggggaactgatcctgaccatgacggcggatgacgttgtgtgcaccagggtctacgtccgagagtgagtggccacaggtagaaccgcggccgaagcccaccactggccatgctcaccgccctgcttcactgccccctccgtcccaccccctccttctaggatagcgctccccttaccccagtcacttctgggggtcactgggatgcctcttgcagggtcttgctttctttgacctcttctctcctcccctacaccaacaaagaggaatggctgcaagagcccagatcacccattccgggttcactccccgcctccccaagtcagcagtcctagcccc

SEQ ID NO: 5361 - DNA, 992 bp, Homo sapiens
  source 1..992: mol_type = unassigned DNA
cgcgcgggagcccaggccagctttggggttgtccctggacttgtcttggttccagaacctgacgacccggcgacggcgacgtctcttttgactaaaagacagtgtccagtgctccagcctaggagtctacggggaccgcctcccgcgccgccaccatgcccaacttctctggcaactggaaaatcatccgatcggaaaacttcgaggaattgctcaaagtgctgggggtgaatgtgatgctgaggaagattgctgtggctgcagcgtccaagccagcagtggagatcaaacaggagggagacactttctacatcaaaacctccaccaccgtgcgcaccacagagattaacttcaaggttggggaggagtttgaggagcagactgtggatgggaggccctgtaagagcctggtgaaatgggagagtgagaataaaatggtctgtgagcagaagctcctgaagggagagggccccaagacctcgtggaccagagaactgaccaacgatggggaactgatcctgaccatgacggcggatgacgttgtgtgcaccagggtctacgtccgagagtgagtggccacaggtagaaccgcggccgaagcccaccactggccatgctcaccgccctgcttcactgccccctccgtcccaccccctccttctaggatagcgctccccttaccccagtcacttctgggggtcactgggatgcctcttgcagggtcttgctttctttgacctcttctctcctcccctacaccaacaaagaggaatggctgcaagagcccagatcacccattccgggttcactccccgcctccccaagtcagcagtcctagccccaaaccagcccagagcagggtctctctaaaggggacttgagggcctgagcaggaaagactggccctctagcttctaccctttgtccctgtagcctatacagtttagaatatttatttgttaattttattaaaatgctttaaaaaaataaaa

SEQ ID NO: 5362 - DNA, 1840 bp, Homo sapiens
  source 1..1840: mol_type = unassigned DNA
ggttacgatagttacttttgttatgtattttaccacaatttttaaaaagcaaaccaaaaccaaccaagagtgcttcccccacacctcaaaatcatcctgcagcagctccctggcccagctctctctcaccctgaccctgggcccctctcccaccacccagggctagccctgtggaccaaccatctctgccagcccctccccgaccctccagccagggaggtggggcgctggccggtgaatggggcaggccaggcccaaaggctggcccagggctcaccagctctggactgggcgtcccgtctgaggtggggatgaccaacatgccagctctgggttttagctgaggatgggcacatcaagcactgacagccagcaagctgggcacaggcgatgctcaacctctaacacatcggctgagaacctcacctgcctctccctgcctgggagccctggcaagacagctcctctcccaggcccagcacaggcaggcgctggacagccacttcctaaggggtgcgcggccgtcaaggcagaggtgggtatccctgcacctcacacctctcaggaggtcaggatccacatccgtcgcctgctttcctgggctgcccctggggcttgtgggctgagatcaaccccttgtgccctgccccaggccctccctcaggcgaggccctgcccaggcaggtggttcttccctggctgttcccttccaacaggtggggcccagaccatcctatctctttggacctggagacatttccttaactgggctttgcagcagagggaagagaacagtggcagagccaggcgcgtacctcctgtgcccaggacagcacctgtaagcaagggggaagggagccacccaccccagaactcaaatggagagaaagtcaagacaatcacccctgacgtggggctgcaccaatccctgacgtctgaccccactgtggctgtcctcagagccaagagggctccagaagcccacccgcctcgaagctgttcagggagcctcacggcccgtgtttgccacatgggtgtgtgccagggccaaggggacacagaagatggcaggatgacactaatggggtgagcagggcacactggtgcctcccatactgccctccagcaccaggcagggtcaccacagccggcaagcactgggcctggggatgtgtgaagagatagggttattgagaagagaaaacagaacgctggtcatccgtggcactcagggctaggcagtccagggagcagaaaacaggggtcccgggcccagtctccctcctggaggtcagagcggagcccctggcactgtgccctggcccagaaccaggctgtgggctccacgctgcacaccccaactcaggagcagaaagcaaacccctgactgtccacactccctgtgactggtccccttcctgccggctcttcacccccagcccatggtggcttcaccccatggcaccagccactgactgcctgcccctccctcccatagtgacactttcctggggtctgcaggtctccggtccacttcatgcagacaggccctgtcccccactggggcccaaggcccaggctaaactacagcccagccatcccaccccaggccgtgaatgccttctccaggagggcaaccaaggatggtgccacatgtgagcacaagcaaaacccggagccaaggcgagtcctgctgggtgcacgtttatcccagccaccgcctccagggcggccgcacaggccctgggcatcaatccagcagggctcccgactcactccctggagaccaggggggacacgggctcacaccacacatctcagaggctaacaggtgggcagg

SEQ ID NO: 5363 - DNA, 1374 bp, Homo sapiens
  source 1..1374: mol_type = unassigned DNA
ttacttttgttatgtattttaccacaatttttaaaaagcaaaccaaaaccaaccaagagtgcttcccccacacctcaaaatcatcctgcagcagctccctggcccagctctctctcaccctgaccctgggcccctctcccaccacccagggctagccctgtggaccaaccatctctgccagcccctccccgaccctccagccagggaggtggggcgctggccggtgaatggggcaggccaggcccaaaggctggcccagggctcaccagctctggactgggcgtcccgtctgaggtggggatgaccaacatgccagctctgggttttagctgaggatgggcacatcaagcactgacagccagcaagctgggcacaggcgatgctcaacctctaacacatcggctgagaacctcacctgcctctccctgcctgggagccctggcaagacagctcctctcccaggcccagcacaggcaggcgctggacagccacttcctaaggggtgcgcggccgtcaaggcagaggtgggtatccctgcacctcacacctctcaggaggtcaggatccacatccgtcgcctgctttcctgggctgcccctggggcttgtgggctgagatcaaccccttgtgccctgccccaggccctccctcaggcgaggccctgcccaggcaggtggttcttccctggctgttcccttccaacaggtggggcccagaccatcctatctctttggacctggagacatttccttaactgggctttgcagcagagggaagagaacagtggcagagccaggcgcgtacctcctgtgcccaggacagcacctgtaagcaagggggaagggagccacccaccccagaactcaaatggagagaaagtcaagacaatcacccctgacgtggggctgcaccaatccctgacgtctgaccccactgtggctgtcctcagagccaagagggctccagaagcccacccgcctcgaagctgttcagggagcctcacggcccgtgtttgccacatgggtgtgtgccagggccaaggggacacagaagatggcaggatgacactaatggggtgagcagggcacactggtgcctcccatactgccctccagcaccaggcagggtcaccacagccggcaagcactgggcctggggatgtgtgaagagatagggttattgagaagagaaaacagaacgctggtcatccgtggcactcagggctaggcagtccagggagcagaaaacaggggtcccgggcccagtctccctcctggaggtcagagcggagcccctggcactgtgccctggcccagaaccaggctgtgggctccacgctgcacaccccaactcaggagcagaaagcaaacccct

SEQ ID NO: 5364 - DNA, 4248 bp, Homo sapiens
  source 1..4248: mol_type = unassigned DNA
agggaacttgacccgttagcagccgcagccatggcggcgcgttcgcctccctcaccgcacccttcgcccccagcgcgacagctgggccccaggtccccacgtgttgggcggggagctgaagtacacgcaatgcgcagcgaggcctcgggttttgccggcgcagcgcgggaggtggtcgcggacgaaagtgataaaatctgggtgggtgaagaagggtcagggggccggcgagggcctgggggggcagctccggctcatgctcccctcctcagcgcgcccatggggtccagacggctagagggcatctcggtagaggaggcgatggtgacccggacgcagctgctggaggaagagctgagcagcctaaaggaggagttggccctgtgtcaggctgataaagaatttgtatggtctttgtggaaacgtctccaggttacaaacccagatctcacacaagtggtcagtttggttgtggaaagagaaaaacagaaatctgaagctaaagacagaaaagttctagaaattctgcaagtcaaggatgccaaaatacaagaatttgaacagagagagtcagtactgaaacaggaaataaatgaccttgtaaaacggaaaattgcagtagatgaagaaaatgctttcttaaggaaagaattcagtgacttggagaagaaatttaaagataaaagtcaagaaattaaggacactaaggagtgtgtacagaacaaagaagagcaaaacagactagttataaaaaatctggaggaggaaaacaagaaattaagtacccgctgcactgacctgctaaatgacctggagaaattgaggaagcaggaagcacatttgagaaaagaaaaatatagcactgatgcaaaaataaagacctttgaagacaatttaattgaagcaaggaaagaagttgaagtatcacagagtaaatacaatgctctatcattacagttgagtaataaacagactgaacttatccagaaggatatggatattaccctggtcaggcaagaactgcaggagctgcagaatctttacaaacagaacagtacacatacagcccagcaagcagagctgatccagcagcttcaggttctcaatatggacacacaaaaagtactgagaaatcaggaagatgttcacacagctgaaagtatatcatatcaaaaactttacaatgagttacatatttgttttgaaaccacaaaatcaaatgaagctatgctccggcaaagtgttactaatcttcaggatcagctattacaaaaagagcaagaaaatgctaagttaaaagaaaaacttcaggaatcacagggagcacctcttcctttacctcaagaaagtgatccagactactcagcacaggtacctcatcgcccatccttatcaagcttagaaacgttaatggtttcacagaagtctgaaattgagtatttacaggagaaactaaagatagcaaatgaaaaactgtcagaaaacatatctgccaacaagggtttctcccgaaagagcatcatgacaagtgctgaaggaaaacataaggaaccacctgtgaaacgttcaaggtctttgtccccaaagagctctttcacagactcagaagagctacagaagctgagaaaagctgaaagaaagattgaaaacttagagaaggcactacaactaaagagccaagaaaatgatgagctaagagatgcccatgaaaaacgcaaggaacggctacagatgttacagaccaactacagagcagtaaaagagcaattaaaacagtgggaagaaggcagtggcatgactgaaatcaggaaaataaagagagcagatccccaacaacttcgacaagaagattctgacgctgtgtggaatgaactggcatatttcaaaagggaaaaccaggagctaatgattcaaaagatgaatcttgaagaagaattagatgaacttaaagtacatatatctattgataaggcagcaatacaagaattgaatagatgtgtggcagagagaagagaagaacagctctttagatctggtgaagatgatgaggtcaagaggagtactccagagaagaatggaaaagaaatgttggagcagacattacagaaggtcactgagttggaaaatcggctgaaatcttttgagaaaaggtcgagaaaattaaaagaagggaataaaaaattaatgaaagaaaatgattttctgaaatccctcttaaaacagcaacaagaagatacagagaccagagaaaaagagctagaacagataataaaggggagtaaagatgtagaaaaagaaaatactgaacttcaagtaaaaatcagtgagctggagacagaagtcacttccctgaggagacaagtggcagaagctaatgcattgagaaatgaaaatgaagagctgatcaacccaatggagaaatcacaccagtcagcagacagagctaaatccgagatggccaccatgaaagtgagatctggacgatatgattgtaagacaactatgaccaaggttaaatttaaagctgcgaagaaaaattgctctgtgggtcgtcaccacactgttctcaatcattccatcaaggttatgagcaatgtgtttgagaacctcagcaaggacggctgggaggatgtgagtgaaagcagcagtgattctgaagcacagacctctcaaactttgggaacaattattgtagaaacatcccagaaaataagtcctacggaagatggaaaagaccagaaagaaagtgatccaacagaagacagccaaacacaaggaaaagaaatagtacagacatatttaaatatagatggcaagaccccaaaggactattttcatgataagaatgccaaaaaaccaacttttcaaaagaagaattgcaagatgcaaaagagttcacatacagcagttcctactagagtcaacagagaaaagtacaaaaatataactgcccagaaatcaagtagcaatattattttattacgagaacggattatatccttgcaacaacaaaacagtgtacttcagaatgccaagaaaacagcagaattgtctgttaaagaatataaagaagttaatgaaaagctcctccatcaacagcaagtatccgatcaacgatttcagacaagcaggcagacaataaagaagctaaatttggatttggctgggcttcggaaagaaaaagaagatttactaaagaaattggagtcctcatctgaaatcacaagtttggcagaagaaaattcccaggtaacatttccacggatacaagttacatcacttagtccttcaaggagcatggatttggaaatgaagcaattgcagtataaactaaagaatgctactaatgaactcactaaacagtcatcaaatgtgaagactttgaaatttgaactcctagcaaaagaagaacacataaaggaaatgcatgaaaagatatctcgaatggagagggatataactatgaaaagacatttgatagaggacttgaaatttcgacagaaagtaaatttggaaagtaacaagagttttagtgaaatgttacaaaatcttgataaaaaggtaaagacattaactgaagaatgttccaacaagaaggtatcaattgattcactaaagcaaagacttaacgttgctgtaaaagaaaagtcacagtatgaacagatgtatcagaaatctaaagaggagttagaaaaaaaggatctcaagcttactctcctagtatcaagaataagtgagactgaatctgcaatggcagaaattgaaacagcagcatctaagcagcttcaagaattagcattgcaaagtgaacaggtcctagaaggtgcacagaagacattgctgttagccaatgaaaaagtagaagagttcaccacatttgtgaaggctttggccaaagagttgcaaaatgatgtccatgtggtaaggcgacaaataagagagcttaaaaaaatgaagaaaaacagggacgcctgtaaaacctcaacccataaagcccagaccttggcagcttctatcctgaacatttcacggtcagatttagaggaaatattagacacagaagatcaagtggaaattgaaaaaacaaaaattgatgctgaaaatgacaaggaatggatgttgtacattcagaaacttcttgaaggacagagtcttgctctgtctcccaggctgaagtgcaatggcgcaatcgtggctcaccaaaacctccgcctgccagactcgagcagttctgcctcagcctcctga

SEQ ID NO: 5365 - DNA, 2061 bp, Homo sapiens
  source 1..2061: mol_type = unassigned DNA
aacttgacccgttagcagccgcagccatggcggcgcgttcgcctccctcaccgcacccttcgcccccagcgcgacagctgggccccaggtccccacgtgttgggcggggagctgaagtacacgcaatgcgcagcgaggcctcgggttttgccggcgcagcgcgggaggtggtcgcggacgaaagtgataaaatctgggtgggtgaagaagggtcagggggccggcgagggcctgggggggcagctccggctcatgctcccctcctcagcgcgcccatggggtccagacggctagagggcatctcggtagaggaggcgatggtgacccggacgcagctgctggaggaagagctgagcagcctaaaggaggagttggccctgtgtcaggctgataaagaatttgtatggtctttgtggaaacgtctccaggttacaaacccagatctcacacaagtggtcagtttggttgtggaaagagaaaaacagaaatctgaagctaaagacagaaaagttctagaaattctgcaagtcaaggatgccaaaatacaagaatttgaacagagagagtcagtactgaaacaggaaataaatgaccttgtaaaacggaaaattgcagtagatgaagaaaatgctttcttaaggaaagaattcagtgacttggagaagaaatttaaagataaaagtcaagaaattaaggacactaaggagtgtgtacagaacaaagaagagcaaaacagactagttataaaaaatctggaggaggaaaacaagaaattaagtacccgctgcactgacctgctaaatgacctggagaaattgaggaagcaggaagcacatttgagaaaagaaaaatatagcactgatgcaaaaataaagacctttgaagacaatttaattgaagcaaggaaagaagttgaagtatcacagagtaaatacaatgctctatcattacagttgagtaataaacagactgaacttatccagaaggatatggatattaccctggtcaggaaggaactgcaggagctgcagaatctttacaaacagaacagtacacatacagcccagcaagcagagctgatccagcagcttcaggttctcaatatggacacacaaaaagtactgagaaatcaggaagatgttcacacagctgaaagtatatcatatcaaaaagtatgcttttattctgtaataaagatgtaaatgtttatgtatgaacttatgaacatatatagaattcagattttttcaaatttcagcatttaatttttacttccttttacatgtgtttcctcaaaatttagaagtgaaggatggttcaatttgataacatttaaaattttttgaattttctttatggtaattagagctgaatcacttaaaatatagatacaaacttactctatagggtattatttttataaattggcattcagacagcttctgtgaaacatactaggagtatagtctcaaaactggaatggaattcctcggcctgctattacaagaaattattttgtcaagtatggcagactttcattgtaaaatttgtacattatttttcggcaaatcttcacaaatacaaaggggattgctgaggagggctttaggatcaatattttccaggatttttctctgtttattttgtgtgtttctgttcagtagtcttttactttacagttgttttaggagcctttcaagaaggtttacccaagtatttaggtgtgctaactgactcagcagcaataatttaatctactaattaaaaaaaatacctttattggccgggcatggtggctcatgcctgtaatcccagcactttgggaggctgaggcgggcgaatcacaaggtcaagagatcgagaccatcctggccaacatgatgaaaccctgtttctactaaaaatacaaaaagttagctgagcatggtggttcatgcctgtagtcccagctacttgggaggctgaggcaggagaatcacttgaacctgggaggcggaggtcgcagtgagccaagatcgcaccattgcactccagccaggcgacagggggagacaacgtctc

SEQ ID NO: 5366 - DNA, 5576 bp, Homo sapiens
  source 1..5576: mol_type = unassigned DNA
cggttcggcgttccgggctcgccgggttggggaaagggaggtggagtttccaacagggaacttgacccgttagcagccgcagccatggcggcgcgttcgcctccctcaccgcacccttcgcccccagcgcgacagctgggccccaggtccccacgtgttgggcggggagctgaagtacacgcaatgcgcagcgaggcctcgggttttgccggcgcagcgcgggaggtggtcgcggacgaaagtgataaaatctgggtgggtgaagaagggtcagggggccggcgagggcctgggggggcagctccggctcatgctcccctcctcagcgcgcccatggggtccagacggctagagggcatctcggtagaggaggcgatggtgacccggacgcagctgctggaggaagagctgagcagcctaaaggaggagttggccctgtgtcaggctgataaagaatttgtatggtctttgtggaaacgtctccaggttacaaacccagatctcacacaagtggtcagtttggttgtggaaagagaaaaacagaaatctgaagctaaagacagaaaagttctagaaattctgcaagtcaaggatgccaaaatacaagaatttgaacagagagagtcagtactgaaacaggaaataaatgaccttgtaaaacggaaaattgcagtagatgaagaaaatgctttcttaaggaaagaattcagtgacttggagaagaaatttaaagataaaagtcaagaaattaaggacactaaggagtgtgtacagaacaaagaagagcaaaacagactagttataaaaaatctggaggaggaaaacaagaaattaagtacccgctgcactgacctgctaaatgacctggagaaattgaggaagcaggaagcacatttgagaaaagaaaaatatagcactgatgcaaaaataaagacctttgaagacaatttaattgaagcaaggaaagaagttgaagtatcacagagtaaatacaatgctctatcattacagttgagtaataaacagactgaacttatccagaaggatatggatattaccctggtcaggaaggaactgcaggagctgcagaatctttacaaacagaacagtacacatacagcccagcaagcagagctgatccagcagcttcaggttctcaatatggacacacaaaaagtactgagaaatcaggaagatgttcacacagctgaaagtatatcatatcaaaaactttacaatgagttacatatttgttttgaaaccacaaaatcaaatgaagctatgctccggcaaagtgttactaatcttcaggatcagctattacaaaaagagcaagaaaatgctaagttaaaagaaaaacttcaggaatcacagggagcacctcttcctttacctcaagaaagtgatccagactactcagcacaggtacctcatcgcccatccttatcaagcttagaaacgttaatggtttcacagaagtctgaaattgagtatttacaggagaaactaaagatagcaaatgaaaaactgtcagaaaacatatctgccaacaagggtttctcccgaaagagcatcatgacaagtgctgaaggaaaacataaggaaccacctgtgaaacgttcaaggtctttgtccccaaagagctctttcacagactcagaagagctacagaagctgagaaaagctgaaagaaagattgaaaacttagagaaggcactacaactaaagagccaagaaaatgatgagctaagagatgcccatgaaaaacgcaaggaacggctacagatgttacagaccaactacagagcagtaaaagagcaattaaaacagtgggaagaaggcagtggcatgactgaaatcaggaaaataaagagagcagatccccaacaacttcgacaagaagattctgacgctgtgtggaatgaactggcatatttcaaaagggaaaaccaggagctaatgattcaaaagatgaatcttgaagaagaattagatgaacttaaagtacatatatctattgataaggcagcaatacaagaattgaatagatgtgtggcagagagaagagaagaacagctctttagatctggtgaagatgatgaggtcaagaggagtactccagagaagaatggaaaagaaatgttggagcagacattacagaaggtcactgagttggaaaatcggctgaaatcttttgagaaaaggtcgagaaaattaaaagaagggaataaaaaattaatgaaagaaaatgattttctgaaatccctcttaaaacagcaacaagaagatacagagaccagagaaaaagagctagaacagataataaaggggagtaaagatgtagaaaaagaaaatactgaacttcaagtaaaaatcagtgagctggagacagaagtcacttccctgaggagacaagtggcagaagctaatgcattgagaaatgaaaatgaagagctgatcaacccaatggagaaatcacaccagtcagcagacagagctaaatccgagatggccaccatgaaagtgagatctggacgatatgattgtaagacaactatgaccaaggttaaatttaaagctgcgaagaaaaattgctctgtgggtcgtcaccacactgttctcaatcattccatcaaggttatgagcaatgtgtttgagaacctcagcaaggacggctgggaggatgtgagtgaaagcagcagtgattctgaagcacagacctctcaaactttgggaacaattattgtagaaacatcccagaaaataagtcctacggaagatggaaaagaccagaaagaaagtgatccaacagaagacagccaaacacaaggaaaagaaatagtacagacatatttaaatatagatggcaagaccccaaaggactattttcatgataagaatgccaaaaaaccaacttttcaaaagaagaattgcaagatgcaaaagagttcacatacagcagttcctactagagtcaacagagaaaagtacaaaaatataactgcccagaaatcaagtagcaatattattttattacgagaacggattatatccttgcaacaacaaaacagtgtacttcagaatgccaagaaaacagcagaattgtctgttaaagaatataaagaagttaatgaaaagctcctccatcaacagcaagtatccgatcaacgatttcagacaagcaggcagacaataaagaagctaaatttggatttggctgggcttcggaaagaaaaagaagatttactaaagaaattggagtcctcatctgaaatcacaagtttggcagaagaaaattcccaggtaacatttccacggatacaagttacatcacttagtccttcaaggagcatggatttggaaatgaagcaattgcagtataaactaaagaatgctactaatgaactcactaaacagtcatcaaatgtgaagactttgaaatttgaactcctagcaaaagaagaacacataaaggaaatgcatgaaaagatatctcgaatggagagggatataactatgaaaagacatttgatagaggacttgaaatttcgacagaaagtaaatttggaaagtaacaagagttttagtgaaatgttacaaaatcttgataaaaaggtaaagacattaactgaagaatgttccaacaagaaggtatcaattgattcactaaagcaaagacttaacgttgctgtaaaagaaaagtcacagtatgaacagatgtatcagaaatctaaagaggagttagaaaaaaaggatctcaagcttactctcctagtatcaagaataagtgagactgaatctgcaatggcagaaattgaaacagcagcatctaagcagcttcaagaattagcattgcaaagtgaacaggtcctagaaggtgcacagaagacattgctgttagccaatgaaaaagtagaagagttcaccacatttgtgaaggctttggccaaagagttgcaaaatgatgtccatgtggtaaggcgacaaataagagagcttaaaaaaatgaagaaaaacagggacgcctgtaaaacctcaacccataaagcccagaccttggcagcttctatcctgaacatttcacggtcagatttagaggaaatattagacacagaagatcaagtggaaattgaaaaaacaaaaattgatgctgaaaatgacaaggaatggatgttgtacattcagaaacttcttgaaggacagcttccttttgcctcatatttactagaagcagtactggaaaaaataaatgaaaaaaagaaactagttgaaggatatttcacaattatgaaagatattagatgatattaaaatggagagctttattgcaaatgtgaaaactttttatgtggtgtgattggaatacatgcattgcaatcctgacacggtatctgctccaactatcaatagtcaggttcaataccaaaataagaagtctctgaaaataattaattgctgaacaagtgaaactaattaagtacatagccatttaaaaggaaatagtgtagcatctgatggtcgaatacaaatattgccacaaatcagtgcaaacttaaaaatgattttccttctagtgcattaaaagaaactgagcaggcttggtacacacaaattggcctgagcataagaagaaaaagtatcaactaaggatttaatgttttacgtttcatgaagaaactagactttttacataaaactgctatagatggccataagtggtccagggagcaacagatttgtagtatgagcaaatataaaatgaagcatcataacttgagcatttattgaaataaattgtgtggtccaattgaatctgttctcattgatgtgctggtttatgtaggagatactgtgtatttctacaactctttggcaaaaacaaaaacattttcttcttctctctcttaacttcacaatactatacgttgtgtagtcatataaatttgcagggaaccacaaacccaatgtataaaattaggctctatttaacagaactactactgtggtcagctaatttaagttacattcttaaccatgatgtcatccttatttagattcctggacattcccacctcatttcacctcttcaccgtgttcctgccataccctttttggttcctctaattcaccatactggtgcctgcctcccacatttgcccttggtcttctctctttctagaatactctgcactcaactttcctcatggctggctccttgtcatcattcagctccaccttccccggtccctcagagacacattctctgaccagcttactattttatttcctcatagcacaaaattatctatctgttcatgtatttgttttcttgtttattttcttcttttccctctttagtatgtaggtcccatgagattaaggcaagggttggcagattatagcctgcagggcgaatctggcctgccacctgttttgtatggcccacaagctaagaatggtttttgccttattaaatggtttttaaaaaatcaaaaggagaataatattttgtagcatgtgaaaattatataaaattcaaattttggtgtctgttaataaagttttattggaacaca

SEQ ID NO: 5367 - DNA, 5516 bp, Homo sapiens
  source 1..5516: mol_type = unassigned DNA
agggaacttgacccgttagcagccgcagccatggcggcgcgttcgcctccctcaccgcacccttcgcccccagcgcgacagctgggccccaggtccccacgtgttgggcggggagctgaagtacacgcaatgcgcagcgaggcctcgggttttgccggcgcagcgcgggaggtggtcgcggacgaaagtgataaaatctgggtgggtgaagaagggtcagggggccggcgagggcctgggggggcagctccggctcatgctcccctcctcagcgcgcccatggggtccagacggctagagggcatctcggtagaggaggcgatggtgacccggacgcagctgctggaggaagagctgagcagcctaaaggaggagttggccctgtgtcaggctgataaagaatttgtatggtctttgtggaaacgtctccaggttacaaacccagatctcacacaagtggtcagtttggttgtggaaagagaaaaacagaaatctgaagctaaagacagaaaagttctagaaattctgcaagtcaaggatgccaaaatacaagaatttgaacagagagagtcagtactgaaacaggaaataaatgaccttgtaaaacggaaaattgcagtagatgaagaaaatgctttcttaaggaaagaattcagtgacttggagaagaaatttaaagataaaagtcaagaaattaaggacactaaggagtgtgtacagaacaaagaagagcaaaacagactagttataaaaaatctggaggaggaaaacaagaaattaagtacccgctgcactgacctgctaaatgacctggagaaattgaggaagcaggaagcacatttgagaaaagaaaaatatagcactgatgcaaaaataaagacctttgaagacaatttaattgaagcaaggaaagaagttgaagtatcacagagtaaatacaatgctctatcattacagttgagtaataaacagactgaacttatccagaaggatatggatattaccctggtcaggcaagaactgcaggagctgcagaatctttacaaacagaacagtacacatacagcccagcaagcagagctgatccagcagcttcaggttctcaatatggacacacaaaaagtactgagaaatcaggaagatgttcacacagctgaaagtatatcatatcaaaaactttacaatgagttacatatttgttttgaaaccacaaaatcaaatgaagctatgctccggcaaagtgttactaatcttcaggatcagctattacaaaaagagcaagaaaatgctaagttaaaagaaaaacttcaggaatcacagggagcacctcttcctttacctcaagaaagtgatccagactactcagcacaggtacctcatcgcccatccttatcaagcttagaaacgttaatggtttcacagaagtctgaaattgagtatttacaggagaaactaaagatagcaaatgaaaaactgtcagaaaacatatctgccaacaagggtttctcccgaaagagcatcatgacaagtgctgaaggaaaacataaggaaccacctgtgaaacgttcaaggtctttgtccccaaagagctctttcacagactcagaagagctacagaagctgagaaaagctgaaagaaagattgaaaacttagagaaggcactacaactaaagagccaagaaaatgatgagctaagagatgcccatgaaaaacgcaaggaacggctacagatgttacagaccaactacagagcagtaaaagagcaattaaaacagtgggaagaaggcagtggcatgactgaaatcaggaaaataaagagagcagatccccaacaacttcgacaagaagattctgacgctgtgtggaatgaactggcatatttcaaaagggaaaaccaggagctaatgattcaaaagatgaatcttgaagaagaattagatgaacttaaagtacatatatctattgataaggcagcaatacaagaattgaatagatgtgtggcagagagaagagaagaacagctctttagatctggtgaagatgatgaggtcaagaggagtactccagagaagaatggaaaagaaatgttggagcagacattacagaaggtcactgagttggaaaatcggctgaaatcttttgagaaaaggtcgagaaaattaaaagaagggaataaaaaattaatgaaagaaaatgattttctgaaatccctcttaaaacagcaacaagaagatacagagaccagagaaaaagagctagaacagataataaaggggagtaaagatgtagaaaaagaaaatactgaacttcaagtaaaaatcagtgagctggagacagaagtcacttccctgaggagacaagtggcagaagctaatgcattgagaaatgaaaatgaagagctgatcaacccaatggagaaatcacaccagtcagcagacagagctaaatccgagatggccaccatgaaagtgagatctggacgatatgattgtaagacaactatgaccaaggttaaatttaaagctgcgaagaaaaattgctctgtgggtcgtcaccacactgttctcaatcattccatcaaggttatgagcaatgtgtttgagaacctcagcaaggacggctgggaggatgtgagtgaaagcagcagtgattctgaagcacagacctctcaaactttgggaacaattattgtagaaacatcccagaaaataagtcctacggaagatggaaaagaccagaaagaaagtgatccaacagaagacagccaaacacaaggaaaagaaatagtacagacatatttaaatatagatggcaagaccccaaaggactattttcatgataagaatgccaaaaaaccaacttttcaaaagaagaattgcaagatgcaaaagagttcacatacagcagttcctactagagtcaacagagaaaagtacaaaaatataactgcccagaaatcaagtagcaatattattttattacgagaacggattatatccttgcaacaacaaaacagtgtacttcagaatgccaagaaaacagcagaattgtctgttaaagaatataaagaagttaatgaaaagctcctccatcaacagcaagtatccgatcaacgatttcagacaagcaggcagacaataaagaagctaaatttggatttggctgggcttcggaaagaaaaagaagatttactaaagaaattggagtcctcatctgaaatcacaagtttggcagaagaaaattcccaggtaacatttccacggatacaagttacatcacttagtccttcaaggagcatggatttggaaatgaagcaattgcagtataaactaaagaatgctactaatgaactcactaaacagtcatcaaatgtgaagactttgaaatttgaactcctagcaaaagaagaacacataaaggaaatgcatgaaaagatatctcgaatggagagggatataactatgaaaagacatttgatagaggacttgaaatttcgacagaaagtaaatttggaaagtaacaagagttttagtgaaatgttacaaaatcttgataaaaaggtaaagacattaactgaagaatgttccaacaagaaggtatcaattgattcactaaagcaaagacttaacgttgctgtaaaagaaaagtcacagtatgaacagatgtatcagaaatctaaagaggagttagaaaaaaaggatctcaagcttactctcctagtatcaagaataagtgagactgaatctgcaatggcagaaattgaaacagcagcatctaagcagcttcaagaattagcattgcaaagtgaacaggtcctagaaggtgcacagaagacattgctgttagccaatgaaaaagtagaagagttcaccacatttgtgaaggctttggccaaagagttgcaaaatgatgtccatgtggtaaggcgacaaataagagagcttaaaaaaatgaagaaaaacagggacgcctgtaaaacctcaacccataaagcccagaccttggcagcttctatcctgaacatttcacggtcagatttagaggaaatattagacacagaagatcaagtggaaattgaaaaaacaaaaattgatgctgaaaatgacaaggaatggatgttgtacattcagaaacttcttgaaggacagcttccttttgcctcatatttactagaagcagtactggaaaaaataaatgaaaaaaagaaactagttgaaggatatttcacaattatgaaagatattagatgatattaaaatggagagctttattgcaaatgtgaaaactttttatgtggtgtgattggaatacatgcattgcaatcctgacacggtatctgctccaactatcaatagtcaggttcaataccaaaataagaagtctctgaaaataattaattgctgaacaagtgaaactaattaagtacatagccatttaaaaggaaatagtgtagcatctgatggtcgaatacaaatattgccacaaatcagtgcaaacttaaaaatgattttccttctagtgcattaaaagaaactgagcaggcttggtacacacaaattggcctgagcataagaagaaaaagtatcaactaaggatttaatgttttacgtttcatgaagaaactagactttttacataaaactgctatagatggccataagtggtccagggagcaacagatttgtagtatgagcaaatataaaatgaagcatcataacttgagcatttattgaaataaattgtgtggtccaattgaatctgttctcattgatgtgctggtttatgtaggagatactgtgtatttctacaactctttggcaaaaacaaaaacattttcttcttctctctcttaacttcacaatactatacgttgtgtagtcatataaatttgcagggaaccacaaacccaatgtataaaattaggctctatttaacagaactactactgtggtcagctaatttaagttacattcttaaccatgatgtcatccttatttagattcctggacattcccacctcatttcacctcttcaccgtgttcctgccataccctttttggttcctctaattcaccatactggtgcctgcctcccacatttgcccttggtcttctctctttctagaatactctgcactcaactttcctcatggctggctccttgtcatcattcagctccaccttccccggtccctcagagacacattctctgaccagcttactattttatttcctcatagcacaaaattatctatctgttcatgtatttgttttcttgtttattttcttcttttccctctttagtatgtaggtcccatgagattaaggcaagggttggcagattatagcctgcagggcgaatctggcctgccacctgttttgtatggcccacaagctaagaatggtttttgccttattaaatggtttttaaaaaatcaaaaggagaataatattttgtagcatgtgaaaattatataaaattcaaattttggtgtctgttaataaagttttattgg

SEQ ID NO: 5368 - DNA, 1158 bp, Homo sapiens
  source 1..1158: mol_type = unassigned DNA
gcggggcggtgccgttgggaccacggcggccagagcggcaggatggcttccggcttcaagaagcccagcgctgcctccaccggccaaaagagaaaggtggcacctaagcccgagctcactgaggatcagaagcaagaagttcgggaagcatttgacctcttcgacgtggacggaagtgggaccatcgacgcgaaggagctgaaggtggccatgagagcgctgggcttcgaacccaggaaggaagagatgaagaaaatgatctccgaggtggacagggaaggcacggggaagatcagcttcaatgacttcctggccgtgatgacgcagaagatgtccgagaaggacaccaaagaagaaatcctgaaggccttcaggctctttgatgacgatgagaccgggaagatctcgttcaaaaacctgaagcgtgtggccaacgagctgggggagaacctcacggatgaggagctgcaggagatgatcgacgaagctgatcgggatggggacggcgaagtgaacgaggaggagttccttcggatcatgaagaagaccagcctttactgaagtcggttcagaagctaaagtgactctctgggttgcctgcttccattttgtgaaaccttagaggacagcggctgcctgtcccttcttcaccccctcacccccataatttgtctagatctatttccatatctctagttcaataatagaatttgaaagatgcttgtaatgtgagttttgggttttaattctcaagagtcaacctggagcacatgaggttaaacaaagggccctgaagtttgagtgcgccctccatttgccctgtgctgaacttgctgttcatctgttgatctggaggcaggacagcttctgggacacacaaaaatgtggttccctttgtcacttctttggtggtcttaaattatcttgcttcatatatcattccttaaattccagtcattgttccagcataatgagatggaatctgccagtagatttgcctagcctgtccacttagctgaataccagtttgaaggaaaacagggtggccacttacaaacttacggagctcaggacagataatcttataaagaatagacttgcttgggtggtagtacgttgtgcaattttgactattcactggctttatacctgcaaatg

SEQ ID NO: 5369 - DNA, 1454 bp, Homo sapiens
  source 1..1454: mol_type = unassigned DNA
ggtgggaacggcgccgagtcagtgtacacgtcggttgcctaacaaccggcagcggactcctttggctatggcctccaactttaagaaggcaaacatggcatcaagttctcagcgaaaaagaatgagccctaagcctgagcttactgaagagcaaaagcaggagatccgggaagcttttgatcttttcgatgcggatggaactggcaccatagatgttaaagaactgaaggtggcaatgagggccctgggctttgaacccaagaaagaagaaattaagaaaatgataagtgaaattgataaggaagggacaggaaaaatgaactttggtgactttttaactgtgatgacccagaaaatgtctgagaaagatactaaagaagaaatcctgaaagctttcaagctctttgatgatgatgaaactgggaagatttcgttcaaaaatctgaaacgcgtggccaaggagttgggtgagaacctgactgatgaggagctgcaggaaatgattgatgaagctgatcgagatggagatggagaggtcagtgagcaagagttcctgcgcatcatgaaaaagaccagcctctattaagatcagtgtcttctttttctactgcaagcacatgtaactagatttagtgcctgccatggtgtgaaatctggcttttgagaacacaaacttttcccccacggacctccctttatcactttaatagtgaccttgagcctattttagccgtttggaagtgttctttgatattacagttctttgtaaaatgacctgcgaattaccctaattctcaaaagcaaaacaagagcacacaagcgtgaagaaaaggatcttaaagctttgagcacctgccattttgccttgcatcgtttccctcgtcatgcatttccacatatccacaaacacagaacgactttagacaagcacatgttacacctgtgttgccacaagcagtcattcttgacggctccagtttttatttgacacttgagtttagttttctcttttataaacccagtgaactcctgcactggcatttggatgtgtgttaatgctatttgttttgtcttaaaagtaaaacctttctcagtttgaacttgtattctctaaggatgagttctttagctttgcttatgagttcctcttctcaattattgtgttgaaggcagcctattagatacaaaactccttaccagcctatggacagaaaatgaataatcctttgctactttcctggcatgaattgctttttgccttggaaggctgctggtttgtaaaactagcagaatttttatatcacctaagcctaaatgatgctctaaaaatagttttggcaaagctaagactggaaaagagtcttgttagtaatttgtgcttgaataaaatggggagagccaggctaacgcaacactaggatggattcagccaacctctcgtgaatttatttgct

SEQ ID NO: 5370 - DNA, 1299 bp, Homo sapiens
  source 1..1299: mol_type = unassigned DNA
agcaccggctcatgtgaggctcgcggcacagcgttctctgggctccccagaagccagcctttcgctcccggacccggcagcccgagcaggagccgtgggaccgggcgccagcaccctctgcggcgtgtcatgggcccgcgccgccggagccgaaagcccgaggccccgaggaggcgcagcccgagcccgaccccgacccccggcccctcccggcggggcccctccttaggcgcttcctcccatcaacacagtcggcggagacaaggttggctaaaggagatccgaaagcttcagaagagcacacacctcttgataaggaagctgcccttcagccgcctggcagcagaagcatttctagttcatctctttgaggacgcctatctcctcaccttacatgcaggccgagttactctcttcccaaaggatgtgcaactggcccggaggatccggggccttgaggagggactcggctgagctcctgcacccagtgtttctgtcagtctttcctgctcagccaggggggatgataccggggactctccagagccatgactagatccaatggattctgcgatgctgtctggactttgctgtctctgaacagtatgtgtgtgttgctttaaatatttttcttttttttgagaaggagaagactgcatgactttcctctgtaacagaggtaatatatgagacaatcaacaccgttccaaaggcctgaaaataattttcagataaagagactccaaggttgactttagtttgtgagttactcatgtgactatttgaggattttgaaaacatcagatttgctgtggtatgggagaaaaggctatgtacttattattttagctctttctgtaatatttacattttttaccatatgtacatttgtacttttattttacacataagggaaaaaataagaccactttgagcagttgcctggaaggctgggcatttccatcatatagacctctgcccttcagagtagcctcaccattagtggcagcatcatgtaactgagtggactgtgcttgtcaacggatgtgtagcttttcagaaacttaattggggatgaatagaaaacctgtaagctttgatgttctggttacttctagtaaattcctgtcaaaatcaattcagaaattctaacttggagaatttaacattttactcttgtaaatcatagaagatgtatcataacagttcagaattttaaagtacattttcgatgcttttatgggtatttttgtagtttctttgtagagagataataaaaatcaaaatatttaatgaaaa

SEQ ID NO: 5371 - DNA, 1452 bp, Homo sapiens
  source 1..1452: mol_type = unassigned DNA
gttttaaaaaacgccggccgtgaagtgggcggagcgagcgatttgaacgcgagcggcgcggacttctgccaagcaccggctcatgtgaggctcgcggcacagcgttctctgggctccccagaagccagcctttcgctcccggacccggcagcccgagcaggagccgtgggaccgggcgccagcaccctctgcggcgtgtcatgggcccgcgccgccggagccgaaagcccgaggccccgaggaggcgcagcccgagcccgaccccgacccccggcccctcccggcggggcccctccttaggcgcttcctcccatcaacacagtcggcggagacaaggttggctaaaggagatccgaaagcttcagaagagcacacacctcttgataaggaagctgcccttcagccgcctggcaagagaaatatgtgttaaattcactcgtggtgtggacttcaattggcaagcccaggccctattggccctacaagaggcagcagaagcatttctagttcatctctttgaggacgcctatctcctcaccttacatgcaggccgagttactctcttcccaaaggatgtgcaactggcccggaggatccggggccttgaggagggactcggctgagctcctgcacccagtgtttctgtcagtctttcctgctcagccaggggggatgataccggggactctccagagccatgactagatccaatggattctgcgatgctgtctggactttgctgtctctgaacagtatgtgtgtgttgctttaaatatttttcttttttttgagaaggagaagactgcatgactttcctctgtaacagaggtaatatatgagacaatcaacaccgttccaaaggcctgaaaataattttcagataaagagactccaaggttgactttagtttgtgagttactcatgtgactatttgaggattttgaaaacatcagatttgctgtggtatgggagaaaaggctatgtacttattattttagctctttctgtaatatttacattttttaccatatgtacatttgtacttttattttacacataagggaaaaaataagaccactttgagcagttgcctggaaggctgggcatttccatcatatagacctctgcccttcagagtagcctcaccattagtggcagcatcatgtaactgagtggactgtgcttgtcaacggatgtgtagcttttcagaaacttaattggggatgaatagaaaacctgtaagctttgatgttctggttacttctagtaaattcctgtcaaaatcaattcagaaattctaacttggagaatttaacattttactcttgtaaatcatagaagatgtatcataacagttcagaattttaaagtacattttcgatgcttttatgggtatttttgtagtttctttgtagagagataataaaaatcaaaatatttaatgaaaatgga

SEQ ID NO: 5372 - DNA, 2840 bp, Homo sapiens
  source 1..2840: mol_type = unassigned DNA
gcccgccgcccggcgacgcgcccgccggcgtccccggaggtgcccccggcccggccgggtcgtcgccccgccgccgcgcccgcgagccgctttgtctcgggcggggcgcgcgggagaggccgccaggtgccccccgccacgggcccgggccccccgccccggggcggcggcggcggcgccgggccccggggcggggggcgcgccgggatgggccccaagaggcgacagctgacgttccgggagaagtcacggatcatccaggaggtggaggagaatccggacctgcgcaagggcgagatcgcgcggcgcttcaacatcccgccgtccacgctgagcacgatcctgaagaacaagcgcgccatcctggcgtcggagcgcaagtacggggtggcctccacctgccgcaagaccaacaagctgtctccctacgacaagctcgagggcttgctcatcgcctggttccagcagatccgcgccgccggcctgccggtcaagggcatcatcctcaaggagaaggcgctgcgcatagccgaggagctgggcatggacgacttcaccgcctccaacggctggctggaccgcttccgccggcgccacggcgtggtgtcctgcagcggcgtggcccgcgcccgcgcgcgaaacgctgccccccgcaccccggcggcgcctgccagtccggccgcggtgccctcggagggcagtggcgggagcactactggttggcgcgctcgggaggagcagccgccgtcggtggccgagggctacgcctcgcaggacgtgttcagcgccaccgagaccagtctatggtacgacttcctgcccgaccaggccgcggggctgtgcggaggcgacggacggccgcgtcaagccacccagcgcctgagcgtcctgctatgcgccaatgccgacggcagcgagaagctgcccccgctggtggccggcaagtcggccaagccccgcgcaggccaagccggcctgccctgcgactacaccgccaactccaagggtggtgtcaccacccaggccctggccaagtacttgaaggccttggacacccgaatggctgcagagtctcgccgggtcctgctgttggccggccgcttggctgcccagtccttggacacctcgggcctgcggcatgtgcagctggccttcttccctcccggcaccgtgcatccgctggagaggggagtggtccagcaggtgaagggccactaccgccaggccatgctgctcaaggccatggccgcgctagagggccaggatccctcaggcctgcagctgggtctcacggaggccctgcactttgtggctgccgcctggcaggcagtggagccttcggacatagccgcctgctttcgtgaggctggctttgggggtggccctaatgccaccatcaccacttccctcaagagtgagggagaggaagaggaggaggaggaggaagaagaggaggaggaagagggtgaaggagaggaagaggaggaggaaggggaggaggaggaggaggaagggggggaaggagaggaattgggggaggaagaggaggtggaggaggagggtgatgttgatagtgatgaagaagaggaggaagatgaggagagctcctcggagggcttggaggctgaggactgggcccagggagtagtggaggccggtggcagcttcggggcttatggtgcccaggaggaagcccagtgccctactctgcatttcctggaaggtggggaggactctgattcagacagtgaggaagaggacgatgaggaagaggatgatgaagatgaagacgacgatgatgatgaggaggatggtgatgaggtgcctgtacccagctttggggaggccatggcttactttgccatggtcaagaggtacctgacctccttccccattgatgaccgcgtgcagagccacatcctccacttggaacacgatctggttcatgtgaccaggaagaaccacgccaggcaggcgggagttcgaggtcttggacatcaaagctgagtcactggacctagctgtgcccccaacctagattggcagcaccaccccagggcagaggactctctgggcacccgctgtgcatggagccagagtgcagagccccagatcctttagtaatgcttcccctggtcctgcaacaggcccggtcacctcggccgggcccggggctgaggtcagcctcactgcctgcttattgcctctttctcagaatcctctttcctccccatttggccctgggctcaggggaccaggtggggcgggtggggagctgtccggtgctaccacaccgtgccctcagtggactaaccacagcagcagccagggatgggccctggaggttcccggccggagagtgcctctcccctctgccatccacgtcaggtctttggtggggggaccccaaagccattctgggaagggctccagaagaaggtccagcctaggccccctgcaaggctggcagcccccacccccaccccccaggccgccttgagaagcacagtttaactcactgcgggctcctgagcctgcttctgcctgctttccacctccccagtccctttctctggccctgtccatgtgactttggcccttggttttctttccagattggaggtttccaagaggccccccaccgtggaagtaaccaagggcgcttccttgtgggcagctgcaggccccatgcctctcctccctctctggcagggccccatcctgggcagaggggcctggggctgggcccagagtccagccgtccagctgctcctttcccagtttgatttcaataaatctgtccactccccttttgtgggggtgaacgttttaacagccaa

SEQ ID NO: 5373 - DNA, 709 bp, Homo sapiens
  source 1..709: mol_type = unassigned DNA
gaggaagatgaggagagctcctcggagggcttggaggctgaggactgggcccagggagtagtggaggccggtggcagcttcggggcttatggtgcccaggaggaagcccagtgccctactctgcatttcctggaaggtggggaggactctgattcagacagtgaggaagaggacgatgaggaagaggatgatgaagatgaagacgacgatgatgatgaggaggatggtgatgaggtgcctgtacccagctttggggaggccatggcttactttgccatggtcaagaggtacctgacctccttccccattgatgaccgcgtgcagagccacatcctccacttggaacacgatctggttcatgtgaccaggaagaaccacgccaggcaggcgggagttcgaggtcttggacatcaaagctgagtcactggacctagctgtgcccccaacctagattggcagcaccaccccagggcagaggactctctgggcacccgctgtgcatggagccagagtgcagagccccagatcctttagtaatgcttcccctggtcctgcaacaggcccggtcacctcggccgggcccggggctgagattggaggtttccaagaggccccccaccgtggaagtaaccaagggcgcttccttgtgggcagctgcaggccccatgcctctcctccctctctggcagggccccatcctgggcagagg

SEQ ID NO: 5374 - DNA, 3885 bp, Homo sapiens
  source 1..3885: mol_type = unassigned DNA
atgtgtctccgggttcaaacccaggcacaggccaagcgttcttgtttgttgagggcggagccaatggcgggggagtgttgttagcgcgcgccttccggatcgcagctctcgcggcagtcgcctgagacttaaggttattgcttggccgcggcctggtattccggcgattcgtttcttgctcggcttcctggagctgtggtccgtgtgggcttccacctcagacagttgcgctggctcagcggggccggaacatggctgcgtccggtctggatcatctcaaaaatggctacagaagaagattttgtcgaccttccagggcacgtgacattaacacagagcaaggccagaatgttctggaaatcttacaagactgttttgaagaaaaaagtcttgccaatgattttagtacaaattctacaaaatcagtgcctaattcaacacgcaaaataaaagacacttgtattcagtcaccaagcaaagagtgccagaaatcacatccaaagtcagttccagtttcttcaaagaagaaagaagcctctctacagtttgttgtagaaccaagtgaagccacaaacagatcagttcaggcccatgaagttcatcagaaaattctggcaactgatgttagttccaaaaatacacctgactcgaaaaaaatatcaagtagaaacataaatgatcatcacagtgaagctgatgaagaattttacttatccgttggctcaccttctgttcttttggatgcaaaaacatctgtatcacaaaatgttattccatctagtgcccaaaagagagagacttacacttttgaaaattcagtaaatatgctgccttcaagtacagaggtttcagttaaaaccaaaaaaaggttaaactttgatgataaagttatgttaaagaaaatagaaatagataataaagtatcagatgaagaggataaaacatcggaaggacaagaaagaaaaccatcaggatcatctcagaatagaatacgagattcagaatatgaaattcaacgacaagctaaaaaaagtttttcaacattgtttttagaaacagtaaaacgaaaaagtgaatccagtcccattgttaggcatgcggcaactgctccacctcattcgtgtcctcccgatgatacgaagttgatagaggatgaatttataattgatgagtcggatcaaagttttgccagtagatcttggattacaataccaagaaaggcagggtctctgaaacaacgcacaatatccccggctgagagcactgcactccttcaaggtagaaagtcaagagaaaagcatcataatatattacctaagactttggcaaatgacaaacattcccataaacctcacccagtagagacatctcagccctctgataaaacagtactggatacaagttatgctttgataggtgaaacagtaaataattatagatctacaaaatatgaaatgtattccaagaatgcagaaaaaccatctagaagcaaaaggactataaaacaaaaacagagaagaaaattcatggctaaaccagctgaagaacagcttgatgtgggacagtctaaagatgaaaacatacatacatcacatattacccaagacgaatttcaaagaaattcagacagaaatatggaagagcatgaagagatgggaaatgattgtgtttccaaaaaacagatgccacctgtgggaagcaagaaaagtagcactagaaaagataaggaagaatctaaaaagaagcgcttttccagtgagtccaagaacaaacttgtacctgaagaagtgacttcaactgtcacgaaaagtcgaagaatttccaggcgtccatctgattggtgggtggtaaaatcagaggagagtcctgtttatagcaattcttcagtaagaaatgaattaccaatgcatcacaatagtagccgaaaatctactaagaaaacaaatcagtcatctaagaatattaggaaaaaaactattccacttaaaaggcagaagacagcaactaaaggcaaccaaagagtacagaagtttttaaatgctgaaggttctggaggtatcgttggtcatgatgaaatttccagatgttcgctgagtgagccattggaaagtgatgaggcagacttggctaagaagaaaaatcttgattgttctagatctacaagaagctcaaagaatgaagataacattatgactgcacagaatgttcccctaaagcctcagaccagtggatatacatgtaatataccaacagagtcaaacttggattctggagagcataagacttcagttttagaggaaagtggaccttccaggctcaataataattatttaatgtctggaaagaatgatgtggatgatgaggaagttcatggaagttcagatgactcaaaacaatctaaagtgataccaaagaacagaatccatcacaaactagtattgccctccaacacaccaaatgttcgcaggaccaagagaacacgtttgaaacctttggagtactggcgaggagagcgaatagattatcaaggaaggccatcaggaggattcgtgattagtggagtactatctccagacacaatatcgtctaaaaggaaggcaaaagaaaatattggaaaagtcaacaaaaaatctaataagaaaaggatctgtcttgataacgatgaaagaaagactaacttaatggtaaatctaggtatacctcttggagatcctttgcagccaacgagggtaaaggacccagaaacaagagagattattctcatggatcttgtaaggccacaagatacatatcaattttttgttaagcatggtgagttgaaggtatacaagacattggatacaccctttttttctactgggaaattgatattaggaccacaagaagaaaagggaaagcagcatgttggccaggatatattggttttttatgttaactttggtgaccttttgtgtactttacatgaaacaccttatatattaagtactggggattcgttctatgttccttcaggtaactattataacatcaaaaatctccggaatgaggaaagtgttcttctttttactcagataaaaagatgaaagatcaaccaaccttaaatatatgtatgtatatatgtatatgtgaaaaacagtttgtatagttggaatatttgtctttgtaattacttgtgatgttttaaaataaaaattttattcagttttctgtagacttgtatttgataaacatttctaactcacatgttttttctgatttttcagtgactgtacataatagcttgtagcgatgtccatatttatgatattatttttataatttgacaagaatatgaaaatgaaatatagaacatttctgtgtcaaaagagacctgattaatatgtctactcattaaaaaacatcttttccaaatactaattttaaatcatttattattaaataatccaatgggagagaactgtggtaaaaggcatgtttgtattaatttcctagaactgctgtaacaaaataccacaaaatgagtgacttaaagcaacagaaatttattatctcagttctagaggctagaagtctgaaatcaaggtgttgtcaaggccgtgatgtctttgaaaacctgtaagggagagaatccttccttattcctaacttctggtggtttactggcaatttctggcattccttggcttgcaccggtagcatttcaatctacttgcattatcacatggtattctcaccttgtgtgtctgtgttggcatgacatctatttagtatattacatgtaaatgtttttccattatgctttttggttcatattttctgttggaggcagtgtccttcgccattgctttctgtatgtggcctcaactttccctttttaatatcaat

SEQ ID NO: 5375 - DNA, 8612 bp, Homo sapiens
  source 1..8612: mol_type = unassigned DNA
taaatttaaaggcggggcggcctgtgagccctgaagtgccggccgcggagggtcctggccattttcctgggaccagttcagcctgataggatggcggaggaaggagccgtggccgtctgcgtgcgagtgcggccgctgaacagcagagaagaatcacttggagaaactgcccaagtttactggaaaactgacaataatgtcatttatcaagttgatggaagtaaatccttcaattttgatcgtgtctttcatggtaatgaaactaccaaaaatgtgtatgaagaaatagcagcaccaatcatcgattctgccatacaaggctacaatggtactatatttgcctatggacagactgcttcaggaaaaacatataccatgatgggttcagaagatcatttgggagttatacccagggcaattcatgacattttccaaaaaattaagaagtttcctgatagggaatttctcttacgtgtatcttacatggaaatatacaatgaaaccattacagatttactctgtggcactcaaaaaatgaaacctttaattattcgagaagatgtcaataggaatgtgtatgttgctgatctcacagaagaagttgtatatacatcagaaatggctttgaaatggattacaaagggagaaaagagcaggcattatggagaaacaaaaatgaatcaaagaagcagtcgttctcataccatctttaggatgattttggaaagcagagagaagggtgaaccttctaattgtgaaggatctgttaaggtatcccatttgaatttggttgatcttgcaggcagtgaaagagctgctcaaacaggcgctgcaggtgtgcggctcaaggaaggctgtaatataaatcgaagcttatttattttgggacaagtgatcaagaaacttagtgatggacaagttggtggtttcataaattatcgagatagcaagttaacacgaattctccagaattccttgggaggaaatgcaaagacacgtattatctgcacaattactccagtatcttttgatgaaacacttactgctctccagtttgccagtactgctaaatatatgaagaatactccttatgttaatgaggtatcaactgatgaagctctcctgaaaaggtatagaaaagaaataatggatcttaaaaaacaattagaggaggtttctttagagacgcgggctcaggcaatggaaaaagaccaattggcccaacttttggaagaaaaagatttgcttcagaaagtacagaatgagaaaattgaaaacttaacacggatgctggtgacctcttcttccctcacgttgcaacaggaattaaaggctaaaagaaaacgaagagttacttggtgccttggcaaaattaacaaaatgaagaactcaaactatgcagatcaatttaatataccaacaaatataacaacaaaaacacataagctttctataaatttattacgagaaattgatgaatctgtctgttcagagtctgatgttttcagtaacactcttgatacattaagtgagatagaatggaatccagcaacaaagctactaaatcaggagaatatagaaagtgagttgaactcacttcgtgctgactatgataatctggtattagactatgaacaactacgaacagaaaaagaagaaatggaattgaaattaaaagaaaagaatgatttggatgaatttgaggctctagaaagaaaaactaaaaaagatcaagagatgcaactaattcatgaaatttcgaacttaaagaatttagttaagcatgcagaagtatataatcaagatcttgagaatgaactcagttcaaaagtagagctgcttagagaaaaggaagaccagattaagaagctacaggaatacatagactctcaaaagctagaaaatataaaaatggacttgtcatactcattggaaagcattgaagacccaaaacaaatgaagcagactctgtttgatgctgaaactgtagcccttgatgccaagagagaatcagcctttcttagaagtgaaaatctggagctgaaggagaaaatgaaagaacttgcaactacatacaagcaaatggaaaatgatattcagttatatcaaagccagttggaggcaaaaaagaaaatgcaagttgatctggagaaagaattacaatctgcttttaatgagataacaaaactcacctcccttatagatggcaaagttccaaaagatttgctctgtaatttggaattggaaggaaagattactgatcttcagaaagaactaaataaagaagttgaagaaaatgaagctttgcgggaagaagtcattttgctttcagaattgaaatctttaccttctgaagtagaaaggctgaggaaagagatacaagacaaatctgaagagctccatataataacatcagaaaaagataaattgttttctgaagtagttcataaggagagtagagttcaaggtttacttgaagaaattgggaaaacaaaagatgacctagcaactacacagtcgaattataaaagcactgatcaagaattccaaaatttcaaaacccttcatatggactttgagcaaaagtataagatggtccttgaggagaatgagagaatgaatcaggaaatagttaatctctctaaagaagcccaaaaatttgattcgagtttgggtgctttgaagaccgagctttcttacaagacccaagaacttcaggagaaaacacgtgaggttcaagaaagactaaatgagatggaacagctgaaggaacaattagaaaatagagattctacgctgcaaactgtagaaagggagaaaacactgattactgagaaactgcagcaaactttagaagaagtaaaaactttaactcaagaaaaagatgatctaaaacaactccaagaaagcttgcaaattgagagggaccaactcaaaagtgatattcacgatactgttaacatgaatatagatactcaagaacaattacgaaatgctcttgagtctctgaaacaacatcaagaaacaattaatacactaaaatcgaaaatttctgaggaagtttccaggaatttgcatatggaggaaaatacaggagaaactaaagatgaatttcagcaaaagatggttggcatagataaaaaacaggatttggaagctaaaaatacccaaacactaactgcagatgttaaggataatgagataattgagcaacaaaggaagatattttctttaatacaggagaaaaatgaactccaacaaatgttagagagtgttatagcagaaaaggaacaattgaagactgacctaaaggaaaatattgaaatgaccattgaaaaccaggaagaattaagacttcttggggatgaacttaaaaagcaacaagagatagttgcacaagaaaagaaccatgccataaagaaagaaggagagctttctaggacctgtgacagactggcagaagttgaagaaaaactaaaggaaaagagccagcaactccaagaaaaacagcaacaacttcttaatgtacaagaagagatgagtgagatgcagaaaaagattaatgaaatagagaatttaaagaatgaattaaagaacaaagaattgacattggaacatatggaaacagagaggcttgagttggctcagaaacttaatgaaaattatgaggaagtgaaatctataaccaaagaaagaaaagttctaaaggaattacagaagtcatttgaaacagagagagaccaccttagaggatatataagagaaattgaagctacaggcctacaaaccaaagaagaactaaaaattgctcatattcacctaaaagaacaccaagaaactattgatgaactaagaagaagcgtatctgagaagacagctcaaataataaatactcaggacttagaaaaatcccataccaaattacaagaagagatcccagtgcttcatgaggaacaagagttactgcctaatgtgaaagaagtcagtgagactcaggaaacaatgaatgaactggagttattaacagaacagtccacaaccaaggactcaacaacactggcaagaatagaaatggaaaggctcaggttgaatgaaaaatttcaagaaagtcaggaagagataaaatctctaaccaaggaaagagacaaccttaaaacgataaaagaagcccttgaagttaaacatgaccagctgaaagaacatattagagaaactttggctaaaatccaggagtctcaaagcaaacaagaacagtccttaaatatgaaagaaaaagacaatgaaactaccaaaatcgtgagtgagatggagcaattcaaacccaaagattcagcactactaaggatagaaatagaaatgctcggattgtccaaaagacttcaagaaagtcatgatgaaatgaaatctgtagctaaggagaaagatgacctacagaggctgcaagaagttcttcaatctgaaagtgaccagctcaaagaaaacataaaagaaattgtagctaaacacctggaaactgaagaggaacttaaagttgctcattgttgcctgaaagaacaagaggaaactattaatgagttaagagtgaatctttcagagaaggaaactgaaatatcaaccattcaaaagcagttagaagcaatcaatgataaattacagaacaagatccaagagatttatgagaaagaggaacaatttaatataaaacaaattagtgaggttcaggaaaaagtgaatgaactgaaacaattcaaggagcatcgcaaagccaaggattcagcactacaaagtatagaaagtaagatgctcgagttgaccaacagacttcaagaaagtcaagaagaaatacaaattatgattaaggaaaaagaggaaatgaaaagagtacaggaggcccttcagatagagagagaccaactgaaagaaaacactaaagaaattgtagctaaaatgaaagaatctcaagaaaaagaatatcagtttcttaagatgacagctgtcaatgagactcaggagaaaatgtgtgaaatagaacacttgaaggagcaatttgagacccagaagttaaacctggaaaacatagaaacggagaatataaggttgactcagatactacatgaaaaccttgaagaaatgagatctgtaacaaaagaaagagatgaccttaggagtgtggaggagactctcaaagtagagagagaccagctcaaggaaaaccttagagaaactataactagagacctagaaaaacaagaggagctaaaaattgttcacatgcatctgaaggagcaccaagaaactattgataaactaagagggattgtttcagagaaaacaaatgaaatatcaaatatgcaaaaggacttagaacactcaaatgatgccttaaaagcacaggatctgaaaatacaagaggaactaagaattgctcacatgcatctgaaagagcagcaggaaactattgacaaactcagaggaattgtttctgagaagacagataaactatcaaatatgcaaaaagatttagaaaattcaaatgctaaattacaagaaaagattcaagaacttaaggcaaatgaacatcaacttattacgttaaaaaaagatgtcaatgagacacagaaaaaagtgtctgaaatggagcaactaaagaaacaaataaaagaccaaagcttaactctgagtaaattagaaatagagaatttaaatttggctcagaaacttcatgaaaaccttgaagaaatgaaatctgtaatgaaagaaagagataatctaagaagagtagaggagacactcaaactggagagagaccaactcaaggaaagcctgcaagaaaccaaagctagagatctggaaatacaacaggaactaaaaactgctcgtatgctatcaaaagaacacaaagaaactgttgataaacttagagaaaaaatttcagaaaagacaattcaaatttcagacattcaaaaggatttagataaatcaaaagatgaattacagaaaaagatccaagaacttcagaaaaaagaacttcaactgcttagagtgaaagaagatgtcaatatgagtcataaaaaaattaatgaaatggaacagttgaagaagcaatttgaggcccaaaacttatctatgcaaagtgtgagaatggataacttccagttgactaagaaacttcatgaaagccttgaagaaataagaattgtagctaaagaaagagatgagctaaggaggataaaagaatctctcaaaatggaaagggaccaattcatagcaaccttaagggaaatgatagctagagaccgacagaaccaccaagtaaaacctgaaaaaaggttactaagtgatggacaacagcaccttacggaaagcctgagagaaaagtgctctagaataaaagagcttttgaagagatactcagagatggatgatcattatgagtgcttgaatagattgtctcttgacttggagaaggaaattgaattccaaaaagagctttcaatgagagttaaagcaaacctctcacttccctatttacaaaccaaacacattgaaaaactttttactgcaaaccagagatgctccatggaattccacagaatcatgaagaaactgaagtatgtgttaagctatgttacaaaaataaaagaagaacaacatgaatccatcaataaatttgaaatggattttattgatgaagtggaaaagcaaaaggaattgctaattaaaatacagcaccttcaacaagattgtgatgtaccatccagagaattaagggatctcaaattgaaccagaatatggatctacatattgaggaaattctcaaagatttctcagaaagtgagttccctagcataaagactgaatttcaacaagtactaagtaataggaaagaaatgacacagtttttggaagagtggttaaatactcgttttgatatagaaaagcttaaaaatggcatccagaaagaaaatgataggatttgtcaagtgaataacttctttaataacagaataattgccataatgaatgaatcaacagagtttgaggaaagaagtgctaccatatccaaagagtgggaacaggacctgaaatcactgaaagagaaaaatgaaaaactatttaaaaactaccaaacattgaagacttccttggcatctggtgcccaggttaatcctaccacacaagacaataagaatcctcatgttacatcaagagctacacagttaaccacagagaaaattcgagagctggaaaattcactgcatgaagctaaagaaagtgctatgcataaggaaagcaagattataaagatgcagaaagaacttgaggtgactaatgacataatagcaaaacttcaagccaaagttcatgaatcaaataaatgccttgaaaaaacaaaagagacaattcaagtacttcaggacaaagttgctttaggagctaagccatataaagaagaaattgaagatctcaaaatgaagcttgtgaaaatagacctagagaaaatgaaaaatgccaaagaatttgaaaaggaaatcagtgctacaaaagccactgtagaatatcaaaaggaagttataaggctattgagagaaaatctcagaagaagtcaacaggcccaagatacctcagtgatatcagaacatactgatcctcagccttcaaataaacccttaacttgtggaggtggcagcggcattgtacaaaacacaaaagctcttattttgaaaagtgaacatataaggctagaaaaagaaatttctaagttaaagcagcaaaatgaacagctaataaaacaaaagaatgaattgttaagcaataatcagcatctttccaatgaggtcaaaacttggaaggaaagaacccttaaaagagaggctcacaaacaagtaacttgtgagaattctccaaagtctcctaaagtgactggaacagcttctaaaaagaaacaaattacaccctctcaatgcaaggaacggaatttacaagatcctgtgccaaaggaatcaccaaaatcttgtttttttgatagccgatcaaagtctttaccatcacctcatccagttcgctattttgataactcaagtttaggcctttgtccagaggtgcaaaatgcaggagcagagagtgtggattctcagccaggtccttggcacgcctcctcaggcaaggatgtgcctgagtgcaaaactcagtagactcctctttgtcacttctctggagatccagcattccttatttggaaatgactttgtttatgtgtctatccctggtaatgatgttgtagtgcagcttaatttcaattcagtctttactttgccactagagttgaaagataagggaacaggaaatgaatgcattgtggtaatttagaatggtgatagcaataccttcttcttgcatatggtaatacttttaaaagttgaattgttttatttatttgtatattttgtaaagaataaagttattgaaagaaatgtaaagttatctacatgacttagcatattccaaagcataatacatacattaatataaaacatcattttattaacaaaattgtaaatgtttttaataccttacacattcaataaatgtttagtagttctgaatcacc

SEQ ID NO: 5376 - DNA, 8241 bp, Homo sapiens
  source 1..8241: mol_type = unassigned DNA
aaatttaaaggcggggcggcctgtgagccctgaagtgccggccgcggagggtcctggccattttcctgggaccagttcagcctgataggatggcggaggaaggagccgtggccgtctgcgtgcgagtgcggccgctgaacagcagagaagaatcacttggagaaactgcccaagtttactggaaaactgacaataatgtcatttatcaagttgatggaagtaaatccttcaattttgatcgtgtctttcatggtaatgaaactaccaaaaatgtgtatgaagaaatagcagcaccaatcatcgattctgccatacaaggctacaatggtactatatttgcctatggacagactgcttcaggaaaaacatataccatgatgggttcagaagatcatttgggagttatacccagggcaattcatgacattttccaaaaaattaagaagtttcctgatagggaatttctcttacgtgtatcttacatggaaatatacaatgaaaccattacagatttactctgtggcactcaaaaaatgaaacctttaattattcgagaagatgtcaataggaatgtgtatgttgctgatctcacagaagaagttgtatatacatcagaaatggctttgaaatggattacaaagggagaaaagagcaggcattatggagaaacaaaaatgaatcaaagaagcagtcgttctcataccatctttaggatgattttggaaagcagagagaagggtgaaccttctaattgtgaaggatctgttaaggtatcccatttgaatttggttgatcttgcaggcagtgaaagagctgctcaaacaggcgctgcaggtgtgcggctcaaggaaggctgtaatataaatcgaagcttatttattttgggacaagtgatcaagaaacttagtgatggacaagttggtggtttcataaattatcgagatagcaagttaacacgaattctccagaattccttgggaggaaatgcaaagacacgtattatctgcacaattactccagtatcttttgatgaaacacttactgctctccagtttgccagtactgctaaatatatgaagaatactccttatgttaatgaggtatcaactgatgaagctctcctgaaaaggtatagaaaagaaataatggatcttaaaaaacaattagaggaggtttctttagagacgcgggctcaggcaatggaaaaagaccaattggcccaacttttggaagaaaaagatttgcttcagaaagtacagaatgagaaaattgaaaacttaacacggatgctggtgacctcttcttccctcacgttgcaacaggaattaaaggctaaaagaaaacgaagagttacttggtgccttggcaaaattaacaaaatgaagaactcaaactatgcagatcaatttaatataccaacaaatataacaacaaaaacacataagctttctataaatttattacgagaaattgatgaatctgtctgttcagagtctgatgttttcagtaacactcttgatacattaagtgagatagaatggaatccagcaacaaagctactaaatcaggagaatatagaaagtgagttgaactcacttcgtgctgactatgataatctggtattagactatgaacaactacgaacagaaaaagaagaaatggaattgaaattaaaagaaaagaatgatttggatgaatttgaggctctagaaagaaaaactaaaaaagatcaagagaatgaactcagttcaaaagtagagctgcttagagaaaaggaagaccagattaagaagctacaggaatacatagactctcaaaagctagaaaatataaaaatggacttgtcatactcattggaaagcattgaagacccaaaacaaatgaagcagactctgtttgatgctgaaactgtagcccttgatgccaagagagaatcagcctttcttagaagtgaaaatctggagctgaaggagaaaatgaaagaacttgcaactacatacaagcaaatggaaaatgatattcagttatatcaaagccagttggaggcaaaaaagaaaatgcaagttgatctggagaaagaattacaatctgcttttaatgagataacaaaactcacctcccttatagatggcaaagttccaaaagatttgctctgtaatttggaattggaaggaaagattactgatcttcagaaagaactaaataaagaagttgaagaaaatgaagctttgcgggaagaagtcattttgctttcagaattgaaatctttaccttctgaagtagaaaggctgaggaaagagatacaagacaaatctgaagagctccatataataacatcagaaaaagataaattgttttctgaagtagttcataaggagagtagagttcaaggtttacttgaagaaattgggaaaacaaaagatgacctagcaactacacagtcgaattataaaagcactgatcaagaattccaaaatttcaaaacccttcatatggactttgagcaaaagtataagatggtccttgaggagaatgagagaatgaatcaggaaatagttaatctctctaaagaagcccaaaaatttgattcgagtttgggtgctttgaagaccgagctttcttacaagacccaagaacttcaggagaaaacacgtgaggttcaagaaagactaaatgagatggaacagctgaaggaacaattagaaaatagagattctacgctgcaaactgtagaaagggagaaaacactgattactgagaaactgcagcaaactttagaagaagtaaaaactttaactcaagaaaaagatgatctaaaacaactccaagaaagcttgcaaattgagagggaccaactcaaaagtgatattcacgatactgttaacatgaatatagatactcaagaacaattacgaaatgctcttgagtctctgaaacaacatcaagaaacaattaatacactaaaatcgaaaatttctgaggaagtttccaggaatttgcatatggaggaaaatacaggagaaactaaagatgaatttcagcaaaagatggttggcatagataaaaaacaggatttggaagctaaaaatacccaaacactaactgcagatgttaaggataatgagataattgagcaacaaaggaagatattttctttaatacaggagaaaaatgaactccaacaaatgttagagagtgttatagcagaaaaggaacaattgaagactgacctaaaggaaaatattgaaatgaccattgaaaaccaggaagaattaagacttcttggggatgaacttaaaaagcaacaagagatagttgcacaagaaaagaaccatgccataaagaaagaaggagagctttctaggacctgtgacagactggcagaagttgaagaaaaactaaaggaaaagagccagcaactccaagaaaaacagcaacaacttcttaatgtacaagaagagatgagtgagatgcagaaaaagattaatgaaatagagaatttaaagaatgaattaaagaacaaagaattgacattggaacatatggaaacagagaggcttgagttggctcagaaacttaatgaaaattatgaggaagtgaaatctataaccaaagaaagaaaagttctaaaggaattacagaagtcatttgaaacagagagagaccaccttagaggatatataagagaaattgaagctacaggcctacaaaccaaagaagaactaaaaattgctcatattcacctaaaagaacaccaagaaactattgatgaactaagaagaagcgtatctgagaagacagctcaaataataaatactcaggacttagaaaaatcccataccaaattacaagaagagatcccagtgcttcatgaggaacaagagttactgcctaatgtgaaagaagtcagtgagactcaggaaacaatgaatgaactggagttattaacagaacagtccacaaccaaggactcaacaacactggcaagaatagaaatggaaaggctcaggttgaatgaaaaatttcaagaaagtcaggaagagataaaatctctaaccaaggaaagagacaaccttaaaacgataaaagaagcccttgaagttaaacatgaccagctgaaagaacatattagagaaactttggctaaaatccaggagtctcaaagcaaacaagaacagtccttaaatatgaaagaaaaagacaatgaaactaccaaaatcgtgagtgagatggagcaattcaaacccaaagattcagcactactaaggatagaaatagaaatgctcggattgtccaaaagacttcaagaaagtcatgatgaaatgaaatctgtagctaaggagaaagatgacctacagaggctgcaagaagttcttcaatctgaaagtgaccagctcaaagaaaacataaaagaaattgtagctaaacacctggaaactgaagaggaacttaaagttgctcattgttgcctgaaagaacaagaggaaactattaatgagttaagagtgaatctttcagagaaggaaactgaaatatcaaccattcaaaagcagttagaagcaatcaatgataaattacagaacaagatccaagagatttatgagaaagaggaacaatttaatataaaacaaattagtgaggttcaggaaaaagtgaatgaactgaaacaattcaaggagcatcgcaaagccaaggattcagcactacaaagtatagaaagtaagatgctcgagttgaccaacagacttcaagaaagtcaagaagaaatacaaattatgattaaggaaaaagaggaaatgaaaagagtacaggaggcccttcagatagagagagaccaactgaaagaaaacactaaagaaattgtagctaaaatgaaagaatctcaagaaaaagaatatcagtttcttaagatgacagctgtcaatgagactcaggagaaaatgtgtgaaatagaacacttgaaggagcaatttgagacccagaagttaaacctggaaaacatagaaacggagaatataaggttgactcagatactacatgaaaaccttgaagaaatgagatctgtaacaaaagaaagagatgaccttaggagtgtggaggagactctcaaagtagagagagaccagctcaaggaaaaccttagagaaactataactagagacctagaaaaacaagaggagctaaaaattgttcacatgcatctgaaggagcaccaagaaactattgataaactaagagggattgtttcagagaaaacaaatgaaatatcaaatatgcaaaaggacttagaacactcaaatgatgccttaaaagcacaggatctgaaaatacaagaggaactaagaattgctcacatgcatctgaaagagcagcaggaaactattgacaaactcagaggaattgtttctgagaagacagataaactatcaaatatgcaaaaagatttagaaaattcaaatgctaaattacaagaaaagattcaagaacttaaggcaaatgaacatcaacttattacgttaaaaaaagatgtcaatgagacacagaaaaaagtgtctgaaatggagcaactaaagaaacaaataaaagaccaaagcttaactctgagtaaattagaaatagagaatttaaatttggctcagaaacttcatgaaaaccttgaagaaatgaaatctgtaatgaaagaaagagataatctaagaagagtagaggagacactcaaactggagagagaccaactcaaggaaagcctgcaagaaaccaaagctagagatctggaaatacaacaggaactaaaaactgctcgtatgctatcaaaagaacacaaagaaactgttgataaacttagagaaaaaatttcagaaaagacaattcaaatttcagacattcaaaaggatttagataaatcaaaagatgaattacagaaaaagcaggaccgacagaaccaccaagtaaaacctgaaaaaaggttactaagtgatggacaacagcaccttacggaaagcctgagagaaaagtgctctagaataaaagagcttttgaagagatactcagagatggatgatcattatgagtgcttgaatagattgtctcttgacttggagaaggaaattgaattccaaaaagagctttcaatgagagttaaagcaaacctctcacttccctatttacaaaccaaacacattgaaaaactttttactgcaaaccagagatgctccatggaattccacagaatcatgaagaaactgaagtatgtgttaagctatgttacaaaaataaaagaagaacaacatgaatccatcaataaatttgaaatggattttattgatgaagtggaaaagcaaaaggaattgctaattaaaatacagcaccttcaacaagattgtgatgtaccatccagagaattaagggatctcaaattgaaccagaatatggatctacatattgaggaaattctcaaagatttctcagaaagtgagttccctagcataaagactgaatttcaacaagtactaagtaataggaaagaaatgacacagtttttggaagagtggttaaatactcgttttgatatagaaaagcttaaaaatggcatccagaaagaaaatgataggatttgtcaagtgaataacttctttaataacagaataattgccataatgaatgaatcaacagagtttgaggaaagaagtgctaccatatccaaagagtgggaacaggacctgaaatcactgaaagagaaaaatgaaaaactatttaaaaactaccaaacattgaagacttccttggcatctggtgcccaggttaatcctaccacacaagacaataagaatcctcatgttacatcaagagctacacagttaaccacagagaaaattcgagagctggaaaattcactgcatgaagctaaagaaagtgctatgcataaggaaagcaagattataaagatgcagaaagaacttgaggtgactaatgacataatagcaaaacttcaagccaaagttcatgaatcaaataaatgccttgaaaaaacaaaagagacaattcaagtacttcaggacaaagttgctttaggagctaagccatataaagaagaaattgaagatctcaaaatgaagcttgtgaaaatagacctagagaaaatgaaaaatgccaaagaatttgaaaaggaaatcagtgctacaaaagccactgtagaatatcaaaaggaagttataaggctattgagagaaaatctcagaagaagtcaacaggcccaagatacctcagtgatatcagaacatactgatcctcagccttcaaataaacccttaacttgtggaggtggcagcggcattgtacaaaacacaaaagctcttattttgaaaagtgaacatataaggctagaaaaagaaatttctaagttaaagcagcaaaatgaacagctaataaaacaaaagaatgaattgttaagcaataatcagcatctttccaatgaggtcaaaacttggaaggaaagaacccttaaaagagaggctcacaaacaagtaacttgtgagaattctccaaagtctcctaaagtgactggaacagcttctaaaaagaaacaaattacaccctctcaatgcaaggaacggaatttacaagatcctgtgccaaaggaatcaccaaaatcttgtttttttgatagccgatcaaagtctttaccatcacctcatccagttcgctattttgataactcaagtttaggcctttgtccagaggtgcaaaatgcaggagcagagagtgtggattctcagccaggtccttggcacgcctcctcaggcaaggatgtgcctgagtgcaaaactcagtagactcctctttgtcacttctctggagatccagcattccttatttggaaatgactttgtttatgtgtctatccctggtaatgatgttgtagtgcagcttaatttcaattcagtctttactttgccactagagttgaaagataagggaacaggaaatgaatgcattgtggtaatttagaatggtgatagcaataccttcttcttgcatatggtaatacttttaaaagttgaattgttttatttatttgtatattttgtaaagaataaagttattgaaagaaatgtaaagttatctacatgacttagcatattccaaagcataatacatacattaatataaaacatcattttattaacaaaattgtaaatgtttttaataccttacacattcaataaatgtttagtagttctg

SEQ ID NO: 5377 - DNA, 8504 bp, Homo sapiens
  source 1..8504: mol_type = unassigned DNA
taaatttaaaggcggggcggcctgtgagccctgaagtgccggccgcggagggtcctggccattttcctgggaccagttcagcctgataggatggcggaggaaggagccgtggccgtctgcgtgcgagtgcggccgctgaacagcagagaagaatcacttggagaaactgcccaagtttactggaaaactgacaataatgtcatttatcaagttgatggaagtaaatccttcaattttgatcgtgtctttcatggtaatgaaactaccaaaaatgtgtatgaagaaatagcagcaccaatcatcgattctgccatacaaggctacaatggtactatatttgcctatggacagactgcttcaggaaaaacatataccatgatgggttcagaagatcatttgggagttatacccagggcaattcatgacattttccaaaaaattaagaagtttcctgatagggaatttctcttacgtgtatcttacatggaaatatacaatgaaaccattacagatttactctgtggcactcaaaaaatgaaacctttaattattcgagaagatgtcaataggaatgtgtatgttgctgatctcacagaagaagttgtatatacatcagaaatggctttgaaatggattacaaagggagaaaagagcaggcattatggagaaacaaaaatgaatcaaagaagcagtcgttctcataccatctttaggatgattttggaaagcagagagaagggtgaaccttctaattgtgaaggatctgttaaggtatcccatttgaatttggttgatcttgcaggcagtgaaagagctgctcaaacaggcgctgcaggtgtgcggctcaaggaaggctgtaatataaatcgaagcttatttattttgggacaagtgatcaagaaacttagtgatggacaagttggtggtttcataaattatcgagatagcaagttaacacgaattctccagaattccttgggaggaaatgcaaagacacgtattatctgcacaattactccagtatcttttgatgaaacacttactgctctccagtttgccagtactgctaaatatatgaagaatactccttatgttaatgaggtatcaactgatgaagctctcctgaaaaggtatagaaaagaaataatggatcttaaaaaacaattagaggaggtttctttagagacgcgggctcaggcaatggaaaaagaccaattggcccaacttttggaagaaaaagatttgcttcagaaagtacagaatgagaaaattgaaaacttaacacggatgctggtgacctcttcttccctcacgttgcaacaggaattaaaggctaaaagaaaacgaagagttacttggtgccttggcaaaattaacaaaatgaagaactcaaactatgcagatcaatttaatataccaacaaatataacaacaaaaacacataagctttctataaatttattacgagaaattgatgaatctgtctgttcagagtctgatgttttcagtaacactcttgatacattaagtgagatagaatggaatccagcaacaaagctactaaatcaggagaatatagaaagtgagttgaactcacttcgtgctgactatgataatctggtattagactatgaacaactacgaacagaaaaagaagaaatggaattgaaattaaaagaaaagaatgatttggatgaatttgaggctctagaaagaaaaactaaaaaagatcaagagatgcaactaattcatgaaatttcgaacttaaagaatttagttaagcatgcagaagtatataatcaagatcttgagaatgaactcagttcaaaagtagagctgcttagagaaaaggaagaccagattaagaagctacaggaatacatagactctcaaaagctagaaaatataaaaatggacttgtcatactcattggaaagcattgaagacccaaaacaaatgaagcagactctgtttgatgctgaaactgtagcccttgatgccaagagagaatcagcctttcttagaagtgaaaatctggagctgaaggagaaaatgaaagaacttgcaactacatacaagcaaatggaaaatgatattcagttatatcaaagccagttggaggcaaaaaagaaaatgcaagttgatctggagaaagaattacaatctgcttttaatgagataacaaaactcacctcccttatagatggcaaagttccaaaagatttgctctgtaatttggaattggaaggaaagattactgatcttcagaaagaactaaataaagaagttgaagaaaatgaagctttgcgggaagaagtcattttgctttcagaattgaaatctttaccttctgaagtagaaaggctgaggaaagagatacaagacaaatctgaagagctccatataataacatcagaaaaagataaattgttttctgaagtagttcataaggagagtagagttcaaggtttacttgaagaaattgggaaaacaaaagatgacctagcaactacacagtcgaattataaaagcactgatcaagaattccaaaatttcaaaacccttcatatggactttgagcaaaagtataagatggtccttgaggagaatgagagaatgaatcaggaaatagttaatctctctaaagaagcccaaaaatttgattcgagtttgggtgctttgaagaccgagctttcttacaagacccaagaacttcaggagaaaacacgtgaggttcaagaaagactaaatgagatggaacagctgaaggaacaattagaaaatagagattctacgctgcaaactgtagaaagggagaaaacactgattactgagaaactgcagcaaactttagaagaagtaaaaactttaactcaagaaaaagatgatctaaaacaactccaagaaagcttgcaaattgagagggaccaactcaaaagtgatattcacgatactgttaacatgaatatagatactcaagaacaattacgaaatgctcttgagtctctgaaacaacatcaagaaacaattaatacactaaaatcgaaaatttctgaggaagtttccaggaatttgcatatggaggaaaatacaggagaaactaaagatgaatttcagcaaaagatggttggcatagataaaaaacaggatttggaagctaaaaatacccaaacactaactgcagatgttaaggataatgagataattgagcaacaaaggaagatattttctttaatacaggagaaaaatgaactccaacaaatgttagagagtgttatagcagaaaaggaacaattgaagactgacctaaaggaaaatattgaaatgaccattgaaaaccaggaagaattaagacttcttggggatgaacttaaaaagcaacaagagatagttgcacaagaaaagaaccatgccataaagaaagaaggagagctttctaggacctgtgacagactggcagaagttgaagaaaaactaaaggaaaagagccagcaactccaagaaaaacagcaacaacttcttaatgtacaagaagagatgagtgagatgcagaaaaagattaatgaaatagagaatttaaagaatgaattaaagaacaaagaattgacattggaacatatggaaacagagaggcttgagttggctcagaaacttaatgaaaattatgaggaagtgaaatctataaccaaagaaagaaaagttctaaaggaattacagaagtcatttgaaacagagagagaccaccttagaggatatataagagaaattgaagctacaggcctacaaaccaaagaagaactaaaaattgctcatattcacctaaaagaacaccaagaaactattgatgaactaagaagaagcgtatctgagaagacagctcaaataataaatactcaggacttagaaaaatcccataccaaattacaagaagagatcccagtgcttcatgaggaacaagagttactgcctaatgtgaaagaagtcagtgagactcaggaaacaatgaatgaactggagttattaacagaacagtccacaaccaaggactcaacaacactggcaagaatagaaatggaaaggctcaggttgaatgaaaaatttcaagaaagtcaggaagagataaaatctctaaccaaggaaagagacaaccttaaaacgataaaagaagcccttgaagttaaacatgaccagctgaaagaacatattagagaaactttggctaaaatccaggagtctcaaagcaaacaagaacagtccttaaatatgaaagaaaaagacaatgaaactaccaaaatcgtgagtgagatggagcaattcaaacccaaagattcagcactactaaggatagaaatagaaatgctcggattgtccaaaagacttcaagaaagtcatgatgaaatgaaatctgtagctaaggagaaagatgacctacagaggctgcaagaagttcttcaatctgaaagtgaccagctcaaagaaaacataaaagaaattgtagctaaacacctggaaactgaagaggaacttaaagttgctcattgttgcctgaaagaacaagaggaaactattaatgagttaagagtgaatctttcagagaaggaaactgaaatatcaaccattcaaaagcagttagaagcaatcaatgataaattacagaacaagatccaagagatttatgagaaagaggaacaatttaatataaaacaaattagtgaggttcaggaaaaagtgaatgaactgaaacaattcaaggagcatcgcaaagccaaggattcagcactacaaagtatagaaagtaagatgctcgagttgaccaacagacttcaagaaagtcaagaagaaatacaaattatgattaaggaaaaagaggaaatgaaaagagtacaggaggcccttcagatagagagagaccaactgaaagaaaacactaaagaaattgtagctaaaatgaaagaatctcaagaaaaagaatatcagtttcttaagatgacagctgtcaatgagactcaggagaaaatgtgtgaaatagaacacttgaaggagcaatttgagacccagaagttaaacctggaaaacatagaaacggagaatataaggttgactcagatactacatgaaaaccttgaagaaatgagatctgtaacaaaagaaagagatgaccttaggagtgtggaggagactctcaaagtagagagagaccagctcaaggaaaaccttagagaaactataactagagacctagaaaaacaagaggagctaaaaattgttcacatgcatctgaaggagcaccaagaaactattgataaactaagagggattgtttcagagaaaacaaatgaaatatcaaatatgcaaaaggacttagaacactcaaatgatgccttaaaagcacaggatctgaaaatacaagaggaactaagaattgctcacatgcatctgaaagagcagcaggaaactattgacaaactcagaggaattgtttctgagaagacagataaactatcaaatatgcaaaaagatttagaaaattcaaatgctaaattacaagaaaagattcaagaacttaaggcaaatgaacatcaacttattacgttaaaaaaagatgtcaatgagacacagaaaaaagtgtctgaaatggagcaactaaagaaacaaataaaagaccaaagcttaactctgagtaaattagaaatagagaatttaaatttggctcagaaacttcatgaaaaccttgaagaaatgaaatctgtaatgaaagaaagagataatctaagaagagtagaggagacactcaaactggagagagaccaactcaaggaaagcctgcaagaaaccaaagctagagatctggaaatacaacaggaactaaaaactgctcgtatgctatcaaaagaacacaaagaaactgttgataaacttagagaaaaaatttcagaaaagacaattcaaatttcagacattcaaaaggatttagataaatcaaaagatgaattacagaaaaagatccaagaacttcagaaaaaagaacttcaactgcttagagtgaaagaagatgtcaatatgagtcataaaaaaattaatgaaatggaacagttgaagaagcaatttgaggcccaaaacttatctatgcaaagtgtgagaatggataacttccagttgactaagaaacttcatgaaagccttgaagaaataagaattgtagctaaagaaagagatgagctaaggaggataaaagaatctctcaaaatggaaagggaccaattcatagcaaccttaagggaaatgatagctagagaccgacagaaccaccaagtaaaacctgaaaaaaggttactaagtgatggacaacagcaccttacggaaagcctgagagaaaagtgctctagaataaaagagcttttgaagagatactcagagatggatgatcattatgagtgcttgaatagattgtctcttgacttggagaaggaaattgaattccacagaatcatgaagaaactgaagtatgtgttaagctatgttacaaaaataaaagaagaacaacatgaatccatcaataaatttgaaatggattttattgatgaagtggaaaagcaaaaggaattgctaattaaaatacagcaccttcaacaagattgtgatgtaccatccagagaattaagggatctcaaattgaaccagaatatggatctacatattgaggaaattctcaaagatttctcagaaagtgagttccctagcataaagactgaatttcaacaagtactaagtaataggaaagaaatgacacagtttttggaagagtggttaaatactcgttttgatatagaaaagcttaaaaatggcatccagaaagaaaatgataggatttgtcaagtgaataacttctttaataacagaataattgccataatgaatgaatcaacagagtttgaggaaagaagtgctaccatatccaaagagtgggaacaggacctgaaatcactgaaagagaaaaatgaaaaactatttaaaaactaccaaacattgaagacttccttggcatctggtgcccaggttaatcctaccacacaagacaataagaatcctcatgttacatcaagagctacacagttaaccacagagaaaattcgagagctggaaaattcactgcatgaagctaaagaaagtgctatgcataaggaaagcaagattataaagatgcagaaagaacttgaggtgactaatgacataatagcaaaacttcaagccaaagttcatgaatcaaataaatgccttgaaaaaacaaaagagacaattcaagtacttcaggacaaagttgctttaggagctaagccatataaagaagaaattgaagatctcaaaatgaagcttgtgaaaatagacctagagaaaatgaaaaatgccaaagaatttgaaaaggaaatcagtgctacaaaagccactgtagaatatcaaaaggaagttataaggctattgagagaaaatctcagaagaagtcaacaggcccaagatacctcagtgatatcagaacatactgatcctcagccttcaaataaacccttaacttgtggaggtggcagcggcattgtacaaaacacaaaagctcttattttgaaaagtgaacatataaggctagaaaaagaaatttctaagttaaagcagcaaaatgaacagctaataaaacaaaagaatgaattgttaagcaataatcagcatctttccaatgaggtcaaaacttggaaggaaagaacccttaaaagagaggctcacaaacaagtaacttgtgagaattctccaaagtctcctaaagtgactggaacagcttctaaaaagaaacaaattacaccctctcaatgcaaggaacggaatttacaagatcctgtgccaaaggaatcaccaaaatcttgtttttttgatagccgatcaaagtctttaccatcacctcatccagttcgctattttgataactcaagtttaggcctttgtccagaggtgcaaaatgcaggagcagagagtgtggattctcagccaggtccttggcacgcctcctcaggcaaggatgtgcctgagtgcaaaactcagtagactcctctttgtcacttctctggagatccagcattccttatttggaaatgactttgtttatgtgtctatccctggtaatgatgttgtagtgcagcttaatttcaattcagtctttactttgccactagagttgaaagataagggaacaggaaatgaatgcattgtggtaatttagaatggtgatagcaataccttcttcttgcatatggtaatacttttaaaagttgaattgttttatttatttgtatattttgtaaagaataaagttattgaaagaaatgtaaagttatctacatgacttagcatattccaaagcataatacatacattaatataaaacatcattttattaacaaaattgtaaatgtttttaataccttacacattcaataaatgtttagtagttctgaatcacc

SEQ ID NO: 5378 - DNA, 10307 bp, Homo sapiens
  source 1..10307: mol_type = unassigned DNA
agaagcgggcgaattgggcaccggtggcggctgcgggcagtttgaattagactctgggctccagcccgccgaagccgcgccagaactgtactctccgagaggtcgttttcccgtccccgagagcaagtttatttacaaatgttggagtaataaagaaggcagaacaaaatgagctgggctttggaagaatggaaagaagggctgcctacaagagctcttcagaaaattcaagagcttgaaggacagcttgacaaactgaagaaggaaaagcagcaaaggcagtttcagcttgacagtctcgaggctgcgctgcagaagcaaaaacagaaggttgaaaatgaaaaaaccgagggtacaaacctgaaaagggagaatcaaagattgatggaaatatgtgaaagtctggagaaaactaagcagaagatttctcatgaacttcaagtcaaggagtcacaagtgaatttccaggaaggacaactgaattcaggcaaaaaacaaatagaaaaactggaacaggaacttaaaaggtgtaaatctgagcttgaaagaagccaacaagctgcgcagtctgcagatgtctctctgaatccatgcaatacaccacaaaaaatttttacaactccactaacaccaagtcaatattatagtggttccaagtatgaagatctaaaagaaaaatataataaagaggttgaagaacgaaaaagattagaggcagaggttaaagccttgcaggctaaaaaagcaagccagactcttccacaagccaccatgaatcaccgcgacattgcccggcatcaggcttcatcatctgtgttctcatggcagcaagagaagaccccaagtcatctttcatctaattctcaaagaactccaattaggagagatttctctgcatcttacttttctggggaacaagaggtgactccaagtcgatcaactttgcaaatagggaaaagagatgctaatagcagtttctttgacaattctagcagtcctcatcttttggatcaattaaaagcgcagaatcaagagctaagaaacaagattaatgagttggaactacgcctgcaaggacatgaaaaagaaatgaaaggccaagtgaataagtttcaagaactccaactccaactggagaaagcaaaagtggaattaattgaaaaagagaaagttttgaacaaatgtagggatgaactagtgagaacaacagcacaatacgaccaggcgtcaaccaagtatactgcattggaacaaaaactgaaaaaattgacggaagatttgagttgtcagcgacaaaatgcagaaagtgccagatgttctctggaacagaaaattaaggaaaaagaaaaggagtttcaagaggagctctcccgtcaacagcgttctttccaaacactggaccaggagtgcatccagatgaaggccagactcacccaggagttacagcaagccaagaatatgcacaacgtcctgcaggctgaactggataaactcacatcagtaaagcaacagctagaaaacaatttggaagagtttaagcaaaagttgtgcagagctgaacaggcgttccaggcgagtcagatcaaggagaatgagctgaggagaagcatggaggaaatgaagaaggaaaacaacctccttaagagtcactctgagcaaaaggccagagaagtctgccacctggaggcagaactcaagaacatcaaacagtgtttaaatcagagccagaattttgcagaagaaatgaaagcgaagaatacctctcaggaaaccatgttaagagatcttcaagaaaaaataaatcagcaagaaaactccttgactttagaaaaactgaagcttgctgtggctgatctggaaaagcagcgagattgttctcaagaccttttgaagaaaagagaacatcacattgaacaacttaatgataagttaagcaagacagagaaagagtccaaagccttgctgagtgctttagagttaaaaaagaaagaatatgaagaattgaaagaagagaaaactctgttttcttgttggaaaagtgaaaacgaaaaacttttaactcagatggaatcagaaaaggaaaacttgcagagtaaaattaatcacttggaaacttgtctgaagacacagcaaataaaaagtcatgaatacaacgagagagtaagaacgctggagatggacagagaaaacctaagtgtcgagatcagaaaccttcacaacgtgttagacagtaagtcagtggaggtagagacccagaaactagcttatatggagctacagcagaaagctgagttctcagatcagaaacatcagaaggaaatagaaaatatgtgtttgaagacttctcagcttactgggcaagttgaagatctagaacacaagcttcagttactgtcaaatgaaataatggacaaagaccggtgttaccaagacttgcatgccgaatatgagagcctcagggatctgctaaaatccaaagatgcttctctggtgacaaatgaagatcatcagagaagtcttttggcttttgatcagcagcctgccatgcatcattcctttgcaaatataattggagaacaaggaagcatgccttcagagaggagtgaatgtcgtttagaagcagaccaaagtccgaaaaattctgccatcctacaaaatagagttgattcacttgaattttcattagagtctcaaaaacagatgaactcagacctgcaaaagcagtgtgaagagttggtgcaaatcaaaggagaaatagaagaaaatctcatgaaagcagaacagatgcatcaaagttttgtggctgaaacaagtcagcgcattagtaagttacaggaagacacttctgctcaccagaatgttgttgctgaaaccttaagtgcccttgagaacaaggaaaaagagctgcaacttttaaatgataaggtagaaactgagcaggcagagattcaagaattaaaaaagagcaaccatctacttgaagactctctaaaggagctacaacttttatccgaaaccctaagcttggagaagaaagaaatgagttccatcatttctctaaataaaagggaaattgaagagctgacccaagagaatgggactcttaaggaaattaatgcatccttaaatcaagagaagatgaacttaatccagaaaagtgagagttttgcaaactatatagatgaaagggagaaaagcatttcagagttatctgatcagtacaagcaagaaaaacttattttactacaaagatgtgaagaaaccggaaatgcatatgaggatcttagtcaaaaatacaaagcagcacaggaaaagaattctaaattagaatgcttgctaaatgaatgcactagtctttgtgaaaataggaaaaatgagttggaacagctaaaggaagcatttgcaaaggaacaccaagaattcttaacaaaattagcatttgctgaagaaagaaatcagaatctgatgctagagttggagacagtgcagcaagctctgagatctgagatgacagataaccaaaacaattctaagagcgaggctggtggtttaaagcaagaaatcatgactttaaaggaagaacaaaacaaaatgcaaaaggaagttaatgacttattacaagagaatgaacagctgatgaaggtaatgaagactaaacatgaatgtcaaaatctagaatcagaaccaattaggaactctgtgaaagaaagagagagtgagagaaatcaatgtaattttaaacctcagatggatcttgaagttaaagaaatttctctagatagttataatgcgcagttggtgcaattagaagctatgctaagaaataaggaattaaaacttcaggaaagtgagaaggagaaggagtgcctgcagcatgaattacagacaattagaggagatcttgaaaccagcaatttgcaagacatgcagtcacaagaaattagtggccttaaagactgtgaaatagatgcggaagaaaagtatatttcagggcctcatgagttgtcaacaagtcaaaacgacaatgcacaccttcagtgctctctgcaaacaacaatgaacaagctgaatgagctagagaaaatatgtgaaatactgcaggctgaaaagtatgaactcgtaactgagctgaatgattcaaggtcagaatgtatcacagcaactaggaaaatggcagaagaggtagggaaactactaaatgaagttaaaatattaaatgatgacagtggtcttctccatggtgagttagtggaagacataccaggaggtgaatttggtgaacaaccaaatgaacagcaccctgtgtctttggctccattggacgagagtaattcctacgagcacttgacattgtcagacaaagaagttcaaatgcactttgccgaattgcaagagaaattcttatctttacaaagtgaacacaaaattttacatgatcagcactgtcagatgagctctaaaatgtcagagctgcagacctatgttgactcattaaaggccgaaaatttggtcttgtcaacgaatctgagaaactttcaaggtgacttggtgaaggagatgcagctgggcttggaggaggggctcgttccatccctgtcatcctcttgtgtgcctgacagctctagtcttagcagtttgggagactcctccttttacagagctcttttagaacagacaggagatatgtctcttttgagtaatttagaaggggctgtttcagcaaaccagtgcagtgtagatgaagtattttgcagcagtctgcaggaggagaatctgaccaggaaagaaaccccttcggccccagcgaagggtgttgaagagcttgagtccctctgtgaggtgtaccggcagtccctcgagaagctagaagagaaaatggaaagtcaagggattatgaaaaataaggaaattcaagagctcgagcagttattaagttctgaaaggcaagagcttgactgccttaggaagcagtatttgtcagaaaatgaacagtggcaacagaagctgacaagcgtgactctggagatggagtccaagttggcggcagaaaagaaacagacggaacaactgtcacttgagctggaagtagcacgactccagctacaaggtctggacttaagttctcggtctttgcttggcatcgacacagaagatgctattcaaggccgaaatgagagctgtgacatatcaaaagaacatacttcagaaactacagaaagaacaccaaagcatgatgttcatcagatttgtgataaagatgctcagcaggacctcaatctagacattgagaaaataactgagactggtgcagtgaaacccacaggagagtgctctggggaacagtccccagataccaattatgagcctccaggggaagataaaacccagggctcttcagaatgcatttctgaattgtcattttctggtcctaatgctttggtacctatggatttcctggggaatcaggaagatatccataatcttcaactgcgggtaaaagagacatcaaatgagaatttgagattacttcatgtgatagaggaccgtgacagaaaagttgaaagtttgctaaatgaaatgaaagaattagactcaaaactccatttacaggaggtacaactaatgaccaaaattgaagcatgcatagaattggaaaaaatagttggggaacttaagaaagaaaactcagatttaagtgaaaaattggaatatttttcttgtgatcaccaggagttactccagagagtagaaacttctgaaggcctcaattctgatttagaaatgcatgcagataaatcatcacgtgaagatattggagataatgtggccaaggtgaatgacagctggaaggagagatttcttgatgtggaaaatgagctgagtaggatcagatcggagaaagctagcattgagcatgaagccctctacctggaggctgacttagaggtagttcaaacagagaagctatgtttagaaaaagacaatgaaaataagcagaaggttattgtctgccttgaagaagaactctcagtggtcacaagtgagagaaaccagcttcgtggagaattagatactatgtcaaaaaaaaccacggcactggatcagttgtctgaaaaaatgaaggagaaaacacaagagcttgagtctcatcaaagtgagtgtctccattgcattcaggtggcagaggcagaggtgaaggaaaagacggaactccttcagactttgtcctctgatgtgagtgagctgttaaaagacaaaactcatctccaggaaaagctgcagagtttggaaaaggactcacaggcactgtctttgacaaaatgtgagctggaaaaccaaattgcacaactgaataaagagaaagaattgcttgtcaaggaatctgaaagcctgcaggccagactgagtgaatcagattatgaaaagctgaatgtctccaaggccttggaggccgcactggtggagaaaggtgagttcgcattgaggctgagctcaacacaggaggaagtgcatcagctgagaagaggcatcgagaaactgagagttcgcattgaggccgatgaaaagaagcagctgcacatcgcagagaaactgaaagaacgcgagcgggagaatgattcacttaaggataaagttgagaaccttgaaagggaattgcagatgtcagaagaaaaccaggagctagtgattcttgatgccgagaattccaaagcagaagtagagactctaaaaacacaaatagaagagatggccagaagcctgaaagtttttgaattagaccttgtcacgttaaggtctgaaaaagaaaatctgacaaaacaaatacaagaaaaacaaggtcagttgtcagaactagacaagttactctcttcatttaaaagtctgttagaagaaaaggagcaagcagagatacagatcaaagaagaatctaaaactgcagtggagatgcttcagaatcagttaaaggagctaaatgaggcagtagcagccttgtgtggtgaccaagaaattatgaaggccacagaacagagtctagacccaccaatagaggaagagcatcagctgagaaatagcattgaaaagctgagagcccgcctagaagctgatgaaaagaagcagctctgtgtcttacaacaactgaaggaaagtgagcatcatgcagatttacttaagggtagagtggagaaccttgaaagagagctagagatagccaggacaaaccaagagcatgcagctcttgaggcagagaattccaaaggagaggtagagaccctaaaagcaaaaatagaagggatgacccaaagtctgagaggtctggaattagatgttgttactataaggtcagaaaaagaaaatctgacaaatgaattacaaaaagagcaagagcgaatatctgaattagaaataataaattcatcatttgaaaatattttgcaagaaaaagagcaagagaaagtacagatgaaagaaaaatcaagcactgccatggagatgcttcaaacacaattaaaagagctcaatgagagagtggcagccctgcataatgaccaagaagcctgtaaggccaaagagcagaatcttagtagtcaagtagagtgtcttgaacttgagaaggctcagttgctacaaggccttgatgaggccaaaaataattatattgttttgcaatcttcagtgaatggcctcattcaagaagtagaagatggcaagcagaaactggagaagaaggatgaagaaatcagtagactgaaaaatcaaattcaagaccaagagcagcttgtctctaaactgtcccaggtggaaggagagcaccaactttggaaggagcaaaacttagaactgagaaatctgacagtggaattggagcagaagatccaagtgctacaatccaaaaatgcctctttgcaggacacattagaagtgctgcagagttcttacaagaatctagagaatgagcttgaattgacaaaaatggacaaaatgtcctttgttgaaaaagtaaacaaaatgactgcaaaggaaactgagctgcagagggaaatgcatgagatggcacagaaaacagcagagctgcaagaagaactcagtggagagaaaaataggctagctggagagttgcagttactgttggaagaaataaagagcagcaaagatcaattgaaggagctcacactagaaaatagtgaattgaagaagagcctagattgcatgcacaaagaccaggtggaaaaggaagggaaagtgagagaggaaatagctgaatatcagctacggcttcatgaagctgaaaagaaacaccaggctttgcttttggacacaaacaaacagtatgaagtagaaatccagacataccgagagaaattgacttctaaagaagaatgtctcagttcacagaagctggagatagaccttttaaagtctagtaaagaagagctcaataattcattgaaagctactactcagattttggaagaattgaagaaaaccaagatggacaatctaaaatatgtaaatcagttgaagaaggaaaatgaacgtgcccaggggaaaatgaagttgttgatcaaatcctgtaaacagctggaagaggaaaaggagatactgcagaaagaactctctcaacttcaagctgcacaggagaagcagaaaacaggtactgttatggataccaaggtcgatgaattaacaactgagatcaaagaactgaaagaaactcttgaagaaaaaaccaaggaggcagatgaatacttggataagtactgttccttgcttataagccatgaaaagttagagaaagctaaagagatgttagagacacaagtggcccatctgtgttcacagcaatctaaacaagattcccgagggtctcctttgctaggtccagttgttccaggaccatctccaatcccttctgttactgaaaagaggttatcatctggccaaaataaagcttcaggcaagaggcaaagatccagtggaatatgggagaatggtagaggaccaacacctgctaccccagagagcttttctaaaaaaagcaagaaagcagtcatgagtggtattcaccctgcagaagacacggaaggtactgagtttgagccagagggacttccagaagttgtaaagaaagggtttgctgacatcccgacaggaaagactagcccatatatcctgcgaagaacaaccatggcaactcggaccagcccccgcctggctgcacagaagttagcgctatccccactgagtctcggcaaagaaaatcttgcagagtcctccaaaccaacagctggtggcagcagatcacaaaaggtcaaagttgctcagcggagcccagtagattcaggcaccatcctccgagaacccaccacgaaatccgtcccagtcaataatcttcctgagagaagtccgactgacagccccagagagggcctgagggtcaagcgaggccgacttgtccccagccccaaagctggactggagtccaacggcagtgagaactgtaaggtccagtgaaggcactttgtgtgtcagtacccctgggaggtgccagtcattgaatagataaggctgtgcctacaggacttctctttagtcagggcatgctttattagtgaggagaaaacaattccttagaagtcttaaatatattgtactctttagatctcccatgtgtaggtattgaaaaagtttggaagcactgatcacctgttagcattgccattcctctactgcaatgtaaatagtataaagctatgtatataaagctttttggtaatatgttacaattaaaatgacaagcactatatcacaatctctgtttgtatgtgggttttacactaaaaaaatgcaaaacacattttattcttctaattaacagctcctaggaaaatgtagacttttgctttatgatattctatctgtagtatgaggcatggaatagttttgtatcgggaatttctcagagctgagtaaaatgaaggaaaagcatgttatgtgtttttaaggaaaatgtgcacacatatacatgtaggagtgtttatctttctcttacaatctgttttagacatctttgcttatgaaacctgtacatatgtgtgtgtgggtatgtgtttatttccagtgagggctgcaggcttcctagaggtgtgctataccatgcgtctgtcgttgtgcttttttctgtttttagaccaattttttacagttctttggtaagcattgtcgtatctggtgatggattaacatatagcctttgttttctaataaaatagtcgccttcgttttctgtaagaatgattcctaagtgt

SEQ ID NO: 5379 - DNA, 525 bp, Homo sapiens
  source 1..525: mol_type = unassigned DNA
ttgatgattaaaggaagaaaaggtaaggtaaacaaaatgactgcaaaggaaactgagctgcagagggaaatgcatgagatggcacagaaaacagcagagctgcaagaagaactcagtggagagaaaaataggctagctggagagttgcagttactgttggaagaaataaagagcagcaaagatcaattgaaggagctcacactagaaaatagtgaattgaagaagagcctagattgcatgcacaaagaccaggtggaaaaggaagggaaagtgagagaggaaatagctgaatatcagctacggcttcatgaagctgaaaagaaacaccaggctttgcttttggacacaaacaaacagtatgaagtagaaatccagacataccgagagaaattgacttctaaagaagaatgtctcagttcacagaagctggagatagaccttttaaagtctagtaaagaagagctcaataattcattgaaagctactactcagattttggaagaattgaagaaaaccaaggaaaat

SEQ ID NO: 5380 - DNA, 4347 bp, Homo sapiens
  source 1..4347: mol_type = unassigned DNA
aggacctcgggacgggggcggggctccgacagaggcggcgattgtggcggcccatttgtaaatgctgcggagattgaggtgtcggttcgtgctgctgagctgcccaggcttcacggagcggtgttggaaatcaatagctcttctagcctttgcattgtttaaatataatagtgtcattggactaagatgttcctgatgccaacctcttcagagttaaacagtgggcagaacttcctaacccagtggatgaccaatccttctcgggctggggtcatattaaatcgtggatttcctattttggaagcagacaaagagaagcgagcagctgtggacatttctaccagctttcctattaaaggcacacatttttctgatagcttcagctttataaatgaagaagattcacttcttgaagaacagaagttggagtcaaacaacccttacaaaccacagtcagataaatctgaaacccatacagcctttccttgcattaaaaagggaccacaggtagcggcatgtcacagtgctcctggacaccaggaagaaaacaaaaatgacttcatcccagatcttgcgagtgaattcaaagaaggggcttataaagacccactttttaaaaaacttgaacagctgaaagaagtacaacagaagaagcaggaacaattgaagaggcaacagttggagcaactacagagactcatggaagaacaagagaagctgctcaccatggtgtctgggcagtgcacacttccaggtttgagtttactgcctgatgatcagagccagaagcacaggtctccaggaaataccaccactggagagagagccacatgctgcttcccatcatatgtctacccggacccaacccaggaagaaacatacccgtccaacattttatcccatgagcaaagcaacttctgtagaactgctcatggagattttgtcttaacttcaaaacgtgcgtctcctaatttattttctgaggcacagtatcaagaagcacctgtggaaaaaaataatttaaaagaagaaaaccgtaaccatcctacaggagaaagtatcttatgttgggagaaagtgacagaacagattcaggaagcaaatgataagaacttacaaaaacatgatgattcctcagaagtggctaatattgaagaaaggcccattaaagctgctattggagaaaggaaacagacctttgaagattacttagaagaacaaattcagttggaagagcaagaactgaagcaaaaacagctgaaggaagcagaaggaccattgccaatcaaagcaaaaccaaaacaaccatttttaaaacgaggagaaggtttagctagatttactaatgccaaatctaagtttcaaaaaggcaaagaaagtaaactagtgactaaccagagcacttccgaggaccagccgctgtttaaaatggatagacagcaactccagcggaaaaccgctcttaaaaataaagagctgtgtgcagacaaccctatccttaaaaaggacagtaaagctagaaccaagagtggttctgtcaccctcagtcagaagccgaaaatgctgaagtgtagtaacaggaaaagtctttctccgtcaggattgaaaatacagacggggaagaaatgtgatgggcagtttagagaccagatcaaatttgaaaacaaagtcacatctaataataaagaaaatgtaactgagtgtccaaaaccttgcgatactggctgcacagggtggaataagacacaaggtaaagacagacttcctctttcaacagggccggccagccggctggctgctaagagccccataagggagaccatgaaagagtctgaatcttctcttgacgtttctcttcagaaaaagttagagacttgggaacgagaaaaggaaaaggaaaatttggaattagatgaatttttgtttttagaacaagctgctgatgaaatatcattttctagtaattcctcatttgtactgaaaatcttagaaagggatcaacagatctgcaaaggtcaccggatgtcttccacccctgtcaaagctgtgccacagaagacaaatccggcagatcccattagtcattgtaaccgcagtgaggatttggaccacactgcacgtgagaaggagagtgagtgtgaagtcgcacccaaacaacttcattcattgtcctcagctgatgaattgagggaacagccttgtaaaatcaggaaagccgtccaaaagagcacttctgaaaatcagactgaatggaatgcacgtgacgatgaaggtgttccaaatagtgacagtagcactgactctgaggaacagcttgatgttaccataaaaccatcgactgaggatagagagaggggcatcagcagcagagaggatagcccacaagtctgtgatgataaggggccttttaaggacaccaggacccaagaagataaaaggagagatgttgatctggatttgtctgataaagattacagtagcgatgagtctatcatggaaagcataaaacataaagtgtctgagccctcgagatcctcatccctaagtctgagtaaaatggactttgatgatgaaagaacttggactgaccttgaagagaatttgtgtaaccatgatgttgttcttgggaatgaatccacttatgggacgccgcagacatgctaccctaataatgaaataggtatcctggacaaaacaataaaaaggaagattgcaccagtcaagaggggagaagacttgagcaagtccaggaggagcagaagtcctcctacatcggagctgatgatgaaattctttccttctttgaaaccaaaaccaaagtcagattcacacttgggaaatgaactcaagttaaacataagtcaagaccaaccacctggtgacaatgctcgatcccaggttttgagagagaaaattattgaattggaaacagaaatagaaaagtttaaagctgagaacgcatctttagctaaacttcgcattgaacgagaaagtgccttggaaaaactcaggaaagaaattgcagacttcgaacaacagaaagcaaaagaattagctcgaatagaagagtttaaaaaggaggagatgaggaagctacaaaaggaacgtaaagtttttgaaaagtatactacagctgcaagaacttttccagataaaaaggaacgtgaagaaatacagactttaaaacagcaaatagcagatttacgggaagatttgaaaagaaaggaaaccaaatggtcaagtacacacagccgtctcagaagccagatacaaatgttagtcagagagaacacagacctccgggaagaaataaaagtgatggaaagattccgactggatgcctggaagagagcagaagccatagagagcagcctcgaggtggagaagaaggacaagcttgcgaacacatctgttcgatttcaaaacagtcagatttcttcaggaacccaggtagaaaaatacaagaaaaattatcttccaatgcaaggcaatccacctcgaagatccaagtctgcacctcctcgtgatttaggcaatttggataagggacaagctgcctctcccagggagccacttgaaccactgaacttcccagatcctgaatataaagaggaggaggaagaccaagacatacagggagaaatcagtcatcctgatggaaaggtggaaaaggtttataagaatgggtgccgtgttatactgtttcccaatggaactcgaaaggaagtgagtgcagatgggaagaccatcactgtcactttctttaatggtgacgtgaagcaggtcatgccagaccaaagagtgatctactactatgcagctgcccagaccactcacacgacatacccggagggactggaagtcttacatttctcaagtggacaaatagaaaaacattacccagatggaagaaaagaaatcacgtttcctgaccagactgttaaaaacttatttcctgatggacaagaagaaagcattttcccagatggtacaattgtcagagtacaacgtgatggcaacaaactcatagagtttaataatggccaaagagaactacatactgcccagttcaagagacgggaatacccagatggcactgttaaaaccgtatatgcaaacggtcatcaagaaacgaagtacagatccggtcggataagagttaaggacaaggagggtaatgtgctaatggacacggagctgtgacgatcctcatgtgatcatgaagtaacagtaactgactttttatgttaaaaaatgtacatttactgtggattctgtttaatttattgtgtatgtgtggggaaaagattagattctaaaataaaagtttaccctgtggcatcttca

SEQ ID NO: 5381 - DNA, 4299 bp, Homo sapiens
  source 1..4299: mol_type = unassigned DNA
agattgaggtgtcggttcgtgctgctgagctgcccaggcttcacggagcggtgttggaaatcaatagctcttctagcctttgcattgtttaaatataatagtgtcattggactaagatgttcctgatgccaacctcttcagagttaaacagtgggcagaacttcctaacccagtggatgaccaatccttctcgggctggggtcatattaaatcgtggatttcctattttggaagcagacaaagagaagcgagcagctgtggacatttctaccagctttcctattaaaggcacacatttttctgatagcttcagctttataaatgaagaagattcacttcttgaagaacagaagttggagtcaaacaacccttacaaaccacagtcagataaatctgaaacccatacagcctttccttgcattaaaaagggaccacaggtagcggcatgtcacagtgctcctggacaccaggaagaaaacaaaaatgacttcatcccagatcttgcgagtgaattcaaagaaggggcttataaagacccactttttaaaaaacttgaacagctgaaagaagtacaacagaagaagcaggaacaattgaagaggcaacagttggagcaactacagagactcatggaagaacaagagaagctgctcaccatggtgtctgggcagtgcacacttccaggtttgagtttactgcctgatgatcagagccagaagcacaggtctccaggaaataccaccactggagagagagccacatgctgcttcccatcatatgtctacccggacccaacccaggaagaaacatacccgtccaacattttatcccatgagcaaagcaacttctgtagaactgctcatggagattttgtcttaacttcaaaacgtgcgtctcctaatttattttctgaggcacagtatcaagaagcacctgtggaaaaaaataatttaaaagaagaaaaccgtaaccatcctacaggagaaagtatcttatgttgggagaaagtgacagaacagattcaggaagcaaatgataagaacttacaaaaacatgatgattcctcagaagtggctaatattgaagaaaggcccattaaagctgctattggagaaaggaaacagacctttgaagattacttagaagaacaaattcagttggaagagcaagaactgaagcaaaaacagctgaaggaagcagaaggaccattgccaatcaaagcaaaaccaaaacaaccatttttaaaacgaggagaaggtttagctagatttactaatgccaaatctaagtttcaaaaaggcaaagaaagtaaactagtgactaaccagagcacttccgaggaccagccgctgtttaaaatggatagacagcaactccagcggaaaaccgctcttaaaaataaagagctgtgtgcagacaaccctatccttaaaaaggacagtaaagctagaaccaagagtggttctgtcaccctcagtcagaagccgaaaatgctgaagtgtagtaacaggaaaagtctttctccgtcaggattgaaaatacagacggggaagaaatgtgatgggcagtttagagaccagatcaaatttgaaaacaaagtcacatctaataataaagaaaatgtaactgagtgtccaaaaccttgcgatactggctgcacagggtggaataagacacaaggtaaagacagacttcctctttcaacagggccggccagccggctggctgctaagagccccataagggagaccatgaaagagtctgaatcttctcttgacgtttctcttcagaaaaagttagagacttgggaacgagaaaaggaaaaggaaaatttggaattagatgaatttttgtttttagaacaagctgctgatgaaatatcattttctagtaattcctcatttgtactgaaaatcttagaaagggatcaacagatctgcaaaggtcaccggatgtcttccacccctgtcaaagctgtgccacagaagacaaatccggcagatcccattagtcattgtaaccgcagtgaggatttggaccacactgcacgtgagaaggagagtgagtgtgaagtcgcacccaaacaacttcattcattgtcctcagctgatgaattgagggaacagccttgtaaaatcaggaaagccgtccaaaagagcacttctgaaaatcagactgaatggaatgcacgtgacgatgaaggtgttccaaatagtgacagtagcactgactctgaggaacagcttgatgttaccataaaaccatcgactgaggatagagagaggggcatcagcagcagagaggatagcccacaagtctgtgatgataaggggccttttaaggacaccaggacccaagaagataaaaggagagatgttgatctggatttgtctgataaagattacagtagcgatgagtctatcatggaaagcataaaacataaagtgtctgagccctcgagatcctcatccctaagtctgagtaaaatggactttgatgatgaaagaacttggactgaccttgaagagaatttgtgtaaccatgatgttgttcttgggaatgaatccacttatgggacgccgcagacatgctaccctaataatgaaataggtatcctggacaaaacaataaaaaggaagattgcaccagtcaagaggggagaagacttgagcaagtccaggaggagcagaagtcctcctacatcggagctgatgatgaaattctttccttctttgaaaccaaaaccaaagtcagattcacacttgggaaatgaactcaagttaaacataagtcaagaccaaccacctggtgacaatgctcgatcccaggttttgagagagaaaattattgaattggaaacagaaatagaaaagtttaaagctgagaacgcatctttagctaaacttcgcattgaacgagaaagtgccttggaaaaactcaggaaagaaattgcagacttcgaacaacagaaagcaaaagaattagctcgaatagaagagtttaaaaaggaggagatgaggaagctacaaaaggaacgtaaagtttttgaaaagtatactacagctgcaagaacttttccagataaaaaggaacgtgaagaaatacagactttaaaacagcaaatagcagatttacgggaagatttgaaaagaaaggaaaccaaatggtcaagtacacacagccgtctcagaagccagatacaaatgttagtcagagagaacacagacctccgggaagaaataaaagtgatggaaagattccgactggatgcctggaagagagcagaagccatagagagcagcctcgaggtggagaagaaggacaagcttgcgaacacatctgttcgatttcaaaacagtcagatttcttcaggaacccaggtagaaaaatacaagaaaaattatcttccaatgcaaggcacagcacagccgcctcacacgcccagcagcttgttggctgaccacctgcctccgctctcctccttcaggccattctcccgtaacatccagctctgttacactttttaacatggaggtcagattctggcacttgctcgagacccttccaaggcaatccacctcgaagatccaagtctgcacctcctcgtgatttaggcaatttggataagggacaagctgcctctcccagggagccacttgaaccactgaacttcccagatcctgaatataaagaggaggaggaagaccaagacatacagggagaaatcagtcatcctgatggaaaggtggaaaaggtttataagaatgggtgccgtgttatactgtttcccaatggaactcgaaaggaagtgagtgcagatgggaagaccatcactgtcactttctttaatggtgacgtgaagcaggtcatgccagaccaaagagtgatctactactatgcagctgcccagaccactcacacgacatacccggagggactggaagtcttacatttctcaagtggacaaatagaaaaacattacccagatggaagaaaagaaatcacgtttcctgaccagactgttaaaaacttatttcctgatggacaagaagaaagcattttcccagatggtacaattgtcagagtacaacgtgatggcaacaaactcatagagtttaataatggccaaagagaactacatactgcccagttcaagagacgggaatacccagatggcactgttaaaaccgtatatgcaaacggtcatcaagaaacgaagtacagatccggtcggataagagttaaggacaaggagggtaatgtgctaatggacacggagctgtgacgatcctcatgtga

SEQ ID NO: 5382 - DNA, 4211 bp, Homo sapiens
  source 1..4211: mol_type = unassigned DNA
tggcggcccatttgtaaatgctgcggagattgaggtgtcggttcgtgctgctgagctgcccaggcttcacggagcggtgttggaaatcaatagctcttctagcctttgcattgtttaaatataatagtgtcattggactaagatgttcctgatgccaacctcttcagagttaaacagtgggcagaacttcctaacccagtggatgaccaatccttctcgggctggggtcatattaaatcgtggatttcctattttggaagcagacaaagagaagcgagcagctgtggacatttctaccagctttcctattaaaggcacacatttttctgatagcttcagctttataaatgaagaagattcacttcttgaagaacagaagttggagtcaaacaacccttacaaaccacagtcagataaatctgaaacccatacagcctttccttgcattaaaaagggaccacaggtagcggcatgtcacagtgctcctggacaccaggaagaaaacaaaaatgacttcatcccagatcttgcgagtgaattcaaagaaggggcttataaagacccactttttaaaaaacttgaacagctgaaagaagtacaacagaagaagcaggaacaattgaagaggcaacagttggagcaactacagagactcatggaagaacaagagaagctgctcaccatggtgtctgggcagtgcacacttccaggtttgagtttactgcctgatgatcagagccagaagcacaggtctccaggaaataccaccactggagagagagccacatgctgcttcccatcatatgtctacccggacccaacccaggaagaaacatacccgtccaacattttatcccatgagcaaagcaacttctgtagaactgctcatggagattttgtcttaacttcaaaacgtgcgtctcctaatttattttctgaggcacagtatcaagaagcacctgtggaaaaaaataatttaaaagaagaaaaccgtaaccatcctacaggagaaagtatcttatgttgggagaaagtgacagaacagattcaggaagcaaatgataagaacttacaaaaacatgatgattcctcagaagtggctaatattgaagaaaggcccattaaagctgctattggagaaaggaaacagacctttgaagattacttagaagaacaaattcagttggaagagcaagaactgaagcaaaaacagctgaaggaagcagaaggaccattgccaatcaaagcaaaaccaaaacaaccatttttaaaacgaggagaaggtttagctagatttactaatgccaaatctaagtttcaaaaaggcaaagaaagtaaactagtgactaaccagagcacttccgaggaccagccgctgtttaaaatggatagacagcaactccagcggaaaaccgctcttaaaaataaagagctgtgtgcagacaaccctatccttaaaaaggacagtaaagctagaaccaagagtggttctgtcaccctcagtcagaagccgaaaatgctgaagtgtagtaacaggaaaagtctttctccgtcaggattgaaaatacagacggggaagaaatgtgatgggcagtttagagaccagatcaaatttgaaaacaaagtcacatctaataataaagaaaatgtaactgagtgtccaaaaccttgcgatactggctgcacagggtggaataagacacaaggtaaagacagacttcctctttcaacagggccggccagccggctggctgctaagagccccataagggagaccatgaaagagtctgaatcttctcttgacgtttctcttcagaaaaagttagagacttgggaacgagaaaaggaaaaggaaaatttggaattagatgaatttttgtttttagaacaagctgctgatgaaatatcattttctagtaattcctcatttgtactgaaaatcttagaaagggatcaacagatctgcaaaggtcaccggatgtcttccacccctgtcaaagctgtgccacagaagacaaatccggcagatcccattagtcattgtaaccgcagtgaggatttggaccacactgcacgtgagaaggagagtgagtgtgaagtcgcacccaaacaacttcattcattgtcctcagctgatgaattgagggaacagccttgtaaaatcaggaaagccgtccaaaagagcacttctgaaaatcagactgaatggaatgcacgtgacgatgaaggtgttccaaatagtgacagtagcactgactctgaggaacagcttgatgttaccataaaaccatcgactgaggatagagagaggggcatcagcagcagagaggatagcccacaagtctgtgatgataaggggccttttaaggacaccaggacccaagaagataaaaggagagatgttgatctggatttgtctgataaagattacagtagcgatgagtctatcatggaaagcataaaacataaagtgtctgagccctcgagatcctcatccctaagtctgagtaaaatggactttgatgatgaaagaacttggactgaccttgaagagaatttgtgtaaccatgatgttgttcttgggaatgaatccacttatgggacgccgcagacatgctaccctaataatgaaataggtatcctggacaaaacaataaaaaggaagattgcaccagtcaagaggggagaagacttgagcaagtccaggaggagcagaagtcctcctacatcggagctgatgatgaaattctttccttctttgaaaccaaaaccaaagtcagattcacacttgggaaatgaactcaagttaaacataagtcaagaccaaccacctggtgacaatgctcgatcccaggttttgagagagaaaattattgaattggaaacagaaatagaaaagtttaaagctgagaacgcatctttagctaaacttcgcattgaacgagaaagtgccttggaaaaactcaggaaagaaattgcagacttcgaacaacagaaagcaaaagaattagctcgaatagaagagtttaaaaaggaggagatgaggaagctacaaaaggaacgtaaagtttttgaaaagtatactacagctgcaagaacttttccagataaaaaggaacgtgaagaaatacagactttaaaacagcaaatagcagatttacgggaagatttgaaaagaaaggaaaccaaatggtcaagtacacacagccgtctcagaagccagatacaaatgttagtcagagagaacacagacctccgggaagaaataaaagtgatggaaagattccgactggatgcctggaagagagcagaagccatagagagcagcctcgaggtggagaagaaggacaagcttgcggcaatccacctcgaagatccaagtctgcacctcctcgtgatttaggcaatttggataagggacaagctgcctctcccagggagccacttgaaccactgaacttcccagatcctgaatataaagaggaggaggaagaccaagacatacagggagaaatcagtcatcctgatggaaaggtggaaaaggtttataagaatgggtgccgtgttatactgtttcccaatggaactcgaaaggaagtgagtgcagatgggaagaccatcactgtcactttctttaatggtgacgtgaagcaggtcatgccagaccaaagagtgatctactactatgcagctgcccagaccactcacacgacatacccggagggactggaagtcttacatttctcaagtggacaaatagaaaaacattacccagatggaagaaaagaaatcacgtttcctgaccagactgttaaaaacttatttcctgatggacaagaagaaagcattttcccagatggtacaattgtcagagtacaacgtgatggcaacaaactcatagagtttaataatggccaaagagaactacatactgcccagttcaagagacgggaatacccagatggcactgttaaaaccgtatatgcaaacggtcatcaagaaacgaagtacagatccggtcggataagagttaaggacaaggagggtaatgtgctaatggacacggagctgtgacgatcctcatgtgatcatgaagtaacagtaactgactttttatgttaaaaaatgtacatttactgtggattctgtttaatttattgtgtatgtgtggggaaaagattagattctaaaataaaagtttaccctgtggc

SEQ ID NO: 5383 - DNA, 1847 bp, Homo sapiens
  source 1..1847: mol_type = unassigned DNA
tttgtgtctcttgtgaacccacttgtggagcgagagggaatttgggagggccaggggttagtctggcctctgtcttagctgtcattttggcggttttttttttttttcttcaggggatttcagtctccacatagttttggagccggacttttgaagaatgattcgtgaatccggaatgggtgacagcgtcatcacggcattttattgacagaccatggattcttacagtgcaccagagtcaactcctagtgcatcctcaagacctgaagattactttataggtgccactcctctgcagaaacgattagaatcggtcaggaagcagagttcatttatcctgactccacctcgaaggaaaattccccagtgttcgcagttgcaggaagatgttgaccctcaaaaggttgcattccttctgcataaacagtggactttatatagtttaactcccttatataaattctcctatagtaatctcaaagagtattctagacttctcaatgcttttattgttgctgaaaagcaaaaaggacttgctgtggaagtgggagaagacttcaacatcaaagtgattttttctactctcctaggaatgaaaggaacacaaagggacccggaagcatttcttgtccagattgtgtcaaaatctcaattgccatctgagaatagagaaggtaaagtgctgtggactggctggttctgctgtgtatttggagacagtcttctggagactgtttcagaagatttcacctgtctgcccttattccttgcaaatggagcagagtctaacacagcaataattggaacttggtttcagaaaacctttgactgttatttcagtcctttagcaatcaatgcatttaatctttcctggatggctgccatgtggactgcatgcaaaatggaccattatgtggctactactgaatttctttggtctgtaccctgtagccctcaaagtctggacatttctttcgcaatacatccagaggatgcaaaagctctatgggacagtgtccacaaaacacctggggaggttacccaggaagaagttgacctattcatggattgcctttattcacatttccatagacatttcaaaattcatttatcagccacaagattagttcgtgtttcaacatctgtagcttcagcacatactgatggaaaaataaagattctgtgtcataaataccttattggagtgttagcatatttgacagaactggcaatttttcaaattgagtgaagccttatgtggactataagttatagattatatactcttattgataacttgcctaattgctatgctgaaagagactgcaggagaaataggcatctatctctgcatctgttttccccaccatgcctttggagttgccaagatggaagccaagaaggatctagaagaacaaagaatatggtagtagatgagccacagccaggtgcccatgtactaatcatgataacctgacatgccattctcaaaatgctgagttgttaatttcttgtcatctttaaatatatatatataggctgggcttggtggctcacacctgtaattccagcactttgggaggctgaggtgggtggatcatttgaggccaggaattcaagaccagcctggccaacatggtgaaaccccttctctactgaaaatacaataattagctgggcgtggtggcacatgcctatgatcccagctactggggaggctgaggcaggagaatcgttttaacccagaagacaggctgcagtgagccaagactgcaccactgcactccagcctgggcaacaaagtgagactctgcctcaaaaaataaaaaagaaataaaataaataaa

SEQ ID NO: 5384 - DNA, 2357 bp, Homo sapiens
  source 1..2357: mol_type = unassigned DNA
ggtctctgacaggctcagctggagagggacgggttgggacgcactgtccttttgcccttccccctccgcgagcagaagctgactccgcaggagcgagggtcgcagagctgggtgagcggaaatgtccctcccagagtgaagtcgcagggcccgccccgcgtctgagggagcggaggtcttcctgggggatttcagtctccacatagttttggagccggacttttgaagaatgattcgtgaatccggaatgggtgacagcgtcatcacggcattttattgacagaccatggattcttacagtgcaccagagtcaactcctagtgcatcctcaagacctgaagattactttataggtgccactcctctgcagaaacgattagaatcggtcaggaagcagagttcatttatcctgactccacctcgaaggaaaattccccagtgttcgcagttgcaggaagatgttgaccctcaaaaggttgcattccttctgcataaacagtggactttatatagtttaactcccttatataaattctcctatagtaatctcaaagagtattctagacttctcaatgcttttattgttgctgaaaagcaaaaaggacttgctgtggaagtgggagaagacttcaacatcaaagtgattttttctactctcctaggaatgaaaggaacacaaagggacccggaagcatttcttgtccagggtctcattttgtcacccaggctggagtacagtggcacgatcttggttgactgcaacctctgtctcctgggctcaagtgatccttccaccttagccttccaagtagctgggactgcaggtgcatgccaccacactcggattgtgtcaaaatctcaattgccatctgagaatagagaaggtaaagtgctgtggactggctggttctgctgtgtatttggagacagtcttctggagactgtttcagaagatttcacctgtctgcccttattccttgcaaatggagcagagtctaacacagcaataattggaacttggtttcagaaaacctttgactgttatttcagtcctttagcaatcaatgcatttaatctttcctggatggctgccatgtggactgcatgcaaaatggaccattatgtggctactactgaatttctttggtctgtaccctgtagccctcaaagtctggacatttctttcgcaatacatccagaggatgcaaaagctctatgggacagtgtccacaaaacacctggggaggttacccaggaagaagttgacctattcatggattgcctttattcacatttccatagacatttcaaaattcatttatcagccacaagattagttcgtgtttcaacatctgtagcttcagcacatactgatggaaaaataaagattctgtgtcataaataccttattggagtgttagcatatttgacagaactggcaatttttcaaattgagtgaagccttatgtggactataagttatagattatatactcttattgataacttgcctaattgctatgctgaaagagactgcaggagaaataggcatctatctctgcatctgttttccccaccatgcctttggagttgccaagatggaagccaagaaggatctagaagaacaaagaatatggtagtagatgagccacagccaggtgcccatgtactaatcatgataacctgacatgccattctcaaaatgctgagttgttaatttcttgtcatctttaaatatatatatataggctgggcttggtggctcacacctgtaattccagcactttgggaggctgaggtgggtggatcatttgaggccaggaattcaagaccagcctggccaacatggtgaaaccccttctctactgaaaatacaataattagctgggcgtggtggcacatgcctatgatcccagctactggggaggctgaggcaggagaatcgttttaacccagaagacaggctgcagtgagccaagactgcaccactgcactccagcctgggcaacaaagtgagactctgcctcaaaaaataaaaaagaaataaaataaataaatacagcgtttattatgtttaaactcttaggattcaaatgagatgtatctaatggatatttctgatttgggtctttaaaacctttaatctcttttaagcattttagacttgcattcagaaagaattctgtcttctaaagacattttcctagcatttcactgcggagaactggcaatcaaaatcccctcaaaagggaactaaagattaatatacacatttttttagtcattaatatgcttctgttttaaatacagttcaactcctgttgcaatgttgaattaaatgtttattttaaaatgaa

SEQ ID NO: 5385 - DNA, 1771 bp, Homo sapiens
  source 1..1771: mol_type = unassigned DNA
gcccgccccgcgtctgagggagcggaggtcttcctgggggatttcagtctccacatagttttggagccggacttttgaagaatgattcgtgaatccggaatgggtgacagcgtcatcacggcattttattgacagaccatggattcttacagtgcaccagagtcaactcctagtgcatcctcaagacctgaagattactttataggtgccactcctctgcagaaacgattagaatcggtcaggaagcagagttcatttatcctgactccacctcgaaggaaaattccccagtgttcgcagttgcaggaagatgttgaccctcaaaaggttgcattccttctgcataaacagtggactttatatagtttaactcccttatataaattctcctatagtaatctcaaagagtattctagacttctcaatgcttttattgttgctgaaaagcaaaaaggacttgctgtggaagtgggagaagacttcaacatcaaagtgattttttctactctcctaggaatgaaaggaacacaaagggacccggaagcatttcttgtccagattgtgtcaaaatctcaattgccatctgagaatagagaaggtaaagtgctgtggactggctggttctgctgtgtatttggagacagtcttctggagactgtttcagaagatttcacctgtctgcccttattccttgcaaatggagcagagtctaacacagcaataattggaacttggtttcagaaaacctttgactgttatttcagtcctttagcaatcaatgcatttaatctttcctggatggctgccatgtggactgcatgcaaaatggaccattatgtggctactactgaatttctttggtctgtaccctgtagccctcaaagtctggacatttctttcgcaatacatccagaggatgcaaaagctctatgggacagtgtccacaaaacacctggggaggttacccaggaagaagttgacctattcatggattgcctttattcacatttccatagacatttcaaaattcatttatcagccacaagattagttcgtgtttcaacatctgtagcttcagcacatactgatggaaaaataaagattctgtgtcataaataccttattggagtgttagcatatttgacagaactggcaatttttcaaattgagtgaagccttatgtggactataagttatagattatatactcttattgataacttgcctaattgctatgctgaaagagactgcaggagaaataggcatctatctctgcatctgttttccccaccatgcctttggagttgccaagatggaagccaagaaggatctagaagaacaaagaatatggtagtagatgagccacagccaggtgcccatgtactaatcatgataacctgacatgccattctcaaaatgctgagttgttaatttcttgtcatctttaaatatatatatataggctgggcttggtggctcacacctgtaattccagcactttgggaggctgaggtgggtggatcatttgaggccaggaattcaagaccagcctggccaacatggtgaaaccccttctctactgaaaatacaataattagctgggcgtggtggcacatgcctatgatcccagctactggggaggctgaggcaggagaatcgttttaacccagaagacaggctgcagtgagccaagactgcaccactgcactccagcctgggcaacaaagtgagactctgcctcaaaaaataaaaaagaaataaaataaataaa

SEQ ID NO: 5386 - DNA, 1398 bp, Homo sapiens
  source 1..1398: mol_type = unassigned DNA
cacctcgctcgcagcctccccagcgcagcagcccggctgtgggcctgcggcagccgggtcttcctggtccccacctcctggggccgacgggcggcaggaaggggctcggcgggacgcgccatcagggacctgaggaggaacaacggaacgcgttcggaacggcctggactcccgagactcacccgactcgtggccacaccgggagaactgaagcggcagtagccggcggagacgcccgacccgaaggccggctgctagggagcagacagctgaaccgcttgccagacgccgaaacccagtgacgccctccaccgctccaccgtgctcccggctcctcgcccccgccgcccgcgggccccaaggcgcatgcgccgcctgtcctggaggggcccatttccgtccgtcgtggggggaggcacagtgagtccactggggcacggcagcgtctaagccacaagccgagcacataagccaggtcctaacggagcctatgtgtaagtccactactggtgcaaggttgcacacttctaagaagagcggcgtggggggctcggcgaccttcgcttcagtcgctcccccgtgcagtcccctgtgcccaagacacagcctgatgcttgtgctccggtgggcggagcttggaggcggcgggaactgcaattggtggctttgaaggcgcggcgagcgggaacagctcttgaggagtgagactgcaggagatgtgggccgtgccaaagagatggatgagactgttgctgagttcatcaagaggaccatcttgaaaatccccatgaatgaactgacaacaatcctgaaggcctgggattttttgtctgaaaatcaactgcagactgtaaatttccgacagagaaaggaatctgtagttcagcacttgatccatctgtgtgaggaaaagcgtgcaagtatcagtgatgctgccctgttagacatcatttatatgcaatttcatcagcaccagaaagtttgggaagtttttcagatgagtaaaggaccaggtgaagatgttgacctttttgatatgaaacaatttaaaaattcgttcaagaaaattcttcagagagcattaaaaaatgtgacagtcagcttcagagaaactgaggagaatgcagtctggattcgaattgcctggggaacacagtacacaaagccaaaccagtacaaacctacctacgtggtgtactactcccagactccgtacgccttcacgtcctcctccatgctgaggcgcaatacaccgcttctgggtcaggagttagaagctactgggaaaatctacctccgacaagaggagatcattttagatattaccgaaatgaagaaagcttgcaattagtgaacatgaaaggaaaataaaaattcctcacagtcatctttttataa

SEQ ID NO: 5387 - DNA, 2481 bp, Homo sapiens
  source 1..2481: mol_type = unassigned DNA
gagcgacgcccacggcctgtctcggccaccagcgtgttccagcgagcgcccagccacctcgctcgcagcctccccagcgcagcagcccggctgtgggcctgcggcagccgggtcttcctggtccccacctcctggggccgacgggcggcaggaaggggctcggcgggacgcgccatcagggacctgaggaggaacaacggaacgcgttcggaacggcctggactcccgagactcacccgactcgtggccacaccgggagaactgaagcggcagtagccggcggagacgcccgacccgaaggccggctgctagggagcagacagctgaaccgcttgccagacgccgaaacccagtgacgccctccaccgctccaccgtgctcccggctcctcgcccccgccgcccgcgggccccaaggcgcatgcgccgcctgtcctggaggggcccatttccgtccgtcgtggggggaggcacagtgagtccactggggcacggcagcgtctaagccacaagccgagcacataagccaggtcctaacggagcctatgtgtaagtccactactggtgcaaggttgcacacttctaagaagagcggcgtggggggctcggcgaccttcgcttcagtcgctcccccgtgcagtcccctgtgcccaagacacagcctgatgcttgtgctccggtgggcggagcttggaggcggcgggaactgcaattggtggctttgaaggcgcggcgagcgggaacagctcttgaggagtgagactgcaggagatgtgggccgtgccaaagagatggatgagactgttgctgagttcatcaagaggaccatcttgaaaatccccatgaatgaactgacaacaatcctgaaggcctgggattttttgtctgaaaatcaactgcagactgtaaatttccgacagagaaaggaatctgtagttcagcacttgatccatctgtgtgaggaaaagcgtgcaagtatcagtgatgctgccctgttagacatcatttatatgcaatttcatcagcaccagaaagtttgggaagtttttcagatgagtaaaggaccaggtgaagatgttgacctttttgatatgaaacaatttaaaaattcgttcaagaaaattcttcagagagcattaaaaaatgtgacagtcagcttcagagaaactgaggagaatgcagtctggattcgaattgcctggggaacacagtacacaaagccaaaccagtacaaacctacctacgtggtgtactactcccagactccgtacgccttcacgtcctcctccatgctgaggcgcaatacaccgcttctgggtcaggcgctgacaattgctagcaaacaccatcagattgtgaaaatggacctgagaagtcggtatctggactctcttaaggctattgtttttaaacagtataatcagacctttgaaactcacaactctacgacacctctacaggaaagaagccttggactagatataaatatggattcaaggatcattcatgaaaacatagtagaaaaagagagagtccaacgaataactcaagaaacatttggagattatcctcaaccacaactagaatttgcacaatataagcttgaaacgaaattcaaaagtggtttaaatgggagcatcttggctgagagggaagaacccctccgatgcctaataaagttctctagcccacatcttctggaagcattgaaatccttagcaccagcgggtattgcagatgctccactttctccactgctcacttgcatacccaacaagagaatgaattattttaaaattagagataaataagacgtgcgtggtttcttaagcacagctcctccttcttgatattgcacatgcacttcagttcatggctagctgtatagcttccgtctgtaaacttgtattttcaagaatccttggtattgaatttttagaaatgctcacataattgttgggactgattcattcctccacgatatgcctcctctctctgatatcctgctaactgtagccgttgtggcatttgagatgacaggacatatatatatatggccccacacttgaccttgagtgcctgaatgctctgaaatcaagcatatggcacagcgctcaagacttttgggtttgtgtccttttttctatggctgtctcttctcaattctggagaggtctggttccagtggctggtttccagggattgattcttaagctctggatcacagagagaagcaacaaggaactatactcaactcaaaactttttaggagaatcatgaaattggtctattcaaaggatggagttgagtccattctgttattgttgcaagaggttgcatatttggtgagtcagttatataaaatagtgttcttattgtaaatatgatacttctcataatctattttatcatgtgtataacattcaaactgacaaatatattgacttatgaataaaggtgtcaaaaaactggcacatcagtt

SEQ ID NO: 5388 - DNA, 971 bp, Homo sapiens
  source 1..971: mol_type = unassigned DNA
tcttgaggagtgagactgcaggagatgtgggccgtgccaaagagatggatgagactgttgctgagttcatcaagaggaccatcttgaaaatccccatgaatgaactgacaacaatcctgaaggcctgggattttttgtctgaaaatcaactgcagactgtaaatttccgacagagaaaggaatctgtagttcagcacttgatccatctgtgtgaggaaaagcgtgcaagtatcagtgatgctgccctgttagacatcatttatatgcaatttcatcagcaccagaaagtttgggaagtttttcagatgagtaaaggaccaggtgaagatgttgacctttttgatatgaaacaatttaaaaattcgttcaagaaaattcttcagagagcattaaaaaatgtgacagtcagcttcagagaaactgaggagaatgcagtctggattcgaattgcctggggaacacagtacacaaagccaaaccagtacaaacctacctacgtggtgtactactcccagactccgtacgccttcacgtcctcctccatgctgaggcgcaatacaccgcttctgggtcagacctttgaaactcacaactctacgacacctctacaggaaagaagccttggactagatataaatatggattcaaggatcattcatgaaaacatagtagaaaaagagagagtccaacgaataactcaagaaacatttggagattatcctcaaccacaactagaatttgcacaatataagcttgaaacgaaattcaaaagtggtttaaatgggagcatcttggctgagagggaagaacccctccgatgcctaataaagttctctagcccacatcttctggaagcattgaaatccttagcaccagcgggtattgcagatgctccactttctccactgctcacttgcatacccaacaagagaatgaattattttaaaattagagataaataagacgtgcgt

SEQ ID NO: 5389 - DNA, 1692 bp, Homo sapiens
  source 1..1692: mol_type = unassigned DNA
aattggtggctttgaaggcgcggcgagcgggaacagctcttgaggagtgagactgcaggagatgtgggccgtgccaaagagatggatgagactgttgctgagttcatcaagaggaccatcttgaaaatccccatgaatgaactgacaacaatcctgaaggcctgggattttttgtctgaaaatcaactgcagactgtaaatttccgacagagaaaggaatctgtagttcagcacttgatccatctgtgtgaggaaaagcgtgcaagtatcagtgatgctgccctgttagacatcatttgtgaagatgttgacctttttgatatgaaacaatttaaaaattcgttcaagaaaattcttcagagagcattaaaaaatgtgacagtcagcttcagagaaactgaggagaatgcagtctggattcgaattgcctggggaacacagtacacaaagccaaaccagtacaaacctacctacgtggtgtactactcccagactccgtacgccttcacgtcctcctccatgctgaggcgcaatacaccgcttctgggtcaggcgctgacaattgctagcaaacaccatcagattgtgaaaatggacctgagaagtcggtatctggactctcttaaggctattgtttttaaacagtataatcagacctttgaaactcacaactctacgacacctctacaggaaagaagccttggactagatataaatatggattcaaggatcattcatgaaaacatagtagaaaaagagagagtccaacgaataactcaagaaacatttggagattatcctcaaccacaactagaatttgcacaatataagcttgaaacgaaattcaaaagtggtttaaatgggagcatcttggctgagagggaagaacccctccgatgcctaataaagttctctagcccacatcttctggaagcattgaaatccttagcaccagcgggtattgcagatgctccactttctccactgctcacttgcatacccaacaagagaatgaattattttaaaattagagataaataagacgtgcgtggtttcttaagcacagctcctccttcttgatattgcacatgcacttcagttcatggctagctgtatagcttccgtctgtaaacttgtattttcaagaatccttggtattgaatttttagaaatgctcacataattgttgggactgattcattcctccacgatatgcctcctctctctgatatcctgctaactgtagccgttgtggcatttgagatgacaggacatatatatatatggccccacacttgaccttgagtgcctgaatgctctgaaatcaagcatatggcacagcgctcaagacttttgggtttgtgtccttttttctatggctgtctcttctcaattctggagaggtctggttccagtggctggtttccagggattgattcttaagctctggatcacagagagaagcaacaaggaactatactcaactcaaaactttttaggagaatcatgaaattggtctattcaaaggatggagttgagtccattctgttattgttgcaagaggttgcatatttggtgagtcagttatataaaatagtgttcttattgtaaatatgatacttctcataatctattttatcatgtgtataacattcaaactgacaaatatattgacttatgaataaaggtgtc

SEQ ID NO: 5390 - DNA, 1556 bp, Homo sapiens
  source 1..1556: mol_type = unassigned DNA
ggctttgaaggcgcggcgagcgggaacagctcttgaggagtgagactgcaggagatgtgggccgtgccaaagagatggatgagactgttgctgagttcatcaagaggaccatcttgaaaatccccatgaatgaactgacaacaatcctgaaggcctgggattttttgtctgaaaatcaactgcagactgtaaatttccgacagagaaaggaatctgtagttcagcacttgatccatctgtgtgaggaaaagcgtgcaagtatcagtgatgctgccctgttagacatcatttatatgcaatttcatcagcaccagaaagtttgggaagtttttcagatgagtaaaggaccaggtgaagatgttgacctttttgatatgaaacaatttaaaaattcgttcaagaaaattcttcagagagcattaaaaaatgtgacagtcagcttcagagaaactgaggagaatgcagtctggattcgaattgcctggggaacacagtacacaaagccaaaccagtacaaacctacctacgtggtgtactactcccagactccgtacgccttcacgtcctcctccatgctgaggcgcaatacaccgcttctgggtcaggcgctgacaattgctagcaaacaccatcagattgtgaaaatggacctgagaagtcggtatctggactctcttaaggctattgtttttaaacagtataatcagacctttgaaactcacaactctacgacacctctacaggaaagaagccttggactagatataaatatggattcaaggatcattcatgaaaacatagtagaaaaagagagagtccaacgaataactcaagaaacatttggagattatcctcaaccacaactagaatttgcacaatataagcttgaaacgaaattcaaaagtggtttaaatgggagcatcttggctgagagggaagaacccctccgatgcctaataaagttctctagcccacatcttctggaagcattgaaatccttagcaccagcggcacttgtttgcaggatccaaaagctgctctgctattctggaagccacagtcaagggacccaggacccgagcagctggcagaaggacttgtaccttctgtttgtcccattgtatccaagatgttaaaatcatgatgtcacaacatttagacatttaaatggttaatcaaatgtatgtctctcctgatatacagctaactgctatagactaatgcaggcctccttgttaaaatggaccctttgttactcaaatttgaccaatcttggaagcttggatgtgcactgacttgacaaccactttttgtgggacataacactctagacacaggtgcttctagctctaaggggaacagataactaatctgtggccaaccaaccaatgattaatcagctatgctgcctcggatcttgatcaaaaaaggaaaatgtgaaaagtgatacacaaaatggcatcactttggttcagagctctaaaatggagttgggaagccattctaagaaggactgcctgcacaatctgcaacttgcaaaacacaaaaacaaaaaa

SEQ ID NO: 5391 - DNA, 1625 bp, Homo sapiens
  source 1..1625: mol_type = unassigned DNA
gaagacgtggatggcgggaattctcgcttctggcctgggtgagctagaagggagaagcaaggacattggagtccctatcaccggttgcctagacaacttcatgggaaggcccttgggaatctgagatggagcaggcgaaccctttacgtccagatggcgagtccaaaggaggtgttttagctcacttggaaaggctagagacccaagtgagcagatcccgtaaacagtctgaagagctgcagagcgtgcaggcccaggaaggtgctcttggaaccaagattcataaactaaggcgtctgcgagatgagctgagggctgtggtgcggcaccggcgagccagcgtgaaagcatgtattgccaatgtagaacccaaccaaacagtggagatcaatgagcaagaagcattggaagagaaattggaaaatgtgaaagccattctgcaggcatatcattttacaggcctcagtggtaaactgaccagccgaggagtttgtgtctgcatcagtactgcttttgaggggaacctattggattcctattttgtggaccttgtcatacagaaaccactccggatacatcaccattcagtcccagtcttcattcccctggaagagatagctgcaaaatatttacagaccaacatccagcacttcctgttcagtctctgcgagtacctgaatgcttactctgggaggaagtaccaggcagaccggcttcagagtgactttgcagccctcctgactgggcccttgcagagaaacccactgtgtaacttgctgtcatttacttacaaactggatccagggggtcagtccttcccgttctgtgctagattgctgtataaggacctcacagcaactcttcccactgacgtcaccgtgacatgtcaaggagtggaagtattatccacttcatgggaggagcaacgagcatctcatgaaactctgttctgtacgaagcccttgcatcaagtgtttgcctcatttacaagaaaaggagaaaagttggatatgagtctggtctcctaatagattgttttcactgcactgggagcacatcagagaaataaatcccccctcccctgccaggtgaaaggaaatattgcactttctgttctcatgactaaggggacaggagttccagaagaacctttcaagatgatcaggaacaccaggacgagggccgtctcacctcactcggaccacatggagacctcccttcaaaatgggagccatgtcctgccccaccaagccctgtctgaagtggagcttccccgcctgtgctccctccacagtcccggaaagcccagcggcaaaggcagctttgtcccagctctgccaccctcctgctcacagtggtcagggcccctcaggggcaaggacggcagggattggaacgagggctctggaaggactgttcagccctatgcctaagacccctatgctggggacactacaggcacacacaggaatagcagggccaccctcagagctcacacatccacgaacaaatgaaggctgaggaggtttctaaacctaaagtccatgagtgtgcacttcaatccaggaaggtcgggacttccttcagtttcaaaaaataaattctcccttccggtttggactgtt

SEQ ID NO: 5392 - DNA, 4386 bp, Homo sapiens
  source 1..4386: mol_type = unassigned DNA
atgcgccccagctcttggaggtaagcggctgtgtgcgggtggtcgcggtgagtgtgcaaggccgcggtggccgcgtgacaagcctgcgctaccagtgcgcccgccggccaggagaacggagcttgtgatagatcctttcgtaacaccaagtattgtaccaggacctgcggctccgccccagaggccgccatcttcctgaccacccgaaaggccggacctactccccggtgcatcttgggatcagggcggggccctgagcgccgccatgcttttgtacggcaggatcgcaaagcacgccgggaccggttggtttggttttgaagacgtggatggcgggaattctcgcttctggcctggcaaggacattggagtccctatcaccggttgcctagacaacttcatgggaaggcccttgggaatctgagatggagcaggcgaaccctttacgtccagatggcgagtccaaaggaggtgttttagctcacttggaaaggctagagacccaagtgagcagatcccgtaaacagtctgaagagctgcagagcgtgcaggcccaggaaggtgctcttggaaccaagattcataaactaaggcgtctgcgagatgagctgagggctgtggtgcggcaccggcgagccagcgtgaaagcatgtattgccaatgtagaacccaaccaaacagtggagatcaatgagcaagaagcattggaagagaaattggaaaatgtgaaagccattctgcaggcatatcattttacaggcctcagtggtaaactgaccagccgaggagtttgtgtctgcatcagtactgcttttgaggggaacctattggattcctattttgtggaccttgtcatacagaaaccactccggatacatcaccattcagtcccagtcttcattcccctggaagagatagctgcaaaatatttacagaccaacatccagcacttcctgttcagtctctgcgagtacctgaatgcttactctgggaggaagtaccaggcagaccggcttcagagtgactttgcagccctcctgactgggcccttgcagagaaacccactgtgtaacttgctgtcatttacttacaaactggatccagggggtcagtccttcccgttctgtgctagattgctgtataaggacctcacagcaactcttcccactgacgtcaccgtgacatgtcaaggagtggaagtattatccacttcatgggaggagcaacgagcatctcatgaaactctgttctgtacgaagcccttgcatcaagtgtttgcctcatttacaagaaaaggagaaaagttggatatgagtctggtctcctaatagattgttttcactgcactgggagcacatcagagaaataaatcccccctcccctgccaggtgaaaggaaatattgcactttctgttctcatgactaaggggacaggagttccagaagaacctttcaagatgatcaggaacaccaggacgagggccgtctcacctcactcggaccacatggagacctcccttcaaaatgggagccatgtcctgccccaccaagccctgtctgaagtggagcttccccgcctgtgctccctccacagtcccggaaagcccagcggcaaaggcagctttgtcccagctctgccaccctcctgctcacagtggtcagggcccctcaggggcaaggacggcagggattggaacgagggctctggaaggactgttcagccctatgcctaagacccctatgctggggacactacaggcacacacaggaatagcagggccaccctcagagctcacacatccacgaacaaatgaaggctgaggaggtttctaaacctaaagtccatgagtgtgcacttcaatccaggaaggtcgggacttccttcagtttcaaaaaataaattctcccttccggtttggactgttgcaggctcgaggccattcaggagttgtccaccacctggtggggcagtgtgacagaggggccattggggaaggtggctagcttatcccgccccttcaagaagaaggtcagcagctcccccttccccttcacaaagatggggcctcgcctcacaaagcggaagccgtactctcggaggatgacttgggtttcttctaccacctggagagggagggggagcaagaacgtggcgttacggggggagcctagactgagggcgggtgggggctttgggtggttggagccgagcactgatccatgggtcccaagcagtacgggacactccccaaacctcccagggccaagcccttccacccgtggcgagcagcgggtgggaaggagaaccctggagtgactggctgggggcctcctctcatccagagacttctctcctaggatggccatggtcacctgggtggcagcactgttacctggaaactgccactgcctgctcttctgtccctttgcccctttcgtggagcttttctgccagacgccactgagacagatcacaaggtattagaaggttcatacccaaaggtaggccatatgcatctagaacttcagcccagattttgtggatgggtggaagtgtttcttcctgtgctgaggctagctattgcagagattcttttccacttgccccacgtctctgcctctggacttactgttcagggccagggtgggaggcaggggcacgtgggaaagcactgttccggttttgttctcatgccgagtctgagcacgtgccagctgtgccactggacatacctgaatgttgcccatgacccccgtggactccatcctgctggctacattgactgtattgccccagatgtcgtagtgtggtttccgggctccgatgaccccagccagaaccccgcctttgttcatgcctagggtagaggcataaagttcagcacagccacaggccacaccttgttatgggcctcagaagccatctcctctccagacctgtaccacaaagctcctaatgtaacacatcattgtcctcattcaacttggctgtatgctattggagggtggaaatcacatctcctgtttatccgtgtgcttgttaggtgtcagccgccaccccccccccatatgcagatttactcggcatggtagtggccagcttctaacacagctggtatttcaagtctcctgggacctcactcaggaatgataccccctcagtagaagcagcaggtgatcttaactcctttcaaagagcaggcctgtctgggaagccatgtcctcagcaggcacagcaacccctctggaaatggatcacaaactcacttctcagccaggcaggccaagcttctattgtaacagtaggcacagtatagtcggatcatcacatcagctgggtttttggtttagtcatctagagtcgtctggactaaaggtctttcaggtctccttgccctgtgagtgcgtgaacctccccacccgaattgcctcagttgtcctgagcctcatgtctctcctggtggtgggccaggcccctgcatgggaagggagcctgctgcggggcaggccagctgggggtgctcacctatgcgcagcatgaagttattgaaggactggttgttgatgttggtgagcgtatccttcatggccagcgcgaagtcggccaggtcagccaggtgctgccagcgctctctctcggacttgtcttcctgtgccaggggaccgtggagaaagtgtcaggggccgctcactgcagcagcctgctctgctgccttccctggcagtgttctgggggtggattccctacacctagatgttcaaggccttacttttcctcccacaaaggagtcgcagccacgctagctctgacttgccactgtgacaaagttcacgtagcaggtctaggcaaagactgggcaattgagcagaggagacggacctgtgagtctgaccacgaggcggaccccttcaccttggctgggcctggtcctggtccttaggttttgtcaggttgtccttgtttggatccctcaactaggtgataagcactggagggggatgacccgccttggacgtgtttctttaacctcatccatataatagggccgtgggatggttgtagaggtaaagcaggatgatggtgttttaagaccagagcttgggaccagggctcctacacctaattttctctcctggtagctgaacaaaggtctaaattagcttaacaaaagaacaggctgccgtcagccagagttctgaaggccatgctttcagtttcccttgttgacaattgctctccagttcctatgaaagcacagagccttagggggcctggccacagaacacaaccatcttaggcctgagctgtgaacagcagggggttgtgtgtctgttctgtttctctgcttgccgaactttctcaataaaccctatttcttatttata

SEQ ID NO: 5393 - DNA, 4272 bp, Homo sapiens
  source 1..4272: mol_type = unassigned DNA
atgcgccccagctcttggaggtaagcggctgtgtgcgggtggtcgcggtgagtgtgcaaggccgcggtggccgcgtgacaagcctgcgctaccagtgcgcccgccggccaggagaacggagcttgtgatagatcctttcgtaacaccaagtattgtaccaggacctgcggctccgccccagaggccgccatcttcctgaccacccgaaaggccggacctactccccggtgcatcttgggatcagggcggggccctgagcgccgccatgcttttgtacggcaggatcgcaaagcacgccgggaccggttggtttggttttgaagacgtggatggcgggaattctcgcttctggcctgggtgttttagctcacttggaaaggctagagacccaagtgagcagatcccgtaaacagtctgaagagctgcagagcgtgcaggcccaggaaggtgctcttggaaccaagattcataaactaaggcgtctgcgagatgagctgagggctgtggtgcggcaccggcgagccagcgtgaaagcatgtattgccaatgtagaacccaaccaaacagtggagatcaatgagcaagaagcattggaagagaaattggaaaatgtgaaagccattctgcaggcatatcattttacaggcctcagtggtaaactgaccagccgaggagtttgtgtctgcatcagtactgcttttgaggggaacctattggattcctattttgtggaccttgtcatacagaaaccactccggatacatcaccattcagtcccagtcttcattcccctggaagagatagctgcaaaatatttacagaccaacatccagcacttcctgttcagtctctgcgagtacctgaatgcttactctgggaggaagtaccaggcagaccggcttcagagtgactttgcagccctcctgactgggcccttgcagagaaacccactgtgtaacttgctgtcatttacttacaaactggatccagggggtcagtccttcccgttctgtgctagattgctgtataaggacctcacagcaactcttcccactgacgtcaccgtgacatgtcaaggagtggaagtattatccacttcatgggaggagcaacgagcatctcatgaaactctgttctgtacgaagcccttgcatcaagtgtttgcctcatttacaagaaaaggagaaaagttggatatgagtctggtctcctaatagattgttttcactgcactgggagcacatcagagaaataaatcccccctcccctgccaggtgaaaggaaatattgcactttctgttctcatgactaaggggacaggagttccagaagaacctttcaagatgatcaggaacaccaggacgagggccgtctcacctcactcggaccacatggagacctcccttcaaaatgggagccatgtcctgccccaccaagccctgtctgaagtggagcttccccgcctgtgctccctccacagtcccggaaagcccagcggcaaaggcagctttgtcccagctctgccaccctcctgctcacagtggtcagggcccctcaggggcaaggacggcagggattggaacgagggctctggaaggactgttcagccctatgcctaagacccctatgctggggacactacaggcacacacaggaatagcagggccaccctcagagctcacacatccacgaacaaatgaaggctgaggaggtttctaaacctaaagtccatgagtgtgcacttcaatccaggaaggtcgggacttccttcagtttcaaaaaataaattctcccttccggtttggactgttgcaggctcgaggccattcaggagttgtccaccacctggtggggcagtgtgacagaggggccattggggaaggtggctagcttatcccgccccttcaagaagaaggtcagcagctcccccttccccttcacaaagatggggcctcgcctcacaaagcggaagccgtactctcggaggatgacttgggtttcttctaccacctggagagggagggggagcaagaacgtggcgttacggggggagcctagactgagggcgggtgggggctttgggtggttggagccgagcactgatccatgggtcccaagcagtacgggacactccccaaacctcccagggccaagcccttccacccgtggcgagcagcgggtgggaaggagaaccctggagtgactggctgggggcctcctctcatccagagacttctctcctaggatggccatggtcacctgggtggcagcactgttacctggaaactgccactgcctgctcttctgtccctttgcccctttcgtggagcttttctgccagacgccactgagacagatcacaaggtattagaaggttcatacccaaaggtaggccatatgcatctagaacttcagcccagattttgtggatgggtggaagtgtttcttcctgtgctgaggctagctattgcagagattcttttccacttgccccacgtctctgcctctggacttactgttcagggccagggtgggaggcaggggcacgtgggaaagcactgttccggttttgttctcatgccgagtctgagcacgtgccagctgtgccactggacatacctgaatgttgcccatgacccccgtggactccatcctgctggctacattgactgtattgccccagatgtcgtagtgtggtttccgggctccgatgaccccagccagaaccccgcctttgttcatgcctagggtagaggcataaagttcagcacagccacaggccacaccttgttatgggcctcagaagccatctcctctccagacctgtaccacaaagctcctaatgtaacacatcattgtcctcattcaacttggctgtatgctattggagggtggaaatcacatctcctgtttatccgtgtgcttgttaggtgtcagccgccaccccccccccatatgcagatttactcggcatggtagtggccagcttctaacacagctggtatttcaagtctcctgggacctcactcaggaatgataccccctcagtagaagcagcaggtgatcttaactcctttcaaagagcaggcctgtctgggaagccatgtcctcagcaggcacagcaacccctctggaaatggatcacaaactcacttctcagccaggcaggccaagcttctattgtaacagtaggcacagtatagtcggatcatcacatcagctgggtttttggtttagtcatctagagtcgtctggactaaaggtctttcaggtctccttgccctgtgagtgcgtgaacctccccacccgaattgcctcagttgtcctgagcctcatgtctctcctggtggtgggccaggcccctgcatgggaagggagcctgctgcggggcaggccagctgggggtgctcacctatgcgcagcatgaagttattgaaggactggttgttgatgttggtgagcgtatccttcatggccagcgcgaagtcggccaggtcagccaggtgctgccagcgctctctctcggacttgtcttcctgtgccaggggaccgtggagaaagtgtcaggggccgctcactgcagcagcctgctctgctgccttccctggcagtgttctgggggtggattccctacacctagatgttcaaggccttacttttcctcccacaaaggagtcgcagccacgctagctctgacttgccactgtgacaaagttcacgtagcaggtctaggcaaagactgggcaattgagcagaggagacggacctgtgagtctgaccacgaggcggaccccttcaccttggctgggcctggtcctggtccttaggttttgtcaggttgtccttgtttggatccctcaactaggtgataagcactggagggggatgacccgccttggacgtgtttctttaacctcatccatataatagggccgtgggatggttgtagaggtaaagcaggatgatggtgttttaagaccagagcttgggaccagggctcctacacctaattttctctcctggtagctgaacaaaggtctaaattagcttaacaaaagaacaggctgccgtcagccagagttctgaaggccatgctttcagtttcccttgttgacaattgctctccagttcctatgaaagcacagagccttagggggcctggccacagaacacaaccatcttaggcctgagctgtgaacagcagggggttgtgtgtctgttctgtttctctgcttgccgaactttctcaataaaccctatttcttatttata

SEQ ID NO: 5394 - DNA, 3088 bp, Homo sapiens
  source 1..3088: mol_type = unassigned DNA
gaattttcatagcgcatgggggaaaccagactctcccagaaccgcaagcctagaaatctgtgagattccacttgatttccctgcttttgggaggaggcttttgaccataaaatgccgtctcatcatgaagctgactttcaccaaggtaggccctttcccttactgcagtgggagccgcaccaccactgggcacagtgaggataccagggtgggctcctgcccatgcccaggacggtgtgtgggctggacaccactggggtgagtcctgaggacggacaggcgaggggcgtccaggctcggccacagccctcacggagcctcagctcaaagggcttttcaggtcagatgctaaaaccgtgagaaaacagctgctttccagcaaagagcctgacgcatccgcttggggaatcctctgaccagtcctctccagaccgtctgggttgtgacagacaagggcagaccaaggagccatcccagatggaaagggtgtggggaaacctgtgaaatgagaatacagctgtagggaggttatgtacaatgttcatgatggggaagcagcagtcatgggagcctggaggctgtggagagacctacagtggggcggacgtgtgtgacagcaagggcaagaggggcggttggcacccatggatgctgcgcaaacactcggaccctgattttcgccagacacctggaacggtgccccgtgcccctcccatggcccctttctccccaccagtggatctgtctacccgtttcttctccccatgcaggaaaagtacccagatgccgtgtacctctcggaggggccctcctcctgctccatggggatccgcagcgccagccggccagggtttgaattagtcattgtttggaggatacaaatagatgaagatgggaaggtttttccaaagctggatcttctcaccaaagtcccacagcgagccctggagctggacaagaacagagccatagaaactgctcctctcagcttccgaaccctggtaggactgcttggaatcgaagctgctctggaaagcctgataaaatcgctttgtgcagaggagaacaactagttccaaaacagtgaacgtggaggatgaagatgctgcgtggaggaacatgcaattttattcaatataaacatttgctattttctgcttagaaaccacaccctgaagacgtgctgtctatgcagttatggcacattatatggaaactctcatgacatgaaaaataaatacaactagttaagtataaaatgccaaataaaagtgacacgtacaatgtggtttataaaaataagcttaacatctgagaaaatgtaccaagtggttgtgtgtcctcagatgtgtggggaggatccatcccccacccactgcagcctcacaccgagtccaccttggacatggtggccacattactcagctgggagaagccacccttatcctggttcctgcctcctgggggctctggagacggatgcctatggcgcctcatctttaaactgtccttagtagcccaggggagccacaccctcactccctgcctccccccggtccgcatggtggcaccgtgaggcagtctcagcaagtcctcatgctgttcttggtcttccacaagaaagtgaagctgtcagcttaataacaagaatggcctaagacagcaaagacagcactgttcctgggctgggacgcaaggaatgaggtcctttatgaaagaaagacccccctgcatagcctaagtgctatatcgatcgtcccggatgtgccttaagaaccgtgacctcatcagtcgcccatttagcattgttaagatctgtgaacgcgtgttgtctcaaaccagtcagggccgtcatgactacgcagcagcagcagtttccaagacgggccagaaacgcatccacagcagtggcacccgcggctcaggggctcctcacagcccgggctggtgggagccaagaccagacagagtgggggtctccatctgttttctcttctccctcaaatacaggctgttttcatcgtgtctagtccagccctgtctgggccctgtgctaggcaataactcttgcagccctgaaggacctagggagcccagcccaccttcccacggactggggttccctcacatgtgcacttgaacccaggacccagcatcctccacacaccgtgacaatgggcaaaatcatcccaaaccaggctgccccagccccagcccagcaacagtgaactcccttgggtcaagacagtactcaacggccactacctccacgcttcccagagcctgcggcttgtccgtgagctccgtgcacttcaccaaagcccccatcccagcacacaggacccgtgtgtatgagacggtgtcattggaagtgagaagaaaacagtaaaagtgtccagttagataagtatctttttgcacctctgagagtagaattagaagtaaatatgacagaattgaacaataaattctagaagagttgccttgattcaaacaagtataattctcaagttatcacaaaatttcccacaaaaatttacaatcagcaaaatagtttccttatttctcatgtatcattttcatataattccatggtttcactaatattatatgttacaataagcctccattagtccctcaaaacgatgatataaataagtctgtacaacctagcatagaataaaaaactgaaaccaagattcccaacgtttttcatagcagccgggcacactttggtgaccccaacgagaaccctctcggcagcagccaggagctgttcaccttccagaagcagggcctgtggcagcctaacagggagaggccacggggcccaaaaacgcaacacgtctcaaggcaaacccgagggaggaacttggtctgggaggaagagagaactcgctcctcaaccaccccagacactggagtgtcaggaaagcactgagctgttggggcacactgcccagcccggccacagcagctcagccagtcacagctccacctccaacttctacagcagcaatttttagtgggaaagaacagctcatctccccctcatgtgaaagattaaattgtaaagcaaaaaaaaaaa

SEQ ID NO: 5395 - DNA, 2570 bp, Homo sapiens
  source 1..2570: mol_type = unassigned DNA
tttgctgtctcctgccctggctctcttcctgtccatacaggcccattattcatgcttgcatttgctgtttgtttattaaaattccccagctcttcgttttaaaaatgccattgggatatatttccagtagagtgggtctctttcaactctgggtttccctggttcttcccaagtctgtacaaacaagaaaagttgggtcaagggaggatggaggctcccagctggtctgttctgcaaaggtctggagatgaggaaaagtacccagatgccgtgtacctctcggaggggccctcctcctgctccatggggatccgcagcgccagccggccagggtttgaattagtcattgtttggaggatacaaatagatgaagatgggaaggtttttccaaagctggatcttctcaccaaagtcccacagcgagccctggagctggacaagaacagagccatagaaactgctcctctcagcttccgaaccctggtaggactgcttggaatcgaagctgctctggaaagcctgataaaatcgctttgtgcagaggagaacaactagttccaaaacagtgaacgtggaggatgaagatgctgcgtggaggaacatgcaattttattcaatataaacatttgctattttctgcttagaaaccacaccctgaagacgtgctgtctatgcagttatggcacattatatggaaactctcatgacatgaaaaataaatacaactagttaagtataaaatgccaaataaaagtgacacgtacaatgtggtttataaaaataagcttaacatctgagaaaatgtaccaagtggttgtgtgtcctcagatgtgtggggaggatccatcccccacccactgcagcctcacaccgagtccaccttggacatggtggccacattactcagctgggagaagccacccttatcctggttcctgcctcctgggggctctggagacggatgcctatggcgcctcatctttaaactgtccttagtagcccaggggagccacaccctcactccctgcctccccccggtccgcatggtggcaccgtgaggcagtctcagcaagtcctcatgctgttcttggtcttccacaagaaagtgaagctgtcagcttaataacaagaatggcctaagacagcaaagacagcactgttcctgggctgggacgcaaggaatgaggtcctttatgaaagaaagacccccctgcatagcctaagtgctatatcgatcgtcccggatgtgccttaagaaccgtgacctcatcagtcgcccatttagcattgttaagatctgtgaacgcgtgttgtctcaaaccagtcagggccgtcatgactacgcagcagcagcagtttccaagacgggccagaaacgcatccacagcagtggcacccgcggctcaggggctcctcacagcccgggctggtgggagccaagaccagacagagtgggggtctccatctgttttctcttctccctcaaatacaggctgttttcatcgtgtctagtccagccctgtctgggccctgtgctaggcaataactcttgcagccctgaaggacctagggagcccagcccaccttcccacggactggggttccctcacatgtgcacttgaacccaggacccagcatcctccacacaccgtgacaatgggcaaaatcatcccaaaccaggctgccccagccccagcccagcaacagtgaactcccttgggtcaagacagtactcaacggccactacctccacgcttcccagagcctgcggcttgtccgtgagctccgtgcacttcaccaaagcccccatcccagcacacaggacccgtgtgtatgagacggtgtcattggaagtgagaagaaaacagtaaaagtgtccagttagataagtatctttttgcacctctgagagtagaattagaagtaaatatgacagaattgaacaataaattctagaagagttgccttgattcaaacaagtataattctcaagttatcacaaaatttcccacaaaaatttacaatcagcaaaatagtttccttatttctcatgtatcattttcatataattccatggtttcactaatattatatgttacaataagcctccattagtccctcaaaacgatgatataaataagtctgtacaacctagcatagaataaaaaactgaaaccaagattcccaacgtttttcatagcagccgggcacactttggtgaccccaacgagaaccctctcggcagcagccaggagctgttcaccttccagaagcagggcctgtggcagcctaacagggagaggccacggggcccaaaaacgcaacacgtctcaaggcaaacccgagggaggaacttggtctgggaggaagagagaactcgctcctcaaccaccccagacactggagtgtcaggaaagcactgagctgttggggcacactgcccagcccggccacagcagctcagccagtcacagctccacctccaacttctacagcagcaatttttagtgggaaagaacagctcatctccccctcatgtgaaagattaaattgtaaagcaaaaaaaaaaa

SEQ ID NO: 5396 - DNA, 8766 bp, Homo sapiens
  source 1..8766: mol_type = unassigned DNA
gcctccgtcacctccccctcaacgactgcaaaagagcctaaaccaaaatcccctagtttctattgaacactatcgctgtgtgtaccaattcctggactaggtcggcgtaagagaggaagtaggtgaaaaaaataaagaggcgctcccctccacgtgatcccagccctgcctctttagtgaggcacgcggccgggcggctccaaggctgccggctagggtgagcagcggagcgcttgggcttggagtagcaaagaacgcgctctccagagaaagtatagccactgcttagacagccagggaaacgtgtgcggggaagtggaggactcaggctctcgtgcgagagcggagttggacgtgcagggccgctggggtcacgcggagctctcccgcctcccctccgcgtgagctctgggatggtccgcgccgggagcgcgcgcgaggcttgaagcgcgggtgaagcgcgcaggtcggagtgacagctgcgctgccggcccggctgcggtcagcaacgcgccatggacgcagagctggcagaggtgcgcgccttgcaagctgagatcgcggccctgcggcgagcgtgtgaggacccaccggcgccctgggaagagaagtcccgagtccaaaaatcttttcaagccatacaccaattcaatttggaaggatggaagtcttcaaaagatctgaaaaatcagcttggacatttagaatcagaactttcatttctaagtacgcttactggcatcaatataagaaatcactccaagcagacagaagacctaacaagcactgagatgacagaaaagagtattagaaaagttctacagagacacagattatcaggaaattgccacatggttacatttcaacttgaatttcagattctggaaattcagaataaggagagattatcttctgctgttactgacctcaacataataatggagcccacagaatgctcagaattaagtgaatttgtgtctagagcagaagagagaaaagatctgttcatgtttttccgaagcctgcatttttttgtggagtggtttgaatatcgtaagcgcacgtttaaacatctcaaggaaaagtacccagatgccgtgtacctctcggaggggccctcctcctgctccatggggatccgcagcgccagccggccagggtttgaattagtcattgtttggaggatacaaatagatgaagatgggaaggtttttccaaagctggatcttctcaccaaagtcccacagcgagccctggagctggacaagaacagagccatagaaactgctcctctcagcttccgaaccctggtaggactgcttggaatcgaagctgctctggaaagcctgataaaatcgctttgtgcagaggagaacaactagttccaaaacagtgaacgtggaggatgaagatgctgcgtggaggaacatgcaattttattcaatataaacatttgctattttctgcttagaaaccacaccctgaagacgtgctgtctatgcagttatggcacattatatggaaactctcatgacatgaaaaataaatacaactagttaagtataaaatgccaaataaaagtgacacgtacaatgtggtttataaaaataagcttaacatctgagaaaatgtaccaagtggttgtgtgtcctcagatgtgtggggaggatccatcccccacccactgcagcctcacaccgagtccaccttggacatggtggccacattactcagctgggagaagccacccttatcctggttcctgcctcctgggggctctggagacggatgcctatggcgcctcatctttaaactgtccttagtagcccaggggagccacaccctcactccctgcctccccccggtccgcatggtggcaccgtgaggcagtctcagcaagtcctcatgctgttcttggtcttccacaagaaagtgaagctgtcagcttaataacaagaatggcctaagacagcaaagacagcactgttcctgggctgggacgcaaggaatgaggtcctttatgaaagaaagacccccctgcatagcctaagtgctatatcgatcgtcccggatgtgccttaagaaccgtgacctcatcagtcgcccatttagcattgttaagatctgtgaacgcgtgttgtctcaaaccagtcagggccgtcatgactacgcagcagcagcagtttccaagacgggccagaaacgcatccacagcagtggcacccgcggctcaggggctcctcacagcccgggctggtgggagccaagaccagacagagtgggggtctccatctgttttctcttctccctcaaatacaggctgttttcatcgtgtctagtccagccctgtctgggccctgtgctaggcaataactcttgcagccctgaaggacctagggagcccagcccaccttcccacggactggggttccctcacatgtgcacttgaacccaggacccagcatcctccacacaccgtgacaatgggcaaaatcatcccaaaccaggctgccccagccccagcccagcaacagtgaactcccttgggtcaagacagtactcaacggccactacctccacgcttcccagagcctgcggcttgtccgtgagctccgtgcacttcaccaaagcccccatcccagcacacaggacccgtgtgtatgagacggtgtcattggaagtgagaagaaaacagtaaaagtgtccagttagataagtatctttttgcacctctgagagtagaattagaagtaaatatgacagaattgaacaataaattctagaagagttgccttgattcaaacaagtataattctcaagttatcacaaaatttcccacaaaaatttacaatcagcaaaatagtttccttatttctcatgtatcattttcatataattccatggtttcactaatattatatgttacaataagcctccattagtccctcaaaacgatgatataaataagtctgtacaacctagcatagaataaaaaactgaaaccaagattcccaacgtttttcatagcagccgggcacactttggtgaccccaacgagaaccctctcggcagcagccaggagctgttcaccttccagaagcagggcctgtggcagcctaacagggagaggccacggggcccaaaaacgcaacacgtctcaaggcaaacccgagggaggaacttggtctgggaggaagagagaactcgctcctcaaccaccccagacactggagtgtcaggaaagcactgagctgttggggcacactgcccagcccggccacagcagctcagccagtcacagctccacctccaacttctacagcagcaatttttagtgggaaagaacagctcatctccccctcatgtgaaagattaaattgtaaagcaaaaaaaaaaaggtcaatgctcgcatgagtggtgtccatcctgacctgagccttgcgctccctgctgccctgtgtggaactgtgggcttcagcacctccacagggaccctgagtctacactgctcagaatcggcatctgcgcgaccacgaggtcacgctgtgcagcagggaaccacctaaaaacctgtgttgatatgtggcttgcactgaaaaagtgaccatgtaactcagctgggggaagttccagtagtatccatgttttcttaaaagtccaaactgtaaaatgtatgtgacaattcaagttttctatgttaggagtctggtggtagcagatccaaaccttgggtcttagaataaggcttttcgcattagagaatcagacatgagccctggttgggaaagaagaactatccagaacgtcttcccagggcttaacggacacttccattttaagagtgtgagcagcttcctgggacacagcactcacttcctacattccttgtccaggaagttgtttctagtgctcttcaattccatgtctccaagaggcaatcccacctcaaaaggggttaaaagcaaaaacattcacaaccaaaggtcacccaacacaacagaaaatatctctatcattcagccttcacattatgttcaagtttcaaagacactgcagggaaagagttagaccttgtggagaactaatgtgcaatcttcgctttccttgaaccgagtcgacatcacggcgttgtctttggcacgtacagtctttgaataatagttgacgatcttgccgtccagtttatactgatggggaatgctctcgtagggcttgaggtcaaggtccagcacagacacggaaaaggcaaacctggacctcgatgaagggacgacaggcctttgatcagagctgcaagtaaaaagtaccatttcaggatacacaagccccccattcatttccctccctcccgttctctctccctttcttctttcaactagtatgtttttatgttttttctttgacttctgcaaagttagataaatcaatctcttttaaaagagaagtgaatggcctcacaccccagctcacaaagagcactcgttctgtgcacctgtgatctgtgcgtgtgacagctgtctgtgccggctgtgtgcaccagcgtgcaaagcttcctcaggccagtgcaccccaccataccaggcgagagagggttaaaggactgaaagatggaaaagtaattatgtggaacatgtgagcgatgttcccccagcccagtggtataaacgaacgctgaaaaatcactttatcatgagccaagtattacaaaacccaacaaaaagtaaaaagtagatctggccattccagcgccaaatggatggaatgtcgacaagccttcttctttgcctctcctgtctgctgagaaacgcaagctcctttggttcacatttgaagagatctggtttctcattttattctcaaattttatcttcagtcctttgtattttgcttctcagggcttagttttgtggttttaacctcagaagtcgtgtgcttataacaagatgtgattaattatttgccctgaaaaacacatttaggattactccgagtcctgagctctgactgctgtgtgtcccgcttttcgtctccgggcactcagcgcacagcactcaagacactggctaaacaagtgacctaagctcagttcagtccaagagaagtatcctgggttctggtgtcccaatgtttactacgctttgagatttagaaatcaacaagccaaaccccaacttcaaaagctcctgccgaggagaggaaatactgatcagcacgtccctgctctgacgctgctcaccatggccttggcgctcactgctgccctgccccagaatcctgtttgtagaaaaaacaaatccctgactaagctgctggggtaagtaactattctcatctgaagagtaaacagcaaataactcatttacaaattaaggtcatgagtctcgctccagaagctggagtgtgcctgcagctcatcccaaggggccacattttattgggagaacctcagaagcccaaggtactgctcagttctgaggcctgagacccaagctgggtgcacctgggctggaacagtcacatccccagcccatgactagggttacgtattttaaaggacaccccaatttctcagaagcagcacctgacaagaccatgggtgtaaagacaggaaggatgttccaggcagctcccggggagggtctgactacctgggtcaaccacaagctagctccatgggaaccaatggcagtgaccagcgggcaccagctcctgacacagaaatgctcttcttccccctcagtaccccggaggccaagactgggcaagaggccccagggacacacctgtcccttgtgccacaagtgtgccctctagcagccttggagaatgaggctcaggtggccttctggctgcaggggggcagcccttgcctggaaggccgttctccaggacactgacccgctgggggttaccgggggaccagcagcctccaagggtgctggggatcggggtggagaagccaaggccgcacactgtgtttcaaatgggaggtcgagaggagcatcagggtttaggccgggaagctgtggcagctctctccacagttccaaattcccaaagggacaaagctctgcagcgacaggaaggcagatccaacttgagacattttcctttatgacagggcagaaacagtagtgcagagctggagaagcctttattttagggggtgtaagaagtttaaatgtggtcaatctatctgtgagctgcaaattagtctagggatctaaatttagtctcaggtctaccaggtatctcaagacgccaagatgactcatgataaatcccagccttagtttgtccctaggcctctagagcaccacagttactggaacttcacaggtgcggccactgcgcacaccttcctggaagcaggcccagccccacacgccatgttctcggaggagaagccttctctgagatcctctccttttgttgagaaaggcctggctagagtgctttgtgcaggatggttccagtgcctacaccctaggtctgagaagccacatggctcagtgccttcaggacatgccctcccctcccctcctagtgtcgtttctgctgagcagctggtcgtaaggacccgggccttcagctttccccgcatgctggctttccaatttgacatcactgaccaggcactaagagattcccaggtgctagacgaggtgagtaacatgtctgtccttcagcggcctttcacagcccacctaagggcaccctgcatccaagcacatttccattgcccagctgcatccttggtcggggggctgctgaacagtggtatcttcgtgggttttctctcatcgaacaccaccagcttaatccagttaaggaattcctcataacttagccctgtaggtatttccttaggggataacaggagttttcaactaaatagaacaaccttttttctacttcagttagccctataatgttcctcagtatttcatattggaaagtaaacaattctgtgcctgccagggaacaggaatcctgggaactgtttagttcaaaagcaccgggaaagtgagtggctggcagccagcaaccaaggtcatcttgacccaggaacacatgttagaagaatgtggaacattccgcaaatactgggtgcagggtttagcacccctgaagatcggtgatggagatgctgtctaacgactatgagattatcagtttcatcccgaattcccagaaacagaggggactggacaaaactagtgacattagggagaggggcggcacataggctggttattcagaagaggaagcagaatgaatgcgcgcctcacaggctttcaaatgactgtggtggtaaaaaggcaggtgcgccatgctgccactgtgggagaccgaggaacaagggccacaggtacccacacatctcaggggctggctttctttgagggaatgcaatgggcagctcactgtccacattgtttctgagctcttgggagtattttcttagaaaacagtaactttcaatgtactaacaatccttttaagttattctccataaatctgtcttttgactgaattacaagcttctagagggcgagagttagtaagccccatgatgtcacataggccaaggaagttatgtcactccgccatggagtctctaaatatggggaaaccaactatcctattaacaattcaccaactgtccataaaaccccgttagacccaggctgcatgccttgcagtgggggcctcacctggcatcctgcagacagggagacagtgcaatcatgatggagcagtccttggcagtcatggcgacgcggtactgctgcacctgcaggggcgggaaagatcagctccaggtcacacaggaagcctctgcccccccacacaaccttccttcccagtagccaagtgtgggaactgcttcctgcctcagaacctgagggtgggattaggagcgagggccacggtgagcacgggcgtcaggaggtcgccctgtgagagcacctgggccagccctcagtgccacggggctgctcagaggccagcaccgccccctgacctctcacggcaagcagtgtgggaccccgactccagaccctgagacggatgatctgtcttcagcaaggtcaccacagtcggcctttggaaggaaaagcagtaagccacctgagccccgcatgttggccacactcagagtatcaagtgagtatcactcgacacctgcaaggagagcgcagggggtgttcagcaaggcatcgcttagaacgacattccctccggaacatcatacagccaccagagacaacggcagacggccacccttctacaggctgtgcatgtgttaacttgctccaccctcacagcagcccaacagggcagcacggccggcgtcccactttacagacaagcaacagacacagacatcacttgtctgtcatgccctgcttgtcaatggcaaggcagggactcaaacccggtacgctggctctgacatttacactcttcaacacatgctccaagctatgtgggtctgtccatactgaccagggacagctcaacacacaccacactgtcagagtcgacatacgtaaagctgtacatgtgcacatgtgtgtgacgcgggcagggagaaaggtgaaggacaggcaccacaatgctcacaactgtctcctctacagagcagaatgtgaggcactctctcctcttccttctttggactttcatatatggtttgcattgttttagatggcatagctctcgctttcacaaaaataaacagttgtaaaagaaaaggaa

SEQ ID NO: 5397 - DNA, 744 bp, Homo sapiens
  source 1..744: mol_type = unassigned DNA
aagcgcgcaggtcggagtgacagctgcgctgccggcccggctgcggtcagcaacgcgccatggacgcagagctggcagaggtgcgcgccttgcaagctgagatcgcggccctgcggcgagcgtgtgaggacccaccggcgccctgggaagagaagtcccgagtccagtattagaaaagttctacagagacacagattatcaggaaattgccacatggttacatttcaacttgaatttcagattctggaaattcagaataaggagagattatcttctgctgttactgacctcaacataataatggagcccacagaatgctcagaattaagtgaatttgtgtctagagcagaagagagaaaagatctgttcatgtttttccgaagcctgcatttttttgtggagtggtttgaatatcgtaagcgcacgtttaaacatctcaaggaaaagtacccagatgccgtgtacctctcggaggggccctcctcctgctccatggggatccgcagcgccagccggccagggtttgaattagtcattgtttggaggatacaaatagatgaagatgggaaggtttttccaaagctggatcttctcaccaaagtcccacagcgagccctggagctggacaagaacagagccatagaaactgctcctctcagcttccgaaccctggtaggactgcttggaatcgaagctgctctggaaagcctgataaaatcgctttgtgcagaggagaacaactag

SEQ ID NO: 5398 - DNA, 1728 bp, Homo sapiens
  source 1..1728: mol_type = unassigned DNA
ctctgtttacgaatgtttgggcgcgaattactctaagcgcggctctcagaagggtgcaagaagaatcagtgcactgtgtttagatcaagatgtctggtaaagcaaatgcttccaagaaaaacgctcaacagttaaaaagaaatccaaagagaaaaaaggataatgaggaagttgtgttgtcagagaataaggttagaaacacagtgaaaaaaaataaaaatcatctgaaagatctgtcttctgaaggacaaacaaagcacactaacctaaaacacggaaagacagcagccagcaagagaaaaacctggcaacctctgtcaaagagtaccagagaccatttgcaaactatgatggaatcagtaataatgacaattttgagtaacagtattaaagaaaaagaagaaatacaataccatctcaacttcctgaagaaaagattgctacaacagtgtgaaactctgaaagtccctcccaaaaagatggaagatttaactaatgtatcaagtctactgaatatggaaagggcacgagacaaagctaatgaagaaggtctggcattactacaggaagaaatagataaaatggtagagaccacagagttaatgactgggaatattcagagcctaaagaacaaaattcagattctggcaagtgaggtggaagaagaagaggagagagtaaaacagatgcatcaaataaatagtagtggagtactctctcttccggaactttctcagaaaactctcaaagcacccacacttcagaaagaaattttggcgctaattccaaaccagaatgctcttctaaaggacttggatattcttcataattcatcacagatgaagagcatgtcaaccttcattgaagaagcctataagaaactggatgcatcttaaagagtgttttttttttagattgttccatattaatttaatgttcgtgaatttgtaaaactgttaacctatgattatatgtacagaggctaaggcttctgcaggatttattatctcctgatatgcactttaaaattagtctttgtagttctatcattagcatctaatgtagttctgaagactgtttttagcagttgccaaatctaggaaactaacatttatattgctgtatctataagtatttgcctaaaaccataaaataggaattgccttaaggatctagtagtttataatgcctgaatggaactcatttattggttaacagctcatatcaggagctgtgataagtaagtgtttacatacactgtctagtgcataaaaaccttagtgtttgctatcattcattctgtagccaatggcttacagtttctgtctggtcatctggaacttgaaaaatcctcaaatgccttcactcttttacctaactccctagtctttttgggaagtagttaagatatgcctgctatctttaactttggaggtagtatcaaaattttacttctttggttgtttagtgaattaatgttgaatattttctactgtcatcaaaacatattcccaaaaagtattaaaaaggaaccttagcacatttattttattaaaacaagaaaacccaaaatatataaaccttttcttattatgataataagcttatatatgtgaataagttataacctagtgtataaaaaattatttctaacaaactacagtatactgtcttgggtttttttttttttttttagtctgtaaaataaaatgactgcaattacttttt

SEQ ID NO: 5399 - DNA, 1701 bp, Homo sapiens
  source 1..1701: mol_type = unassigned DNA
ctcagaagggtgcaagaagaatcagtgttttttttttttcgaagcactgtgtttagatcaagatgtctggtaaagcaaatgcttccaagaaaaacgctcaacagttaaaaagaaatccaaagagaaaaaaggataatgaggaagttgtgttgtcagagaataaggttagaaacacagtgaaaaaaaataaaaatcatctgaaagatctgtcttctgaaggacaaacaaagcacactaacctaaaacacggaaagacagcagccagcaagagaaaaacctggcaacctctgtcaaagagtaccagagaccatttgcaaactatgatggaatcagtaataatgacaattttgagtaacagtattaaagaaaaagaagaaatacaataccatctcaacttcctgaagaaaagattgctacaacagtgtgaaactctgaaagtccctcccaaaaagatggaagatttaactaatgtatcaagtctactgaatatggaaagggcacgagacaaagctaatgaagaaggtctggcattactacaggaagaaatagataaaatggtagagaccacagagttaatgactgggaatattcagagcctaaagaacaaaattcagattctggcaagtgaggtggaagaagaagaggagagagtaaaacagatgcatcaaataaatagtagtggagtactctctcttccggaactttctcagaaaactctcaaagcacccacacttcagaaagaaattttggcgctaattccaaaccagaatgctcttctaaaggacttggatattcttcataattcatcacagatgaagagcatgtcaaccttcattgaagaagcctataagaaactggatgcatcttaaagagtgttttttttttagattgttccatattaatttaatgttcgtgaatttgtaaaactgttaacctatgattatatgtacagaggctaaggcttctgcaggatttattatctcctgatatgcactttaaaattagtctttgtagttctatcattagcatctaatgtagttctgaagactgtttttagcagttgccaaatctaggaaactaacatttatattgctgtatctataagtatttgcctaaaaccataaaataggaattgccttaaggatctagtagtttataatgcctgaatggaactcatttattggttaacagctcatatcaggagctgtgataagtaagtgtttacatacactgtctagtgcataaaaaccttagtgtttgctatcattcattctgtagccaatggcttacagtttctgtctggtcatctggaacttgaaaaatcctcaaatgccttcactcttttacctaactccctagtctttttgggaagtagttaagatatgcctgctatctttaactttggaggtagtatcaaaattttacttctttggttgtttagtgaattaatgttgaatattttctactgtcatcaaaacatattcccaaaaagtattaaaaaggaaccttagcacatttattttattaaaacaagaaaacccaaaatatataaaccttttcttattatgataataagcttatatatgtgaataagttataacctagtgtataaaaaattatttctaacaaactacagtatactgtcttgggtttttttttttttttttagtctgtaaaataaaatgactgcaattacttttt

SEQ ID NO: 5400 - DNA, 1829 bp, Homo sapiens
  source 1..1829: mol_type = unassigned DNA
gctggctgggcggttaggagggcccggggccgagacgatggctgaccacaaccctgacagcgactccacgccgcgcacgctgctgcgacgcgtgctggatacagcggacccgcgcaccccgcggcgaccccggagtgctcgggctggagcccggagagccctgcttgaaacggcttcccccaggaagttgagtggccaaacaaggacgatagccagagggcgttcccatggagccaggtctgttggcagatcggcccatattcaggccagtgggcacttggaggaacagacacctcggacgctgctgaagaacatcctactaactgccccagaatcttccatcctgatgcctgagtcggtagtgaagccagtgccagcaccgcaggcggtccaaccctccagacaagagagcagttgcggcagcctggagctgcaacttcctgagctcgagccccccacaaccctggctccaggtctgctggcccctggcaggaggaaacagaggctgagactgtcagtgtttcagcagggagtggaccaggggctgtctctctcccaagagcctcaagggaatgctgatgcctcttccctcaccagatccctcaacctgacctttgccacacctcttcagccacagtcagtgcagaggcctggcttggcccgcagacctccagcccgccgagctgtagacgtgggtgcctttttgcgggatctgcgagatacttccctggctcctccaaacattgtgttggaggacacccagccgttctctcagcccatggttggctcccccaacgtgtatcactccctgccctgcacgcctcacactggggctgaagacgctgagcaggctgccggtcgcaagacacagagcagtgggcctgggctgcagaagaatagccctgggaaaccagcccagtttctggcaggagaggcagaggaggtcaatgcctttgctctgggcttcctgagcaccagcagtggtgtctctggagaagatgaagtagagcccttacacgatggagttgaagaggcagagaaaaagatggaagaagaaggtgtgagtgtgagtgaaatggaggcaacaggagcacaaggacccagcagggtagaagaggctgagggacacacagaggtgacagaagcagagggatcccaggggactgctgaggctgacgggccaggagcatcttcaggggatgaggatgcctctggcagggcagcaagtccagagtcggcctccagcacccctgagtctctccaggccaggcgacatcatcagtttcttgagccagccccagcgcctggtgctgcagtcttatcttcagagcctgcagagcctctgttggtcaggcatccccctaggccccggaccaccggccccaggccccggcaagatccccacaaggctggactgagccactatgtgaaactctttagcttctatgccaagatgcccatggagaggaaggctcttgagatggtggagaagtgcctagataaatatttccagcatctttgtgatgatctggaggtatttgctgctcatgctggccgcaagactgtgaagccagaggacctggagctgctgatgcggcggcagggcctggtcactgaccaagtctcactgcacgtgctagtggagcggcacctgcccctggagtaccggcagctgctcatcccctgtgcatacagtggcaactctgtcttccctgcccagtagtggccaggcttcaacactttccctgtccccacctggggactcttgcccccacatatttctccaggtctcctccccacccccccagcatcaataaagtgtcataaac

SEQ ID NO: 5401 - DNA, 1990 bp, Homo sapiens
  source 1..1990: mol_type = unassigned DNA
agctggctgggcggttaggagggcccggggccgagacgatggctgaccacaaccctgacagcgactccacgccgcgcacgctgctgcgacgcgtgctggatacagcggacccgcgcaccccgcggcgaccccggagtgctcgggctggagcccggagagccctgcttgaaacggcttcccccaggaagttgagtggccaaacaaggacgatagccagagggcgttcccatggagccaggtctgttggcagatcggcccatattcaggccagtgggcacttggaggaacagacacctcggacgctgctgaagaacatcctactaactgccccagaatcttccatcctgatgcctgagtcggtagtgaagccagtgccagcaccgcaggcggtccaaccctccagacaagagagcagttgcggcagcctggagctgcaacttcctgagctcgagccccccacaaccctggctccagatccctcaacctgacctttgccacacctcttcagccacagtcagtgcagaggcctggcttggcccgcagacctccagcccgccgagctgtagacgtgggtgcctttttgcgggatctgcgagatacttccctggctcctccaaacattgtgttggaggacacccagccgttctctcagcccatggttggctcccccaacgtgtatcactccctgccctgcacgcctcacactggggctgaagacgctgagcaggctgccggtcgcaagacacagagcagtgggcctgggctgcagaagaatagtgagtgtgtggcactggtggcctggagccaaatttagcttgggtgagagttgacaatggtagttttccttcctcaagcccctctgtgcccctagagcaccctggctgtggctgcctccttcatccaagagcagagtccatgttgggccaggagacttcagatccatgtcctggtgctgcctctggctttgtctttcctcagtgggcaggactgggtctgctggtccatctttacccttctctgagctatgcagccttggcctgctgcgtctccggcctgtattctctccccttcactcaggccctgggaaaccagcccagtttctggcaggagaggcagaggaggtcaatgcctttgctctgggcttcctgagcaccagcagtggtgtctctggagaagatgaagtagagcccttacacgatggagttgaagaggcagagaaaaagatggaagaagaaggtgtgagtgtgagtgaaatggaggcaacaggagcacaaggacccagcagggtagaagaggctgagggacacacagaggtgacagaagcagagggatcccaggggactgctgaggctgacgggccaggagcatcttcaggggatgaggatgcctctggcagggcagcaagtccagagtcggcctccagcacccctgagtctctccaggccaggcgacatcatcagtttcttgagccagccccagcgcctggtgctgcagtcttatcttcagagcctgcagagcctctgttggtcaggcatccccctaggccccggaccaccggccccaggccccggcaagatccccacaaggctggactgagccactatgtgaaactctttagcttctatgccaagatgcccatggagaggaaggctcttgagatggtggagaagtgcatctttgtgatgatctggaggtatttgctgctcatgctggccgcaagactgtgaagccagaggacctggagctgctgatgcggcggcagggcctggtcactgaccaagtctcactgcacgtgctagtggagcggcacctgcccctggagtaccggcagctgctcatcccctgtgcatacagtggcaactctgtcttccctgcccagtagtggccaggcttcaacactttccctgtccccacctggggactcttgcccccacatatttctccaggtctcctccccacccccccagcatcaataaagtgtcataaacag

SEQ ID NO: 5402 - DNA, 2202 bp, Homo sapiens
  source 1..2202: mol_type = unassigned DNA
cttgtctcaggtatctgataatttacacttgatctcagtgcagattctgggaaagtgaactccacggaagactcagaaaccaagttctaattcagttgccatgaaaacttaaggtgagaggattgtcaaccagtgaaaaatacggaggaaaacactaacagaatatgatgaagaagccaagacttgggctgcttgcattacattaaccgaggtttacccgcagcgaggctgcctccaaagcatccggagtttgcaaccatcactgtccaccccgcgagctgcgatagtgcgagaactacaattcccgtggggctgtgcgggagcatcgcgagagttacattaactgtggcggcgggaaggcggagcctgcagctggctgggcggttaggagggcccggggccgagacgatggctgaccacaaccctgacagcgactccacgccgcgcacgctgctgcgacgcgtgctggatacagcggacccgcgcaccccgcggcgaccccggagtgctcgggctggagcccggagagccctgcttgaaacggcttcccccaggaagttgagtggccaaacaaggacgatagccagagggcgttcccatggagccaggtctgttggcagatcggcccatattcaggccagtgggcacttggaggaacagacacctcggacgctgctgaagaacatcctactaactgccccagaatcttccatcctgatgcctgagtcggtagtgaagccagtgccagcaccgcaggcggtccaaccctccagacaagagagcagttgcggcagcctggagctgcaacttcctgagctcgagccccccacaaccctggctccaggtctgctggcccctggcaggaggaaacagaggctgagactgtcagtgtttcagcagggagtggaccaggggctgtctctctcccaagagcctcaagggaatgctgatgcctcttccctcaccagatccctcaacctgacctttgccacacctcttcagccacagtcagtgcagaggcctggcttggcccgcagacctccagcccgccgagctgtagacgtgggtgcctttttgcgggatctgcgagatacttccctggctcctccaaacattgtgttggaggacacccagccgttctctcagcccatggttggctcccccaacgtgtatcactccctgccctgcacgcctcacactggggctgaagacgctgagcaggctgccggtcgcaagacacagagcagtgggcctgggctgcagaagaatagccctgggaaaccagcccagtttctggcaggagaggcagaggaggtcaatgcctttgctctgggcttcctgagcaccagcagtggtgtctctggagaagatgaagtagagcccttacacgatggagttgaagaggcagagaaaaagatggaagaagaaggtgtgagtgtgagtgaaatggaggcaacaggagcacaaggacccagcagggtagaagaggctgagggacacacagaggtgacagaagcagagggatcccaggggactgctgaggctgacgggccaggagcatcttcaggggatgaggatgcctctggcagggcagcaagtccagagtcggcctccagcacccctgagtctctccaggccaggcgacatcatcagtttcttgagccagccccagcgcctggtgctgcagtcttatcttcagagcctgcagagcctctgttggtcaggcatccccctaggccccggaccaccggccccaggccccggcaagatccccacaaggctggactgagccactatgtgaaactctttagcttctatgccaagatgcccatggagaggaaggctcttgagatggtggagaagtgcctagataaatatttccagcatctttgtgatgatctggaggtatttgctgctcatgctggccgcaagactgtgaagccagaggacctggagctgctgatgcggcggcagggcctggtcactgaccaagtctcactgcacgtgctagtggagcggcacctgcccctggagtaccggcagctgctcatcccctgtgcatacagtggcaactctgtcttccctgcccagtagtggccaggcttcaacactttccctgtccccacctggggactcttgcccccacatatttctccaggtctcctccccacccccccagcatcaataaagtgtcataaacag

SEQ ID NO: 5403 - DNA, 952 bp, Homo sapiens
  source 1..952: mol_type = unassigned DNA
ggttaggagggcccggggccgagacgatggctgaccacaaccctgacagcgactccacgccgcgcacgctgctgcgacgcgtgctggatacagcggacccgcgcaccccgcggcgaccccggagtgctcgggctggagcccggagagccctgcttgaaacggcttcccccaggaagttgagtggccaaacaaggacgatagccagagggcgttcccatggagccaggccccagaatcttccatcctgatgcctgagtcggtagtgaagccagtgccagcaccgcaggcggtccaaccctccagacaagagagcagttgcggcagcctggagctgcaacttcctgagctcgagccccccacaaccctggctccaggtctgctggcccctggcaggaggaaacagaggctgagactgtcagtgtttcagcagggagtggaccaggggctgtctctctcccaagagcctcaagggaatgctgatgcctcttccctcaccagatccctcaacctgacctttgccacacctcttcagccacagtcagtgcagaggcctggcttggcccgcagacctccagcccgccgagctgtagacgtgggtgcctttttgcgggatctgcgagatacttccctggctcctccaagtaaggttgggttttcccctgctggcctttggggaaagctctccccgctatgacagataggaggtgatgctgagtcagggttgcacccctctcggtggggtcaaggacagcgagcaactctggtcagtgggtctacaaggaatttctgcttgctttctacagggggcctctttccttggtccctcggtgtctcccagggccccatatccttagactatagggctggaggttgtaaaggggtgtggtgtggtggccaaaacttgttgagaggggccaggtttcaggatcagctggccaattcaaactgacct

SEQ ID NO: 5404 - DNA, 2345 bp, Homo sapiens
  source 1..2345: mol_type = unassigned DNA
acccatgctgactctggagcgggccgggtggcgctgcccatccccggatccttcgtagatggagtcttgcttagtcgcccaagctggagtagtgtggctcgatctcagctctgcaacctctgcctcccagggttcaagcaattctcctgcctcagtttccagagtagctggaattatagtgcagattctgggaaagtgaactccacggaagactcagaaaccaagttctaattcagttgccatgaaaacttaaggtgagaggattgtcaaccagtgaaaaatacggaggaaaacactaacagaatatgatgaagaagccaagacttgggctgcttgcattacattaaccgaggtttacccgcagcgaggctgcctccaaagcatccggagtttgcaaccatcactgtccaccccgcgagctgcgatagtgcgagaactacaattcccgtggggctgtgcgggagcatcgcgagagttacattaactgtggcggcgggaaggcggagcctgcagctggctgggcggttaggagggcccggggccgagacgatggctgaccacaaccctgacagcgactccacgccgcgcacgctgctgcgacgcgtgctggatacagcggacccgcgcaccccgcggcgaccccggagtgctcgggctggagcccggagagccctgcttgaaacggcttcccccaggaagttgagtggccaaacaaggacgatagccagagggcgttcccatggagccaggtctgttggcagatcggcccatattcaggccagtgggcacttggaggaacagacacctcggacgctgctgaagaacatcctactaactgccccagaatcttccatcctgatgcctgagtcggtagtgaagccagtgccagcaccgcaggcggtccaaccctccagacaagagagcagttgcggcagcctggagctgcaacttcctgagctcgagccccccacaaccctggctccaggtctgctggcccctggcaggaggaaacagaggctgagactgtcagtgtttcagcagggagtggaccaggggctgtctctctcccaagagcctcaagggaatgctgatgcctcttccctcaccagatccctcaacctgacctttgccacacctcttcagccacagtcagtgcagaggcctggcttggcccgcagacctccagcccgccgagctgtagacgtgggtgcctttttgcgggatctgcgagatacttccctggctcctccaaacattgtgttggaggacacccagccgttctctcagcccatggttggctcccccaacgtgtatcactccctgccctgcacgcctcacactggggctgaagacgctgagcaggctgccggtcgcaagacacagagcagtgggcctgggctgcagaagaatagccctgggaaaccagcccagtttctggcaggagaggcagaggaggtcaatgcctttgctctgggcttcctgagcaccagcagtggtgtctctggagaagatgaagtagagcccttacacgatggagttgaagaggcagagaaaaagatggaagaagaaggtgtgagtgtgagtgaaatggaggcaacaggagcacaaggacccagcagggtagaagaggctgagggacacacagaggtgacagaagcagagggatcccaggggactgctgaggctgacgggccaggagcatcttcaggggatgaggatgcctctggcagggcagcaagtccagagtcggcctccagcacccctgagtctctccaggccaggcgacatcatcagtttcttgagccagccccagcgcctggtgctgcagtcttatcttcagagcctgcagagcctctgttggtcaggcatccccctaggccccggaccaccggccccaggccccggcaagatccccacaaggctggactgagccactatgtgaaactctttagcttctatgccaagatgcccatggagaggaaggctcttgagatggtggagaagtgcctagataaatatttccagcatctttgtgatgatctggaggtatttgctgctcatgctggccgcaagactgtgaagccagaggacctggagctgctgatgcggcggcagggcctggtcactgaccaagtctcactgcacgtgctagtggagcggcacctgcccctggagtaccggcagctgctcatcccctgtgcatacagtggcaactctgtcttccctgcccagtagtggccaggcttcaacactttccctgtccccacctggggactcttgcccccacatatttctccaggtctcctccccacccccccagcatcaataaagtgtcataaacagaa

SEQ ID NO: 5405 - DNA, 1165 bp, Homo sapiens
  source 1..1165: mol_type = unassigned DNA
ggcgcgcgcaggccggcgggggcgcgccgcgctgcgaggcctgcgcgccaggctgcgggagccatgcggcgatcgaggagctctgcggccgccaagctgcgcgggcagaagcggtccggggcctccgcggcccccgcggcctccgcggccgctgccttggcacccagcgccacccgcacacggcgctccgctagccaggccgggagcaagagccaggcggtggagaagccgccgtcggagaagccgcggctgaggcgctcgtcgccgcgggcccaggaggagggcccgggggagccgccgccgcctgagctggcgttgctcccgccaccgccgccgccgccgccgactcccgcgaccccgacgtcctcggcgtccaacctggacctgggcgagcagcgggagcgctgggagacgttccagaagcggcagaagcttacctccgagggtgccgccaagctcctgctagacacctttgaataccagggcctggtgaagcacacaggaggctgccactgtggagcagttcgttttgaagtttgggcctcagcagacttgcatatatttgactgcaattgcagcatttgcaagaagaagcagaatagacacttcattgttccagcttctcgcttcaagctcctgaagggagctgagcacataacgacttacacgttcaatactcacaaagcccagcataccttctgtaagagatgtggcgttcagagcttctatactccacgatcaaaccccggaggcttcggaattgccccccactgcctggatgagggcactgtgcggagtatggtcactgaggaattcaatggcagcgattgggagaaggccatgaaagagcacaagaccatcaagaacatgtctaaagagtgagcttctgcctctcctgccctgaaaaggaggaatgattggggccagcaactttgctctccctgccgtgcctcggtggtgctcctgaatgtggctgacctgggctgctggttccgttgactagggtcatcttgatctctgcagtttgctccagctaccagtttctttaggcagctctttgtcctccctctgcccagattttgatgtagtctaattgacatccttctcttcccaacttttgtgtgatcttttaggaaaaaaaataaatatttttaacattaaagca

SEQ ID NO: 5406 - DNA, 4900 bp, Homo sapiens
  source 1..4900: mol_type = unassigned DNA
agcggctacgcaggcggcaaaaggtcctcgggtggcgggcttgtctctgcttgcagactggcagggctgcagcgtggctttttccttgagtcggggcacagttaggatctgggctggcggcccgaggcagaggagccgggcgcgctgcagcagacggcggtgggacctggctgcggagcggggtccgggcatcagggaccgggggcgggcagtgggggtcccgccgggggtcccggattacccgcgactcaactggacctcacttccccccagccgccttcgcccccggaccgctcaccgcaaccatggtctccaaatccgaccaattgctcatcgtcgtgtccatcctagaaggtcggcatttccccaaacgtccaaagcatatgcttgtagtggaagcaaagtttgatggagaacagttggctactgatcctgtggaccacactgaccagccagaatttgctactgagttagcttgggaaattgacaggaaagcgcttcatcagcacaggctacagcgtactcctatcaaactccaatgttttgccttggatcctgtaacttcagccaaggaaaccataggttacatcgttctggatttaagaaccgctcaagaaacaaagcaggcaccaaaatggtaccagttgctgagtaataaatacaccaaattcaagtctgagatacagataagtattgctttggaaaccgatacaaagccaccagtggatagctttaaagcaaagggggctccccctcgagatggaaaagtacctgccatcctggctggacttgaccccagggacattgtggctgtgctgaatgaagagggaggctaccatcagattggaccagcagaatactgtactgactcctttattatgtcagtgaccatagcatttgctacccagttggaacagttaattccatgtaccatgaaacttccagaaagacagcctgagtttttcttttactactctttactgggaaatgatgttacaaatgaacccttcaatgatttaatcaacccaaactttgagccagagagagcatcagttcgcatccgtagcagtgtagaaattcttcgtgtttacctggctcttcagtctaaactgcagattcacctctgctgtggagaccagtcacttggaagtacagaaatacctttaactggattacttaaaaagggcagtacagaaatcaaccagcacccagtcacagtcgaaggtgcttttacccttgaccctccaaacagagccaaacagaagcttgcacctattcctgtggagctagccccaactgtgggagtgtctgtggctctgcagagagaaggcatagactcccagtctttaattgaattaaagacccagaatgaacatgagccagagcattcaaagaagaaagttttaacccccataaaggagaagacacttactgggccaaaatcaccaacagtgtcccctgttccatctcacaaccagtcacctccaacaaaagatgatgcaacagaaagtgaagtggaaagtttacagtatgataaggacaccaaaccaaatccaaaagccagttcttctgtacctgcttcactggcccagctagtgactacatccaatgcttcagaagtagcttcaggacagaagattgctgtaccagcaacatcacatcatttttgcttttcaatagacttaaggagtatacatgccttggagattggttttccaatcaactgtatattaaggtactcatatccattctttggaagtgcagctcctattatgactaatcctcctgtagaagttcggaaaaacatggaagtttttcttccccagtcttactgtgcatttgattttgcaactatgcctcatcagctgcaagacaccttcttaaggattccattactggttgaactatggcacaaggataaaatgagtaaagatttacttctgggaattgcgagaatccagctttctaacatcttgtcttcagaaaaaactcgttttttaggttctaatggtgaacagtgttggcgtcaaacttacagtgaaagtgtgcctgttatagcagcacaaggatcaaataacaggatagcagatctttcttacacagtgactctagaagattatggactagtaaaaatgcgtgagatttttatctctgattcatctcagggtgtatctgccgtacagcaaaagccgtcttctcttcctccagcaccttgtccttcagagatccagacagagcctcgtgaaacgttagaatacaaagcagcacttgagctagaaatgtggaaggagatgcaagaagatatatttgaaaatcagctgaagcagaaagaactggctcatatgcaggctcttgcagaggaatggaagaaaagggaccgagaaagagaatcactagtaaagaaaaaggtggctgaatatactattctagaaggaaaacttcaaaaaactctaattgacttggagaagcgagagcagcagcttgctagtgtggaatcagagcttcaaagagaaaaaaaggaactgcaatcagaacgtcagcggaacctgcaagaactgcaggactctatccgtagggccaaagaggactgtattcaccaagtagaactagaaaggttaaaaatcaaacagctcgaagaggataaacaccgccttcagcaacagcttaatgatgctgaaaataagtataagattttggaaaaagagttccaacagttcaaggaccagcaaaacaacaaaccagaaatccgtctacagtctgaaataaatcttctcaccttggaaaaggttgaacttgaaagaaagttggaatctgcaactaagtctaaactgcattacaagcagcagtggggacgagctttgaaagaacttgccagacttaaacagagggagcaagaaagtcaaatggctcgtcttaaaaaacagcaggaagaattggaacagatgagactacgttaccttgccgctgaggaaaaagatacagtaaaaaccgagcgacaagaattgttggatataagaaatgaattgaacaggttaaggcaacaagagcaaaaacaataccaggattccacagagattgcaagtggaaaaaaggatggcccccatggcagtgtattggaagaaggtttggatgattatttgactcgcctgatagaagaaagggatactttgatgagaacgggtgtgtataatcacgaggatcgaataataagtgaactcgaccgacagatcagagagattttggcaaaaagcaatgccagtaattaataacatttggaaaagctttatagagactctaagtctaaattttaatttctttgtaaaaacctcaaaagtgaggaaaatggatgttttaaaatggtattttcaattttttataagcaaaattttgtatgttattgtatagtatttatttgatcttatttactttatgctacctctcccacactggttttatttgtaatttgcatttatatactcattttaaatgacttttcagtgtttttcatagtttataatctgatggctaactaactttcaaaacagcttttaactaagtttgttgtaggagaaatgactgcggtaatttccagttctataatgtttcatgttgagccaaaagagtatatcttgcactttaaaaacgctgcgtcctattccatttgaatgtaaattcttaaaagttgagaccaattgtaaccagtttaactcattttagatgacctttttttcttataatatttgcaagtgacaagtttgaaaacaaagcaagatcagtgcagagaagccacatgacatgttgggtgacagattggtcatttatttaaataaagttaatacagattaaatttgtttcaagagctattgaattttcaaattttcagtgtatttataacttttaagaacatgaagtattagcttaatatagttttctctgttggtttcttcctcaagtttgcattgttttcttttgttaaaattagagatttctttttattttccagttatagtaatactagctgtcagcttaaaccctctgtaatagaacatggaaacagacacataaagacattagctgaaaaaatagagtgaaaatcaactattttttactcccgctaatttcaatcaatcgttttcaaaagcgcacgagattcactcattggatttatgcagtgccctgtctgtataaaaactcttaagagttcctttatatcatattcttcagagccaacatttgtcctcaaagcaacgtttcccacctccttttactgagtactgaaaaagttttagcaaagtcacagattaggttgaatttcaaaatatatgtactttaaaaagttctgatttccaaatataataaagttaaaattaagtatatactttaggaagttaccaataacttccatcaaagcagagtaggatatatggtaacattaattttcggtcatttcaaatgaggtatatttcttattagggaaattaaagtccctatatttattatatattttttccttattaacagagtattaatctagtaaaaaataacccagcagtaaataataaagaaattactgaatgagaggataatgaatctgaatcatagcaggaatttgcaatattaattatggttagctatttttctctcattgatttttgtgccacttgaatggaacagaagcaagccttatgttttggaaggtctgcggtaaaatgctgtgactgtttactttcaattgcattgtgtgttgcctgtgactgctttcaaacgctagagggggcctctgatttaaagaaataaaaaggacttttctaaaatggatgtgtagtttattttgccttttgtaaagctcttttggctattgtaacttaacaaataaaatcataattgtgtgcatctctga

SEQ ID NO: 5407 - DNA, 4629 bp, Homo sapiens
  source 1..4629: mol_type = unassigned DNA
tttacagcagtagtgcgcttgcgcagctggtcccacaccaagtcgcccgcctctcctcgtccggctagcagagggcgctgtgaggtcggcatttccccaaacgtccaaagcatatgcttgtagtggaagcaaagtttgatggagaacagttggctactgatcctgtggaccacactgaccagccagaatttgctactgagttagcttgggaaattgacaggaaagcgcttcatcagcacaggctacagcgtactcctatcaaactccaatgttttgccttggatcctgtaacttcagccaaggaaaccataggttacatcgttctggatttaagaaccgctcaagaaacaaagcaggcaccaaaatggtaccagttgctgagtaataaatacaccaaattcaagtctgagatacagataagtattgctttggaaaccgatacaaagccaccagtggatagctttaaagcaaagggggctccccctcgagatggaaaagtacctgccatcctggctggacttgaccccagggacattgtggctgtgctgaatgaagagggaggctaccatcagattggaccagcagaatactgtactgactcctttattatgtcagtgaccatagcatttgctacccagttggaacagttaattccatgtaccatgaaacttccagaaagacagcctgagtttttcttttactactctttactgggaaatgatgttacaaatgaacccttcaatgatttaatcaacccaaactttgagccagagagagcatcagttcgcatccgtagcagtgtagaaattcttcgtgtttacctggctcttcagtctaaactgcagattcacctctgctgtggagaccagtcacttggaagtacagaaatacctttaactggattacttaaaaagggcagtacagaaatcaaccagcacccagtcacagtcgaaggtgcttttacccttgaccctccaaacagagccaaacagaagcttgcacctattcctgtggagctagccccaactgtgggagtgtctgtggctctgcagagagaaggcatagactcccagtctttaattgaattaaagacccagaatgaacatgagccagagcattcaaagaagaaagttttaacccccataaaggagaagacacttactgggccaaaatcaccaacagtgtcccctgttccatctcacaaccagtcacctccaacaaaagatgatgcaacagaaagtgaagtggaaagtttacagtatgataaggacaccaaaccaaatccaaaagccagttcttctgtacctgcttcactggcccagctagtgactacatccaatgcttcagaagtagcttcaggacagaagattgctgtaccagcaacatcacatcatttttgcttttcaatagacttaaggagtatacatgccttggagattggttttccaatcaactgtatattaaggtactcatatccattctttggaagtgcagctcctattatgactaatcctcctgtagaagttcggaaaaacatggaagtttttcttccccagtcttactgtgcatttgattttgcaactatgcctcatcagctgcaagacaccttcttaaggattccattactggttgaactatggcacaaggataaaatgagtaaagatttacttctgggaattgcgagaatccagctttctaacatcttgtcttcagaaaaaactcgttttttaggttctaatggtgaacagtgttggcgtcaaacttacagtgaaagtgtgcctgttatagcagcacaaggatcaaataacaggatagcagatctttcttacacagtgactctagaagattatggactagtaaaaatgcgtgagatttttatctctgattcatctcagggtgtatctgccgtacagcaaaagccgtcttctcttcctccagcaccttgtccttcagagatccagacagagcctcgtgaaacgttagaatacaaagcagcacttgagctagaaatgtggaaggagatgcaagaagatatatttgaaaatcagctgaagcagaaagaactggctcatatgcaggctcttgcagaggaatggaagaaaagggaccgagaaagagaatcactagtaaagaaaaaggtggctgaatatactattctagaaggaaaacttcaaaaaactctaattgacttggagaagcgagagcagcagcttgctagtgtggaatcagagcttcaaagagaaaaaaaggaactgcaatcagaacgtcagcggaacctgcaagaactgcaggactctatccgtagggccaaagaggactgtattcaccaagtagaactagaaaggttaaaaatcaaacagctcgaagaggataaacaccgccttcagcaacagcttaatgatgctgaaaataagtataagattttggaaaaagagttccaacagttcaaggaccagcaaaacaacaaaccagaaatccgtctacagtctgaaataaatcttctcaccttggaaaaggttgaacttgaaagaaagttggaatctgcaactaagtctaaactgcattacaagcagcagtggggacgagctttgaaagaacttgccagacttaaacagagggagcaagaaagtcaaatggctcgtcttaaaaaacagcaggaagaattggaacagatgagactacgttaccttgccgctgaggaaaaagatacagtaaaaaccgagcgacaagaattgttggatataagaaatgaattgaacaggttaaggcaacaagagcaaaaacaataccaggattccacagagattgcaagtggaaaaaaggatggcccccatggcagtgtattggaagaaggtttggatgattatttgactcgcctgatagaagaaagggatactttgatgagaacgggtgtgtataatcacgaggatcgaataataagtgaactcgaccgacagatcagagagattttggcaaaaagcaatgccagtaattaataacatttggaaaagctttatagagactctaagtctaaattttaatttctttgtaaaaacctcaaaagtgaggaaaatggatgttttaaaatggtattttcaattttttataagcaaaattttgtatgttattgtatagtatttatttgatcttatttactttatgctacctctcccacactggttttatttgtaatttgcatttatatactcattttaaatgacttttcagtgtttttcatagtttataatctgatggctaactaactttcaaaacagcttttaactaagtttgttgtaggagaaatgactgcggtaatttccagttctataatgtttcatgttgagccaaaagagtatatcttgcactttaaaaacgctgcgtcctattccatttgaatgtaaattcttaaaagttgagaccaattgtaaccagtttaactcattttagatgacctttttttcttataatatttgcaagtgacaagtttgaaaacaaagcaagatcagtgcagagaagccacatgacatgttgggtgacagattggtcatttatttaaataaagttaatacagattaaatttgtttcaagagctattgaattttcaaattttcagtgtatttataacttttaagaacatgaagtattagcttaatatagttttctctgttggtttcttcctcaagtttgcattgttttcttttgttaaaattagagatttctttttattttccagttatagtaatactagctgtcagcttaaaccctctgtaatagaacatggaaacagacacataaagacattagctgaaaaaatagagtgaaaatcaactattttttactcccgctaatttcaatcaatcgttttcaaaagcgcacgagattcactcattggatttatgcagtgccctgtctgtataaaaactcttaagagttcctttatatcatattcttcagagccaacatttgtcctcaaagcaacgtttcccacctccttttactgagtactgaaaaagttttagcaaagtcacagattaggttgaatttcaaaatatatgtactttaaaaagttctgatttccaaatataataaagttaaaattaagtatatactttaggaagttaccaataacttccatcaaagcagagtaggatatatggtaacattaattttcggtcatttcaaatgaggtatatttcttattagggaaattaaagtccctatatttattatatattttttccttattaacagagtattaatctagtaaaaaataacccagcagtaaataataaagaaattactgaatgagaggataatgaatctgaatcatagcaggaatttgcaatattaattatggttagctatttttctctcattgatttttgtgccacttgaatggaacagaagcaagccttatgttttggaaggtctgcggtaaaatgctgtgactgtttactttcaattgcattgtgtgttgcctgtgactgctttcaaacgctagagggggcctctgatttaaagaaataaaaaggacttttctaaaatggatgtgtagtttattttgccttttgtaaagctcttttggctattgtaacttaacaaataaaatcataattgtgtgcatctctg

SEQ ID NO: 5408 - DNA, 4710 bp, Homo sapiens
  source 1..4710: mol_type = unassigned DNA
tttacagcagtagtgcgcttgcgcagctggtcccacaccaagtcgcccgcctctcctcgtccggctagcagagggcgctgtgagccgccttcgcccccggaccgctcaccgcaaccatggtctccaaatccgaccaattgctcatcgtcgtgtccatcctagaaggtcggcatttccccaaacgtccaaagcatatgcttgtagtggaagcaaagtttgatggagaacagttggctactgatcctgtggaccacactgaccagccagaatttgctactgagttagcttgggaaattgacaggaaagcgcttcatcagcacaggctacagcgtactcctatcaaactccaatgttttgccttggatcctgtaacttcagccaaggaaaccataggttacatcgttctggatttaagaaccgctcaagaaacaaagcaggcaccaaaatggtaccagttgctgagtaataaatacaccaaattcaagtctgagatacagataagtattgctttggaaaccgatacaaagccaccagtggatagctttaaagcaaagggggctccccctcgagatggaaaagtacctgccatcctggctggacttgaccccagggacattgtggctgtgctgaatgaagagggaggctaccatcagattggaccagcagaatactgtactgactcctttattatgtcagtgaccatagcatttgctacccagttggaacagttaattccatgtaccatgaaacttccagaaagacagcctgagtttttcttttactactctttactgggaaatgatgttacaaatgaacccttcaatgatttaatcaacccaaactttgagccagagagagcatcagttcgcatccgtagcagtgtagaaattcttcgtgtttacctggctcttcagtctaaactgcagattcacctctgctgtggagaccagtcacttggaagtacagaaatacctttaactggattacttaaaaagggcagtacagaaatcaaccagcacccagtcacagtcgaaggtgcttttacccttgaccctccaaacagagccaaacagaagcttgcacctattcctgtggagctagccccaactgtgggagtgtctgtggctctgcagagagaaggcatagactcccagtctttaattgaattaaagacccagaatgaacatgagccagagcattcaaagaagaaagttttaacccccataaaggagaagacacttactgggccaaaatcaccaacagtgtcccctgttccatctcacaaccagtcacctccaacaaaagatgatgcaacagaaagtgaagtggaaagtttacagtatgataaggacaccaaaccaaatccaaaagccagttcttctgtacctgcttcactggcccagctagtgactacatccaatgcttcagaagtagcttcaggacagaagattgctgtaccagcaacatcacatcatttttgcttttcaatagacttaaggagtatacatgccttggagattggttttccaatcaactgtatattaaggtactcatatccattctttggaagtgcagctcctattatgactaatcctcctgtagaagttcggaaaaacatggaagtttttcttccccagtcttactgtgcatttgattttgcaactatgcctcatcagctgcaagacaccttcttaaggattccattactggttgaactatggcacaaggataaaatgagtaaagatttacttctgggaattgcgagaatccagctttctaacatcttgtcttcagaaaaaactcgttttttaggttctaatggtgaacagtgttggcgtcaaacttacagtgaaagtgtgcctgttatagcagcacaaggatcaaataacaggatagcagatctttcttacacagtgactctagaagattatggactagtaaaaatgcgtgagatttttatctctgattcatctcagggtgtatctgccgtacagcaaaagccgtcttctcttcctccagcaccttgtccttcagagatccagacagagcctcgtgaaacgttagaatacaaagcagcacttgagctagaaatgtggaaggagatgcaagaagatatatttgaaaatcagctgaagcagaaagaactggctcatatgcaggctcttgcagaggaatggaagaaaagggaccgagaaagagaatcactagtaaagaaaaaggtggctgaatatactattctagaaggaaaacttcaaaaaactctaattgacttggagaagcgagagcagcagcttgctagtgtggaatcagagcttcaaagagaaaaaaaggaactgcaatcagaacgtcagcggaacctgcaagaactgcaggactctatccgtagggccaaagaggactgtattcaccaagtagaactagaaaggttaaaaatcaaacagctcgaagaggataaacaccgccttcagcaacagcttaatgatgctgaaaataagtataagattttggaaaaagagttccaacagttcaaggaccagcaaaacaacaaaccagaaatccgtctacagtctgaaataaatcttctcaccttggaaaaggttgaacttgaaagaaagttggaatctgcaactaagtctaaactgcattacaagcagcagtggggacgagctttgaaagaacttgccagacttaaacagagggagcaagaaagtcaaatggctcgtcttaaaaaacagcaggaagaattggaacagatgagactacgttaccttgccgctgaggaaaaagatacagtaaaaaccgagcgacaagaattgttggatataagaaatgaattgaacaggttaaggcaacaagagcaaaaacaataccaggattccacagagattgcaagtggaaaaaaggatggcccccatggcagtgtattggaagaaggtttggatgattatttgactcgcctgatagaagaaagggatactttgatgagaacgggtgtgtataatcacgaggatcgaataataagtgaactcgaccgacagatcagagagattttggcaaaaagcaatgccagtaattaataacatttggaaaagctttatagagactctaagtctaaattttaatttctttgtaaaaacctcaaaagtgaggaaaatggatgttttaaaatggtattttcaattttttataagcaaaattttgtatgttattgtatagtatttatttgatcttatttactttatgctacctctcccacactggttttatttgtaatttgcatttatatactcattttaaatgacttttcagtgtttttcatagtttataatctgatggctaactaactttcaaaacagcttttaactaagtttgttgtaggagaaatgactgcggtaatttccagttctataatgtttcatgttgagccaaaagagtatatcttgcactttaaaaacgctgcgtcctattccatttgaatgtaaattcttaaaagttgagaccaattgtaaccagtttaactcattttagatgacctttttttcttataatatttgcaagtgacaagtttgaaaacaaagcaagatcagtgcagagaagccacatgacatgttgggtgacagattggtcatttatttaaataaagttaatacagattaaatttgtttcaagagctattgaattttcaaattttcagtgtatttataacttttaagaacatgaagtattagcttaatatagttttctctgttggtttcttcctcaagtttgcattgttttcttttgttaaaattagagatttctttttattttccagttatagtaatactagctgtcagcttaaaccctctgtaatagaacatggaaacagacacataaagacattagctgaaaaaatagagtgaaaatcaactattttttactcccgctaatttcaatcaatcgttttcaaaagcgcacgagattcactcattggatttatgcagtgccctgtctgtataaaaactcttaagagttcctttatatcatattcttcagagccaacatttgtcctcaaagcaacgtttcccacctccttttactgagtactgaaaaagttttagcaaagtcacagattaggttgaatttcaaaatatatgtactttaaaaagttctgatttccaaatataataaagttaaaattaagtatatactttaggaagttaccaataacttccatcaaagcagagtaggatatatggtaacattaattttcggtcatttcaaatgaggtatatttcttattagggaaattaaagtccctatatttattatatattttttccttattaacagagtattaatctagtaaaaaataacccagcagtaaataataaagaaattactgaatgagaggataatgaatctgaatcatagcaggaatttgcaatattaattatggttagctatttttctctcattgatttttgtgccacttgaatggaacagaagcaagccttatgttttggaaggtctgcggtaaaatgctgtgactgtttactttcaattgcattgtgtgttgcctgtgactgctttcaaacgctagagggggcctctgatttaaagaaataaaaaggacttttctaaaatggatgtgtagtttattttgccttttgtaaagctcttttggctattgtaacttaacaaataaaatcataattgtgtgcatctctg

SEQ ID NO: 5409 - DNA, 1259 bp, Homo sapiens
  source 1..1259: mol_type = unassigned DNA
tttacagcagtagtgcgcttgcgcagctggtcccacaccaagtcgcccgcctctcctcgtccggctagcagagggcgctgtgagccgccttcgcccccggaccgctcaccgcaaccatggtctccaaatccgaccaattgctcatcgtcgtgtccatcctagaaggtcggcatttccccaaacgtccaaagcatatgcttgtagtggaagcaaagtttgatggagaacagttggctactgatcctgtggaccacactgaccagccagaatttgctactgagttagcttgggaaattgacaggaaagcgcttcatcagcacaggctacagcgtactcctatcaaactccaatgttttgccttggatcctgtaacttcagccaaggaaaccataggttacatcgttctggatttaagaaccgctcaagaaacaaagcaggcaccaaaatggtaccagttgctgagtaataaatacaccaaattcaagtctgagatacagataagtattgctttggaaaccgatacaaagccaccagtggatagctttaaagcaaagggggctccccctcgagatggaaaagtacctgccatcctggctggacttgaccccagggacattgtggctgtgctgaatgaagagggaggctaccatcagattggaccagcagaatactgtactgactcctttattatgtcagtgaccatagcatttgctacccagttggaacagttaattccatgtaccatgaaacttccagaaagacagcctgagtttttcttttactactctttactgggaaatgatgttacaaatgaacccttcaatgatttaatcaacccaaactttgagccagagagagcatcagttcgcatccgtagcagtgtagaaattcttcgtgtttacctggctcttcagtctaaactgcagattcacctctgctgtggagaccagtcacttggaagtacagaaatacctttaactggattacttaaaaagggcagtacagaaatcaaccagcacccagtcacagtcgaaggtgcttttacccttgaccctccaaacagagccaaacagaagcttgcacctattcctgtggagctagccccaactgtgggagtgtctgtggctctgcagagagaaggcatagactcccaggatgcattttggtattcagctctggatatcatatttcctctgttcatcttcctttttctggtcctagatgctataaggaaatttgcaaattacgaagaaaaatag

SEQ ID NO: 5410 - DNA, 4986 bp, Homo sapiens
  source 1..4986: mol_type = unassigned DNA
gggatctgctagaagttggtcttccgccaggactagagtttcctcgcggtaacagcctccgtggcctccggaggaccatgtcattagactttggcagtgtggcactaccagtgcaaaatgaagatgaagagtatgacgaagaggactatgaaagagagaaagagttgcagcagttactcacagaccttccccatgacatgctggatgacgacctctcctctccagagctccagtattcggactgcagcgaggatggcacagacggacaaccacatcatcctgagcaattggagatgagctggaatgagcaaatgctgcccaaatctcaaagtgtaaatggtcccagttgtcaaggtttggaaccgtataataaagtgacatataaaccttatcagtcttctgcccagaataatggctcaccagcccaggagataacaggaagtgacacattcgaaggcctgcaacaacaatttttaggagctaatgagaactctgcagaaaatatgcagattattcaacttcaggttcttaacaaagcaaaagagagacaactggagaacttaattgaaaagttaaatgaaagtgaacgtcaaattcgatatctgaatcaccagcttgtaataataaaagatgaaaaggatggtttgactctcagccttcgagaatcacagaaactctttcagaatggaaaagaaagagagatacagcttgaagctcaaataaaagcactggagactcagatacaagcattaaaagtcaatgaagaacagatgatcaagaagtccagaacaactgaaatggctctggaaagcttgaagcagcagctggtggaccttcatcattctgaatcacttcaacgagctagagaacagcatgagagcattgttatgggcctcacaaagaagtacgaagagcaagtattgtccttacaaaagaatttggatgccacagtcaccgcacttaaagaacaggaagacatttgctctcgtctgaaagatcacgtgaaacaactggaaaggaatcaagaagcaatcaagttagaaaagactgagatcattaataagttgacaagaagtctagaggagagtcaaaagcagtgtgcccacttgttgcagtccgggtcagtacaagaggtggctcagctacagttccagctgcagcaagcacagaaggcacatgctatgagtgcaaacatgaacaaggctttgcaagaagaattaacagaactaaaagatgaaatttctctctatgaatctgctgcaaaactaggaatacatccaagtgactcagaaggagaattaaatatagaactcactgaatcgtatgtggatttgggtattaaaaaggtcaactggaaaaaatccaaagttaccagcattgtacaagaagaagacccaaatgaagagctttcaaaagatgagttcattctgaagttaaaggcagaagtacagcgtttgctgggtagcaactcaatgaagcgtcatctggtgtctcagttacaaaatgacctcaaagactgtcataagaaaattgaagatctccaccaagtgaagaaggatgaaaaaagcattgaggttgagactaaaacagatacctcagaaaaaccaaagaatcaattatggcctgagtcttctacttctgatgttgtcagagatgatattctgctgcttaaaaatgaaattcaagttttacaacaacaaaatcaggaacttaaagaaactgaaggaaaactgagaaatacaaatcaagacttatgtaatcaaatgagacaaatggtacaagattttgaccatgacaaacaagaagctgtggataggtgtgaaaggacttatcagcagcaccatgaagccatgaaaactcaaatacgtgaaagcctattagcaaagcatgctttggagaagcagcagctctttgaggcttatgagagaactcatttgcaactgaggtctgagttggataagttgaataaggaggtgactgctgtgcaggaatgttacctagaagtgtgcagagagaaggataatctagaattgactctcaggaagaccactgaaaaggagcaacagactcaggagaagatcaaagaaaaactcattcaacagcttgaaaaggagtggcagtctaagctggatcaaactataaaggcaatgaaaaagaagaccttagattgtggcagccaaactgaccaagtaaccaccagtgatgttatttccaagaaagagatggcaattatgatagaagagcagaagtgcacaatccagcaaaacttagaacaagagaaggacatagccatcaagggggctatgaagaaactcgaaattgaattggaactcaaacattgtgaaaatattaccaaacaggtagaaatagctgtgcaaaatgctcatcagcgatggctgggagaactaccagagctggcagagtatcaagcacttgtgaaggcagaacagaaaaagtgggaagaacagcatgaggtctctgtgaacaaaaggatatcatttgctgtttctgaagctaaagagaaatggaagagtgagcttgaaaatatgaggaaaaatatacttcctggaaaggaattggaagagaagattcattctcttcagaaggaacttgagttaaagaacgaagaagtccctgtggtcatcagggctgagttagctaaggctcggagtgaatggaacaaagaaaagcaagaagaaatccacagaatccaagaacaaaatgagcaagattaccggcaatttttagatgatcaccgaaataaaattaatgaggtgcttgcggcagctaaagaagactttatgaaacaaaaaactgaactacttcttcagaaggagacagaattacaaacttgtctagaccagagtcgtagagaatggactatgcaggaagccaagcggatccaactggaaatctatcagtatgaggaagacatcctgactgtacttggggttcttttaagtgatacccaaaaggagcacatcagtgattctgaggacaagcagcttttggaaatcatgtcgacttgttcttcaaaatggatgtctgtgcaatattttgaaaaactaaagggctgcatacagaaagcatttcaagatacacttcctctgcttgtagaaaacgctgacccagaatggaaaaagagaaatatggccgagctctctaaggattctgccagccagggcactggccaaggagaccctggacctgctgctggacaccatgctcagcccttggccttacaagcaacagaagcagaagctgataagaaaaaggtccttgaaattaaggatttatgctgtggacactgcttccaagaacttgaaaaggcaaagcaggaatgtcaagatctgaaaggaaaactggagaaatgctgtaggcatcttcagcatttagaaaggaagcacaaagctgtagtggaaaaaattggagaagagaataataaagttgttgaagaattaatagaagaaaacaacgacatgaagaataaattggaagaattgcaaacactttgtaaaacaccaccaaggtcattgtcagcaggggccattgaaaatgcttgcctgccatgcagtgggggagccttggaagaacttcgtgggcagtacattaaagctgtaaaaaaaattaaatgtgacatgcttcgttatattcaggagagtaaggaacgagctgcagaaatggtaaaagcagaggtactgcgagaacgtcaagaaaccgcccgaaagatgcgcaaatattatttgatttgcctccaacagattttgcaggatgatggaaaagaaggggctgagaaaaagattatgaatgctgctagcaaacttgctacaatggcaaaattactggaaacacctatttctagtaagtcccaaagcaaaactacacagtcaggtatgtcaaagtgagtcgccaaatggtttttctatcttttcttctttagctatttaatattttcagtatgaagaaggcagggaaggtaaggagtgagagttaatttgtgaagttttgtatgttttacttaaactagaagtttacgcaaaaagagtacacagtttccaatttaagtaggcagactgagcatgcccatcagtttcctattgctgcttccatccctcgaaatgatagaaaagattttaaacagcaaataaagaatgagaaaaagaagaaattataagtgggttttaaaaagttgcagtgggccaggcatcatggctcacacctgtaatcccagcactttgggaggctgaggtgggaggatcccttgatcccaggaatttgaggttgcagtaagctatgattgtgccactgtactccagcctgggtgacagagtgaggccctgtctcaaaaaaaaaaaaaaaaagtttgcagtggatagaccagaagctacaagaaatccctgagagaaagaagacagtataggatggaagatggaaacctcagttcaaaaccaccgggagatgactattgcaattaggagcaatatcaaaactgttccacatatgagggtgatatgttccaggagaaatagagggcctaggggatatgaatggggtaattagttggtgttctaaaccaacagcaaccaggtggggttaatcctctctttatttcttcttctcccctcctttccccaacctcaatattgagctgggcaacaacaacaggaacaaagaatctgggagcagggcagtgctccaggtggctagccatatcaagcaggaactgggagccgacttgccttgggaggctgagatgggaggatcacttgagtccgggaggtcaaggctgcagtgagctgtgatcgcaccactgcactccagcctgggaaacagagcagaccctgtctcaaaaaaaaaaaaaaaaaaaaaaaaaaaagtaagagtaaccaacaaaaacatagaacgtataactttaaaactggtaaaggaaaaacttggaaaaaaacattttcaatctaacaaaatcaggaaagaggaaaaaaacct

SEQ ID NO: 5411 - DNA, 5635 bp, Homo sapiens
  source 1..5635: mol_type = unassigned DNA
ccgggcgagcttctagtcggcgattgaaggatgcgagtgctccttaagggcctccgccccgtgagttcggttgtgactaggaaggagctagtggactagagccagggtaaggggatctgctagaagttggtcttccgccaggactagagtttcctcgcggtaacagcctccgtggcctccggaggaccatgtcattagactttggcagtgtggcactaccagtgcaaaatgaagatgaagagtatgacgaagaggactatgaaagagagaaagagttgcagcagttactcacagaccttccccatgacatgctggatgacgacctctcctctccagagctccagtattcggactgcagcgaggatggcacagacggacaaccacatcatcctgagcaattggagatgagctggaatgagcaaatgctgcccaaatctcaaagtgtaaatggctataatgaaattcagagtttatatgctggagaaaaatgtggtaatgtctgggaagaaaatagaagtaaaactgaagaccgacatcctgtgtaccatcctgaagaaggtggagatgaaggtggaagtggttatagtcctccaagtaaatgtgaacagactgatttatatcaccttcctgaaaactttaggccatataccaatggtcagaagcaggaatttaataaccaagcaaccaatgtaattaaattttcagatcctcaatggaaccattttcagggtcccagttgtcaaggtttggaaccgtataataaagtgacatataaaccttatcagtcttctgcccagaataatggctcaccagcccaggagataacaggaagtgacacattcgaaggcctgcaacaacaatttttaggagctaatgagaactctgcagaaaatatgcagattattcaacttcaggttcttaacaaagcaaaagagagacaactggagaacttaattgaaaagttaaatgaaagtgaacgtcaaattcgatatctgaatcaccagcttgtaataataaaagatgaaaaggatggtttgactctcagccttcgagaatcacagaaactctttcagaatggaaaagaaagagagatacagcttgaagctcaaataaaagcactggagactcagatacaagcattaaaagtcaatgaagaacagatgatcaagaagtccagaacaactgaaatggctctggaaagcttgaagcagcagctggtggaccttcatcattctgaatcacttcaacgagctagagaacagcatgagagcattgttatgggcctcacaaagaagtacgaagagcaagtattgtccttacaaaagaatttggatgccacagtcaccgcacttaaagaacaggaagacatttgctctcgtctgaaagatcacgtgaaacaactggaaaggaatcaagaagcaatcaagttagaaaagactgagatcattaataagttgacaagaagtctagaggagagtcaaaagcagtgtgcccacttgttgcagtccgggtcagtacaagaggtggctcagctacagttccagctgcagcaagcacagaaggcacatgctatgagtgcaaacatgaacaaggctttgcaagaagaattaacagaactaaaagatgaaatttctctctatgaatctgctgcaaaactaggaatacatccaagtgactcagaaggagaattaaatatagaactcactgaatcgtatgtggatttgggtattaaaaaggtcaactggaaaaaatccaaagttaccagcattgtacaagaagaagacccaaatgaagagctttcaaaagatgagttcattctgaagttaaaggcagaagtacagcgtttgctgggtagcaactcaatgaagcgtcatctggtgtctcagttacaaaatgacctcaaagactgtcataagaaaattgaagatctccaccaagtgaagaaggatgaaaaaagcattgaggttgagactaaaacagatacctcagaaaaaccaaagaatcaattatggcctgagtcttctacttctgatgttgtcagagatgatattctgctgcttaaaaatgaaattcaagttttacaacaacaaaatcaggaacttaaagaaactgaaggaaaactgagaaatacaaatcaagacttatgtaatcaaatgagacaaatggtacaagattttgaccatgacaaacaagaagctgtggataggtgtgaaaggacttatcagcagcaccatgaagccatgaaaactcaaatacgtgaaagcctattagcaaagcatgctttggagaagcagcagctctttgaggcttatgagagaactcatttgcaactgaggtctgagttggataagttgaataaggaggtgactgctgtgcaggaatgttacctagaagtgtgcagagagaaggataatctagaattgactctcaggaagaccactgaaaaggagcaacagactcaggagaagatcaaagaaaaactcattcaacagcttgaaaaggagtggcagtctaagctggatcaaactataaaggcaatgaaaaagaagaccttagattgtggcagccaaactgaccaagtaaccaccagtgatgttatttccaagaaagagatggcaattatgatagaagagcagaagtgcacaatccagcaaaacttagaacaagagaaggacatagccatcaagggggctatgaagaaactcgaaattgaattggaactcaaacattgtgaaaatattaccaaacaggtagaaatagctgtgcaaaatgctcatcagcgatggctgggagaactaccagagctggcagagtatcaagcacttgtgaaggcagaacagaaaaagtgggaagaacagcatgaggtctctgtgaacaaaaggatatcatttgctgtttctgaagctaaagagaaatggaagagtgagcttgaaaatatgaggaaaaatatacttcctggaaaggaattggaagagaagattcattctcttcagaaggaacttgagttaaagaacgaagaagtccctgtggtcatcagggctgagttagctaaggctcggagtgaatggaacaaagaaaagcaagaagaaatccacagaatccaagaacaaaatgagcaagattaccggcaatttttagatgatcaccgaaataaaattaatgaggtgcttgcggcagctaaagaagactttatgaaacaaaaaactgaactacttcttcagaaggagacagaattacaaacttgtctagaccagagtcgtagagaatggactatgcaggaagccaagcggatccaactggaaatctatcagtatgaggaagacatcctgactgtacttggggttcttttaagtgatacccaaaaggagcacatcagtgattctgaggacaagcagcttttggaaatcatgtcgacttgttcttcaaaatggatgtctgtgcaatattttgaaaaactaaagggctgcatacagaaagcatttcaagatacacttcctctgcttgtagaaaacgctgacccagaatggaaaaagagaaatatggccgagctctctaaggattctgccagccagggcactggccaaggagaccctggacctgctgctggacaccatgctcagcccttggccttacaagcaacagaagcagaagctgataagaaaaaggtccttgaaattaaggatttatgctgtggacactgcttccaagaacttgaaaaggcaaagcaggaatgtcaagatctgaaaggaaaactggagaaatgctgtaggcatcttcagcatttagaaaggaagcacaaagctgtagtggaaaaaattggagaagagaataataaagttgttgaagaattaatagaagaaaacaacgacatgaagaataaattggaagaattgcaaacactttgtaaaacaccaccaaggtcattgtcagcaggggccattgaaaatgcttgcctgccatgcagtgggggagccttggaagaacttcgtgggcagtacattaaagctgtaaaaaaaattaaatgtgacatgcttcgttatattcaggagagtaaggaacgagctgcagaaatggtaaaagcagaggtactgcgagaacgtcaagaaaccgcccgaaagatgcgcaaatattatttgatttgcctccaacagattttgcaggatgatggaaaagaaggggctgagaaaaagattatgaatgctgctagcaaacttgctacaatggcaaaattactggaaacacctatttctagtaagtcccaaagcaaaactacacagtcagcactgcccctaacttcagagatgctgattgcagttaaaaaatcaaaaagaaatgatgtgaatcagaaaataccatgttgtattgaaagcaaatcaaatagtgtaaacaccatcaccagaactctgtgcgaacaagctcccaagaggagggcagcttgtaacttacaaaggctgttagagaactcagagcatcagagcataaagcatgtgggatccaaagagacacatttggaattccagtttggggatggtagttgcaagcacctaaacagtttgccaaggaatgtttctcctgagtttgttccttgtgaaggtgaaggaggctttggtttgcacaagaagaaagacctactcagtgataatggttctgaatcacttccgcattcagctgcatacccctttcttggaaccttaggaaataaaccctcacctagatgtacccctggtccttctgaatcaggatgcatgcatataacctttcgcgattctaatgaaagacttggtttaaaagtatataaatgcaatccactaatggaaagtgaaaatgctgcatctgagaaaagtcaaggtttggatgttcaggaacctccagtaaaagatggaggggaccttagtgactgcttgggctggccttccagcagtgcaaccttatcctttgacagtcgtgaagcatcatttgtacatggtaggccacaaggaactttggaaataccaagtgaatctgttaaatccaaacagttttcaccatccggttatctttcagatacagaggaaagtaatatgatttgtcaaacaatgaaatgtcagcgttatcaaactccatacctgtcagaagaaaccacgtatttggagccaggaaagatcagtgtgaattgtggacacccatctcgtcataaggctgatagattaaagtcagatttcaaaaaactgagcagtacattaccatcttcagtgtgtcagcagccttcaagaaaattaattgttccgctatctagccaacaagatagtggctttgatagcccatttgttaatctagactaattatggtacagtatttaagaagaatcattaatatattaacaaaaatggaagggaagacctcatactgaaaaaaattgtgagccctgcctcttttgagatgttttaataacatctgttatataagtaaagcattcttctaaaattgcttgagatatttatgttgccttaatattccaaaggcctgatggtgtatgtataatctgcttttgtgtggtgcttatttttggtttctaaaccatctatttttatacttataaattgactcactctgcagtgttaacttatttaaataaacttgcatatggtctgtagaa

SEQ ID NO: 5412 - DNA, 5097 bp, Homo sapiens
  source 1..5097: mol_type = unassigned DNA
tcgcggtaacagcctccgtggcctccggaggaccatgtcattagactttggcagtgtggcactaccagtgcaaaatgaagatgaagagtatgacgaagaggactatgaaagagagaaagagttgcagcagttactcacagaccttccccatgacatgctggatgacgacctctcctctccagagctccagtattcggactgcagcgaggatggcacagacggacaaccacatcatcctgagcaattggagatgagctggaatgagcaaatgctgcccaaatctcaaagtgtaaatggctataatgaaattcagagtttatatgctggagaaaaatgtggtaatgtctgggaagaaaatagaagtaaaactgaagaccgacatcctgtgtaccatcctgaagaaggtggagatgaaggtggaagtggttatagtcctccaagtaaatgtgaacagactgatttatatcaccttcctgaaaactttaggccatataccaatggtcagaagcaggaatttaataaccaagcaaccaatgtaattaaattttcagatcctcaatggaaccattttcagggtcccagttgtcaaggtttggaaccgtataataaagtgacatataaaccttatcagtcttctgcccagaataatggctcaccagcccaggagataacaggaagtgacacattcgaaggcctgcaacaacaatttttaggagctaatgagaactctgcagaaaatatgcagattattcaacttcaggttcttaacaaagcaaaagagagacaactggagaacttaattgaaaagttaaatgaaagtgaacgtcaaattcgatatctgaatcaccagcttgtaataataaaagatgaaaaggatggtttgactctcagccttcgagaatcacagaaactctttcagaatggaaaagaaagagagatacagcttgaagctcaaataaaagcactggagactcagatacaagcattaaaagtcaatgaagaacagatgatcaagaagtccagaacaactgaaatggctctggaaagcttgaagcagcagctggtggaccttcatcattctgaatcacttcaacgagctagagaacagcatgagagcattgttatgggcctcacaaagaagtacgaagagcaagtattgtccttacaaaagaatttggatgccacagtcaccgcacttaaagaacaggaagacatttgctctcgtctgaaagatcacgtgaaacaactggaaaggaatcaagaagcaatcaagttagaaaagactgagatcattaataagttgacaagaagtctagaggagagtcaaaagcagtgtgcccacttgttgcagtccgggtcagtacaagaggtggctcagctacagttccagctgcagcaagcacagaaggcacatgctatgagtgcaaacatgaacaaggctttgcaagaagaattaacagaactaaaagatgaaatttctctctatgaatctgctgcaaaactaggaatacatccaagtgactcagaaggagaattaaatatagaactcactgaatcgtatgtggatttgggtattaaaaaggtcaactggaaaaaatccaaagttaccagcattgtacaagaagaagacccaaatgaagagctttcaaaagatgagttcattctgaagttaaaggcagaagtacagcgtttgctgggtagcaactcaatgaagcgtcatctggtgtctcagttacaaaatgacctcaaagactgtcataagaaaattgaagatctccaccaagtgaagaaggatgaaaaaagcattgaggttgagactaaaacagatacctcagaaaaaccaaagaatcaattatggcctgagtcttctacttctgatgttgtcagagatgatattctgctgcttaaaaatgaaattcaagttttacaacaacaaaatcaggaacttaaagaaactgaaggaaaactgagaaatacaaatcaagacttatgtaatcaaatgagacaaatggtacaagattttgaccatgacaaacaagaagctgtggataggtgtgaaaggacttatcagcagcaccatgaagccatgaaaactcaaatacgtgaaagcctattagcaaagcatgctttggagaagcagcagctctttgaggcttatgagagaactcatttgcaactgaggtctgagttggataagttgaataaggaggtgactgctgtgcaggaatgttacctagaagtgtgcagagagaaggataatctagaattgactctcaggaagaccactgaaaaggagcaacagactcaggagaagatcaaagaaaaactcattcaacagcttgaaaaggagtggcagtctaagctggatcaaactataaaggcaatgaaaaagaagaccttagattgtggcagccaaactgaccaagtaaccaccagtgatgttatttccaagaaagagatggcaattatgatagaagagcagaagtgcacaatccagcaaaacttagaacaagagaaggacatagccatcaagggggctatgaagaaactcgaaattgaattggaactcaaacattgtgaaaatattaccaaacaggtagaaatagctgtgcaaaatgctcatcagcgatggctgggagaactaccagagctggcagagtatcaagcacttgtgaaggcagaacagaaaaagtgggaagaacagcatgaggtctctgtgaacaaaaggatatcatttgctgtttctgaagctaaagagaaatggaagagtgagcttgaaaatatgaggaaaaatatacttcctggaaaggaattggaagagaagattcattctcttcagaaggaacttgagttaaagaacgaagaagtccctgtggtcatcagggctgagttagctaaggctcggagtgaatggaacaaagaaaagcaagaagaaatccacagaatccaagaacaaaatgagcaagattaccggcaatttttagatgatcaccgaaataaaattaatgaggtgcttgcggcagctaaagaagactttatgaaacaaaaaactgaactacttcttcagaaggagacagaattacaaacttgtctagaccagagtcgtagagaatggactatgcaggaagccaagcggatccaactggaaatctatcagtatgaggaagacatcctgactgtacttggggttcttttaagtgatacccaaaaggagcacatcagtgattctgaggacaagcagcttttggaaatcatgtcgacttgttcttcaaaatggatgtctgtgcaatattttgaaaaactaaagggctgcatacagaaagcatttcaagatacacttcctctgcttgtagaaaacgctgacccagaatggaaaaagagaaatatggccgagctctctaaggattctgccagccagggcactggccaaggagaccctggacctgctgctggacaccatgctcagcccttggccttacaagcaacagaagcagaagctgaagagaataataaagttgttgaagaattaatagaagaaaacaacgacatgaagaataaattggaagaattgcaaacactttgtaaaacaccaccaaggtcattgtcagcaggggccattgaaaatgcttgcctgccatgcagtgggggagccttggaagaacttcgtgggcagtacattaaagctgtaaaaaaaattaaatgtgacatgcttcgttatattcaggagagtaaggaacgagctgcagaaatggtaaaagcagaggtactgcgagaacgtcaagaaaccgcccgaaagatgcgcaaatattatttgatttgcctccaacagattttgcaggatgatggaaaagaaggggctgagaaaaagattatgaatgctgctagcaaacttgctacaatggcaaaattactggaaacacctatttctagtaagtcccaaagcaaaactacacagtcagcactgcccctaacttcagagatgctgattgcagttaaaaaatcaaaaagaaatgatgtgaatcagaaaataccatgttgtattgaaagcaaatcaaatagtgtaaacaccatcaccagaactctgtgcgaacaagctcccaagaggagggcagcttgtaacttacaaaggctgttagagaactcagagcatcagagcataaagcatgtgggatccaaagagacacatttggaattccagtttggggatggtagttgcaagcacctaaacagtttgccaaggaatgtttctcctgagtttgttccttgtgaaggtgaaggaggctttggtttgcacaagaagaaagacctactcagtgataatggttctgaatcacttccgcattcagctgcatacccctttcttggaaccttaggaaataaaccctcacctagatgtacccctggtccttctgaatcaggatgcatgcatataacctttcgcgattctaatgaaagacttggtttaaaagtatataaatgcaatccactaatggaaagtgaaaatgctgcatctgagaaaagtcaaggtttggatgttcaggaacctccagtaaaagatggaggggaccttagtgactgcttgggctggccttccagcagtgcaaccttatcctttgacagtcgtgaagcatcatttgtacatggtaggccacaaggaactttggaaataccaagtgaatctgttaaatccaaacagttttcaccatccggttatctttcagatacagaggaaagtaatatgatttgtcaaacaatgaaatgtcagcgttatcaaactccatacctgtcagaagaaaccacgtatttggagccaggaaagatcagtgtgaattgtggacacccatctcgtcataaggctgatagattaaagtcagatttcaaaaaactgagcagtacattaccatcttcagtgtgtcagcagccttcaagaaaattaattgttccgctatctagccaacaagatagtggctttgatagcccatttgttaatctagactaattatggtacagtatttaagaagaatcattaatatattaacaaaaatggaagggaagacctcatactgaaaaaaattgtgagccctgcctcttttgaga

SEQ ID NO: 5413 - DNA, 1896 bp, Homo sapiens
  source 1..1896: mol_type = unassigned DNA
ggttgtgactaggaaggagctagtggactagagccagggtaaggggatctgctagaagttggtcttccgccaggactagagtttcctcgcggtaacagcctccgtggcctccggaggaccatgtcattagactttggcagtgtggcactaccagtgcaaaatgaagatgaagagtatgacgaagaggactatgaaagagagaaagagttgcagcagttactcacagaccttccccatgacatgctggatgacgacctctcctctccagagctccagtattcggactgcagcgaggatggcacagacggacaaccacatcatcctgagcaattggagatgagctggaatgagcaaatgctgcccaaatctcaaagtgtaaatggctataatgaaattcagagtttatatgctggagaaaaatgtggtaatgtctgggaagaaaatagaagtaaaactgaagaccgacatcctgtgtaccatcctgaagaaggtggagatgaaggtggaagtggttatagtcctccaagtaaatgtgaacagactgatttatatcaccttcctgaaaactttaggccatataccaatggtcagaagcaggaatttaataaccaagcaaccaatgtaattaaattttcagatcctcaatggaaccattttcagggtcccagttgtcaaggtttggaaccgtataataaagtgacatataaaccttatcagtcttctgcccagaataatggctcaccagcccaggagataacaggaagtgacacattcgaaggcctgcaacaacaatttttaggagctaatgagaactctgcagaaaatatgcagattattcaacttcaggttcttaacaaagcaaaagagagacaactggagaacttaattgaaaagttaaatgaaagtgaacgtcaaattcgatatctgaatcaccagcttgtaataataaaagatgaaaaggatggtttgactctcagccttcgagaatcacagaaactctttcagaatggaaaagaaagagagatacagcttgaagctcaaataaaagcactggagactcagatacaagcattaaaagtcaatgaagaacagatgatcaagaagtccagaacaactgaaatggctctggaaagcttgaagcagcagctggtggaccttcatcattctgaatcacttcaacgagctagagaacagcatgagagcattgttatgggcctcacaaagaagtacgaagagcaagtattgtccttacaaaagaatttggatgccacagtcaccgcacttaaagaacaggaagacatttgctctcgtctgaaagatcacgtgaaacaactggaaaggaatcaagaagcaatcaagttagaaaagactgagatcattaataagttgacaagaagtctagaggagagtcaaaagcagtgtgcccacttgttgcagtccgggtcagtacaagaggtggctcagctacagttccagctgcagcaagcacagaaggcacatgctatgagtgcaaacatgaacaaggctttgcaagaagaattaacagaactaaaagatgaaatttctctctatgaatctgctgcaaaactaggaatacatccaagtgactcagaaggagaattaaatatagaactcactgaatcgtatgtggatttgggtattaaaaaggtcaactggaaaaaatccaaagttaccagcattgtacaagaagaagacccaaatgaagagctttcaaaagatgagttcattctgaagttaaaggcagaagtacagcgtttgctgggtagcaactcaatgaagcgtcatctggtgtctcagttacaaaatgacctcaaagactgtcataagaaaattgaagatctccaccaagtgaaaaaaaaaaaaaaaaaaaaaaaa

SEQ ID NO: 5414 - DNA, 588 bp, Homo sapiens
  source 1..588: mol_type = unassigned DNA
agccccgggcatcctgggccccgtgcggctttggtcatgtttgtagtgccgtagctgacgccaaacagttcctcaaggtcattcgctcagcctgtggatgcttattgtgtattagcattactcgctccgccctctgggcaacttgaatcaatttgtccaaagtgctgttattagcactgatcacaagatgttgtgatcatttgtttatatgtctattttctttcccttcatcgtgtcctgttaaactttgtaatcttgaacagtgcttggtaaattgtcgaatgaatgaataaggtgtctccaccaggtgttgcaagtctaaaccgggctatgtgctctggctatttccattctagaaggcgagttatgtcagcaagaggaccatgtcattagactttggcagtgtggcactaccagtgcaaaatgaagatgaagagtatgacgaagaggactatgaaagagagaaagagttgcagcagttactcacagaccttccccatgacatgctggatgacgacctctcctctccagagctccagtattcggactgcagcgaggatggcacagacggacaaccacatcatcctg

SEQ ID NO: 5415 - DNA, 6828 bp, Homo sapiens
  source 1..6828: mol_type = unassigned DNA
cacggtaaggggatgacgtagctttgccaaagacttagaagctaagcagaaaatgagcttaacatcctggtttttggtgagcagtggaggcactcgccacaggctgccacgagaaatgatttttgttggaagagatgactgtgagctcatgttgcagtctcgtagtgtggataagcaacacgctgtcatcaactatgatgcgtctacggatgagcatttagtgaaggatttgggcagcctcaatgggacttttgtgaatgatgtaaggattccggaacagacttatatcaccttgaaacttgaagataagctgagatttggatatgatacaaatcttttcactgtagtacaaggagaaatgagggtccctgaagaagctcttaagcatgagaagtttaccattcagcttcagttgtcccaaaaatcttcagaatcagaattatccaaatctgcaagtgccaaaagcatagattcaaaggtagcagacgctgctactgaagtgcagcacaaaactactgaagcactgaaatccgaggaaaaagccatggatatttctgctatgccccgtggtactccattatatgggcagccgtcatggtggggggatgatgaggtggatgaaaaaagagctttcaagacaaatggcaaacctgaagaaaaaaaccatgaagctggaacatcagggtgcggcatagatgccaagcaagttgaggaacaatctgcagctgcaaatgaagaagtactttttcctttctgtagggaaccaagttattttgaaatccctacaaaagaattccagcaaccatcacaaataacagaaagcactattcatgaaatcccaacaaaagacacgccaagttcccatataacaggtgcagggcatgcttcatttaccattgaatttgatgacagtaccccagggaaggtaactattagagaccatgtgacaaagtttacttctgatcagcgccacaagtccaagaagtcttctcctggaactcaagacttgctggggattcaaacaggaatgatggcacccgaaaacaaagttgctgactggctagcacaaaacaaccctcctcaaatgctatgggaaagaacagaagaggattctaaaagcattaaaagtgatgttccagtgtacttgaaaaggttgaaaggaaataaacatgatgatggtacgcaaagtgattcagagaacgctggggctcacaggcgctgtagcaaacgtgcaactcttgaggaacacttaagacgccaccattcagaacacaaaaagctacagaaggtccaggctactgaaaagcatcaagaccaagctgttactagctctgcgcatcacagaggggggcatggtgttccacatgggaaattgttaaaacagaaatcagaggagccatcggtgtcaatacccttcctacaaactgcattattaagaagttcagggagtcttgggcacagaccaagccaggagatggataaaatgttaaaaaatcaagcaacttctgctacttctgaaaaggataatgatgatgaccaaagtgacaagggtacttataccattgagttagagaatcccaacagtgaggaagtggaagcaagaaaaatgattgacaaggtgtttggagtagatgacaatcaggattataataggcctgttatcaacgaaaaacataaagatctaataaaagattgggctctcagttctgctgcagcagtaatggaagaaagaaaaccactgactacatctggatttcaccactcagaggaaggcacatcttcatctggaagcaaacgttgggtttcacagtgggctagtttggctgccaatcatacaaggcatgatcaagaagaaaggataatggaattttctgcacctcttcctttagagaatgagacagagatcagtgagtctggcatgacagtgagaagtactggctctgcaacttccttggctagccagggagagagaaggagacgaactcttccccagcttccaaatgaagaaaagtctcttgagagccacagagcaaaggttgtaacacagaggtcagagataggagaaaaacaagacacagaacttcaggagaaagaaacacctacacaggtataccagaaagataaacaagatgctgacagacccttgagtaaaatgaacagggcagtaaatggagagactctcaaaactggtggagataataaaaccctacttcacttaggcagctctgctcctggaaaagagaaaagtgaaactgataaggaaacttctttggtaaagcaaacattagcaaaacttcaacaacaagaacaaagggaggaggctcagtggacacctactaaattgtcttccaaaaatgtttcaggtcagacagataaatgtagggaggaaacttttaaacaagaatcacaacctccagaaaaaaattcaggacattctacaagcaaaggagacagagtggcacaaagtgagagcaagagaagaaaagctgaggaaattctgaaaagtcagactccaaagggaggagacaagaaggaatcctccaagtcattagtgcgacaagggagcttcactatagaaaaacccagcccaaacatacccatagaacttattccccatataaataaacagacttcctctactccttcttctttagcattaacatctgcaagtagaatacgagaaagaagtgagtctttggatcctgattctagtatggacacaacccttattctaaaagacacagaagcagtaatggcttttctagaagctaaactacgtgaagataataaaactgatgaaggaccagatactcccagttataatagagacaattctatttcaccagaatctgatgtagatacagctagtacaatcagtctggttactggagaaactgaaagaaagtcaacccaaaagcgaaagagtttcactagcctctataaagataggtgttccacaggttctccttccaaagatgttacaaaatcatcatcttcaggtgctagggaaaaaatggaaaagaaaacaaaaagtcgttccacagatgtgggttcaagagcagatggtcgtaaatttgttcagtccagtgggagaataagacagccctcagtagacttaacagatgatgaccaaacctctagtgtacctcattctgccatctctgatattatgtcatctgatcaagaaacttactcttgtaaacctcatggacggactccacttacctcagctgatgagcatgtacattccaaactggaaggaagtaaagtaacgaaatctaagacttctccggtggtatctggttcatctagtaaatcaaccacccttccaaggccacgacctaccaggacttccctcttgcgcagagcacgacttggtgaagcttcagacagtgaacttgctgatgctgacaaagcatctgttgcttctgaagtatccacaacaagttctacatcaaaacctcccacaggaaggcgtaacatctctcggattgatttattggctcagcctcgtagaacacgacttggctcactgtcagctcgtagtgactctgaagcaacaatttctagaagtagtgcctcttcgaggaccgcagaagccatcattagaagtggagccagactagtaccatcagataaattttctcctagaattagagctaacagtatctctcgactctcagactccaaggtcaaaagtatgacctcagctcatggctctgcttcagtaaattcaagatggaggcgctttcctactgattatgcttccacctcagaagatgaatttggatcaaaccgtaattcccctaaacatacccgtctacgtacttctccagccctgaaaaccactcgcttgcagagcgctggatcagcaatgcctactagttcttcattcaaacaccggattaaagagcaggaagactacatccgagattggactgctcatcgagaagagatagccaggatcagccaagatcttgctctcattgctcgggagatcaacgatgtagcaggagagatagattcagtgacttcatcaggcactgcccctagtaccacagtaagcactgctgccaccacccctggctctgccatagacactagagaagagttggttgatcgtgtttttgatgaaagcctcaacttccgaaagattcctccattagttcattccaaaacaccagaaggaaacaacggtcgatctggtgatccaagacctcaagcagcagagcctcccgatcacttaacaattacaaggcggagaacctggagcagggatgaagtcatgggagataatctgctgctgtcatccgtctttcagttctctaagaagataagacaatctatagataagacagctggaaagatcagaatattatttaaagacaaagatcggaattgggatgacatagaaagcaaattaagagccgaaagtgaagtccctattgtgaaaacctcaagcatggagatttcttctatcttacaggaactgaaaagagtagaaaagcagctgcaagcaatcaatgctatgattgatcctgatggaactttggaggctctgaacaacatgggatttcccagtgctatgttgccatctccaccgaaacagaagtccagccctgtgaataaccaccacagcccgggtcagacaccaacacttggccaaccagaagctagggctcttcatcctgctgctgtttcagccgcagctgaatttgagaatgctgaatctgaggctgatttcagtatacatttcaatagattcaaccccgatggggaagaggaagatgttacagtacaagaatgactttctcttgattgttgaaaaatcattacctgtggaatggctaggaatattggaagcagcatagtgttgatgtacgcaaaacaagacagcttggtcagctacaatcttggaatccctgtcttcttaattttatttatttatttttgacgtataatgtagtatatcaatcctttcaaactatttagataaccacttgatgcacaaataggaaaaagcagattgtggcagtgtcgccttttgtggttttatgattttcaaattgaatttaatgattacaccctttcccttcatagatcttttttcttttttttaagccatgctgtgacctacaagcaaactaaatagccaacatttctgaacccctaagtctcctgtgccaagctgctccctgaaatggacttcttcatctgtacagatttgttaaaccattctatttgcttcttaataataggatttatattagtactcattaccattggacacaatgacataagtactctccacagtaaagcagacctttcacaacagtcactctgtgtcctaaaattttccaacatagatgtgatttatataactttgttgatacgtaaattgtcttggggtttacggaaattaactattatgtttgcactaagatttgctgggagtggtaggtggacatatctatatatcaataaggactaaccgtcttttttgtacataggagattgataatactgtatttgttttaagcccacagtgttttactccactttcaaaaagatcaatttggcactttttttcattttttttaatggaaataagatttggtctctcattttaggttaaatgataactagaaagattaaactagacagatagtttaggtggagtatatttttaaaactcagaacatgtatattggtcctgtgttaccaagtttatatgtgacagttgaaaaagaaattcccttgaaatgatcatgaggttaaaattttcttcattaggggacttggagaaccagtagtcgtaagattagttgatagtttcactcccaagcaatgaattgcttctgtgtgtttccctgtaggactcaatagtaaatgctgtctgtcttacacatttataaggaccctgcaagacgacgacaaaggcctttggcctgtgctactaaacaagaagcctatgaaaaatttcttctttaaacttgttttttctctttccagtaagttcacatttggataattttaaaaagaaaagtaattacctttgtgtttccagaacactataattggggtgtatcttaattcagttaaatattattagtagacctggattttcccccttgaccccatcagtctataaaggttaaactgcaacttttatgaaatggtctttaatatttccacaataatcctgtgctatatttgttttaagaaacaaagtaactctatacacttcaagactttacaggattttttaaatcctgtattgttggatcaattaataaagatgcaaaaaaactttatagagatgtaaaaacaaaactataatggatctcctatttttctttaaatacaaaaaaaaaaaggtaaatgaactattctccttgtaaagctaaattccccattctgtctaataaaggaagactgaaaaaaggttttaaagaacataaatggaaagatacaaatgctttgaaggaataaacgaaatgttaaaacagggtcaatccatttgaagaaaaagttggacaaaataatcagcattgctccctcttttatttaatatttgggtactgattatatccacatggaagtagaaggtaaggagtttaggaaaatactagaatctactctgcttacattcttgtttaagtgtttacacagtttggttcaattataaacatttggccttttactatgttatttttattttgtatgaatacattatcctccttatttatttttgttacatttattacttatgttattttgttatgcatttacaactccatttttaaataaagtgtttctggaacttta

SEQ ID NO: 5416 - DNA, 6727 bp, Homo sapiens
  source 1..6727: mol_type = unassigned DNA
ttggaactgggcaggaggggatagggtccggctcctcgccctttcccgaggcgcctgcgcactaggcagtcggtctttgccgttaccgctatgtgtggggcgtgtgtggaataacgttattgcccagcggagctgagggccccggagctcgaccgcagcggcagcgacgacaacagcggcgacgacgacgacgacgaggtggggggaggacggcgtgcgagagactcacgggacgcgacgcgccccgcctcccccgtccggtccctctctccacggtaaggggatgacgtagctttgccaaagacttagaagctaagcagaaaatgagcttaacatcctggtttttggtgagcagtggaggcactcgccacaggctgccacgagaaatgatttttgttggaagagatgactgtgagctcatgttgcagtctcgtagtgtggataagcaacacgctgtcatcaactatgatgcgtctacggatgagcatttagtgaaggatttgggcagcctcaatgggacttttgtgaatgatgtaaggattccggaacagacttatatcaccttgaaacttgaagataagctgagatttggatatgatacaaatcttttcactgtagtacaaggagaaatgagggtccctgaagaagctcttaagcatgagaagtttaccattcagcttcagttgtcccaaaaatcttcagaatcagaattatccaaatctgcaagtgccaaaagcatagattcaaaggtagcagacgctgctactgaagtgcagcacaaaactactgaagcactgaaatccgaggaaaaagccatggatatttctgctatgccccgtggtactccattatatgggcagccgtcatggtggggggatgatgaggtggatgaaaaaagagctttcaagacaaatggcaaacctgaagaaaaaaaccatgaagctggaacatcagggtgcggcatagatgccaagcaagttgaggaacaatctgcagctgcaaatgaagaagtactttttcctttctgtagggaaccaagttattttgaaatccctacaaaagaattccagcaaccatcacaaataacagaaagcactattcatgaaatcccaacaaaagacacgccaagttcccatataacaggtgcagggcatgcttcatttaccattgaatttgatgacagtaccccagggaaggtaactattagagaccatgtgacaaagtttacttctgatcagcgccacaagtccaagaagtcttctcctggaactcaagacttgctggggattcaaacaggaatgatggcacccgaaaacaaagttgctgactggctagcacaaaacaaccctcctcaaatgctatgggaaagaacagaagaggattctaaaagcattaaaagtgatgttccagtgtacttgaaaaggttgaaaggaaataaacatgatgatggtacgcaaagtgattcagagaacgctggggctcacaggcgctgtagcaaacgtgcaactcttgaggaacacttaagacgccaccattcagaacacaaaaagctacagaaggtccaggctactgaaaagcatcaagaccaagctgttgtgtttggagtagatgacaatcaggattataataggcctgttatcaacgaaaaacataaagatctaataaaagattgggctctcagttctgctgcagcagtaatggaagaaagaaaaccactgactacatctggatttcaccactcagaggaaggcacatcttcatctggaagcaaacgttgggtttcacagtgggctagtttggctgccaatcatacaaggcatgatcaagaagaaaggataatggaattttctgcacctcttcctttagagaatgagacagagatcagtgagtctggcatgacagtgagaagtactggctctgcaacttccttggctagccagggagagagaaggagacgaactcttccccagcttccaaatgaagaaaagtctcttgagagccacagagcaaaggttgtaacacagaggtcagagataggagaaaaacaagacacagaacttcaggagaaagaaacacctacacaggtataccagaaagataaacaagatgctgacagacccttgagtaaaatgaacagggcagtaaatggagagactctcaaaactggtggagataataaaaccctacttcacttaggcagctctgctcctggaaaagagaaaagtgaaactgataaggaaacttctttggtaaagcaaacattagcaaaacttcaacaacaagaacaaagggaggaggctcagtggacacctactaaattgtcttccaaaaatgtttcaggtcagacagataaatgtagggaggaaacttttaaacaagaatcacaacctccagaaaaaaattcaggacattctacaagcaaaggagacagagtggcacaaagtgagagcaagagaagaaaagctgaggaaattctgaaaagtcagactccaaagggaggagacaagaaggaatcctccaagtcattagtgcgacaagggagcttcactatagaaaaacccagcccaaacatacccatagaacttattccccatataaataaacagacttcctctactccttcttctttagcattaacatctgcaagtagaatacgagaaagaagtgagtctttggatcctgattctagtatggacacaacccttattctaaaagacacagaagcagtaatggcttttctagaagctaaactacgtgaagataataaaactgatgaaggaccagatactcccagttataatagagacaattctatttcaccagaatctgatgtagatacagctagtacaatcagtctggttactggagaaactgaaagaaagtcaacccaaaagcgaaagagtttcactagcctctataaagataggtgttccacaggttctccttccaaagatgttacaaaatcatcatcttcaggtgctagggaaaaaatggaaaagaaaacaaaaagtcgttccacagatgtgggttcaagagcagatggtcgtaaatttgttcagtccagtgggagaataagacagccctcagtagacttaacagatgatgaccaaacctctagtgtacctcattctgccatctctgatattatgtcatctgatcaagaaacttactcttgtaaacctcatggacggactccacttacctcagctgatgagcatgtacattccaaactggaaggaagtaaagtaacgaaatctaagacttctccggtggtatctggttcatctagtaaatcaaccacccttccaaggccacgacctaccaggacttccctcttgcgcagagcacgacttggtgaagcttcagacagtgaacttgctgatgctgacaaagcatctgttgcttctgaagtatccacaacaagttctacatcaaaacctcccacaggaaggcgtaacatctctcggattgatttattggctcagcctcgtagaacacgacttggctcactgtcagctcgtagtgactctgaagcaacaatttctagaagtagtgcctcttcgaggaccgcagaagccatcattagaagtggagccagactagtaccatcagataaattttctcctagaattagagctaacagtatctctcgactctcagactccaaggtcaaaagtatgacctcagctcatggctctgcttcagccctgaaaaccactcgcttgcagagcgctggatcagcaatgcctactagttcttcattcaaacaccggattaaagagcaggaagactacatccgagattggactgctcatcgagaagagatagccaggatcagccaagatcttgctctcattgctcgggagatcaacgatgtagcaggagagatagattcagtgacttcatcaggcactgcccctagtaccacagtaagcactgctgccaccacccctggctctgccatagacactagagaagaggtaggagatcttcatggagaaatgcataagttggttgatcgtgtttttgatgaaagcctcaacttccgaaagattcctccattagttcattccaaaacaccagaaggaaacaacggtcgatctggtgatccaagacctcaagcagcagagcctcccgatcacttaacaattacaaggcggagaacctggagcagggatgaagtcatgggagataatctgctgctgtcatccgtctttcagttctctaagaagataagacaatctatagataagacagctggaaagatcagaatattatttaaagacaaagatcggaattgggatgacatagaaagcaaattaagagccgaaagtgaagtccctattgtgaaaacctcaagcatggagatttcttctatcttacaggaactgaaaagagtagaaaagcagctgcaagcaatcaatgctatgattgatcctgatggaactttggaggctctgaacaacatgggatttcccagtgctatgttgccatctccaccgaaacagaagtccagccctgtgaataaccaccacagcccgggtcagacaccaacacttggccaaccagaagctagggctcttcatcctgctgctgtttcagccgcagctgaatttgagaatgctgaatctgaggctgatttcagtatacatttcaatagattcaaccccgatggggaagaggaagatgttacagtacaagaatgactttctcttgattgttgaaaaatcattacctgtggaatggctaggaatattggaagcagcatagtgttgatgtacgcaaaacaagacagcttggtcagctacaatcttggaatccctgtcttcttaattttatttatttatttttgacgtataatgtagtatatcaatcctttcaaactatttagataaccacttgatgcacaaataggaaaaagcagattgtggcagtgtcgccttttgtggttttatgattttcaaattgaatttaatgattacaccctttcccttcatagatcttttttcttttttttaagccatgctgtgacctacaagcaaactaaatagccaacatttctgaacccctaagtctcctgtgccaagctgctccctgaaatggacttcttcatctgtacagatttgttaaaccattctatttgcttcttaataataggatttatattagtactcattaccattggacacaatgacataagtactctccacagtaaagcagacctttcacaacagtcactctgtgtcctaaaattttccaacatagatgtgatttatataactttgttgatacgtaaattgtcttggggtttacggaaattaactattatgtttgcactaagatttgctgggagtggtaggtggacatatctatatatcaataaggactaaccgtcttttttgtacataggagattgataatactgtatttgttttaagcccacagtgttttactccactttcaaaaagatcaatttggcactttttttcattttttttaatggaaataagatttggtctctcattttaggttaaatgataactagaaagattaaactagacagatagtttaggtggagtatatttttaaaactcagaacatgtatattggtcctgtgttaccaagtttatatgtgacagttgaaaaagaaattcccttgaaatgatcatgaggttaaaattttcttcattaggggacttggagaaccagtagtcgtaagattagttgatagtttcactcccaagcaatgaattgcttctgtgtgtttccctgtaggactcaatagtaaatgctgtctgtcttacacatttataaggaccctgcaagacgacgacaaaggcctttggcctgtgctactaaacaagaagcctatgaaaaatttcttctttaaacttgttttttctctttccagtaagttcacatttggataattttaaaaagaaaagtaattacctttgtgtttccagaacactataattggggtgtatcttaattcagttaaatattattagtagacctggattttcccccttgaccccatcagtctataaaggttaaactgcaacttttatgaaatggtctttaatatttccacaataatcctgtgctatatttgttttaagaaacaaagtaactctatacacttcaagactttacaggattttttaaatcctgtattgttggatcaattaataaagatgcaaaaaaactttatagagatgtaaaaacaaaactataatggatctcctatttttctttaaatacaaaaaaaaaaaggtaaatgaactattctccttgtaaagctaaattccccattctgtctaataaaggaagactgaaaaaaggttttaaagaacataaatggaaagatacaaatgctttgaaggaataaacgaaatgttaaaacagggtcaatccatttgaagaaaaagttggacaaaataatcagcattgctccctcttttatttaatatttgggtactgattatatccacatggaagtagaaggtaaggagtttaggaaaatactagaatctactctgcttacattcttgtttaagtgtttacacagtttggttcaattataaacatttggccttttactatgttatttttattttgtatgaatacattatcctccttatttatttttgttacatttattacttatgttattttgttatgcatttacaactccatttttaaataaagtgtttctggaacttta

SEQ ID NO: 5417 - DNA, 6805 bp, Homo sapiens
  source 1..6805: mol_type = unassigned DNA
ttggaactgggcaggaggggatagggtccggctcctcgccctttcccgaggcgcctgcgcactaggcagtcggtctttgccgttaccgctatgtgtggggcgtgtgtggaataacgttattgcccagcggagctgagggccccggagctcgaccgcagcggcagcgacgacaacagcggcgacgacgacgacgacgaggtggggggaggacggcgtgcgagagactcacgggacgcgacgcgccccgcctcccccgtccggtccctctctccacggtaaggggatgacgtagctttgccaaagacttagaagctaagcagaaaatgagcttaacatcctggtttttggtgagcagtggaggcactcgccacaggctgccacgagaaatgatttttgttggaagagatgactgtgagctcatgttgcagtctcgtagtgtggataagcaacacgctgtcatcaactatgatgcgtctacggatgagcatttagtgaaggatttgggcagcctcaatgggacttttgtgaatgatgtaaggattccggaacagacttatatcaccttgaaacttgaagataagctgagatttggatatgatacaaatcttttcactgtagtacaaggagaaatgagggtccctgaagaagctcttaagcatgagaagtttaccattcagcttcagttgtcccaaaaatcttcagaatcagaattatccaaatctgcaagtgccaaaagcatagattcaaaggtagcagacgctgctactgaagtgcagcacaaaactactgaagcactgaaatccgaggaaaaagccatggatatttctgctatgccccgtggtactccattatatgggcagccgtcatggtggggggatgatgaggtggatgaaaaaagagctttcaagacaaatggcaaacctgaagaaaaaaaccatgaagctggaacatcagggtgcggcatagatgccaagcaagttgaggaacaatctgcagctgcaaatgaagaagtactttttcctttctgtagggaaccaagttattttgaaatccctacaaaagaattccagcaaccatcacaaataacagaaagcactattcatgaaatcccaacaaaagacacgccaagttcccatataacaggtgcagggcatgcttcatttaccattgaatttgatgacagtaccccagggaaggtaactattagagaccatgtgacaaagtttacttctgatcagcgccacaagtccaagaagtcttctcctggaactcaagacttgctggggattcaaacaggaatgatggcacccgaaaacaaagttgctgactggctagcacaaaacaaccctcctcaaatgctatgggaaagaacagaagaggattctaaaagcattaaaagtgatgttccagtgtacttgaaaaggttgaaaggaaataaacatgatgatggtacgcaaagtgattcagagaacgctggggctcacaggcgctgtagcaaacgtgcaactcttgaggaacacttaagacgccaccattcagaacacaaaaagctacagaaggtccaggctactgaaaagcatcaagaccaagctgttgtgtttggagtagatgacaatcaggattataataggcctgttatcaacgaaaaacataaagatctaataaaagattgggctctcagttctgctgcagcagtaatggaagaaagaaaaccactgactacatctggatttcaccactcagaggaaggcacatcttcatctggaagcaaacgttgggtttcacagtgggctagtttggctgccaatcatacaaggcatgatcaagaagaaaggataatggaattttctgcacctcttcctttagagaatgagacagagatcagtgagtctggcatgacagtgagaagtactggctctgcaacttccttggctagccagggagagagaaggagacgaactcttccccagcttccaaatgaagaaaagtctcttgagagccacagagcaaaggttgtaacacagaggtcagagataggagaaaaacaagacacagaacttcaggagaaagaaacacctacacaggtataccagaaagataaacaagatgctgacagacccttgagtaaaatgaacagggcagtaaatggagagactctcaaaactggtggagataataaaaccctacttcacttaggcagctctgctcctggaaaagagaaaagtgaaactgataaggaaacttctttggtaaagcaaacattagcaaaacttcaacaacaagaacaaagggaggaggctcagtggacacctactaaattgtcttccaaaaatgtttcaggtcagacagataaatgtagggaggaaacttttaaacaagaatcacaacctccagaaaaaaattcaggacattctacaagcaaaggagacagagtggcacaaagtgagagcaagagaagaaaagctgaggaaattctgaaaagtcagactccaaagggaggagacaagaaggaatcctccaagtcattagtgcgacaagggagcttcactatagaaaaacccagcccaaacatacccatagaacttattccccatataaataaacagacttcctctactccttcttctttagcattaacatctgcaagtagaatacgagaaagaagtgagtctttggatcctgattctagtatggacacaacccttattctaaaagacacagaagcagtaatggcttttctagaagctaaactacgtgaagataataaaactgatgaaggaccagatactcccagttataatagagacaattctatttcaccagaatctgatgtagatacagctagtacaatcagtctggttactggagaaactgaaagaaagtcaacccaaaagcgaaagagtttcactagcctctataaagataggtgttccacaggttctccttccaaagatgttacaaaatcatcatcttcaggtgctagggaaaaaatggaaaagaaaacaaaaagtcgttccacagatgtgggttcaagagcagatggtcgtaaatttgttcagtccagtgggagaataagacagccctcagtagacttaacagatgatgaccaaacctctagtgtacctcattctgccatctctgatattatgtcatctgatcaagaaacttactcttgtaaacctcatggacggactccacttacctcagctgatgagcatgtacattccaaactggaaggaagtaaagtaacgaaatctaagacttctccggtggtatctggttcatctagtaaatcaaccacccttccaaggccacgacctaccaggacttccctcttgcgcagagcacgacttggtgaagcttcagacagtgaacttgctgatgctgacaaagcatctgttgcttctgaagtatccacaacaagttctacatcaaaacctcccacaggaaggcgtaacatctctcggattgatttattggctcagcctcgtagaacacgacttggctcactgtcagctcgtagtgactctgaagcaacaatttctagaagtagtgcctcttcgaggaccgcagaagccatcattagaagtggagccagactagtaccatcagataaattttctcctagaattagagctaacagtatctctcgactctcagactccaaggtcaaaagtatgacctcagctcatggctctgcttcagtaaattcaagatggaggcgctttcctactgattatgcttccacctcagaagatgaatttggatcaaaccgtaattcccctaaacatacccgtctacgtacttctccagccctgaaaaccactcgcttgcagagcgctggatcagcaatgcctactagttcttcattcaaacaccggattaaagagcaggaagactacatccgagattggactgctcatcgagaagagatagccaggatcagccaagatcttgctctcattgctcgggagatcaacgatgtagcaggagagatagattcagtgacttcatcaggcactgcccctagtaccacagtaagcactgctgccaccacccctggctctgccatagacactagagaagagttggttgatcgtgtttttgatgaaagcctcaacttccgaaagattcctccattagttcattccaaaacaccagaaggaaacaacggtcgatctggtgatccaagacctcaagcagcagagcctcccgatcacttaacaattacaaggcggagaacctggagcagggatgaagtcatgggagataatctgctgctgtcatccgtctttcagttctctaagaagataagacaatctatagataagacagctggaaagatcagaatattatttaaagacaaagatcggaattgggatgacatagaaagcaaattaagagccgaaagtgaagtccctattgtgaaaacctcaagcatggagatttcttctatcttacaggaactgaaaagagtagaaaagcagctgcaagcaatcaatgctatgattgatcctgatggaactttggaggctctgaacaacatgggatttcccagtgctatgttgccatctccaccgaaacagaagtccagccctgtgaataaccaccacagcccgggtcagacaccaacacttggccaaccagaagctagggctcttcatcctgctgctgtttcagccgcagctgaatttgagaatgctgaatctgaggctgatttcagtatacatttcaatagattcaaccccgatggggaagaggaagatgttacagtacaagaatgactttctcttgattgttgaaaaatcattacctgtggaatggctaggaatattggaagcagcatagtgttgatgtacgcaaaacaagacagcttggtcagctacaatcttggaatccctgtcttcttaattttatttatttatttttgacgtataatgtagtatatcaatcctttcaaactatttagataaccacttgatgcacaaataggaaaaagcagattgtggcagtgtcgccttttgtggttttatgattttcaaattgaatttaatgattacaccctttcccttcatagatcttttttcttttttttaagccatgctgtgacctacaagcaaactaaatagccaacatttctgaacccctaagtctcctgtgccaagctgctccctgaaatggacttcttcatctgtacagatttgttaaaccattctatttgcttcttaataataggatttatattagtactcattaccattggacacaatgacataagtactctccacagtaaagcagacctttcacaacagtcactctgtgtcctaaaattttccaacatagatgtgatttatataactttgttgatacgtaaattgtcttggggtttacggaaattaactattatgtttgcactaagatttgctgggagtggtaggtggacatatctatatatcaataaggactaaccgtcttttttgtacataggagattgataatactgtatttgttttaagcccacagtgttttactccactttcaaaaagatcaatttggcactttttttcattttttttaatggaaataagatttggtctctcattttaggttaaatgataactagaaagattaaactagacagatagtttaggtggagtatatttttaaaactcagaacatgtatattggtcctgtgttaccaagtttatatgtgacagttgaaaaagaaattcccttgaaatgatcatgaggttaaaattttcttcattaggggacttggagaaccagtagtcgtaagattagttgatagtttcactcccaagcaatgaattgcttctgtgtgtttccctgtaggactcaatagtaaatgctgtctgtcttacacatttataaggaccctgcaagacgacgacaaaggcctttggcctgtgctactaaacaagaagcctatgaaaaatttcttctttaaacttgttttttctctttccagtaagttcacatttggataattttaaaaagaaaagtaattacctttgtgtttccagaacactataattggggtgtatcttaattcagttaaatattattagtagacctggattttcccccttgaccccatcagtctataaaggttaaactgcaacttttatgaaatggtctttaatatttccacaataatcctgtgctatatttgttttaagaaacaaagtaactctatacacttcaagactttacaggattttttaaatcctgtattgttggatcaattaataaagatgcaaaaaaactttatagagatgtaaaaacaaaactataatggatctcctatttttctttaaatacaaaaaaaaaaaggtaaatgaactattctccttgtaaagctaaattccccattctgtctaataaaggaagactgaaaaaaggttttaaagaacataaatggaaagatacaaatgctttgaaggaataaacgaaatgttaaaacagggtcaatccatttgaagaaaaagttggacaaaataatcagcattgctccctcttttatttaatatttgggtactgattatatccacatggaagtagaaggtaaggagtttaggaaaatactagaatctactctgcttacattcttgtttaagtgtttacacagtttggttcaattataaacatttggccttttactatgttatttttattttgtatgaatacattatcctccttatttatttttgttacatttattacttatgttattttgttatgcatttacaactccatttttaaataaagtgtttctggaacttta

SEQ ID NO: 5418 - DNA, 1953 bp, Homo sapiens
  source 1..1953: mol_type = unassigned DNA
gggcaagctggaaaagcgtgtgggtgagaccctcgcacaaccccttttcattgtctgtgtgtggcgcctgcgcagtaagggatcgttggaactgggcaggaggggatagggtccggctcctcgccctttcccgaggcgcctgcgcactaggcagtcggtctttgccgttaccgctatgtgtggggcgtgtgtggaataacgttattgcccagcggagctgagggccccggagctcgaccgcagcggcagcgacgacaacagcggcgacgacgacgacgacgaggtggggggaggacggcgtgcgagagactcacgggacgcgacgcgccccgcctcccccgtccggtccctctctccacggtaaggggatgacgtagctttgccaaagacttagaagctaagcagaaaatgagcttaacatcctggtttttggtgagcagtggaggcactcgccacaggctgccacgagaaatgatttttgttggaagagatgactgtgagctcatgttgcagtctcgtagtgtggataagcaacacgctgtcatcaactatgatgcgtctacggatgagcatttagtgaaggatttgggcagcctcaatgggacttttgtgaatgatgtaaggattccggaacagacttatatcaccttgaaacttgaagataagctgagatttggatatgatacaaatcttttcactgtagtacaaggagaaatgagggtccctgaagaagctcttaagcatgagaagtttaccattcagcttcagttgtcccaaaaatcttcagaatcagaattatccaaatctgcaagtgccaaaagcatagattcaaaggtagcagacgctgctactgaagtgcagcacaaaactactgaagcactgaaatccgaggaaaaagccatggatatttctgctatgccccgtggtactccattatatgggcagccgtcatggtggggggatgatgaggtggatgaaaaaagagctttcaagacaaatggcaaacctgaagaaaaaaaccatgaagctggaacatcagggtgcggcatagatgccaagcaagttgaggaacaatctgcagctgcaaatgaagaagtactttttcctttctgtagggaaccaagttattttgaaatccctacaaaagaattccagcaaccatcacaaataacagaaagcactattcatgaaatcccaacaaaagacacgccaagttcccatataacaggtgcagggcatgcttcatttaccattgaatttgatgacagtaccccagggaaggtaactattagagaccatgtgacaaagtttacttctgatcagcgccacaagtccaagaagtcttctcctggaactcaagacttgctggggattcaaacaggaatgatggcacccgaaaacaaagttgctgactggctagcacaaaacaaccctcctcaaatgctatgggaaagaacagaagaggattctaaaagcattaaaagtgatgttccagtgtacttgaaaaggttgaaaggaaataaacatgatgatggtacgcaaagtgattcagagaacgctggggctcacaggcgctgtagcaaacgtgcaactcttgaggaacacttaagacgccaccattcagaacacaaaaagctacagaaggtccaggctactgaaaagcatcaagaccaagctgttactagctctgcgcatcacagaggggggcatggtgttccacatgggaaattgttaaaacagaaatcagaggagccatcggtgtcaatacccttcctacaaactgcattattaagaagttcagggagtcttgggcacagaccaagccaggagatggataaaatgttaaaaaatcaagcagattgtggcagtgtcgccttttgtggttttatgattttcaaattgaatttaatgattacaccctttcccttcatagatcttttttcttttttttaa

SEQ ID NO: 5419 - DNA, 561 bp, Homo sapiens
  source 1..561: mol_type = unassigned DNA
gtcatgcaccctgcctggcgactgcaccccgtggaggctctggctctgtagtaaacccgggggaggagagagtggcttcctgtcggcttcattgtcctaggattcagatgtagggttttggatgacgtagctttgccaaagacttagaagctaagcagaaaatgagcttaacatcctggtttttggtgagcagtggaggcactcgccacaggctgccacgagaaatgatttttgttggaagagatgactgtgagctcatgttgcagtctcgtagtgtggataagcaacacgctgtcatcaactatgatgcgtctacggatgagcatttagtgaaggatttgggcagcctcaatgggacttttgtgaatgatgtaaggattccggaacagacttatatcaccttgaaacttgaagataagctgagatttggatatgatacaaatcttttcactgtagtacaaggagaaatgagggtccctgaagaagctcttaagcatgagaagtttaccattcagcttcagttgtcccaaaaatcttcagaatcagaattatccaaatctg

SEQ ID NO: 5420 - DNA, 608 bp, Homo sapiens
  source 1..608: mol_type = unassigned DNA
gtgtggcgcctgcgcagtaagggatcgttggaactgggcaggaggggatagggtccggctcctcgccctttcccgaggcgcctgcgcactaggcagtcggtctttgccgttaccgctatgtgtggggcgtgtgtggaataacgttattgcccagcggagctgagggccccggagctcgaccgcagcggcagcgacgacaacagcggcgacgacgacgacgacgaggtggggggaggacggcgtgcgagagactcacgggacgcgacgcgccccgcctcccccgtccggtccctctctccacggatgacgtagctttgccaaagacttagaagctaagcagaaaatgagcttaacatcctggtttttggtgagcagtggaggcactcgccacaggctgccacgagaaatgatttttgttggaagagatgactgtgagctcatgttgcagtctcgtagtgtggataagcaacacgctgtcatcaactatgatgcgtctacggatgagcatttagtgaaggatttgggcagcctcaatgggacttttgtgaatgatgtaaggattccggaacagacttatatcaccttgaaacttgaagataagctgagat

SEQ ID NO: 5421 - DNA, 593 bp, Homo sapiens
  source 1..593: mol_type = unassigned DNA
atgtgctccctgagtaggctgtgactatcactgaacttgattctcaccgtgattaatctagttcttgcctttgtgatgtaaaagtagtaatcctcctaaaatggacctttactttcataaagtaacttactacatgaggaaagatgtcctaacatgtgcttttcataaaaacgaagtgttgcagtgttttccctactacctaatggtagctacttaacggatgacgtagctttgccaaagacttagaagctaagcagaaaatgagcttaacatcctggtttttggtgagcagtggaggcactcgccacaggctgccacgagaaatgatttttgttggaagagatgactgtgagctcatgttgcagtctcgtagtgtggataagcaacacgctgtcatcaactatgatgcgtctacggatgagcatttagtgaaggatttgggcagcctcaatgggacttttgtgaatgatgtaaggattccggaacagacttatatcaccttgaaacttgaagataagctgagatttggatatgatacaaatcttttcactgtagtacaaggagaaatgagggtccctgaagaagctcttaag

SEQ ID NO: 5422 - DNA, 4638 bp, Homo sapiens
  source 1..4638: mol_type = unassigned DNA
gggcaagctggaaaagcgtgtgggtgagaccctcgcacaaccccttttcattgtctgtgtgtggcgcctgcgcagtaagggatcgttggaactgggcaggaggggatagggtccggctcctcgccctttcccgaggcgcctgcgcactaggcagtcggtctttgccgttaccgctatgtgtggggcgtgtgtggaataacgttattgcccagcggagctgagggccccggagctcgaccgcagcggcagcgacgacaacagcggcgacgacgacgacgacgaggtggggggaggacggcgtgcgagagactcacgggacgcgacgcgccccgcctcccccgtccggtccctctctccacggtaaggggatgacgtagctttgccaaagacttagaagctaagcagaaaatgagcttaacatcctggtttttggtgagcagtggaggcactcgccacaggctgccacgagaaatgatttttgttggaagagatgactgtgagctcatgttgcagtctcgtagtgtggataagcaacacgctgtcatcaactatgatgcgtctacggatgagcatttagtgaaggatttgggcagcctcaatgggacttttgtgaatgatgtaaggattccggaacagacttatatcaccttgaaacttgaagataagctgagatttggatatgatacaaatcttttcactgtagtacaaggagaaatgagggtccctgaagaagctcttaagcatgagaagtttaccattcagcttcagttgtcccaaaaatcttcagaatcagaattatccaaatctgcaagtgccaaaagcatagattcaaaggtagcagacgctgctactgaagtgcagcacaaaactactgaagcactgaaatccgaggaaaaagccatggatatttctgctatgccccgtggtactccattatatgggcagccgtcatggtggggggatgatgaggtggatgaaaaaagagctttcaagacaaatggcaaacctgaagaaaaaaaccatgaagctggaacatcagggtgcggcatagatgccaagcaagttgaggaacaatctgcagctgcaaatgaagaagtactttttcctttctgtagggaaccaagttattttgaaatccctacaaaagaattccagcaaccatcacaaataacagaaagcactattcatgaaatcccaacaaaagacacgccaagttcccatataacaggtgcagggcatgcttcatttaccattgaatttgatgacagtaccccagggaaggtaactattagagaccatgtgacaaagtttacttctgatcagcgccacaagtccaagaagtcttctcctggaactcaagacttgctggggattcaaacaggaatgatggcacccgaaaacaaagttgctgactggctagcacaaaacaaccctcctcaaatgctatgggaaagaacagaagaggattctaaaagcattaaaagtgatgttccagtgtacttgaaaaggttgaaaggaaataaacatgatgatggtacgcaaagtgattcagagaacgctggggctcacaggcgctgtagcaaacgtgcaactcttgaggaacacttaagacgccaccattcagaacacaaaaagctacagaaggtccaggctactgaaaagcatcaagaccaagctgttgtgtttggagtagatgacaatcaggattataataggcctgttatcaacgaaaaacataaagatctaataaaagattgggctctcagttctgctgcagcagtaatggaagaaagaaaaccactgactacatctggatttcaccactcagaggaaggcacatcttcatctggaagcaaacgttgggtttcacagtgggctagtttggctgccaatcatacaaggcatgatcaagaagaaaggataatggaattttctgcacctcttcctttagagaatgagacagagatcagtgagtctggcatgacagtgagaagtactggctctgcaacttccttggctagccagggagagagaaggagacgaactcttccccagcttccaaatgaagaaaagtctcttgagagccacagagcaaaggttgtaacacagaggtcagagataggagaaaaacaagacacagaacttcaggagaaagaaacacctacacaggtataccagaaagataaacaagatgctgacagacccttgagtaaaatgaacagggcagtaaatggagagactctcaaaactggtggagataataaaaccctacttcacttaggcagctctgctcctggaaaagagaaaagtgaaactgataaggaaacttctttggtaaagcaaacattagcaaaacttcaacaacaagaacaaagggaggaggctcagtggacacctactaaattgtcttccaaaaatgtttcaggtcagacagataaatgtagggaggaaacttttaaacaagaatcacaacctccagaaaaaaattcaggacattctacaagcaaaggagacagagtggcacaaagtgagagcaagagaagaaaagctgaggaaattctgaaaagtcagactccaaagggaggagacaagaaggaatcctccaagtcattagtgcgacaagggagcttcactatagaaaaacccagcccaaacatacccatagaacttattccccatataaataaacagacttcctctactccttcttctttagcattaacatctgcaagtagaatacgagaaagaagtgagtctttggatcctgattctagtatggacacaacccttattctaaaagacacagaagcagtaatggcttttctagaagctaaactacgtgaagataataaaactgatgaaggaccagatactcccagttataatagagacaattctatttcaccagaatctgatgtagatacagctagtacaatcagtctggttactggagaaactgaaagaaagtcaacccaaaagcgaaagagtttcactagcctctataaagataggtgttccacaggttctccttccaaagatgttacaaaatcatcatcttcaggtgctagggaaaaaatggaaaagaaaacaaaaagtcgttccacagatgtgggttcaagagcagatggtcgtaaatttgttcagtccagtgggagaataagacagccctcagtagacttaacagatgatgaccaaacctctagtgtacctcattctgccatctctgatattatgtcatctgatcaagaaacttactcttgtaaacctcatggacggactccacttacctcagctgatgagcatgtacattccaaactggaaggaagtaaagtaacgaaatctaagacttctccggtggtatctggttcatctagtaaatcaaccacccttccaaggccacgacctaccaggacttccctcttgcgcagagcacgacttggtgaagcttcagacagtgaacttgctgatgctgacaaagcatctgttgcttctgaagtatccacaacaagttctacatcaaaacctcccacaggaaggcgtaacatctctcggattgatttattggctcagcctcgtagaacacgacttggctcactgtcagctcgtagtgactctgaagcaacaatttctagaagtagtgcctcttcgaggaccgcagaagccatcattagaagtggagccagactagtaccatcagataaattttctcctagaattagagctaacagtatctctcgactctcagactccaaggtcaaaagtatgacctcagctcatggctctgcttcagccctgaaaaccactcgcttgcagagcgctggatcagcaatgcctactagttcttcattcaaacaccggattaaagagcaggaagactacatccgagattggactgctcatcgagaagagatagccaggatcagccaagatcttgctctcattgctcgggagatcaacgatgtagcaggagagatagattcagtgacttcatcaggcactgcccctagtaccacagtaagcactgctgccaccacccctggctctgccatagacactagagaagaggtaggagatcttcatggagaaatgcataagttggttgatcgtgtttttgatgaaagcctcaacttccgaaagattcctccattagttcattccaaaacaccagaaggaaacaacggtcgatctggtgatccaagacctcaagcagcagagcctcccgatcacttaacaattacaaggcggagaacctggagcagggatgaagtcatgggagataatctgctgctgtcatccgtctttcagttctctaagaagataagacaatctatagataagacagctggaaagatcagaatattatttaaagacaaagatcggaattgggatgacatagaaagcaaattaagagccgaaagtgaagtccctattgtgaaaacctcaagcatggagatttcttctatcttacaggaactgaaaagagtagaaaagcagctgcaagcaatcaatgctatgattgatcctgatggaactttggaggctctgaacaacatgggatttcccagtgctatgttgccatctccaccgaaacagaagtccagccctgtgaataaccaccacagcccggccatgctgtga

SEQ ID NO: 5423 - DNA, 8155 bp, Homo sapiens
  source 1..8155: mol_type = unassigned DNA
cccggggcccgcttgcctcagcttcttgctgccgccagcacgctaagctccagtcggcgccgaaggagagcttcccgaccctcgtgtccagtagccgcaatcccaggctgggagggtgaggcgccgcgctctgccgcccccccgcccctcgctccctgtgtcctggcggatttgcacgtaatctatccgaaagcccagtcccacccgccacccgactctggagctcccattcttcaggaccctgctgaagtatcgcttctcagccgccttctccaggcgcagctgcattcgcttctcggtttttgcactcgctgtgcaccgagttactttcccggcccctcgttgacaccgttcacaggtggctgttggtctttagtaagggtgctgtcttccctgtctgatccttagcaaaagtaggaaggtagagttgttggcagaaatcctgggataagagaatagtttcctggaagatctgtgcctccaaccagcagagagggattgagcttcattgaactcaacagagccaacatttcatagcaccatgttcaagaggaggttgaagtggcatggcaatggttagagaccctgctgggcgtgaacaccctctggctacctagggacctgtgggcctaccacctggtgccctcatggagacaagaagccctgggttgaacaacatgaagccccagtcactgcagctggtactggaagagcaggtgctggcactacagcagcagatggcagagaatcaggcagcctcctggcggaagctgaagaactcccaggaggcccagcagagacaagcaacccttgtgaggaagctgcaggccaaggtgctgcagtaccgaagctggtgccaagagctggagaagcggctagaagccactggaggaccaatcccccagaggtgggaaaatgtggaggagccaaacctggatgagctgctggtccgattggaggaggagcaacagaggtgtgagagtctagcagaggtgaacacccagcttcgactgcacatggaaaaagctgacgtggtgaataaagcccttagggaagatgtggaaaaactgacagtggactggagccgggcccgggatgagctaatgaggaaggagagccagtggcagatggagcaggagttcttcaagggctacctgaaaggggagcacggtcgccttctcagtctatggcgggaggttgtgacattccgacgccacttcctggaaatgaagtcagctactgacagagatctgatggagctaaaagctgagcatgtgaggctttcagggtctctgttgacctgttgtctgcgcttgactgtgggagcacagtctcgggaacccaacggatctggaagaatggatgggcgggagccggcccagctgctgctgctactagccaagacccaggagctggagaaggaagcccatgaaaggagccaggagttaatacagctgaagagtcaaggggatctggagaaggctgaacttcaggaccgggtgaccgagctctctgctctgttgacccagtctcagaagcaaaatgaagattatgaaaagatgataaaggctctgagagagacagtggagatcctggagacaaatcacacagaattaatggaacatgaagcatctcttagtaggaatgcgcaagaggagaagttgtctttacagcaggtgatcaaggatataacccaggtcatggtggaagaaggggacaatatagcccaaggctctggtcatgagaactctttggaattggactctagtatcttctcccagtttgattaccaggatgcagacaaggctcttactctggtgcgttcagtgctgactcggagacgccaggctgtgcaggacctaaggcagcagcttgcaggctgtcaagaggctgtgaacttgttgcaacagcagcatgatcagtgggaggaagagggcaaagccttgagacagcggctgcagaagctcactggggagcgggacactctggcagggcagactgtggacctccagggagaggtggactctctcagcaaggagcgagagctgctgcagaaggccagggaagagctgcggcagcagctggaggtgctagagcaggaggcatggcgcctgcgaagggtaaatgtggagcttcagctgcagggggactctgcccagggccagaaggaggaacagcaggaggagctgcacctggctgtccgggagagggagcgtcttcaggagatgctgatgggcctggaagccaaacagtcagaatcactcagtgaactgatcactcttcgggaagccctggagtcaagtcacctggaaggggagttactgaggcaagagcaaacggaagtgaccgcagcgctggctagggcagagcagtcaattgcagagctgtcgagttctgaaaacaccctgaagacagaagtagctgatcttcgggctgcagctgtcaagctcagtgccttaaatgaggctttggcgttagataaagttgggctgaaccagcagcttctccagttagaggaggagaaccagtctgtgtgcagcagaatggaggccgcagagcaggcgagaaatgctttgcaggtcgacctggcggaggcagagaagaggagggaagccctgtgggaaaagaacactcacctggaggctcagctgcagaaagctgaggaggctggggctgagctgcaggcagatctcagggacatccaagaagagaaggaagaaattcaaaagaaactaagtgagtcacgtcaccagcaggaggcagccacgactcagctggagcagctacatcaggaggcaaagcgacaggaagaagtgcttgccagggcagtccaggagaaggaggccctagtacgagagaaagcggctctagaggtgcggctgcaggccgtggagcgtgaccggcaggacctcgctgaacaactacaggggctcagctcagccaaggagctactggagagcagtctgtttgaagcccaacaacaaaattctgtgatagaggtcaccaaggggcagctggaggtccagattcaaactgtcactcaagccaaggaagtaatccaaggggaagtgaggtgcctgaagctggaactggacactgaacggagtcaggcagagcaggagcgggatgctgcagccagacagctggcccaggctgagcaagaagggaagactgccttggagcagcagaaggcagcccatgagaaagaggtgaaccagctccgggagaaatggatgcagctggaaacagagaaggagagagtatccctcctggagacactgctgcagacgcagaaggagctagcagatgccagccaacaactggaacgactgaggcaggacatgaaagtccagaaattaaaggagcaggagaccactgggatactacagacccagctccaggaggctcaacgggagctgaaggaggcagcccggcagcacagagatgaccttgctgccctccaagaagagagcagctccctgctgcaggataagatggacctgcagaagcaggtggaggacttgaagtctcagctggtggcccaggatgactcccagaggctggtggagcaggaggttcaggagaagctgagagagacccaggagtataaccgaattcagaaggagctggagagagagaaagccagcctgactctgtcactgatggaaaaggaacagagactccttgttttacaagaagctgactctattcgacaacaagagctgagtgccctgcgccaggacatgcaggaggcccagggagaacagaaagagctcagtgctcagatggaattactaaggcaagaggtgaaggaaaaggaggctgactttctggcccaggaagcacagctgctggaggagctggaggcgtctcatatcacggagcagcagctgcgagcctccttgtgggcccaggaagccaaggcagcccaactacagctgcgactgcgcagcacagagagccagctagaagcgctggccgcagagcagcagcccgggaaccaggcccaggcccaggcccagctggccagcctctactctgccctgcagcaggccctggggtctgtttgtgagagcaggcctgagctgagtggtgggggagactctgctccttccgtctggggccttgagccagaccagaatggagctaggagcctctttaagagagggcccctgctgactgctctctccgctgaggcagtagcatctgccctccacaagcttcatcaagacctgtggaagactcaacagacccgggatgttctgagggatcaggtccagaaactggaagagcgtctaactgatactgaggctgagaagagccaggtccacacagagttgcaggatctgcagagacagctctcccagaatcaggaagagaaatccaagtgggaaggaaagcagaactccctagaatctgagctgatggaactacatgaaactatggcatccttacagagtcgcctgcggagagcagagctacagcgaatggaagcccagggtgagcgagagttacttcaggcagccaaggagaacctgacagcccaggtggaacacctgcaagcagctgtcgtagaagccagggctcaggcaagtgctgctggcatcctggaagaagacctgagaacggctcgctcagcactgaagctgaaaaatgaggaagtagagagtgagcgtgagagagcccaggctctgcaagagcagggcgaactgaaggtggcccaagggaaggctctgcaagagaatttggccctcctgacccagaccctagctgaaagagaagaggaggtggagactctgcggggacaaatccaggaactggagaagcaacgggaaatgcagaaggctgctttggaattgctgtctctggacctgaagaagaggaaccaagaggtagatctgcagcaagaacagattcaggagctagagaagtgtaggtctgttttagagcatctgcccatggccgtccaggagcgagagcagaagctgactgtgcagagggagcagatcagagagctcgagaaggatcgggagactcagaggaacgtcttggagcatcagcttctagaacttgagaagaaagaccaaatgattgagtcccagagaggacaggttcaggacctgaaaaagcagttggttactctggaatgcctggccctggaactggaggaaaaccatcacaagatggagtgccagcaaaaactgatcaaggagctggagggccagagggaaacccagagagtggctttgacccaccttacgctggacctagaagaaaggagccaggagctgcaggcacaaagcagccagatccatgacctggagagccacagcaccgttctggcaagagagctgcaggagagggaccaggaggtgaagtctcagcgagaacagatcgaggagctgcagaggcagaaagagcatctgactcaggatctcgagaggagagaccaggagctgatgctgcagaaggagaggattcaggttctcgaggatcagaggacccggcagaccaagatcctggaggaggacctggaacagatcaagctgtccttgagagagcgaggccgggagctgaccactcagaggcagctgatgcaggaacgggcagaggaagggaagggcccaagtaaagcacagcgcgggagcctagagcacatgaagctgatcctgcgtgataaggagaaggaggtggaatgtcagcaggagcatatccatgaactccaggagctcaaagaccagctggagcagcagctccagggcctgcacaggaaggtaggtgagaccagcctcctcctgtcccagcgagagcaggaaatagtggtcctgcagcagcaactgcaggaagccagggaacaaggggagctgaaggagcagtcacttcagagtcaactggatgaggcccagagagccctagcccagagggaccaggaactggaggctctgcagcaagaacagcagcaggcccagggacaggaggagagggtgaaggaaaaggcagacgccctccagggagctctggagcaagcccatatgacactgaaggagcgtcatggagagcttcaggaccacaaggaacaggcacgaaggctggaggaagagctggcagtggagggacggcgggtccaggccctggaggaggtgctgggagacctaagggctgagtctcgggaacaggagaaagctctgttggccctccagcagcagtgtgctgagcaggcacaggagcatgaggtggagaccagggccctgcaggacagctggctgcaggcccaggcagtgctcaaggaacgggaccaggagctggaagctctgcgggcagaaagtcagtcctcccggcatcaggaggaggctgcccgggcccgggctgaggctctgcaggaggcccttggcaaggctcatgctgccctgcaggggaaagagcagcatctcctcgagcaggcagaattgagccgcagtctggaggccagcactgcaaccctgcaagcctccctggatgcctgccaggcacacagtcggcagctggaggaggctctgaggatacaagaaggtgagatccaggaccaggatctccgataccaggaggatgtgcagcagctgcagcaggcacttgcccagagggatgaagagctgagacatcagcaggaacgggagcagctgctggagaagtctctggcccagagggtccaagagaatatgatccaagagaagcagaatctggggcaagagagagaagaggaggagataaggggccttcatcagagtgtaagggagctacagctgactctagcccaaaaggaacaggagattctggagctgagggagacccagcaaaggaacaacctggaagccttaccccacagccacaaaacctccccaatggaggaacaatctctaaaacttgattctttagagcccaggctgcagcgggagctggagcggctacaggcagccctgagacagacagaagccagggagattgagtggagggagaaggcccaggacttggcactctccctagcgcagaccaaggccagtgtcagcagtctgcaggaggtagccatgttcctacaagcctctgtcctggagcgggactcagaacagcaaaggctgcaggatgaactggagctcaccagacgggctctggagaaggagcggctacacagcccaggtgcaaccagcacagcagaactggggtccagaggggagcagggtgtgcagctgggagaggtctcaggagtggaggctgagcctagtcctgatggaatggagaagcagtcatggagacaaaggcttgaacacctgcagcaagcagtggcccggctggagattgacaggagcaggctgcagcgccacaatgtccagctgcggagtaccttggagcaggtggagcgagaacggaggaagctgaagagggaggccatgcgtgcggcccaggcagggtccctagagatcagcaaggccacggcttcttcacccacacagcaggatgggagaggacagaagaactcagatgccaagtgtgtggctgaactgcagaaagaggtggtcctgctgcaagctcagctgactttggagcggaagcagaagcaggactacatcacccgctcagcacagaccagccgtgagctagcaggcctgcaccacagcctctcacactcacttcttgccgtggcccaggcccctgaggccactgtcctggaggcagagacccgcaggctggatgagtccctgactcaaagtctgacatccccagggccagtcctgctacaccccagccccagcactacccaagccgcctccaggtagcagccacagccaggagcacacagacagaagactgtgtcatgggtcatggcccctccgcacacctacaggtttgccaaaggaaaagcctggctctgttaggcacccaggagccccaggtcggcgggtgttcccaggaagaggaagtaaatctgcaaccctggggaggaccccaactcacctgggaatgaggcaaattgcatttgcttgctccctatggaatcacccagaggggtgccttgccctggctgagggacatgtactgcctctcatctagaatttattttcctagcacttcaccacctccttcatcttctccttcaacaataaaccctgagatctttgcattc

SEQ ID NO: 5424 - DNA, 1419 bp, Homo sapiens
  source 1..1419: mol_type = unassigned DNA
gttactttcccggcccctcgttgacaccgttcacaggtggctgttggtctttagtaagggtgctgtcttccctgtctgatccttagcaaaagtaggaaggtagagttgttggcagaaatcctgggataagagaatagtttcctggaagatctgtgcctccaaccagcagagagggattgagcttcattgaactcaacagagccaacatttcatagcaccatgttcaagaggaggttgaagtggcatggcaatggttagagaccctgctgggcgtgaacaccctctggctacctagggacctgtgggcctaccacctggtgccctcatggagacaagaagccctgggttgaacaacatgaagccccagtcactgcagctggtactggaagagcaggtgctggcactacagcagcagatggcagagaatcaggcagcctcctggcggaagctgaagaactcccaggaggcccagcagagacaagcaacccttgtgaggaagctgcaggccaaggtgctgcagtaccgaagctggtgccaagagctggagaagcggctagaagccactggaggaccaatcccccagaggtgggaaaatgtggaggagccaaacctggatgagctgctggtccgattggaggaggagcaacagaggtgtgagagtctagcagaggtgaacacccagcttcgactgcacatggaaaaagctgacgtggtgaataaagcccttagggaagatgtggaaaaactgacagtggactggagccgggcccgggatgagctaatgaggaaggagagccagtggcagatggagcaggagttcttcaagggctacctgaaaggggagcacggtcgccttctcagtctatggcgggaggttgtgacattccgacgccacttcctggaaatgaagtcagctactgacagagatctgatggagctaaaagctgagcatgtgaggctttcagggtctctgttgacctgttgtctgcgcttgactgtgggagcacagtctcgggaacccaacggatctggaagaatggatgggcgggagccggcccagctgctgctgctactagccaagacccaggagctggagaaggaagcccatgaaaggagccaggagttaatacagctgaagagtcaaggggatctggagaaggctgaacttcaggaccgggtgaccgagctctctgctctgttgacccagtctcagaagcaaaatgaagattatgaaaagatgataaaggctctgagagagacagtggagatcctggtacatgatcctttgctctggaaaggagttgggcgtgggcttgtaggttccttgtgctttatggacagatagtgcaggataccagttacatattccatgatgaaatcctctaaagctaaaaaataaattttggctgaatctgaaaa

SEQ ID NO: 5425 - DNA, 8398 bp, Homo sapiens
  source 1..8398: mol_type = unassigned DNA
cgttcgggcagcggcctcttgttacccgggaggaacccgaggcccagagaggggctgggacgcgtcgttagggcccggggcccgcttgcctcagcttcttgctgccgccagcacgctaagctccagtcggcgccgaaggagagcttcccgaccctcgtgtccagtagccgcaatcccaggctgggagggtgaggcgccgcgctctgccgcccccccgcccctcgctccctgtgtcctggcggatttgcacgtaatctatccgaaagcccagtcccacccgccacccgactctggagctcccattcttcaggaccctgctgaagtatcgcttctcagccgccttctccaggcgcagctgcattcgcttctcggtttttgcactcgctgtgcaccgagttactttcccggcccctcgttgacaccgttcacaggtggctgttggtctttagtaagggtgctgtcttccctgtctgatccttagcaaaagtaggaaggtagagttgttggcagaaatcctgggataagagaatagtttcctggaagatctgtgcctccaaccagcagagagggattgagcttcattgaactcaacagagccaacatttcatagcaccatgttcaagaggaggttgaagtggcatggcaatggttagagaccctgctgggcgtgaacaccctctggctacctagggacctgtgggcctaccacctggtgccctcatggagacaagaagccctgggttgaacaacatgaagccccagtcactgcagctggtactggaagagcaggtgctggcactacagcagcagatggcagagaatcaggcagcctcctggcggaagctgaagaactcccaggaggcccagcagagacaagcaacccttgtgaggaagctgcaggccaaggtgctgcagtaccgaagctggtgccaagagctggagaagcggctagaagccactggaggaccaatcccccagaggtgggaaaatgtggaggagccaaacctggatgagctgctggtccgattggaggaggagcaacagaggtgtgagagtctagcagaggtgaacacccagcttcgactgcacatggaaaaagctgacgtggtgaataaagcccttagggaagatgtggaaaaactgacagtggactggagccgggcccgggatgagctaatgaggaaggagagccagtggcagatggagcaggagttcttcaagggctacctgaaaggggagcacggtcgccttctcagtctatggcgggaggttgtgacattccgacgccacttcctggaaatgaagtcagctactgacagagatctgatggagctaaaagctgagcatgtgaggctttcagggtctctgttgacctgttgtctgcgcttgactgtgggagcacagtctcgggaacccaacggatctggaagaatggatgggcgggagccggcccagctgctgctgctactagccaagacccaggagctggagaaggaagcccatgaaaggagccaggagttaatacagctgaagagtcaaggggatctggagaaggctgaacttcaggaccgggtgaccgagctctctgctctgttgacccagtctcagaagcaaaatgaagattatgaaaagatgataaaggctctgagagagacagtggagatcctggagacaaatcacacagaattaatggaacatgaagcatctcttagtaggaatgcgcaagaggagaagttgtctttacagcaggtgatcaaggatataacccaggtcatggtggaagaaggggacaatatagcccaaggctctggtcatgagaactctttggaattggactctagtatcttctcccagtttgattaccaggatgcagacaaggctcttactctggtgcgttcagtgctgactcggagacgccaggctgtgcaggacctaaggcagcagcttgcaggctgtcaagaggctgtgaacttgttgcaacagcagcatgatcagtgggaggaagagggcaaagccttgagacagcggctgcagaagctcactggggagcgggacactctggcagggcagactgtggacctccagggagaggtggactctctcagcaaggagcgagagctgctgcagaaggccagggaagagctgcggcagcagctggaggtgctagagcaggaggcatggcgcctgcgaagggtaaatgtggagcttcagctgcagggggactctgcccagggccagaaggaggaacagcaggaggagctgcacctggctgtccgggagagggagcgtcttcaggagatgctgatgggcctggaagccaaacagtcagaatcactcagtgaactgatcactcttcgggaagccctggagtcaagtcacctggaaggggagttactgaggcaagagcaaacggaagtgaccgcagcgctggctagggcagagcagtcaattgcagagctgtcgagttctgaaaacaccctgaagacagaagtagctgatcttcgggctgcagctgtcaagctcagtgccttaaatgaggctttggcgttagataaagttgggctgaaccagcagcttctccagttagaggaggagaaccagtctgtgtgcagcagaatggaggccgcagagcaggcgagaaatgctttgcaggtcgacctggcggaggcagagaagaggagggaagccctgtgggaaaagaacactcacctggaggctcagctgcagaaagctgaggaggctggggctgagctgcaggcagatctcagggacatccaagaagagaaggaagaaattcaaaagaaactaagtgagtcacgtcaccagcaggaggcagccacgactcagctggagcagctacatcaggaggcaaagcgacaggaagaagtgcttgccagggcagtccaggagaaggaggccctagtacgagagaaagcggctctagaggtgcggctgcaggccgtggagcgtgaccggcaggacctcgctgaacaactacaggggctcagctcagccaaggagctactggagagcagtctgtttgaagcccaacaacaaaattctgtgatagaggtcaccaaggggcagctggaggtccagattcaaactgtcactcaagccaaggaagtaatccaaggggaagtgaggtgcctgaagctggaactggacactgaacggagtcaggcagagcaggagcgggatgctgcagccagacagctggcccaggctgagcaagaagggaagactgccttggagcagcagaaggcagcccatgagaaagaggtgaaccagctccgggagaaatgggagaaggagcgctcctggcaccagcaggagctggcaaaggctctggagagcttagaaagggaaaaaatggagctggaaatgaggctaaaggagcagcagacagaaatggaggccatccaggcccagagggaagaagaacggacccaggcagagagtgccctatgccagatgcagctggaaacagagaaggagagagtatccctcctggagacactgctgcagacgcagaaggagctagcagatgccagccaacaactggaacgactgaggcaggacatgaaagtccagaaattaaaggagcaggagaccactgggatactacagacccagctccaggaggctcaacgggagctgaaggaggcagcccggcagcacagagatgaccttgctgccctccaagaagagagcagctccctgctgcaggataagatggacctgcagaagcaggtggaggacttgaagtctcagctggtggcccaggatgactcccagaggctggtggagcaggaggttcaggagaagctgagagagacccaggagtataaccgaattcagaaggagctggagagagagaaagccagcctgactctgtcactgatggaaaaggaacagagactccttgttttacaagaagctgactctattcgacaacaagagctgagtgccctgcgccaggacatgcaggaggcccagggagaacagaaagagctcagtgctcagatggaattactaaggcaagaggtgaaggaaaaggaggctgactttctggcccaggaagcacagctgctggaggagctggaggcgtctcatatcacggagcagcagctgcgagcctccttgtgggcccaggaagccaaggcagcccaactacagctgcgactgcgcagcacagagagccagctagaagcgctggccgcagagcagcagcccgggaaccaggcccaggcccaggcccagctggccagcctctactctgccctgcagcaggccctggggtctgtttgtgagagcaggcctgagctgagtggtgggggagactctgctccttccgtctggggccttgagccagaccagaatggagctaggagcctctttaagagagggcccctgctgactgctctctccgctgaggcagtagcatctgccctccacaagcttcatcaagacctgtggaagactcaacagacccgggatgttctgagggatcaggtccagaaactggaagagcgtctaactgatactgaggctgagaagagccaggtccacacagagttgcaggatctgcagagacagctctcccagaatcaggaagagaaatccaagtgggaaggaaagcagaactccctagaatctgagctgatggaactacatgaaactatggcatccttacagagtcgcctgcggagagcagagctacagcgaatggaagcccagggtgagcgagagttacttcaggcagccaaggagaacctgacagcccaggtggaacacctgcaagcagctgtcgtagaagccagggctcaggcaagtgctgctggcatcctggaagaagacctgagaacggctcgctcagcactgaagctgaaaaatgaggaagtagagagtgagcgtgagagagcccaggctctgcaagagcagggcgaactgaaggtggcccaagggaaggctctgcaagagaatttggccctcctgacccagaccctagctgaaagagaagaggaggtggagactctgcggggacaaatccaggaactggagaagcaacgggaaatgcagaaggctgctttggaattgctgtctctggacctgaagaagaggaaccaagaggtagatctgcagcaagaacagattcaggagctagagaagtgtaggtctgttttagagcatctgcccatggccgtccaggagcgagagcagaagctgactgtgcagagggagcagatcagagagctcgagaaggatcgggagactcagaggaacgtcttggagcatcagcttctagaacttgagaagaaagaccaaatgattgagtcccagagaggacaggttcaggacctgaaaaagcagttggttactctggaatgcctggccctggaactggaggaaaaccatcacaagatggagtgccagcaaaaactgatcaaggagctggagggccagagggaaacccagagagtggctttgacccaccttacgctggacctagaagaaaggagccaggagctgcaggcacaaagcagccagatccatgacctggagagccacagcaccgttctggcaagagagctgcaggagagggaccaggaggtgaagtctcagcgagaacagatcgaggagctgcagaggcagaaagagcatctgactcaggatctcgagaggagagaccaggagctgatgctgcagaaggagaggattcaggttctcgaggatcagaggacccggcagaccaagatcctggaggaggacctggaacagatcaagctgtccttgagagagcgaggccgggagctgaccactcagaggcagctgatgcaggaacgggcagaggaagggaagggcccaagtaaagcacagcgcgggagcctagagcacatgaagctgatcctgcgtgataaggagaaggaggtggaatgtcagcaggagcatatccatgaactccaggagctcaaagaccagctggagcagcagctccagggcctgcacaggaaggtaggtgagaccagcctcctcctgtcccagcgagagcaggaaatagtggtcctgcagcagcaactgcaggaagccagggaacaaggggagctgaaggagcagtcacttcagagtcaactggatgaggcccagagagccctagcccagagggaccaggaactggaggctctgcagcaagaacagcagcaggcccagggacaggaggagagggtgaaggaaaaggcagacgccctccagggagctctggagcaagcccatatgacactgaaggagcgtcatggagagcttcaggaccacaaggaacaggcacgaaggctggaggaagagctggcagtggagggacggcgggtccaggccctggaggaggtgctgggagacctaagggctgagtctcgggaacaggagaaagctctgttggccctccagcagcagtgtgctgagcaggcacaggagcatgaggtggagaccagggccctgcaggacagctggctgcaggcccaggcagtgctcaaggaacgggaccaggagctggaagctctgcgggcagaaagtcagtcctcccggcatcaggaggaggctgcccgggcccgggctgaggctctgcaggaggcccttggcaaggctcatgctgccctgcaggggaaagagcagcatctcctcgagcaggcagaattgagccgcagtctggaggccagcactgcaaccctgcaagcctccctggatgcctgccaggcacacagtcggcagctggaggaggctctgaggatacaagaaggtgagatccaggaccaggatctccgataccaggaggatgtgcagcagctgcagcaggcacttgcccagagggatgaagagctgagacatcagcaggaacgggagcagctgctggagaagtctctggcccagagggtccaagagaatatgatccaagagaagcagaatctggggcaagagagagaagaggaggagataaggggccttcatcagagtgtaagggagctacagctgactctagcccaaaaggaacaggagattctggagctgagggagacccagcaaaggaacaacctggaagccttaccccacagccacaaaacctccccaatggaggaacaatctctaaaacttgattctttagagcccaggctgcagcgggagctggagcggctacaggcagccctgagacagacagaagccagggagattgagtggagggagaaggcccaggacttggcactctccctagcgcagaccaaggccagtgtcagcagtctgcaggaggtagccatgttcctacaagcctctgtcctggagcgggactcagaacagcaaaggctgcaggatgaactggagctcaccagacgggctctggagaaggagcggctacacagcccaggtgcaaccagcacagcagaactggggtccagaggggagcagggtgtgcagctgggagaggtctcaggagtggaggctgagcctagtcctgatggaatggagaagcagtcatggagacaaaggcttgaacacctgcagcaagcagtggcccggctggagattgacaggagcaggctgcagcgccacaatgtccagctgcggagtaccttggagcaggtggagcgagaacggaggaagctgaagagggaggccatgcgtgcggcccaggcagggtccctagagatcagcaaggccacggcttcttcacccacacagcaggatgggagaggacagaagaactcagatgccaagtgtgtggctgaactgcagaaagaggtggtcctgctgcaagctcagctgactttggagcggaagcagaagcaggactacatcacccgctcagcacagaccagccgtgagctagcaggcctgcaccacagcctctcacactcacttcttgccgtggcccaggcccctgaggccactgtcctggaggcagagacccgcaggctggatgagtccctgactcaaagtctgacatccccagggccagtcctgctacaccccagccccagcactacccaagccgcctccaggtagcagccacagccaggagcacacagacagaagactgtgtcatgggtcatggcccctccgcacacctacaggtttgccaaaggaaaagcctggctctgttaggcacccaggagccccaggtcggcgggtgttcccaggaagaggaagtaaatctgcaaccctggggaggaccccaactcacctgggaatgaggcaaattgcatttgcttgctccctatggaatcacccagaggggtgccttgccctggctgagggacatgtactgcctctcatctagaatttattttcctagcacttcaccacctccttcatcttctccttcaacaataaaccctgagatctttgcattcat

SEQ ID NO: 5426 - DNA, 702 bp, Homo sapiens
  source 1..702: mol_type = unassigned DNA
agcagcggctgccgcagctcaatcgcggagcaactagccgggcgtctgcgggagccgagcgtggttcacaggtggctgttggtctttagtaagggtgctgtcttccctgtctgatccttagcaaaagtaggaaggtagagttgttggcagaaatcctgggataagagaatagtttcctggaagatctgtgcctccaaccagcagagagggattgagcttcattgaactcaacagagccaacatttcatagcaccatgttcaagaggaggttgaagtggcatggcaatggttagagaccctgctgggcgtgaacaccctctggctacctagggacctgtgggcctaccacctggtgccctcatggagacaagaagccctgggttgaacaacatgaagccccagtcactgcagctggtactggaagagcaggtgctggcactacagcagcagatggcagagaatcaggcagcctcctggcggaagctgaagaactcccaggaggcccagcagagacaagcaacccttgtgaggaagctgcaggccaaggtgctgcagtaccgaagctggtgccaagagctggagaagcggctagaagccactggaggaccaatcccccagaggtgggaaaatgtggaggagccaaacctggatgagctgctggtccgattggaggaggagcaacagaggtgtgagagtctagca

SEQ ID NO: 5427 - DNA, 2156 bp, Homo sapiens
  source 1..2156: mol_type = unassigned DNA
ttcaagaggaggttgaagtggcatggcaatggttagagaccctgctgggcgtgaacaccctctggctacctagggacctgtgggcctaccacctggtgccctcatggagacaagaagccctgggttgaacaacatgaagccccagtcactgcagctggtactggaagagcaggtgctggcactacagcagcagatggcagagaatcaggcagcctcctggcggaagctgaagaactcccaggaggcccagcagagacaagcaacccttgtgaggaagctgcaggccaaggtgctgcagtaccgaagctggtgccaagagctggagaagcggctagaagccactggaggaccaatcccccagaggtgggaaaatgtggaggagccaaacctggatgagctgctggtccgattggaggaggagcaacagaggtgtgagagtctagcagaggtgaacacccagcttcgactgcacatggaaaaagctgacgtggtgaataaagcccttagggaagatgtggaaaaactgacagtggactggagccgggcccgggatgagctaatgaggaaggagagccagtggcagatggagcaggagttcttcaagggctacctgaaaggggagcacggtcgccttctcagtctatggcgggaggttgtgacattccgacgccacttcctggaaatgaagtcagctactgacagagatctgatggagctaaaagctgagcatgtgaggctttcagggtctctgttgacctgttgtctgcgcttgactgtgggagcacagtctcgggaacccaacggatctggaagaatggatgggcgggagccggcccagctgctgctgctactagccaagacccaggagctggagaaggaagcccatgaaaggagccaggagttaatacagctgaagagtcaaggggatctggagaaggctgaacttcaggaccgggtgaccgagctctctgctctgttgacccagtctcagaagcaaaatgaagattatgaaaagatgataaaggctctgagagagacagtggagatcctgacaaatcacacagaattaatggaacatgaagcatctcttagtaggaatgcgcaagaggagaagttgtctttacagcaggtgatcaaggatataacccaggtcatggtggaagaaggggacaatatagcccaaggctctggtcatgagaactctttggaattggactctagtatcttctcccagtttgattaccaggatgcagacaaggctcttactctggtgcgttcagtgctgactcggagacgccaggctgtgcaggacctaaggcagcagcttgcaggctgtcaagaggctgtgaacttgttgcaacagcagcatgatcagtgggaggaagagggcaaagccttgagacagcggctgcagaagctcactggggagcgggacactctggcagggcagactgtggacctccagggagaggtggactctctcagcaaggagcgagagctgctgcagaaggccagggaagagctgcggcagcagctggaggtgctagagcaggaggcatggcgcctgcgaagggtaaatgtggagcttcagctgcagggggactctgcccagggccagaaggaggaacagcaggaggagctgcacctggctgtccgggagagggagcgtcttcaggagatgctgatgggcctggaagccaaacagtcagaatcactcagtgaactgatcactcttcgggaagccctggagtcaagtcacctggaaggggagttactgaggcaagagcaaacggaagtgaccgcagcgctggctagggcagagcagtcaattgcagagctgtcgagttctgaaaacaccctgaagacagaagtagctgatcttcgggctgcagctgtcaagctcagtgccttaaatgaggctttggcgttagataaagttgggctgaaccagcagcttctccagttagaggaggagaaccagtctgtgtgcagcagaatggaggccgcagagcaggcgagaaatgctttgcaggtcgacctggcggaggcagagaagaggagggaagccctgtgggaaaagaacactcacctggaggctcagctgcagaaagctgaggaggctggggctgagctgcaggcagatctcagggacatcc

SEQ ID NO: 5428 - DNA, 868 bp, Homo sapiens
  source 1..868: mol_type = unassigned DNA
cgcagggccttagcagcggctgccgcagctcaatcgcggagcaactagccgggcgtctgcgggagccgagcgtggtgaggttcacaggtggctgttggtctttagtaagggtgctgtcttccctgtctgatccttagcaaaagtaggaaggtagagttgttggcagaaatcctgggataagagaatagtttcctggaagatctgtgcctccaaccagcagagagggattgagcttcattgaactcaacagagccaacatttcatagcaccatgttcaagaggaggttgaagtggcatggcaatggttagagaccctgctgggcgtgaacaccctctggctacctagggacctgtgggcctaccacctggtgccctcatggagacaagaagccctgggttgaacaacatgaagccccagtcactgcagctggtactggaagagcaggtgctggcactacagcagcagatggcagagaatcaggcagcctcctggcggaagctgaagaactcccaggaggcccagcagagacaagcaacccttgtgaggaagctgcaggccaaggtgctgcagtaccgaagctggtgccaagagctggagaagcggctagaagccactggaggaccaatcccccagaggtgggaaaatgtggaggagccaaacctggatgagctgctggtccgattggaggaggagcaacagaggtgtgagagtctagcagaggtgaacacccagcttcgactgcacatggaaaaagctgacgtggtgaataaagcccttagggaagatgtggaaaaactgacagtggactggagccgggcccgggatgagctaatgaggaaggagagccagtggcagatggagcaggag

SEQ ID NO: 5429 - DNA, 2295 bp, Homo sapiens
  source 1..2295: mol_type = unassigned DNA
cagtcccacccgccacccgactctggagctcccattcttcaggaccctgctgaagtatcgcttctcagccgccttctccaggcgcagctgcattcgcttctcggtttttgcactcgctgtgcaccgagttactttcccggcccctcgttgacaccgtagagttgttggcagaaatcctgggataagagaatagtttcctggaagatctgtgcctccaaccagcagagagggattgagcttcattgaactcaacagagccaacatttcatagcaccatgttcaagaggaggttgaagtggcatggcaatggttagagaccctgctgggcgtgaacaccctctggctacctagggacctgtgggcctaccacctggtgccctcatggagacaagaagccctgggttgaacaacatgaagccccagtcactgcagctggtactggaagagcaggtgctggcactacagcagcagatggcagagaatcaggcagcctcctggcggaagctgaagaactcccaggaggcccagcagagacaagcaacccttgtgaggaagctgcaggccaaggtgctgcagtaccgaagctggtgccaagagctggagaagcggctagaagccactggaggaccaatcccccagaggtgggaaaatgtggaggagccaaacctggatgagctgctggtccgattggaggaggagcaacagaggtgtgagagtctagcagaggtgaacacccagcttcgactgcacatggaaaaagctgacgtggtgaataaagcccttagggaagatgtggaaaaactgacagtggactggagccgggcccgggatgagctaatgaggaaggagagccagtggcagatggagcaggagttcttcaagggctacctgaaaggggagcacggtcgccttctcagtctatggcgggaggttgtgacattccgacgccacttcctggaaatgaagtcagctactgacagagatctgatggagctaaaagctgagcatgtgaggctttcagggtctctgttgacctgttgtctgcgcttgactgtgggagcacagtctcgggaacccaacggatctggaagaatggatgggcgggagccggcccagctgctgctgctactagccaagacccaggagctggagaaggaagcccatgaaaggagccaggagttaatacagctgaagagtcaaggggatctggagaaggctgaacttcaggaccgggtgaccgagctctctgctctgttgacccagtctcagaagcaaaatgaagattatgaaaagatgataaaggctctgagagagacagtggagatcctggagacaaatcacacagaattaatggaacatgaagcatctcttagtaggaatgcgcaagaggagaagttgtctttacagcaggtgatcaaggatataacccaggtcatggtggaagaaggggacaatatagcccaaggctctggtcatgagaactctttggaattggactctagtatcttctcccagtttgattaccaggatgcagacaaggctcttactctggtgcgttcagtgctgactcggagacgccaggctgtgcaggacctaaggcagcagcttgcaggctgtcaagaggctgtgaacttgttgcaacagcagcatgatcagtgggaggaagagggcaaagccttgagacagcggctgcagaagctcactggggagcgggacactctggcagggcagactgtggacctccagggagaggtggactctctcagcaaggagcgagagctgctgcagaaggccagggaagagctgcggcagcagctggaggtgctagagcaggaggcatggcgcctgcgaagggtaaatgtggagcttcagctgcagggggactctgcccagggccagaaggaggaacagcaggaggagctgcacctggctgtccgggagagggagcgtctgcagagcagtcaattgcagagctgtcgagttctgaaaacaccctgaagacagaagtagctgatcttcgggctgcagctgtcaagctcagtgccttaaatgaggctttggcgttagataaagttgggctgaaccagcagcttctccagttagaggaggagaaccagtctgtgtgcagcagaatggaggccgcagagcaggcgagaaatgctttgcaggtcgacctggcggaggcagagaagaggagggaagccctgtgggaaaagaacactcacctggaggctcagctgcagaaagctgaggaggctggggctgagctgcaggcagatctcagggacatccaag

SEQ ID NO: 5430 - DNA, 7544 bp, Homo sapiens
  source 1..7544: mol_type = unassigned DNA
ggcccgcggccgggtccagcttggtggttgcggtagtgagaggcctccgctggttgccaggcttggtctagaggtggagcacagtgaaagaattcaagatgccacctaatataaactggaaagaaataatgaaagttgacccagatgacctgccccgtcaagaagaactggcagataatttattgatttccttatccaaggtggaagtaaatgagctaaaaagtgaaaagcaagaaaatgtgatacaccttttcagaattactcagtcactaatgaagatgaaagctcaagaagtggagctggctttggaagaagtagaaaaagctggagaagaacaagcaaaatttgaaaatcaattaaaaactaaagtaatgaaactggaaaatgaactggagatggctcagcagtctgcaggtggacgagatactcggtttttacgtaatgaaatttgccaacttgaaaaacaattagaacaaaaagatagagaattggaggacatggaaaaggagttggagaaagagaagaaagttaatgagcaattggctcttcgaaatgaggaggcagaaaatgaaaacagcaaattaagaagagagaacaaacgtctaaagaaaaagaatgaacaactttgtcaggatattattgactaccagaaacaaatagattcacagaaagaaacacttttatcaagaagaggggaagacagtgactaccgatcacagttgtctaaaaaaaactatgagcttatccaatatcttgatgaaattcagactttaacagaagctaatgagaaaattgaagttcagaatcaagaaatgagaaaaaatttagaagagtctgtacaggaaatggagaagatgactgatgaatataatagaatgaaagctattgtgcatcagacagataatgtaatagatcagttaaaaaaagaaaacgatcattatcaacttcaagtgcaggagcttacagatcttctgaaatcaaaaaatgaagaagatgatccaattatggtagctgtcaatgcaaaagtagaagaatggaagctaattttgtcttctaaagatgatgaaattattgagtatcagcaaatgttacataacctaagggagaaacttaagaatgctcagcttgatgctgataaaagtaatgttatggctctacagcagggtatacaggaacgagacagtcaaattaagatgctcaccgaacaagtagaacaatatacaaaagaaatggaaaagaatacttgtattattgaagatttgaaaaatgagctccaaagaaacaaaggtgcttcaaccctttctcaacagactcatatgaaaattcagtcaacgttagacattttaaaagagaaaactaaagaggctgagagaacagctgaactggctgaggctgatgctagggaaaaggataaagaattagttgaggctctgaagaggttaaaagattatgaatcgggagtatatggtttagaagatgctgtcgttgaaataaagaattgtaaaaaccaaattaaaataagagatcgagagattgaaatattaacaaaggaaatcaataaacttgaattgaagatcagtgatttccttgatgaaaatgaggcacttagagagcgtgtgggccttgaaccaaagacaatgattgatttaactgaatttagaaatagcaaacacttaaaacagcagcagtacagagctgaaaaccagattcttttgaaagaggcaagtattgaaagtctagaggaagaacgacttgatctgaaaaaaaaaattcgtcaaatggctcaagaaagaggaaaaagaagtgcaacttcaggattaaccactgaggacctgaacctaactgaaaacatttctcaaggagatagaataagtgaaagaaaattggatttattgagcctcaaaaatatgagtgaagcacaatcaaagaatgaatttctttcaagagaactaattgaaaaagaaagagatttagaaaggagtaggacagtgatagccaaatttcagaataaattaaaagaattagttgaagaaaataagcaacttgaagaaggtatgaaagaaatattgcaagcaattaaggaaatgcagaaagatcctgatgttaaaggaggagaaacatctctaattatccctagccttgaaagactagttaatgctatagaatcaaagaatgcagaaggaatctttgatgcgagtctgcatttgaaagcccaagttgatcagcttaccggaagaaatgaagaattaagacaggagctcagggaatctcggaaagaggctataaattattcacagcagttggcaaaagctaatttaaagatagaccatcttgaaaaagaaactagtcttttacgacaatcagaaggatcaaatgttgtttttaaaggaattgacttacctgatgggatagcaccatctagtgccagtatcattaattctcagaatgaatatttaatacatttgttacaggaactagaaaataaagaaaaaaagttaaagaatttagaagattctcttgaagattacaacagaaaatttgctgtaattcgtcatcaacaaagtttgttgtataaagaatacctaagtgaaaaggagacctggaaaacagaatctaaaacaataaaagaggaaaagagaaaacttgaggatcaagtccaacaagatgctataaaagtaaaagaatataataatttgctcaatgctcttcagatggattcggatgaaatgaaaaaaatacttgcagaaaatagtaggaaaattactgttttgcaagtgaatgaaaaatcacttataaggcaatatacaaccttagtagaattggagcgacaacttagaaaagaaaatgagaagcaaaagaatgaattgttgtcaatggaggctgaagtttgtgaaaaaattgggtgtttgcaaagatttaaggaaatggccattttcaagattgcagctctccaaaaagttgtagataatagtgtttctttgtctgaactagaactggctaataaacagtacaatgaactgactgctaagtacagggacatcttgcaaaaagataatatgcttgttcaaagaacaagtaacttggaacacctggagtgtgaaaacatctccttaaaagaacaagtggagtctataaataaagaactggagattaccaaggaaaaacttcacactattgaacaagcctgggaacaggaaactaaattaggtaatgaatctagcatggataaggcaaagaaatcaataaccaacagtgacattgtttccatttcaaaaaaaataactatgctggaaatgaaggaattaaatgaaaggcagcgggctgaacattgtcaaaaaatgtatgaacacttacggacttcgttaaagcaaatggaggaacgtaattttgaattggaaaccaaatttgctgagcttaccaaaatcaatttggatgcacagaaggtggaacagatgttaagagatgaattagctgatagtgtgagcaaggcagtaagtgatgctgataggcaacggattctagaattagagaagaatgaaatggaactaaaagttgaagtgtcaaaactgagagagatttctgatattgccagaagacaagttgaaattttgaatgcacaacaacaatctagggacaaggaagtagagtccctcagaatgcaactgctagactatcaggcacagtctgatgaaaagtcgctcattgccaagttgcaccaacataatgtctctcttcaactgagtgaggctactgctcttggtaagttggagtcaattacatctaaactgcagaagatggaggcctacaacttgcgcttagagcagaaacttgatgaaaaagaacaggctctctattatgctcgtttggagggaagaaacagagcaaaacatctgcgccaaacaattcagtctctacgacgacagtttagtggagctttacccttggcacaacaggaaaagttctccaaaacaatgattcaactacaaaatgacaaacttaagataatgcaagaaatgaaaaattctcaacaagaacatagaaatatggagaacaaaacattggagatggaattaaaattaaagggcctggaagagttaataagcactttaaaggataccaaaggagcccaaaaggtaatcaactggcatatgaaaatagaagaacttcgtcttcaagaacttaaactaaatcgggaattagtcaaggataaagaagaaataaaatatttgaataacataatttctgaatatgaacgtacaatcagcagtcttgaagaagaaattgtgcaacagaacaagtttcatgaagaaagacaaatggcctgggatcaaagagaagttgacctggaacgccaactagacatttttgaccgtcagcaaaatgaaatactaaatgcggcacaaaagtttgaagaagctacaggatcaatccctgaccctagtttgccccttccaaatcaacttgagatcgctctaaggaaaattaaggagaacattcgaataattctagaaacacgggcaacttgcaaatcactagaagagaaactaaaagagaaagaatctgctttaaggttagcagaacaaaatatactgtcaagagacaaagtaatcaatgaactgaggcttcgattgcctgccactgcagaaagagaaaagctcatagctgagctaggcagaaaagagatggaaccaaaatctcaccacacattgaaaattgctcatcaaaccattgcaaacatgcaagcaaggttaaatcaaaaagaagaagtattaaagaagtatcaacgtcttctagaaaaagccagagaggagcaaagagaaattgtgaagaaacatgaggaagaccttcatattcttcatcacagattagaactacaggctgatagttcactaaataaattcaaacaaacggcttgggatttaatgaaacagtctcccactccagttcctaccaacaagcattttattcgtctggctgagatggaacagacagtagcagaacaagatgactctctttcctcactcttggtcaaactaaagaaagtatcacaagatttggagagacaaagagaaatcactgaattaaaagtaaaagaatttgaaaatatcaaattacagcttcaagaaaaccatgaagatgaagtgaaaaaagtaaaagcggaagtagaggatttaaagtatcttctggaccagtcacaaaaggagtcacagtgtttaaaatctgaacttcaggctcaaaaagaagcaaattcaagagctccaacaactacaatgagaaatctagtagaacggctaaagagccaattagccttgaaggagaaacaacagaaagcacttagtcgggcacttttagaactccgggcagaaatgacagcagctgctgaagaacgtattatttctgcaacttctcaaaaagaggcccatctcaatgttcaacaaatcgttgatcgacatactagagagctaaagacacaagttgaagatttaaatgaaaatcttttaaaattgaaagaagcacttaaaacaagtaaaaacagagaaaactcactaactgataatttgaatgacttaaataatgaactgcaaaagaaacaaaaagcctataataaaatacttagagagaaagaggaaattgatcaagagaatgatgaactgaaaaggcaaattaaaagactaaccagtggattacagggcaaacccctgacagataataaacaaagtctaattgaagaactccaaaggaaagttaaaaaactagagaaccaattagagggaaaggtggaggaagtagacctaaaacctatgaaagaaaagaatgctaaagaagaattaattaggtgggaagaaggtaaaaagtggcaagccaaaatagaaggaattcgaaacaagttaaaagagaaagagggggaagtctttactttaacaaagcagttgaatactttgaaggatctttttgccaaagccgataaagagaaacttactttgcagaggaaactaaaaacaactggcatgactgttgatcaggttttgggaatacgagctttggagtcagaaaaagaattggaagaattaaaaaagagaaatcttgacttagaaaatgatatattgtatatgagggcccaccaagctcttcctcgagattctgttgtagaagatttacatttacaaaatagatacctccaagaaaaacttcatgctttagaaaaacagttttcaaaggatacatattctaagccttcaatttcaggaatagagtcagatgatcattgtcagagagaacaggagcttcagaaggaaaacttgaagttgtcatctgaaaatattgaactgaaatttcagcttgaacaagcaaataaagatttgccaagattaaagaatcaagtcagagatttgaaggaaatgtgtgaatttcttaagaaagaaaaagcagaagttcagcggaaacttggccatgttagagggtctggtagaagtggaaagacaatcccagaactggaaaaaaccattggtttaatgaaaaaagtagttgaaaaagtccagagagaaaatgaacagttgaaaaaagcatcaggaatattgactagtgaaaaaatggctaatattgagcaggaaaatgaaaaattgaaggctgaattagaaaaacttaaagctcatcttgggcatcagttgagcatgcactatgaatccaagaccaaaggcacagaaaaaattattgctgaaaatgaaaggcttcgtaaagaacttaaaaaagaaactgatgctgcagagaaattacggatagcaaagaataatttagagatattaaatgagaagatgacagttcaactagaagagactggtaagagattgcagtttgcagaaagcagaggtccacagcttgaaggtgctgacagtaagagctggaaatccattgtggttacaagaatgtatgaaaccaagttaaaagaattggaaactgatattgccaaaaaaaatcaaagcattactgaccttaaacagcttgtaaaagaagcaacagagagagaacaaaaagttaacaaatacaatgaagaccttgaacaacagattaagattcttaaacatgttcctgaaggtgctgagacagagcaaggccttaaacgggagcttcaagttcttagattagctaatcatcagctggataaagagaaagcagaattaatccatcagatagaagctaacaaggaccaaagtggagctgaaagcaccatacctgatgctgatcaactaaaggaaaaaataaaagatctagagacacagctcaaaatgtcagatctagaaaagcagcatttgaaggaggaaataaagaagctgaaaaaagaactggaaaattttgatccttcattttttgaagaaattgaagatcttaagtataattacaaggaagaagtgaagaagaatattctcttagaagagaaggtaaaaaaactttcagaacaattgggagttgaattaactagccctgttgctgcttctgaagagtttgaagatgaagaagaaagtcctgttaatttccccatttactaa

SEQ ID NO: 5431 - DNA, 6699 bp, Homo sapiens
  source 1..6699: mol_type = unassigned DNA
gatcattatcaacttcaagtgcaggagcttacagatcttctgaaatcaaaaaatgaagaagatgatccaattatggtagctgtcaatgcaaaagtagaagaatggaagctaattttgtcttctaaagatgatgaaattattgagtatcagcaaatgttacataacctaagggagaaacttaagaatgctcagcttgatgctgataaaagtaatgttatggctctacagcagggtatacaggaacgagacagtcaaattaagatgctcaccgaacaagtagaacaatatacaaaagaaatggaaaagaatacttgtattattgaagatttgaaaaatgagctccaaagaaacaaaggtgcttcaaccctttctcaacagactcatatgaaaattcagtcaacgttagacattttaaaagagaaaactaaagaggctgagagaacagctgaactggctgaggctgatgctagggaaaaggataaagaattagttgaggctctgaagaggttaaaagattatgaatcgggagtatatggtttagaagatgctgtcgttgaaataaagaattgtaaaaaccaaattaaaataagagatcgagagattgaaatattaacaaaggaaatcaataaacttgaattgaagatcagtgatttccttgatgaaaatgaggcacttagagagcgtgtgggccttgaaccaaagacaatgattgatttaactgaatttagaaatagcaaacacttaaaacagcagcagtacagagctgaaaaccagattcttttgaaagagattgaaagtctagaggaagaacgacttgatctgaaaaaaaaaattcgtcaaatggctcaagaaagaggaaaaagaagtgcaacttcaggattaaccactgaggacctgaacctaactgaaaacatttctcaaggagatagaataagtgaaagaaaattggatttattgagcctcaaaaatatgagtgaagcacaatcaaagaatgaaatcatagcacaggaattcttgatcaaagaagcagagtgtagaaatgcagatatagagcttgaacatcacagaagccaggcagaacagaatgaatttctttcaagagaactaattgaaaaagaaagagatttagaaaggagtaggacagtgatagccaaatttcagaataaattaaaagaattagttgaagaaaataagcaacttgaagaaggtatgaaagaaatattgcaagcaattaaggaaatgcagaaagatcctgatgttaaaggaggagaaacatctctaattatccctagccttgaaagactagttaatgctatagaatcaaagaatgcagaaggaatctttgatgcgagtctgcatttgaaagcccaagttgatcagcttaccggaagaaatgaagaattaagacaggagctcagggaatctcggaaagaggctataaattattcacagcagttggcaaaagctaatttaaagatagaccatcttgaaaaagaaactagtcttttacgacaatcagaaggatcaaatgttgtttttaaaggaattgacttacctgatgggatagcaccatctagtgccagtatcattaattctcagaatgaatatttaatacatttgttacaggaactagaaaataaagaaaaaaagttaaagaatttagaagattctcttgaagattacaacagaaaatttgctgtaattcgtcatcaacaaagtttgttgtataaagaatacctaagtgaaaaggagacctggaaaacagaatctaaaacaataaaagaggaaaagagaaaacttgaggatcaagtccaacaagatgctataaaagtaaaagaatataataatttgctcaatgctcttcagatggattcggatgaaatgaaaaaaatacttgcagaaaatagtaggaaaattactgttttgcaagtgaatgaaaaatcacttataaggcaatatacaaccttagtagaattggagcgacaacttagaaaagaaaatgagaagcaaaagaatgaattgttgtcaatggaggctgaagtttgtgaaaaaattgggtgtttgcaaagatttaaggaaatggccattttcaagattgcagctctccaaaaagttgtagataatagtgtttctttgtctgaactagaactggctaataaacagtacaatgaactgactgctaagtacagggacatcttgcaaaaagataatatgcttgttcaaagaacaagtaacttggaacacctggagtgtgaaaacatctccttaaaagaacaagtggagtctataaataaagaactggagattaccaaggaaaaacttcacactattgaacaagcctgggaacaggaaactaaattaggtaatgaatctagcatggataaggcaaagaaatcaataaccaacagtgacattgtttccatttcaaaaaaaataactatgctggaaatgaaggaattaaatgaaaggcagcgggctgaacattgtcaaaaaatgtatgaacacttacggacttcgttaaagcaaatggaggaacgtaattttgaattggaaaccaaatttgctgagcttaccaaaatcaatttggatgcacagaaggtggaacagatgttaagagatgaattagctgatagtgtgagcaaggcagtaagtgatgctgataggcaacggattctagaattagagaagaatgaaatggaactaaaagttgaagtgtcaaaactgagagagatttctgatattgccagaagacaagttgaaattttgaatgcacaacaacaatctagggacaaggaagtagagtccctcagaatgcaactgctagactatcaggcacagtctgatgaaaagtcgctcattgccaagttgcaccaacataatgtctctcttcaactgagtgaggctactgctcttggtaagttggagtcaattacatctaaactgcagaagatggaggcctacaacttgcgcttagagcagaaacttgatgaaaaagaacaggctctctattatgctcgtttggagggaagaaacagagcaaaacatctgcgccaaacaattcagtctctacgacgacagtttagtggagctttacccttggcacaacaggaaaagttctccaaaacaatgattcaactacaaaatgacaaacttaagataatgcaagaaatgaaaaattctcaacaagaacatagaaatatggagaacaaaacattggagatggaattaaaattaaagggcctggaagagttaataagcactttaaaggataccaaaggagcccaaaaggtaatcaactggcatatgaaaatagaagaacttcgtcttcaagaacttaaactaaatcgggaattagtcaaggataaagaagaaataaaatatttgaataacataatttctgaatatgaacgtacaatcagcagtcttgaagaagaaattgtgcaacagaacaagtttcatgaagaaagacaaatggcctgggatcaaagagaagttgacctggaacgccaactagacatttttgaccgtcagcaaaatgaaatactaaatgcggcacaaaagtttgaagaagctacaggatcaatccctgaccctagtttgccccttccaaatcaacttgagatcgctctaaggaaaattaaggagaacattcgaataattctagaaacacgggcaacttgcaaatcactagaagagaaactaaaagagaaagaatctgctttaaggttagcagaacaaaatatactgtcaagagacaaagtaatcaatgaactgaggcttcgattgcctgccactgcagaaagagaaaagctcatagctgagctaggcagaaaagagatggaaccaaaatctcaccacacattgaaaattgctcatcaaaccattgcaaacatgcaagcaaggttaaatcaaaaagaagaagtattaaagaagtatcaacgtcttctagaaaaagccagagaggagcaaagagaaattgtgaagaaacatgaggaagaccttcatattcttcatcacagattagaactacaggctgatagttcactaaataaattcaaacaaacggcttgggatttaatgaaacagtctcccactccagttcctaccaacaagcattttattcgtctggctgagatggaacagacagtagcagaacaagatgactctctttcctcactcttggtcaaactaaagaaagtatcacaagatttggagagacaaagagaaatcactgaattaaaagtaaaagaatttgaaaatatcaaattacagcttcaagaaaaccatgaagatgaagtgaaaaaagtaaaagcggaagtagaggatttaaagtatcttctggaccagtcacaaaaggagtcacagtgtttaaaatctgaacttcaggctcaaaaagaagcaaattcaagagctccaacaactacaatgagaaatctagtagaacggctaaagagccaattagccttgaaggagaaacaacagaaagcacttagtcgggcacttttagaactccgggcagaaatgacagcagctgctgaagaacgtattatttctgcaacttctcaaaaagaggcccatctcaatgttcaacaaatcgttgatcgacatactagagagctaaagacacaagttgaagatttaaatgaaaatcttttaaaattgaaagaagcacttaaaacaagtaaaaacagagaaaactcactaactgataatttgaatgacttaaataatgaactgcaaaagaaacaaaaagcctataataaaatacttagagagaaagaggaaattgatcaagagaatgatgaactgaaaaggcaaattaaaagactaaccagtggattacagggcaaacccctgacagataataaacaaagtctaattgaagaactccaaaggaaagttaaaaaactagagaaccaattagagggaaaggtggaggaagtagacctaaaacctatgaaagaaaagaatgctaaagaagaattaattaggtgggaagaaggtaaaaagtggcaagccaaaatagaaggaattcgaaacaagttaaaagagaaagagggggaagtctttactttaacaaagcagttgaatactttgaaggatctttttgccaaagccgataaagagaaacttactttgcagaggaaactaaaaacaactggcatgactgttgatcaggttttgggaatacgagctttggagtcagaaaaagaattggaagaattaaaaaagagaaatcttgacttagaaaatgatatattgtatatgagggcccaccaagctcttcctcgagattctgttgtagaagatttacatttacaaaatagatacctccaagaaaaacttcatgctttagaaaaacagttttcaaaggatacatattctaagccttcaatttcaggaatagagtcagatgatcattgtcagagagaacaggagcttcagaaggaaaacttgaagttgtcatctgaaaatattgaactgaaatttcagcttgaacaagcaaataaagatttgccaagattaaagaatcaagtcagagatttgaaggaaatgtgtgaatttcttaagaaagaaaaagcagaagttcagcggaaacttggccatgttagagggtctggtagaagtggaaagacaatcccagaactggaaaaaaccattggtttaatgaaaaaagtagttgaaaaagtccagagagaaaatgaacagttgaaaaaagcatcaggaatattgactagtgaaaaaatggctaatattgagcaggaaaatgaaaaattgaaggctgaattagaaaaacttaaagctcatcttgggcatcagttgagcatgcactatgaatccaagaccaaaggcacagaaaaaattattgctgaaaatgaaaggcttcgtaaagaacttaaaaaagaaactgatgctgcagagaaattacggatagcaaagaataatttagagatattaaatgagaagatgacagttcaactagaagagactggtaagagattgcagtttgcagaaagcagaggtccacagcttgaaggtgctgacagtaagagctggaaatccattgtggttacaagaatgtatgaaaccaagttaaaagaattggaaactgatattgccaaaaaaaatcaaagcattactgaccttaaacagcttgtaaaagaagcaacagagagagaacaaaaagttaacaaatacaatgaagaccttgaacaacagattaagattcttaaacatgttcctgaaggtgctgagacagagcaaggccttaaacgggagcttcaagttcttagattagctaatcatcagctggataaagagaaagcagaattaatccatcagatagaagctaacaaggaccaaagtggagctgaaagcaccatacctgatgctgatcaactaaaggaaaaaataaaagatctagagacacagctcaaaatgtcagatctagaaaagcagcatttgaaggaggaaataaagaagctgaaaaaagaactggaaaattttgatccttcattttttgaagaaattgaagatcttaagtataattacaaggaagaagtgaagaagaatattctcttagaagagaaggtaaaaaaactttcagaacaattgggagttgaattaactagccctgttgctgcttctgaagagtttgaagatgaagaagaaagtcctgttaatttccccatttactaa

SEQ ID NO: 5432 - DNA, 2826 bp, Homo sapiens
  source 1..2826: mol_type = unassigned DNA
ggcccgcggccgggtccagcttggtggttgcggtagtgagaggcctccgctggttgccaggcttggtctagaggtggagcacagtgaaagaattcaagatgccacctaatataaactggaaagaaataatgaaagttgacccagatgacctgccccgtcaagaagaactggcagataatttattgatttccttatccaaggtggaagtaaatgagctaaaaagtgaaaagcaagaaaatgtgatacaccttttcagaattactcagtcactaatgaagatgaaagctcaagaagtggagctggctttggaagaagtagaaaaagctggagaagaacaagcaaaatttgaaaatcaattaaaaactaaagtaatgaaactggaaaatgaactggagatggctcagcagtctgcaggtggacgagatactcggtttttacgtaatgaaatttgccaacttgaaaaacaattagaacaaaaagatagagaattggaggacatggaaaaggagttggagaaagagaagaaagttaatgagcaattggctcttcgaaatgaggaggcagaaaatgaaaacagcaaattaagaagagagaacaaacgtctaaagaaaaagaatgaacaactttgtcaggatattattgactaccagaaacaaatagattcacagaaagaaacacttttatcaagaagaggggaagacagtgactaccgatcacagttgtctaaaaaaaactatgagcttatccaatatcttgatgaaattcagactttaacagaagctaatgagaaaattgaagttcagaatcaagaaatgagaaaaaatttagaagagtctgtacaggaaatggagaagatgactgatgaatataatagaatgaaagctattgtgcatcagacagataatgtaatagatcagttaaaaaaagaaaacgatcattatcaacttcaagtgcaggagcttacagatcttctgaaatcaaaaaatgaagaagatgatccaattatggtagctgtcaatgcaaaagtagaagaatggaagctaattttgtcttctaaagatgatgaaattattgagtatcagcaaatgttacataacctaagggagaaacttaagaatgctcagcttgatgctgataaaagtaatgttatggctctacagcagggtatacaggaacgagacagtcaaattaagatgctcaccgaacaagtagaacaatatacaaaagaaatggaaaagaatacttgtattattgaagatttgaaaaatgagctccaaagaaacaaaggtgcttcaaccctttctcaacagactcatatgaaaattcagtcaacgttagacattttaaaagagaaaactaaagaggctgagagaacagctgaactggctgaggctgatgctagggaaaaggataaagaattagttgaggctctgaagaggttaaaagattatgaatcgggagtatatggtttagaagatgctgtcgttgaaataaagaattgtaaaaaccaaattaaaataagagatcgagagattgaaatattaacaaaggaaatcaataaacttgaattgaagatcagtgatttccttgatgaaaatgaggcacttagagagcgtgtgggccttgaaccaaagacaatgattgatttaactgaatttagaaatagcaaacacttaaaacagcagcagtacagagctgaaaaccagattcttttgaaagagattgaaagtctagaggaagaacgacttgatctgaaaaaaaaaattcgtcaaatggctcaagaaagaggaaaaagaagtgcaacttcaggattaaccactgaggacctgaacctaactgaaaacatttctcaaggagatagaataagtgaaagaaaattggatttattgagcctcaaaaatatgagtgaagcacaatcaaagaatgaatttctttcaagagaactaattgaaaaagaaagagatttagaaaggagtaggacagtgatagccaaatttcagaataaattaaaagaattagttgaagaaaataagcaacttgaagaaggtatgaaagaaatattgcaagcaattaaggaaatgcagaaagatcctgatgttaaaggaggagaaacatctctaattatccctagccttgaaagactagttaatgctatagaatcaaagaatgcagaaggaatctttgatgcgagtctgcatttgaaagcccaagttgatcagcttaccggaagaaatgaagaattaagacaggagctcagggaatctcggaaagaggctataaattattcacagcagttggcaaaagctaatttaaagatagaccatcttgaaaaagaaactagtcttttacgacaatcagaaggatcaaatgttgtttttaaaggaattgacttacctgatgggatagcaccatctagtgccagtatcattaattctcagaatgaatatttaatacatttgttacaggaactagaaaataaagaaaaagttaaagaatttagaagattctcttgaagattacaacagaaaatttgctgtaattcgtcatcaacaaagtttgttgtataaagaatacctaagtgaaaaggagacctggaaaacagaatctaaaacaataaaagaggaaaagagaaaacttgaggatcaagtccaacaagatgctataaaagtaaaagaatataataatttgctcaatgctcttcagatggattcggatgaaatgaaaaaaatacttgcagaaaatagtaggaaaattactgttttgcaagtgaatgaaaaatcacttataaggcaatatacaaccttagtagaattggagcgacaactt

SEQ ID NO: 5433 - DNA, 1935 bp, Homo sapiens
  source 1..1935: mol_type = unassigned DNA
aagatggctcagcagtctgcaggtggacgagatactcggtttttacgtaatgaaatttgccaacttgaaaaacaattagaacaaaaagatagagaattggaggacatggaaaaggagttggagaaagagaagaaagttaatgagcaattggctcttcgaaatgaggaggcagaaaatgaaaacagcaaattaagaagagagaacaaacgtctaaagaaaaagaatgaacaactttgtcaggatattattgactaccagaaacaaatagattcacagaaagaaacacttttatcaagaagaggggaagacagtgactaccgatcacagttgtctaaaaaaaactatgagcttatccaatatcttgatgaaattcagactttaacagaagctaatgagaaaattgaagttcagaatcaagaaatgagaaaaaatttagaagagtctgtacaggaaatggagaagatgactgatgaatataatagaatgaaagctattgtgcatcagacagataatgtaatagatcagttaaaaaaagaaaacgatcattatcaacttcaagtgcaggagcttacagatcttctgaaatcaaaaaatgaagaagatgatccaattatggtagctgtcaatgcaaaagtagaagaatggaagctaattttgtcttctaaagatgatgaaattattgagtatcagcaaatgttacataacctaagggagaaacttaagaatgctcagcttgatgctgataaaagtaatgttatggctctacagcagggtatacaggaacgagacagtcaaattaagatgctcaccgaacaagtagaacaatatacaaaagaaatggaaaagaatacttgtattattgaagatttgaaaaatgagctccaaagaaacaaaggtgcttcaaccctttctcaacagactcatatgaaaattcagtcaacgttagacattttaaaagagaaaactaaagaggctgagagaacagctgaactggctgaggctgatgctagggaaaaggataaagaattagttgaggctctgaagaggttaaaagattatgaatcgggagtatatggtttagaagatgctgtcgttgaaataaagaattgtaaaaaccaaattaaaataagagatcgagagattgaaatattaacaaaggaaatcaataaacttgaattgaagatcagtgatttccttgatgaaaatgaggcacttagagagcgtgtgggccttgaaccaaagacaatgattgatttaactgaatttagaaatagcaaacacttaaaacagcagcagtacagagctgaaaaccagattcttttgaaagagattgaaagtctagaggaagaacgacttgatctgaaaaaaaaaattcgtcaaatggctcaagaaagaggaaaaagaagtgcaacttcaggattaaccactgaggacctgaacctaactgaaaacatttctcaaggagatagaataagtgaaagaaaattggatttattgagcctcaaaaatatgagtgaagcacaatcaaagaatgaatttctttcaagagaactaattgaaaaagaaagagatttagaaaggagtaggacagtgatagccaaatttcagaataaatgctatagaatcaaagaatgcagaaggaatctttgatgcgagtctgcatttgaaagcccaagttgatcagcttaccggaagaaatgaagaattaagacaggagctcagggaatctcggaaagaggctataaattattcacagcagttggcaaaagctaatttaaagatagaccatcttgaaaaagaaactagtcttttacgacaatcagaaggatcaaatgttgtttttaaaggaattgacttacctgatgggatagcaccatctagtgccagtatcattaattctcagaatgaatatttaatacatttgttacaggtatt

SEQ ID NO: 5434 - DNA, 5967 bp, Homo sapiens
  source 1..5967: mol_type = unassigned DNA
aagcttaatactgagcatcaagaaattctttaataaatataagtgatatttattcagacatgtaataaggaaatgttcatgtcttatttttgtgttagatttttttagaatctacttttgttagagttttataaatacagttagtgtttgagatagaaagagaaaagaattagttttcttcctcttctacctgctcatgaacttgatttttttctcccaacaattgaagagccaagaaaaagggagattcttaagagatgggaaatagaatctcatctacccctgtttcccccagaacagtgaaactgaatcttaagggtaagatagaatagtgtgtacttaacttagatggagaagaaaggctgccaaaatgagatctgaagcgctattacaaatatttccatcgttactgtacttcagaatgaattacaaccgtaagtttttttacttcctcattcataaatttgattattccttataccacttctcagctttcatcattctttattgtacttttctatgtaatgtttgcctattatacagcaacttaagagaactgtaagtttggacatttcattttggtgttgataatagaatatctttgaatagttctatagttgatgagtagaaccatgaaccaagtaacttaaagtccttgatgttatttattacagagaactataatagaagctctcccgctaatgtttccatcatgtgtacaaaaagttttcttgttattaaagctagtccgtttaacttacaataagcataaatagctaagctgtgaaagttacctgtgataatgctaattttcccatttattaaaaggcaagttgttttccgatcataagaaatttagaaaagccatccaaagataaattccgagtgatatattcctgctgtttgttatgttttctcaaattaattgagttttattttacaatgacaggagttattaaagtattttatttttattatgattaagattttcaaagtaacatttcttatatgaaagaaattatgttaatgcatgtttttcttacatgggaaatcatatattttaaaaatgattttaaaattcgttttactttaagttgtattatctttctcaaaagtggctagtgcttgaccagaaaaaaagacaccagcataactcagtgtatctttatttacataggaaatggccattttcaagattgcagctctccaaaaagttgtagataatagtgtttctttgtctgaactagaactggctaataaacagtacaatgaactgactgctaagtacagggacatcttgcaaaaagataatatgcttgttcaaagaacaagtaacttggaacacctggagtgtgaaaacatctccttaaaagaacaagtggagtctataaataaagaactggagattaccaaggaaaaacttcacactattgaacaagcctgggaacaggaaactaaattaggtaatgaatctagcatggataaggcaaagaaatcaataaccaacagtgacattgtttccatttcaaaaaaaataactatgctggaaatgaaggaattaaatgaaaggcagcgggctgaacattgtcaaaaaatgtatgaacacttacggacttcgttaaagcaaatggaggaacgtaattttgaattggaaaccaaatttgctgagcttaccaaaatcaatttggatgcacagaaggtggaacagatgttaagagatgaattagctgatagtgtgagcaaggcagtaagtgatgctgataggcaacggattctagaattagagaagaatgaaatggaactaaaagttgaagtgtcaaaactgagagagatttctgatattgccagaagacaagttgaaattttgaatgcacaacaacaatctagggacaaggaagtagagtccctcagaatgcaactgctagactatcaggcacagtctgatgaaaagtcgctcattgccaagttgcaccaacataatgtctctcttcaactgagtgaggctactgctcttggtaagttggagtcaattacatctaaactgcagaagatggaggcctacaacttgcgcttagagcagaaacttgatgaaaaagaacaggctctctattatgctcgtttggagggaagaaacagagcaaaacatctgcgccaaacaattcagtctctacgacgacagtttagtggagctttacccttggcacaacaggaaaagttctccaaaacaatgattcaactacaaaatgacaaacttaagataatgcaagaaatgaaaaattctcaacaagaacatagaaatatggagaacaaaacattggagatggaattaaaattaaagggcctggaagagttaataagcactttaaaggataccaaaggagcccaaaaggtaatcaactggcatatgaaaatagaagaacttcgtcttcaagaacttaaactaaatcgggaattagtcaaggataaagaagaaataaaatatttgaataacataatttctgaatatgaacgtacaatcagcagtcttgaagaagaaattgtgcaacagaacaagtttcatgaagaaagacaaatggcctgggatcaaagagaagttgacctggaacgccaactagacatttttgaccgtcagcaaaatgaaatactaaatgcggcacaaaagtttgaagaagctacaggatcaatccctgaccctagtttgccccttccaaatcaacttgagatcgctctaaggaaaattaaggagaacattcgaataattctagaaacacgggcaacttgcaaatcactagaagagaaactaaaagagaaagaatctgctttaaggttagcagaacaaaatatactgtcaagagacaaagtaatcaatgaactgaggcttcgattgcctgccactgcagaaagagaaaagctcatagctgagctaggcagaaaagagatggaaccaaaatctcaccacacattgaaaattgctcatcaaaccattgcaaacatgcaagcaaggttaaatcaaaaagaagaagtattaaagaagtatcaacgtcttctagaaaaagccagagaggagcaaagagaaattgtgaagaaacatgaggaagaccttcatattcttcatcacagattagaactacaggctgatagttcactaaataaattcaaacaaacggcttgggatttaatgaaacagtctcccactccagttcctaccaacaagcattttattcgtctggctgagatggaacagacagtagcagaacaagatgactctctttcctcactcttggtcaaactaaagaaagtatcacaagatttggagagacaaagagaaatcactgaattaaaagtaaaagaatttgaaaatatcaaattacagcttcaagaaaaccatgaagatgaagtgaaaaaagtaaaagcggaagtagaggatttaaagtatcttctggaccagtcacaaaaggagtcacagtgtttaaaatctgaacttcaggctcaaaaagaagcaaattcaagagctccaacaactacaatgagaaatctagtagaacggctaaagagccaattagccttgaaggagaaacaacagaaagcacttagtcgggcacttttagaactccgggcagaaatgacagcagctgctgaagaacgtattatttctgcaacttctcaaaaagaggcccatctcaatgttcaacaaatcgttgatcgacatactagagagctaaagacacaagttgaagatttaaatgaaaatcttttaaaattgaaagaagcacttaaaacaagtaaaaacagagaaaactcactaactgataatttgaatgacttaaataatgaactgcaaaagaaacaaaaagcctataataaaatacttagagagaaagaggaaattgatcaagagaatgatgaactgaaaaggcaaattaaaagactaaccagtggattacagggcaaacccctgacagataataaacaaagtctaattgaagaactccaaaggaaagttaaaaaactagagaaccaattagagggaaaggtggaggaagtagacctaaaacctatgaaagaaaagaatgctaaagaagaattaattaggtgggaagaaggtaaaaagtggcaagccaaaatagaaggaattcgaaacaagttaaaagagaaagagggggaagtctttactttaacaaagcagttgaatactttgaaggatctttttgccaaagccgataaagagaaacttactttgcagaggaaactaaaaacaactggcatgactgttgatcaggttttgggaatacgagctttggagtcagaaaaagaattggaagaattaaaaaagagaaatcttgacttagaaaatgatatattgtatatgagggcccaccaagctcttcctcgagattctgttgtagaagatttacatttacaaaatagatacctccaagaaaaacttcatgctttagaaaaacagttttcaaaggatacatattctaagccttcaatttcaggaatagagtcagatgatcattgtcagagagaacaggagcttcagaaggaaaacttgaagttgtcatctgaaaatattgaactgaaatttcagcttgaacaagcaaataaagatttgccaagattaaagaatcaagtcagagatttgaaggaaatgtgtgaatttcttaagaaagaaaaagcagaagttcagcggaaacttggccatgttagagggtctggtagaagtggaaagacaatcccagaactggaaaaaaccattggtttaatgaaaaaagtagttgaaaaagtccagagagaaaatgaacagttgaaaaaagcatcaggaatattgactagtgaaaaaatggctaatattgagcaggaaaatgaaaaattgaaggctgaattagaaaaacttaaagctcatcttgggcatcagttgagcatgcactatgaatccaagaccaaaggcacagaaaaaattattgctgaaaatgaaaggcttcgtaaagaacttaaaaaagaaactgatgctgcagagaaattacggatagcaaagaataatttagagatattaaatgagaagatgacagttcaactagaagagactggtaagagattgcagtttgcagaaagcagaggtccacagcttgaaggtgctgacagtaagagctggaaatccattgtggttacaagaatgtatgaaaccaagttaaaagaattggaaactgatattgccaaaaaaaatcaaagcattactgaccttaaacagcttgtaaaagaagcaacagagagagaacaaaaagttaacaaatacaatgaagaccttgaacaacagattaagattcttaaacatgttcctgaaggtgctgagacagagcaaggccttaaacgggagcttcaagttcttagattagctaatcatcagctggataaagagaaagcagaattaatccatcagatagaagctaacaaggaccaaagtggagctgaaagcaccatacctgatgctgatcaactaaaggaaaaaataaaagatctagagacacagctcaaaatgtcagatctagaaaagcagcatttgaaggaggaaataaagaagctgaaaaaagaactggaaaattttgatccttcattttttgaagaaattgaagatcttaagtataattacaaggaagaagtgaagaagaatattctcttagaagagaaggtaaaaaaactttcagaacaattgggagttgaattaactagccctgttgctgcttctgaagagtttgaagatgaagaagaaagtcctgttaatttccccatttactaaaggtcacctataaactttgtttcatttaactatttattaactttataagttaaatatacttggaaataagcagttctccgaactgtagtatttccttctcactaccttgtacctttatacttagattggaattcttaataaataaaattatatgaaattttcaactt

SEQ ID NO: 5435 - DNA, 7948 bp, Homo sapiens
  source 1..7948: mol_type = unassigned DNA
atttgaagtcctcgttccacgccttctcatcatcctgaacaccgagctctgggactccggcggagaatctaaacgtaaagcatcacccacggtcgtgaactgtaggctctcctggcatccgggatcttattctggccttggcggagttggggatggtgtcgcctagcagccgctgccgctttggcttgctcgggaccatttggctggacccagagtccgcgtggaaccgcgatagggatctgtcagggcccgcggccgggtccagcttggtggttgcggtagtgagaggcctccgctggttgccaggcttggtctagaggtggagcacagtgaaagaattcaagatgccacctaatataaactggaaagaaataatgaaagttgacccagatgacctgccccgtcaagaagaactggcagataatttattgatttccttatccaaggtggaagtaaatgagctaaaaagtgaaaagcaagaaaatgtgatacaccttttcagaattactcagtcactaatgaagatgaaagctcaagaagtggagctggctttggaagaagtagaaaaagctggagaagaacaagcaaaatttgaaaatcaattaaaaactaaagtaatgaaactggaaaatgaactggagatggctcagcagtctgcaggtggacgagatactcggtttttacgtaatgaaatttgccaacttgaaaaacaattagaacaaaaagatagagaattggaggacatggaaaaggagttggagaaagagaagaaagttaatgagcaattggctcttcgaaatgaggaggcagaaaatgaaaacagcaaattaagaagagagaacaaacgtctaaagaaaaagaatgaacaactttgtcaggatattattgactaccagaaacaaatagattcacagaaagaaacacttttatcaagaagaggggaagacagtgactaccgatcacagttgtctaaaaaaaactatgagcttatccaatatcttgatgaaattcagactttaacagaagctaatgagaaaattgaagttcagaatcaagaaatgagaaaaaatttagaagagtctgtacaggaaatggagaagatgactgatgaatataatagaatgaaagctattgtgcatcagacagataatgtaatagatcagttaaaaaaagaaaacgatcattatcaacttcaagtgcaggagcttacagatcttctgaaatcaaaaaatgaagaagatgatccaattatggtagctgtcaatgcaaaagtagaagaatggaagctaattttgtcttctaaagatgatgaaattattgagtatcagcaaatgttacataacctaagggagaaacttaagaatgctcagcttgatgctgataaaagtaatgttatggctctacagcagggtatacaggaacgagacagtcaaattaagatgctcaccgaacaagtagaacaatatacaaaagaaatggaaaagaatacttgtattattgaagatttgaaaaatgagctccaaagaaacaaaggtgcttcaaccctttctcaacagactcatatgaaaattcagtcaacgttagacattttaaaagagaaaactaaagaggctgagagaacagctgaactggctgaggctgatgctagggaaaaggataaagaattagttgaggctctgaagaggttaaaagattatgaatcgggagtatatggtttagaagatgctgtcgttgaaataaagaattgtaaaaaccaaattaaaataagagatcgagagattgaaatattaacaaaggaaatcaataaacttgaattgaagatcagtgatttccttgatgaaaatgaggcacttagagagcgtgtgggccttgaaccaaagacaatgattgatttaactgaatttagaaatagcaaacacttaaaacagcagcagtacagagctgaaaaccagattcttttgaaagagattgaaagtctagaggaagaacgacttgatctgaaaaaaaaaattcgtcaaatggctcaagaaagaggaaaaagaagtgcaacttcaggattaaccactgaggacctgaacctaactgaaaacatttctcaaggagatagaataagtgaaagaaaattggatttattgagcctcaaaaatatgagtgaagcacaatcaaagaatgaatttctttcaagagaactaattgaaaaagaaagagatttagaaaggagtaggacagtgatagccaaatttcagaataaattaaaagaattagttgaagaaaataagcaacttgaagaaggtatgaaagaaatattgcaagcaattaaggaaatgcagaaagatcctgatgttaaaggaggagaaacatctctaattatccctagccttgaaagactagttaatgctatagaatcaaagaatgcagaaggaatctttgatgcgagtctgcatttgaaagcccaagttgatcagcttaccggaagaaatgaagaattaagacaggagctcagggaatctcggaaagaggctataaattattcacagcagttggcaaaagctaatttaaagatagaccatcttgaaaaagaaactagtcttttacgacaatcagaaggatcaaatgttgtttttaaaggaattgacttacctgatgggatagcaccatctagtgccagtatcattaattctcagaatgaatatttaatacatttgttacaggaactagaaaataaagaaaaaaagttaaagaatttagaagattctcttgaagattacaacagaaaatttgctgtaattcgtcatcaacaaagtttgttgtataaagaatacctaagtgaaaaggagacctggaaaacagaatctaaaacaataaaagaggaaaagagaaaacttgaggatcaagtccaacaagatgctataaaagtaaaagaatataataatttgctcaatgctcttcagatggattcggatgaaatgaaaaaaatacttgcagaaaatagtaggaaaattactgttttgcaagtgaatgaaaaatcacttataaggcaatatacaaccttagtagaattggagcgacaacttagaaaagaaaatgagaagcaaaagaatgaattgttgtcaatggaggctgaagtttgtgaaaaaattgggtgtttgcaaagatttaaggaaatggccattttcaagattgcagctctccaaaaagttgtagataatagtgtttctttgtctgaactagaactggctaataaacagtacaatgaactgactgctaagtacagggacatcttgcaaaaagataatatgcttgttcaaagaacaagtaacttggaacacctggagtgtgaaaacatctccttaaaagaacaagtggagtctataaataaagaactggagattaccaaggaaaaacttcacactattgaacaagcctgggaacaggaaactaaattaggtaatgaatctagcatggataaggcaaagaaatcaataaccaacagtgacattgtttccatttcaaaaaaaataactatgctggaaatgaaggaattaaatgaaaggcagcgggctgaacattgtcaaaaaatgtatgaacacttacggacttcgttaaagcaaatggaggaacgtaattttgaattggaaaccaaatttgctgagcttaccaaaatcaatttggatgcacagaaggtggaacagatgttaagagatgaattagctgatagtgtgagcaaggcagtaagtgatgctgataggcaacggattctagaattagagaagaatgaaatggaactaaaagttgaagtgtcaaaactgagagagatttctgatattgccagaagacaagttgaaattttgaatgcacaacaacaatctagggacaaggaagtagagtccctcagaatgcaactgctagactatcaggcacagtctgatgaaaagtcgctcattgccaagttgcaccaacataatgtctctcttcaactgagtgaggctactgctcttggtaagttggagtcaattacatctaaactgcagaagatggaggcctacaacttgcgcttagagcagaaacttgatgaaaaagaacaggctctctattatgctcgtttggagggaagaaacagagcaaaacatctgcgccaaacaattcagtctctacgacgacagtttagtggagctttacccttggcacaacaggaaaagttctccaaaacaatgattcaactacaaaatgacaaacttaagataatgcaagaaatgaaaaattctcaacaagaacatagaaatatggagaacaaaacattggagatggaattaaaattaaagggcctggaagagttaataagcactttaaaggataccaaaggagcccaaaaggtaatcaactggcatatgaaaatagaagaacttcgtcttcaagaacttaaactaaatcgggaattagtcaaggataaagaagaaataaaatatttgaataacataatttctgaatatgaacgtacaatcagcagtcttgaagaagaaattgtgcaacagaacaagtttcatgaagaaagacaaatggcctgggatcaaagagaagttgacctggaacgccaactagacatttttgaccgtcagcaaaatgaaatactaaatgcggcacaaaagtttgaagaagctacaggatcaatccctgaccctagtttgccccttccaaatcaacttgagatcgctctaaggaaaattaaggagaacattcgaataattctagaaacacgggcaacttgcaaatcactagaagagaaactaaaagagaaagaatctgctttaaggttagcagaacaaaatatactgtcaagagacaaagtaatcaatgaactgaggcttcgattgcctgccactgcagaaagagaaaagctcatagctgagctaggcagaaaagagatggaaccaaaatctcaccacacattgaaaattgctcatcaaaccattgcaaacatgcaagcaaggttaaatcaaaaagaagaagtattaaagaagtatcaacgtcttctagaaaaagccagagaggagcaaagagaaattgtgaagaaacatgaggaagaccttcatattcttcatcacagattagaactacaggctgatagttcactaaataaattcaaacaaacggcttgggatttaatgaaacagtctcccactccagttcctaccaacaagcattttattcgtctggctgagatggaacagacagtagcagaacaagatgactctctttcctcactcttggtcaaactaaagaaagtatcacaagatttggagagacaaagagaaatcactgaattaaaagtaaaagaatttgaaaatatcaaattacagcttcaagaaaaccatgaagatgaagtgaaaaaagtaaaagcggaagtagaggatttaaagtatcttctggaccagtcacaaaaggagtcacagtgtttaaaatctgaacttcaggctcaaaaagaagcaaattcaagagctccaacaactacaatgagaaatctagtagaacggctaaagagccaattagccttgaaggagaaacaacagaaagcacttagtcgggcacttttagaactccgggcagaaatgacagcagctgctgaagaacgtattatttctgcaacttctcaaaaagaggcccatctcaatgttcaacaaatcgttgatcgacatactagagagctaaagacacaagttgaagatttaaatgaaaatcttttaaaattgaaagaagcacttaaaacaagtaaaaacagagaaaactcactaactgataatttgaatgacttaaataatgaactgcaaaagaaacaaaaagcctataataaaatacttagagagaaagaggaaattgatcaagagaatgatgaactgaaaaggcaaattaaaagactaaccagtggattacagggcaaacccctgacagataataaacaaagtctaattgaagaactccaaaggaaagttaaaaaactagagaaccaattagagggaaaggtggaggaagtagacctaaaacctatgaaagaaaagaatgctaaagaagaattaattaggtgggaagaaggtaaaaagtggcaagccaaaatagaaggaattcgaaacaagttaaaagagaaagagggggaagtctttactttaacaaagcagttgaatactttgaaggatctttttgccaaagccgataaagagaaacttactttgcagaggaaactaaaaacaactggcatgactgttgatcaggttttgggaatacgagctttggagtcagaaaaagaattggaagaattaaaaaagagaaatcttgacttagaaaatgatatattgtatatgagggcccaccaagctcttcctcgagattctgttgtagaagatttacatttacaaaatagatacctccaagaaaaacttcatgctttagaaaaacagttttcaaaggatacatattctaagccttcaatttcaggaatagagtcagatgatcattgtcagagagaacaggagcttcagaaggaaaacttgaagttgtcatctgaaaatattgaactgaaatttcagcttgaacaagcaaataaagatttgccaagattaaagaatcaagtcagagatttgaaggaaatgtgtgaatttcttaagaaagaaaaagcagaagttcagcggaaacttggccatgttagagggtctggtagaagtggaaagacaatcccagaactggaaaaaaccattggtttaatgaaaaaagtagttgaaaaagtccagagagaaaatgaacagttgaaaaaagcatcaggaatattgactagtgaaaaaatggctaatattgagcaggaaaatgaaaaattgaaggctgaattagaaaaacttaaagctcatcttgggcatcagttgagcatgcactatgaatccaagaccaaaggcacagaaaaaattattgctgaaaatgaaaggcttcgtaaagaacttaaaaaagaaactgatgctgcagagaaattacggatagcaaagaataatttagagatattaaatgagaagatgacagttcaactagaagagactggtaagagattgcagtttgcagaaagcagaggtccacagcttgaaggtgctgacagtaagagctggaaatccattgtggttacaagaatgtatgaaaccaagttaaaagaattggaaactgatattgccaaaaaaaatcaaagcattactgaccttaaacagcttgtaaaagaagcaacagagagagaacaaaaagttaacaaatacaatgaagaccttgaacaacagattaagattcttaaacatgttcctgaaggtgctgagacagagcaaggccttaaacgggagcttcaagttcttagattagctaatcatcagctggataaagagaaagcagaattaatccatcagatagaagctaacaaggaccaaagtggagctgaaagcaccatacctgatgctgatcaactaaaggaaaaaataaaagatctagagacacagctcaaaatgtcagatctagaaaagcagcatttgaaggaggaaataaagaagctgaaaaaagaactggaaaattttgatccttcattttttgaagaaattgaagatcttaagtataattacaaggaagaagtgaagaagaatattctcttagaagagaaggtaaaaaaactttcagaacaattgggagttgaattaactagccctgttgctgcttctgaagagtttgaagatgaagaagaaagtcctgttaatttccccatttactaaaggtcacctataaactttgtttcatttaactatttattaactttataagttaaatatacttggaaataagcagttctccgaactgtagtatttccttctcactaccttgtacctttatacttagattggaattcttaataaataaaattatatgaaattttcaa

SEQ ID NO: 5436 - DNA, 3750 bp, Homo sapiens
  source 1..3750: mol_type = unassigned DNA
aaggctggagccggcgagccccagcccagagaacaaaaggcctcgctagccggcgtcccgcgttgcccttggcaaccattgagcggcgtcttgcccttctgcgaccctgagatgagagagtaaacggggcccccattggccggccggggaagacgggccaatcggagaagagggtatagggaggcggctgaacaaggttgtgggggtaggaagctagggttagaggcaacccgtgaggctagaaccccgaacgtggtcggttggagaaaatatgtccctccggaggcacattgggaaccctgagtatctgatgaaaaggataccacagaacccaagataccagcatatcaaatcaagactggacactggtaacagtatgactaaatatactgagaagctcgaagagattaagaaaaattatagatacaaaaaagatgagcttttcaagagactaaaagttacaacttttgcccagctgatcatccaagttgcttccctctctgatcaaacactggaagtgacagctgaggagattcaaaggctggaagacaatgattctgcagcttcagaccctgatgctgaaaccactgccaggaccaatgggaaaggaaatccaggtgagcagtcgccgagccctgagcagttcataaacaacgcaggagcaggggactccagccgctcaactcttcagagtgtcatcagtggtgttggggaactggatctagacaaagggccagtgaagaaagcagagccccataccaaagacaaaccttatcctgactgccccttcctgctgctagatgtgcgtgatagagattcttaccagcagtgccacattgttggagcttacagttacccaattgcaactctgtctagaacaatgaacccttattcaaatgatattcttgaatataaaaatgcccatggcaagatcatcattctgtatgacgatgatgaaaggctggccagtcaggcggccaccaccatgtgcgagcgtggatttgaaaacctcttcatgctttccggaggtctaaaagtcttagctcagaaattcccggaaggactgattactggttccctgccagcatcttgccagcaggcccttcctcctgggtctgcccggaaacgatccagccccaaagggccacccctaccagctgagaataaatggagatttaccccagaagacttaaaaaagatagaatattatctggaagaggagcaagggcctgcagatcatcctagccgactgaaccaagctaactcctccggaagagagtccaaggtgcctggtgcccgaagcgctcagaatctgccaggtggcggccccgccagccactcaaacccccgctccctcagcagtggtcacctgcaaggcaaaccctggaagtaaagactttgtctcacttaggcaaataaatgttcttcctcttttcagaacccctgagcatttcccaagttgggtcatttccagaaacttctgcagaggaaagaccatgacatatgtatgggataggcctcttccctgtccctgtctccagttcctctcccctcaggaggccacctcaggaaggattttgacaggtgaccataaaaaccagaggtgtgacaggctctagtctcctccctgttgtttacagcatatttaagtcttgtgaaactgtataggaaaaaagtatctacgtttttagtttttttgttttgtttttttttaataaggtccagcttgttgggtctctctgtgttgttttgtaaatacttcagtcacatctgcccgtgtgcctgtccctgccaccttttcattcactgttcttgacttcatgaaggcttctccgggcagtcttggtgtgagaagctgtttccaagggtgcagatgagccttaggttccagccgcctgcagaccccaccccagcaggctcactcagcaaggagctctctgcccagcatattgcaggccctgttttgagtatggaagccagtgcctgtgtactcactgaaattgaagatgaggaaagtagctgtacactcactgaatgctcccccttactagatatttcctggagccagaaaggtatgcatgtgggtgtcttcacaccggggaggagggcctctcatgggaaagccctggccaccacaccggcctgtgccccttgaagcccaccaaagcggccctcacttgtggtcagtatatcagttatgacgcccattgcccagcttcagtccatccatgttagatggacagaaattatggccagttgaaaataccagctttggttggacaactgtggacacacaaggtgaagaggactccgaagtcctttgtcagggctgacaacctcgtaagcccttgcttagaaatacagtattagtctaattgagtaattagtgcaatttcctgcttacttttcattctcatgactgaactgtgattaggaagttgtgattatagattctggttttggccggaattttgaatcagcattaattgaattgctaaatgactgacattcattccatttaattgggggaacaaaaggcctcaggtaaggatgaggaactctgaaatcagatggaaaagagcggtgttaatttttatggtctgtgatcgtagctgtgataagggactgaggaataaattgtgctctttgtcatggcaaccagcttctgaaaagcccactgaaaattgcctgtcctgctggtaactgctacggggtaagatttgccttaacagtactattttctcgccaccaaaaaaaaaaaaaaaaaaaaaaaaaaatgcaccacagtatttctagcatgggggctgtgtttgtatgagaaataaacgtaataaatatctcatagagacatatggaaaaataactttcagattcagcccagttctgttttagagtgtgtttattcttctctacttgatttccaaagtgcaacattttccgatgctttagaaatcaaacaaaccagggacattgttcagatgtcaagccatgcccaattttccacaagattcaagaatcttgtataaaattcagccaacgtacacatagctttaatgaggagcctgtcatgtttccccataaatttattgcctgagaacttagttcagcctttgctaatgccaaaatgctctggctttgtattttctttacagcatagatagaaaaatgcacatttttccacactcagctttcccctagcatggacaagattttcagccatttttgccacatatacatttttaaggaaaaaagatttttctctgtaagaaagttctggttatgctgttttaaaggtgacttgtcaggagttgagacttccctgccggattctattttgaaagtaaatggtcttccctccttgttccgattctgcgttcccatcgtcagacaactttggagtattagaaaccactgtatatatgtggaaagccaggtcagccagacctgttagaattggtgtgcactcacctgagagatctggcaggttggatatatttatgtgtatttctccacagtgcttgctttgccctgttggtaaggattttaaataaccatgctcaaaagagctgttctaatctgcgttttgcatgttaagtgttaatatcaaacattctttacgtgctcgaggtattgcttttaacattctactttgccagtttcttcattagattaattgacatgtattatttaaatgaccagtgatgctttgtgcaattatgaatgttgaagattaaagtacatagttactaa

SEQ ID NO: 5437 - DNA, 1087 bp, Homo sapiens
  source 1..1087: mol_type = unassigned DNA
aaccccgaacgtggtcggttggagaaaatatgtccctccggaggcacattgggaaccctgagtatctgatgaaaaggataccacagaacccaagataccagcatatcaaatcaagactggacactggtaacagtatgactaaatatactgagaagctcgaagagattaagaaaaattatagatacaaaaaagatgagcttttcaagagactaaaagttacaacttttgcccagctgatcatccaagttgcttccctctctgatcaaacactggaagtgacagctgaggagattcaaaggctggaagacaatgattctgcagcttcagaccctgatgctgaaaccactgccaggaccaatgggaaaggaaatccaggtgagcagtcgccgagccctgagcagttcataaacaacgcaggagcaggggactccagccgctcaactcttcagagtgtcatcagtggtgttggggaactggatctagacaaagggccagtgaagaaagcagagccccataccaaagacaaaccttatcctgactgccccttcctgctgctagatgtgcgtgatagagattcttaccagcagtgccacattgttggagcttacagttacccaattgcaactctgtctagaacaatgaacccttattcaaatgatattcttgaatataaaaatgcccatggcaagatcatcattctgtatgacgatgatgaaaggctggccagtcaggcggccaccaccatgtgcgagcgtggatttgaaaacctcttcatgctttccggaggccgactgaaccaagctaactcctccggaagagagtccaaggtgcctggtgcccgaagcgctcagaatctgccaggtggcggccccgccagccactcaaacccccgctccctcagcagtggtcacctgcaaggcaaaccctggaagtaaagactttgtctcacttaggcaaataaatgttcttcctcttttcagaacccctgagcatttcccaagttgggtcatttccagaaacttctgcagaggaaagaccatgacatatgtatgggataggcctcttccctgtccctgtctccagttcc

SEQ ID NO: 5438 - DNA, 3161 bp, Homo sapiens
  source 1..3161: mol_type = unassigned DNA
aggcggctgaacaaggttgtgggggtaggaagctagggttagaggcaacccgtgaggctagaaccccgaacgtggtcggttggagaaaatatgtccctccggaggcacattgggaaccctgagtatctgatgaaaaggataccacagaacccaagataccagcatatcaaatcaagactggacactggtgcctgtgtgtatcttaccagctccccagcactgccagactgtgccatgaatggattatgcttctgatgaaatccctggctgcgttttgttcagtcaccaccgcagggttcttgtatattctcaagcaccctctctgggtttctgttttgcagcactgcaggctgattaagggacactttccaaaccacagggctctccctttattagtccccacagtctttcattggctgcattgtcctcccatttctatctatattcaatctaatttccaatttctttagctttctgaaattctgtaggctttctccactcagtcttttctagccttatttttgtctttttaaaaattcaccttccttttattatctctagacaaactattcattccctcttttcttctttaggctttacttttcctgaatatttgctaatagccttgactgtaagcatcaaactcattatagactaggtactcttcatttttatttgttgtttaattctgtttcttccgtcaaaggaagaaatatatgtgaaaggcttttataaaccagaaagcactatacacacatatcacttattgaggttaacaaaggaccactgtgcctcttttcatgctttctgctcttccaagccaagagaacttctccatagaggagggaaatattgaagaaaaataaagccatggagttgtctcttagcaactgagttcgtgccttataaatctcatctactttagattactgctgcacaaaatcacttgcttttcttattggctcagtataaataatgttattaaattataggaaaacaatggaaaaaatctaatgaatgactcattcactgaatcagttgcactctgtgtttgcacagcactgttgctatagtcgggttgtttcttcctcttgattctaattgtaaagttttgttatatatcttttatcacaactttagttgtaagtaaacaaagtagaagctaaatgctaccttatacatttataggttgcttaagtcgtgaagcaatatgagtcatatatgtagcacataacatatactgtatataagtcaagttgtacatagtttaaagaaaatcaggtgtgcagaaactcagaccaaattgggaagtatttgcattataaaataactcattataaggatttttcagttagtagatctccatagtaaatttcattcagcaaatgtgtatttttcctatttatttatttatttatttattgagatgaagtctcgctctgttgcccaagctggagtgcagtggcgtgatcttggctcactgcaacctctgcctcccaggttcaagcgattcttctgcctcagcctcctgagtagctgggactacaggtgcgcaccaccatgcctggctaatttttatatttttagtagagacggggttttactatgttggtcaggctggtctcgaactcctgaccttgtgatcctcccgcctcggcctcccaaagtgctgggattacaggcgtgagccactgtgccaggtctagttatttatttatttattgtagagatgggctctcactgtgttggccagggtggtcttgaactcctggcctcgagcaatccttccacctcagtctcccaaagtgctgggattacaggtgtgagctatcacacctggccatttttttttttttttttttttttgagatagagtctcactctgtcacccgcattgtagtgcagtggcgcattcttgctcactgcaacctccccttcctgggctcaggggatcctcctacctcagcctctcaagtagctgggactacagggatgtgccaccatgcctggctagtttttgtgtatgtgtgtgttttgtagagacgaggtctcactattttgcccaggctggtccggaactcctgggctcaagcaatcctgcctcctcagcctcccaacgtgctgggattgcaggcatgatccagtgcacctgaccatcattcagcaagtatttttgagtgtctcctatgctagacaatggaagggataaagattattcatacgtgtgtgtgtgtgtgtgtgtgtacgtgcccataaatagtccttggctttctgtctagtaaggtaggtaagacaatacagtgataaatgccttgtgagttgtaagccgagtgctatagaggctcagaggagggaaaggtcacttcctgctgagtgagctcttacgagtatgtggcaaggtgatacgttagagaatgcaagactaagagtttgtcaagttaagtaattaaggcaacattaagaggtagtgagttggtgtccagtgctagagcaaggagtttcagctttagttaggaagcaatggggagccactgacttttttttttctttttgatcaaaaagtcttatctgggaaaatgtatctggcagtaatgtgtaatttcaattttttttaaaaaaaattggttcttggatagtcttttaggcttcttttgtatgaaacaaagccatgtttataaataagtgaattatgaaatggattcatttccaatctttttaaaaggtagtcagaaactatcttcagatgcaattagatacagtaagataggctgcatagttaagatgtaagcagtttacacagtgggataaaaatgctacttttcatactttctcaaaccatttttaggggtatttttgtgtcagccatcctgctatctcatttgtccaattaaagcaaggaagaaatcctccattctccttttttccccattcttggatagaatgaatgtctatagtgaaaagaactcatcagtagtcctctcagatttggtctgaatttcaccaaatatttgtataattgcaaaaaacttgtttctcagccttctcctttagggggaaaacaaatagagggcatgatggcctacctccctgcattgtggtgagggtcagctgatacaaaataaagtgttaagtgtaattaccctgaaatgtttgtaattaat

SEQ ID NO: 5439 - DNA, 1278 bp, Homo sapiens
  source 1..1278: mol_type = unassigned DNA
agctagggttagaggcaacccgtgaggctagaaccccgaacgtggtcggttggagaaaatatgtccctccggaggcacattgggaaccctgagtatctgatgaaaaggataccacagaacccaagataccagcatatcaaatcaagactggacactgattatagatacaaaaaagatgagcttttcaagagactaaaagttacaacttttgcccagctgatcatccaagttgcttccctctctgatcaaacactggaagtgacagctgaggagattcaaaggctggaagacaatgattctgcagcttcagaccctgatgctgaaaccactgccaggaccaatgggaaaggaaatccaggtgagcagtcgccgagccctgagcagttcataaacaacgcaggagcaggggactccagccgctcaactcttcagagtgtcatcagtggtgttggggaactggatctagacaaagggccagtgaagaaagcagagccccataccaaagacaaaccttatcctgactgccccttcctgctgctagatgtgcgtgatagagattcttaccagcagtgccacattgttggagcttacagttacccaattgcaactctgtctagaacaatgaacccttattcaaatgatattcttgaatataaaaatgcccatggcaagatcatcattctgtatgacgatgatgaaaggctggccagtcaggcggccaccaccatgtgcgagcgtggatttgaaaacctcttcatgctttccggaggccgactgaaccaagctaactcctccggaagagagtccaaggtgcctggtgcccgaagcgctcagaatctgccaggtggcggccccgccagccactcaaacccccgctccctcagcagtggtcacctgcaaggcaaaccctggaagtaaagactttgtctcacttaggcaaataaatgttcttcctcttttcagaacccctgagcatttcccaagttgggtcatttccagaaacttctgcagaggaaagaccatgacatatgtatgggataggcctcttccctgtccctgtctccagttcctctcccctcaggaggccacctcaggaaggattttgacaggtgaccataaaaaccagaggtgtgacaggctctagtctcctccctgttgtttacagcatatttaagtcttgtgaaactgtataggaaaaaagtatctacgtttttagtttttttgttttgtttttttttaataaggtccagcttgttgggtctctctgtgttgttttgt

SEQ ID NO: 5440 - DNA, 1501 bp, Homo sapiens
  source 1..1501: mol_type = unassigned DNA
cacacctgatggtgtgactcggccgacgcgagcgccgcgcttcgcttcagctgctagctggcccaagggaggcgaccgcggagggtggcgaggggcggccaggacccgcagccccggggccgggccggtccggaccgccagggagggcaggtcagtgggcagatcgcgtccgcgggattcaatctctgcccgctctgataacagtccttttccctggcgctcacttcgtgcctggcacccggctgggcgcctcaagaccgttgtctcttcgatcgcttctttggacttggcgaccatttcagagatgtcttccagaagtaccaaagatttaattaaaagtaagtggggatcgaagcctagtaactccaaatccgaaactacattagaaaaattaaagggagaaattgcacacttaaagacatcagtggatgaaatcacaagtgggaaaggaaagctgactgataaagagagacacagacttttggagaaaattcgagtccttgaggctgagaaggagaagaatgcttatcaactcacagagaaggacaaagaaatacagcgactgagagaccaactgaaggccagatatagtactaccacattgcttgaacagctggaagagacaacgagagaaggagaaaggagggagcaggtgttgaaagccttatctgaagagaaagacgtattgaaacaacagttgtctgctgcaacctcacgaattgctgaacttgaaagcaaaaccaatacactccgtttatcacagactgtggctccaaactgcttcaactcatcaataaataatattcatgaaatggaaatacagctgaaagatgctctggagaaaaatcagcagtggctcgtgtatgatcagcagcgggaagtctatgtaaaaggacttttagcaaagatctttgagttggaaaagaaaacggaaacagctgctcattcactcccacagcagacaaaaaagcctgaatcagaaggttatcttcaagaagagaagcagaaatgttacaacgatctcttggcaagtgcaaaaaaagatcttgaggttgaacgacaaaccataactcagctgagttttgaactgagtgaatttcgaagaaaatatgaagaaacccaaaaagaagttcacaatttaaatcagctgttgtattcacaaagaagggcagatgtgcaacatctggaagatgataggcataaaacagagaagatacaaaaactcagggaagagaatgatattgctaggggaaaacttgaagaagagaagaagagatccgaagagctcttatctcaggtccagtttctttacacatctctgctaaagcagcaagaagaacaaacaagggtagctctgttggaacaacagatgcaggcatgtactttagactttgaaaatgaaaaactcgaccgtcaacatgtgcagcatcaattgcatgtaattcttaaggagctccgaaaagcaagaaataacacagttggaatccttgataccaaatca

SEQ ID NO: 5441 - DNA, 2638 bp, Homo sapiens
  source 1..2638: mol_type = unassigned DNA
cacacctgatggtgtgactcggccgacgcgagcgccgcgcttcgcttcagctgctagctggcccaagggaggcgaccgcggagggtggcgaggggcggccaggacccgcagccccggggccgggccggtccggaccgccagggagggcaggtcagtgggcagatcgcgtccgcgggattcaatctctgcccgctctgataacagtccttttccctggcgctcacttcgtgcctggcacccggctgggcgcctcaagaccgttgtctcttcgatcgcttctttggacttggcgaccatttcagagatgtcttccagaagtaccaaagatttaattaaaagtaagtggggatcgaagcctagtaactccaaatccgaaactacattagaaaaattaaagggagaaattgcacacttaaagacatcagtggatgaaatcacaagtgggaaaggaaagctgactgataaagagagacacagacttttggagaaaattcgagtccttgaggctgagaaggagaagaatgcttatcaactcacagagaaggacaaagaaatacagcgactgagagaccaactgaaggccagatatagtactaccacattgcttgaacagctggaagagacaacgagagaaggagaaaggagggagcaggtgttgaaagccttatctgaagagaaagacgtattgaaacaacagttgtctgctgcaacctcacgaattgctgaacttgaaagcaaaaccaatacactccgtttatcacagactgtggctccaaactgcttcaactcatcaataaataatattcatgaaatggaaatacagctgaaagatgctctggagaaaaatcagcagtggctcgtgtatgatcagcagcgggaagtctatgtaaaaggacttttagcaaagatctttgagttggaaaagaaaacggaaacagctgctcattcactcccacagcagacaaaaaagcctgaatcagaaggttatcttcaagaagagaagcagaaatgttacaacgatctcttggcaagtgcaaaaaaagatcttgaggttgaacgacaaaccataactcagctgagttttgaactgagtgaatttcgaagaaaatatgaagaaacccaaaaagaagttcacaatttaaatcagctgttgtattcacaaagaagggcagatgtgcaacatctggaagatgataggcataaaacagagaagatacaaaaactcagggaagagaatgatattgctaggggaaaacttgaagaagagaagaagagatccgaagagctcttatctcaggtccagtttctttacacatctctgctaaagcagcaagaagaacaaacaagggtagctctgttggaacaacagatgcaggcatgtactttagactttgaaaatgaaaaactcgaccgtcaacatgtgcagcatcaattgcatgtaattcttaaggagctccgaaaagcaagaaatcaaataacacagttggaatccttgaaacagcttcatgagtttgccatcacagagccattagtcactttccaaggagagactgaaaacagagaaaaagttgccgcctcaccaaaaagtcccactgctgcactcaatgaaagcctggtggaatgtcccaagtgcaatatacagtatccagccactgagcatcgcgatctgcttgtccatgtggaatactgttcaaagtagcaaaataagtatttgttttgatattaaaagattcaatactgtattttctgttagcttgtgggcattttgaattatatatttcacattttgcataaaactgcctatctacctttgacactccagcatgctagtgaatcatgtatcttttaggctgctgtgcatttctcttggcagtgatacctccctgacatggttcatcatcaggctgcaatgacagaatgtggtgagcagcgtctactgagactactaacattttgcactgtcaaaatacttggtgaggaaaagatagctcaggttattgctaatgggttaatgcaccagcaagcaaaatattttatgttttgggggttttgaaaaatcaaagataattaaccaaggatcttaactgtgttcgcattttttatccaagcacttagaaaacctacaatcctaattttgatgtccattgttaagaggtggtgatagatactattttttttttcatattgtatagcggttattagaaaagttggggattttcttgatctttattgctgcttaccattgaaacttaacccagctgtgttccccaactctgttctgcgcacgaaacagtatctgtttgaggcataatcttaagtggccacacacaatgttttctcttatgttatctggcagtaactgtaacttgaattacattagcacattctgcttagctaaaattgttaaaataaactttaataaacccatgtagccctctcatttgattgacagtattttagttatttttggcattcttaaagctgggcaatgtaatgatcagatctttgtttgtctgaacaggtatttttatacatgctttttgtaaaccaaaaacttttaaatttcttcaggttttctaacatgcttaccactgggctactgtaaatgagaaaagaataaaattatttaatgttttaa

SEQ ID NO: 5442 - DNA, 747 bp, Homo sapiens
  source 1..747: mol_type = unassigned DNA
actcatcaataaataatattcatgaaatggaaatacagctgaaagatgctctggagaaaaatcagcagtggctcgtgtatgatcagcagcgggaagtctatgtaaaaggacttttagcaaagatctttgagttggaaaagaaaacggaaacagctgctcattcactcccacagcagacaaaaaagcctgaatcagaaggttatcttcaagaagagaagcagaaatgttacaacgatctcttggcaagtgcaaaaaaagatcttgaggttgaacgacaaaccataactcagctgagttttgaactgagtgaatttcgaagaaaatatgaagaaacccaaaaagaagttcacaatttaaatcagctgttgtattcacaaagaagggcagatgtgcaacatctggaagatgataggcataaaacagagaagatacaaaaactcagggaagagaatgatattgctaggggaaaacttgaagaagagaagaagagatccgaagagctcttatctcaggtccagtttctttacacatctctgctaaagcagcaagaagaacaaacaagggtagctctgttggaacaacaggtactcattcgggttgcttctaaattcaattctgcctgttagaaaatgcagtttttcctcatgtttatgctgttctatggagaactgtttgaaagttgtgaaaagtgtctttaaaagacttcaataaaagtctttcttcttcaataaaaaagatatttcaaga

SEQ ID NO: 5443 - DNA, 3080 bp, Homo sapiens
  source 1..3080: mol_type = unassigned DNA
gtccgttaggacgtgttgccctttctgtgtaagctgtgagcgtaggcggccctgagggggtgtgttgcaggggtttccaagcccagcaccagcacccttgcccttttccatcaggggttcagcctagggtccccgctggtgggcggctcccgagtcttggagaagagcacgagaacctagaccgcccccgaagtgcggagaccccctgggcaggctgaaagatggcggcggcgtctgtctctgcggcttctggttctcacttgtcgaacagctttgctgagccatcaaggtctaatggaagcatggttcggcattcttcatctccatatgtagtatatccttcggataagcctttccttaatagtgatctacgacgctccccaagtaagcctacacttgcctatccagaaagcaacagcagagccatattttctgctcttaagaatcttcaagataagattcgacgcttggaacttgagaggattcaggcagaagaaagtgtgaaaaccttgtctagagaaacaattgaatataagaaagtactggatgaacagatacaagaaagggagaattcaaagaatgaggaatcaaagcacaatcaagaactgacatctcagttgttagctgcagaaaataaatgcaatctattagaaaaacaattggaatacatgcgaaatatgataaagcatgccgaaatggagaggacatctgtcttagagaaacaagtttccctagaaagagaacgacaacatgatcaaacacatgttcagagccaacttgaaaaattggatcttcttgaacaggagtataacaaacttaccacaatgcaggcccttgcagaaaaaaaaatgcaagagttggaagcaaaactccatgaagaagaacaggaaaggaaacgcatgcaagctaaggcagctgagttgcagactggtctagaaacaaatagacttatctttgaagataaggcaactccgtgtgttcccaatgcaagaagaattaaaaaaaagaagtcaaaaccaccagaaaagtccacaagccctagccatgccgtggtagccaatgttcagcttgtcttgcatctaatgaagcaacacagtaaagctttgtgcaatgatcgagtcatcaacagtattcctttggcaaagcaagtatcttcacgaggtggtaaaagtaagaagttgtcagtaacacctccctcctccaacggtattaatgaggagttgtcagaagtcttacagactttacaggatgaatttgggcaaatgagctttgatcaccagcagcttgcaaaacttatccaggagtcgccaaccgttgaactgaaagacaagttggagtgtgaattggaggcattagtgggaaggatggaagcaaaagccaaccaaataactaaagttcgaaaataccaagcccagctggagaaacagaagttagagaagcagaagaaggaattaaaagctaccaaaaagactcttgatgaagaaagaaacagcagcagccgttctggaatcacagggaccacaaataagaaagattttatgaaactgagacctggagaaaaaaggagaaaaaatcttcagttattgaaggacatgcaaagcatacagaattcattacaaagcagtagtttgtgttgggattactgactcataaccaggtcagaaattttattcagataatctgtacctcatcaatcagatgatgacaatttacttcccaggtctcatactcacttatgttggaattaattaatagcaggtgttaaaggacccaggcttcattacacaggcttttcatgtatgcaggatgactcaatgttaaagcatttaaatggaaaccaggggagttttaaagcccgagaaaccacacataatcttttgttgagatgagtttgctgtactgacgctgcactttgtaaacagattaccagttttttacttgtgggtgtgattttttaaaatagttctttatatataattaaaattaggtttaaattttcaaaatatgagactatgctataggcagtgcttgcttgaaaagtctcatttttaaatctccctggcatgaggtgcccacttcccctttccaaagcaaccattaaacatactttgtttctactattggtggagtttttctatatttaaaaatacatatatatttcagaggatttttattttgctttttggcatttcagactttgatcagtgttaagtgcacttgtattgctttttaatctgttaattttttaaagacccaagcagtcattttgagttatatctataaaaattataaaaggatttttgaaagtataaacaaattgtcagtgaaataaatgagattttggaataaagtgagaatgggagaagggatatgttgtgagcatataccttcacagttcttaatacctgttttgtaatcatgatattcagtcaaggcattatggtttttaatcttgaaacttagagaaccctttgaatatttgcttttactggtgtacagtatgagtggaatataaactgtacacataattatcatgttgatataaatcataatttcaactagatcaagacatgttaaccttttataaatttaaagtcaataaagcacctttttaaaggaaacactgcaactttccttaacagcctgttaataaaggctttgtgacaagctctcaaaaaatgcatttctaaataggaggacatcaatgtattgatgaagagaaaaaactagtacttagttgccacactcatgcttacatagaaagagagcccaagaatattagatttcctcatgatacaagatactacagtaacaggctttaatttaggatccttaagattttggggtattatttgtgactctcctgaaattgtaaacttgtgcttctgtgtccagttttctaatgagtaggttcgtagcttgattgaattaataattgtgagcccatagacacaagggaagtgagaaacagtgctctggtgacatgataaatatatgtgtcaaccaccatttcagctattaaaaactcctgttatctccttgtttgaatttcaggtcattaaattgtataaccatcattt

SEQ ID NO: 5444 - DNA, 3178 bp, Homo sapiens
  source 1..3178: mol_type = unassigned DNA
gattggctaggaaagacgtccgttaggacgtgttgccctttctgtgtaagctgtgagcgtaggcggccctgagggggtgtgttgcaggggtttccaagcccagcaccagcacccttgcccttttccatcaggggttcagcctagggtccccgctggtgggcggctcccgagtcttggagaagagcacgagaacctagaccgcccccgaagtgcggagaccccctgggcaggctgaaagatggcggcggcgtctgtctctgcggcttctggttctcacttgtcgaacagctttgctgagccatcaaggtctaatggaagcatggttcggcattcttcatctccatatgtagtatatccttcggataagcctttccttaatagtgatctacgacgctccccaagtaagcctacacttgcctatccagaaagcaacagcagagccatattttctgctcttaagaatcttcaagataagattcgacgcttggaacttgagaggattcaggcagaagaaagtgtgaaaaccttgtctagagaaacaattgaatataagaaagtactggatgaacagatacaagaaagggagaattcaaagaatgaggaatcaaagcacaatcaagaactgacatctcagttgttagctgcagaaaataaatgcaatctattagaaaaacaattggaatacatgcgaaatatgataaagcatgccgaaatggagaggacatctgtcttagagaaacaagtttccctagaaagagaacgacaacatgatcaaacacatgttcagagccaacttgaaaaattggatcttcttgaacaggagtataacaaacttaccacaatgcaggcccttgcagaaaaaaaaatgcaagagttggaagcaaaactccatgaagaagaacaggaaaggaaacgcatgcaagctaaggcagctgagttgcagactggtctagaaacaaatagacttatctttgaagataaggcaactccgtgtgttcccaatgcaagaagaattaaaaaaaagaagtcaaaaccaccagaaaagaaaagttctaggaactattttggtgcacaaccacattatagattatgcttgggtgatatgccatttgtagctgggaagtccacaagccctagccatgccgtggtagccaatgttcagcttgtcttgcatctaatgaagcaacacagtaaagctttgtgcaatgatcgagtcatcaacagtattcctttggcaaagcaagtatcttcacgaggtggtaaaagtaagaagttgtcagtaacacctccctcctccaacggtattaatgaggagttgtcagaagtcttacagactttacaggatgaatttgggcaaatgagctttgatcaccagcagcttgcaaaacttatccaggagtcgccaaccgttgaactgaaagacaagttggagtgtgaattggaggcattagtgggaaggatggaagcaaaagccaaccaaataactaaagttcgaaaataccaagcccagctggagaaacagaagttagagaagcagaagaaggaattaaaagctaccaaaaagactcttgatgaagaaagaaacagcagcagccgttctggaatcacagggaccacaaataagaaagattttatgaaactgagacctggagaaaaaaggagaaaaaatcttcagttattgaaggacatgcaaagcatacagaattcattacaaagcagtagtttgtgttgggattactgactcataaccaggtcagaaattttattcagataatctgtacctcatcaatcagatgatgacaatttacttcccaggtctcatactcacttatgttggaattaattaatagcaggtgttaaaggacccaggcttcattacacaggcttttcatgtatgcaggatgactcaatgttaaagcatttaaatggaaaccaggggagttttaaagcccgagaaaccacacataatcttttgttgagatgagtttgctgtactgacgctgcactttgtaaacagattaccagttttttacttgtgggtgtgattttttaaaatagttctttatatataattaaaattaggtttaaattttcaaaatatgagactatgctataggcagtgcttgcttgaaaagtctcatttttaaatctccctggcatgaggtgcccacttcccctttccaaagcaaccattaaacatactttgtttctactattggtggagtttttctatatttaaaaatacatatatatttcagaggatttttattttgctttttggcatttcagactttgatcagtgttaagtgcacttgtattgctttttaatctgttaattttttaaagacccaagcagtcattttgagttatatctataaaaattataaaaggatttttgaaagtataaacaaattgtcagtgaaataaatgagattttggaataaagtgagaatgggagaagggatatgttgtgagcatataccttcacagttcttaatacctgttttgtaatcatgatattcagtcaaggcattatggtttttaatcttgaaacttagagaaccctttgaatatttgcttttactggtgtacagtatgagtggaatataaactgtacacataattatcatgttgatataaatcataatttcaactagatcaagacatgttaaccttttataaatttaaagtcaataaagcacctttttaaaggaaacactgcaactttccttaacagcctgttaataaaggctttgtgacaagctctcaaaaaatgcatttctaaataggaggacatcaatgtattgatgaagagaaaaaactagtacttagttgccacactcatgcttacatagaaagagagcccaagaatattagatttcctcatgatacaagatactacagtaacaggctttaatttaggatccttaagattttggggtattatttgtgactctcctgaaattgtaaacttgtgcttctgtgtccagttttctaatgagtaggttcgtagcttgattgaattaataattgtgagcccatagacacaagggaagtgagaaacagtgctctggtgacatgataaatatatgtgtcaaccaccatttcagctattaaaaactcctgttatctccttgtttgaatttcaggtcattaaattgtataaccatcatttgaa

SEQ ID NO: 5445 - DNA, 2084 bp, Homo sapiens
  source 1..2084: mol_type = unassigned DNA
ccgcccccgaagtgcggagaccccctgggcaggctgaaagatggcggcggcgtctgtctctgcggcttctggttctcacttgtcgaacagctttgctgagccatcaaggtctaatggaagcatggttcggcattcttcatctccatatgtagtatatccttcggataagcctttccttaatagtgatctacgacgctccccaagtaagcctacacttgcctatccagaaagcaacagcagagccatattttctgctcttaagaatcttcaagataagattcgacgcttggaacttgagaggattcaggcagaagaaagtgtgaaaaccttgtctagagaaacaattgaatataagaaagtactggatgaacagatacaagaaagggagaattcaaagaatgaggaatcaaagcacaatcaagaactgacatctcagttgttagctgcagaaaataaatgcaatctattagaaaaacaattggaatacatgcgaaatatgataaagcatgccgaaatggagaggacatctgtcttagagaaacaagtttccctagaaagagaacgacaacatgatcaaacacatgttcagagccaacttgaaaaattggatcttcttgaacaggagtataacaaacttaccacaatgcaggcccttgcagaaaaaaaaatgcaagagttggaagcaaaactccatgaagaagaacaggaaaggaaacgcatgcaagctaaggcagctgagttgcagactggtctagaaacaaatagacttatctttgaagataaggcaactccgtgtgttcccaatgcaagaagaattaaaaaaaagaagtcaaaaccaccagaaaaggtgtgaagacagaaccaaatcaggcaaaatgctgattacttggtatagtttatgtcaaaacacccataaactgtgtggtgtactacaaccttgagagagtaaatctttcattctcaatttcttcattcagaaggtggagataagtaatacctactcctaaatttttatcctgatagtgagaaaatatataagcattttggaactacagaacaccatacaaaattagcattattagtactgcattatcttgtgctcttacaatgttttgtgtatatgtatactgattttctacttagaatgtaactgttgttttgtcaagtgcttttttccccccagcctttcctaggctaggatatatgctaacaagtactattaggagctggcttgtgatcataatgccaactatagataaggcaagtagtagcctagtagttaactgaagtttcaagttagtcatgtatagtcagtttttattatcatgtgaataaaataaaattgttttccttttcttttcattcagaaaagttctaggaactattttggtgcacaaccacattatagattatgcttgggtgatatgccatttgtagctgggaaggtgagttggtcaaactccggattctttttatacaacattgatccctgaattaagtccctgcatctgcaagtatgtctacaaatggaaggaacatttttctgtgcctttaccagtgtgtggatcacagtgatgtgaaaatgagatgtagggaggtttttggggattagggaagcaaggaagagatggggaggataccttaaagtagataaagtatatgtggaaaggaagtgataaaacagagaccctaagttgaagaaggtgttgtttcagataggggtcaaggaaataagaaatagtatgtttgtagcattggatttttagtatcaatcctgttgagttacatttagatataggtagatattcgaataagcacgtagcacattctgcttgtcctcacatccagatcatttctaggactaattctccaagaagcagtcatacgtacacttgaatcttcagtttcttcagcacttgaatgtaaagctgtattgtcatatatcaagtactgagtgaagtgcctaaaactgtgctagttgacactactttataagctgtttgtgttgctggtggttttatatttagattccaactagattgttattctggcatcttgggaagtaaatgttcttctgaattttg

SEQ ID NO: 5446 - DNA, 2910 bp, Homo sapiens
  source 1..2910: mol_type = unassigned DNA
atgttgaccagaattgataacagctttgctgagccatcaaggtctaatggaagcatggttcggcattcttcatctccatatgtagtatatccttcggataagcctttccttaatagtgatctacgacgctccccaagtaagcctacacttgcctatccagaaagcaacagcagagccatattttctgctcttaagaatcttcaagataagattcgacgcttggaacttgagaggattcaggcagaagaaagtgtgaaaaccttgtctagagaaacaattgaatataagaaagtactggatgaacagatacaagaaagggagaattcaaagaatgaggaatcaaagcacaatcaagaactgacatctcagttgttagctgcagaaaataaatgcaatctattagaaaaacaattggaatacatgcgaaatatgataaagcatgccgaaatggagaggacatctgtcttagagaaacaagtttccctagaaagagaacgacaacatgatcaaacacatgttcagagccaacttgaaaaattggatcttcttgaacaggagtataacaaacttaccacaatgcaggcccttgcagaaaaaaaaatgcaagagttggaagcaaaactccatgaagaagaacaggaaaggaaacgcatgcaagctaaggcagctgagttgcagactggtctagaaacaaatagacttatctttgaagataaggcaactccgtgtgttcccaatgcaagaagaattaaaaaaaagaagtcaaaaccaccagaaaagaaaagttctaggaactattttggtgcacaaccacattatagattatgcttgggtgatatgccatttgtagctgggaagtccacaagccctagccatgccgtggtagccaatgttcagcttgtcttgcatctaatgaagcaacacagtaaagctttgtgcaatgatcgagtcatcaacagtattcctttggcaaagcaagtatcttcacgaggtggtaaaagtaagaagttgtcagtaacacctccctcctccaacggtattaatgaggagttgtcagaagtcttacagactttacaggatgaatttgggcaaatgagctttgatcaccagcagcttgcaaaacttatccaggagtcgccaaccgttgaactgaaagacaagttggagtgtgaattggaggcattagtgggaaggatggaagcaaaagccaaccaaataactaaagttcgaaaataccaagcccagctggagaaacagaagttagagaagcagaagaaggaattaaaagctaccaaaaagactcttgatgaagaaagaaacagcagcagccgttctggaatcacagggaccacaaataagaaagattttatgaaactgagacctggagaaaaaaggagaaaaaatcttcagttattgaaggacatgcaaagcatacagaattcattacaaagcagtagtttgtgttgggattactgactcataaccaggtcagaaattttattcagataatctgtacctcatcaatcagatgatgacaatttacttcccaggtctcatactcacttatgttggaattaattaatagcaggtgttaaaggacccaggcttcattacacaggcttttcatgtatgcaggatgactcaatgttaaagcatttaaatggaaaccaggggagttttaaagcccgagaaaccacacataatcttttgttgagatgagtttgctgtactgacgctgcactttgtaaacagattaccagttttttacttgtgggtgtgattttttaaaatagttctttatatataattaaaattaggtttaaattttcaaaatatgagactatgctataggcagtgcttgcttgaaaagtctcatttttaaatctccctggcatgaggtgcccacttcccctttccaaagcaaccattaaacatactttgtttctactattggtggagtttttctatatttaaaaatacatatatatttcagaggatttttattttgctttttggcatttcagactttgatcagtgttaagtgcacttgtattgctttttaatctgttaattttttaaagacccaagcagtcattttgagttatatctataaaaattataaaaggatttttgaaagtataaacaaattgtcagtgaaataaatgagattttggaataaagtgagaatgggagaagggatatgttgtgagcatataccttcacagttcttaatacctgttttgtaatcatgatattcagtcaaggcattatggtttttaatcttgaaacttagagaaccctttgaatatttgcttttactggtgtacagtatgagtggaatataaactgtacacataattatcatgttgatataaatcataatttcaactagatcaagacatgttaaccttttataaatttaaagtcaataaagcacctttttaaaggaaacactgcaactttccttaacagcctgttaataaaggctttgtgacaagctctcaaaaaatgcatttctaaataggaggacatcaatgtattgatgaagagaaaaaactagtacttagttgccacactcatgcttacatagaaagagagcccaagaatattagatttcctcatgatacaagatactacagtaacaggctttaatttaggatccttaagattttggggtattatttgtgactctcctgaaattgtaaacttgtgcttctgtgtccagttttctaatgagtaggttcgtagcttgattgaattaataattgtgagcccatagacacaagggaagtgagaaacagtgctctggtgacatgataaatatatgtgtcaaccaccatttcagctattaaaaactcctgttatctccttgtttgaatttcaggtcattaaattgtataaccatcattt

SEQ ID NO: 5447 - DNA, 2732 bp, Homo sapiens
  source 1..2732: mol_type = unassigned DNA
attcgcaggccaaagaggggctggccctcgacgcgctcgggctcgattggccgccctcccccggcggtggtaacggtcgcggaggcggggcctgacgtagctgatcccagcctaacctggcccggctggctgctggtgggaggccggcgactgagtaagatgaagatccagtttcagacatgagactcgttgggtgatcatttcattgagatcaacctgaatgaccaggtgtaaagtgcaagagtaatatgctatgactgagtaactatgtttccggtagcccctaaaccccaggattccagtcaaccatcagacagactcatgactgaaaaacagcaggaagaagcagaatgggaaagcataaatgtgctattgatgatgcatggcttaaaacctttgtctctagtcaaaagaacagatctcaaagatctcatcatttttgacaaacagtcatcacaaaggatgagacagaatttgaaattgttggtggaagaaacatcatgtcaacagaacatgatacaggagcttatagaaactaatcaacagcttagaaatgaacttcagctagagcaaagccgagcagccaatcaagaacaacgagctaatgacttggaacaaattatggaaagtgtgaaatccaaaattggtgaattggaggatgaatcactaagtagggcttgccaccaacagaataaaataaaagatcttcaaaaggagcagaaaactttacaggtgaagtgccagcattataagaaaaaacgaacggagcaagaagaaactattgcttctttgcaaatggaagtctgtagattaaaaaaggaggaagaagatcgcattgtcactcaaaacagagtgtttgcctatctgtgcaaaagagttcctcataccgtcttggatagacagttgctttgtctaattgattactatgaatctaaaattagaaaaattcatacacaaaggcaatataaagaagatgaaagtcagtcagaagaagaaaacgactacagaaatctggatgcctcaccaacttataaaggccttttaatgtcattacagaatcaactcaaggaatcaaaatctaagattgatgcactttcaagtgaaaagctgaacctccaaaaagatttggaaaccaggcctacgcagcatgaattaagactttataaacagcaggtgaagaagctggaaaaagcccttaagaaaaacgtcaaattacaggagcttattaatcataagaaggctgaggacacagagaagaaagatgagcccagcaaatataatcagcaacaggccctaattgaccagagatactttcaggtgctgtgtagcatcaattcaattatccacaatccaagagctccagtaataatttataaacagaccaaagggggagtccaaaattttaataaagatcttgttcaagattgtggatttgagcatcttgttcctgtaatagaaatgtgggcagatcaactgacatccttaaaggatttgtataagtccttgaaaacactatctgcagaactggtaccttggcttaatttgaagaagcaggatgaaaatgaaggtatcaaagttgaagatttgttgtttatagtagatactatgctggaagaagttgaaaataaggaaaaggacagcaatatgccacactttcaaactttgcaagctattgtttctcacttccaaaagttatttgatgtgccttctttaaatggagtctatccccgaatgaatgaagtttatactaggcttggagaaatgaacaatgctgtgagaaacctccaagaactcttagaattagatagttcatcctcattgtgtgtgctagtaagcactgttggaaaactctgtaggctgattaatgaagatgtgaatgagcaggttatgcaggtattaggacctgaagacctccagagcattatctacaaattggaagaacacgaggaatttttcccagcatttcaggcatttactaatgatctacttgaaatcttagaaattgatgacttggatgccattgtacctgcagtaaagaaattaaaagtactttcatactgaaaacaaatcaaatcatttttactgtgtaaattgtattcttaacattttgtattttgtaggattgatcttattttgagacaagggttgtaaaatgtatttgctctcagaattcatccccttcttagtattaggtcattcttcatctgtataatttttattaactttgagattcttatacagaaaatagttgcaagggtaaggtaattaactttagatcccttcatttctaaagcaattattgagtgcttaaaatttaaggttgttttagagtggagtttgtgagtaaaagaggagcccagggagacagattgcaagtagtaggttgcaatcttttagattcagcttgtaataatctttgagccacaccaaaaggaatgccaagggctctctaaatttagccagtaggaagctactgctctcctggcaaggattaattggcacattctgttaagatatccctcatgacagttgccctttcaaagcaggaggaagaaaaggaagaaagaaaaactgtttcatcatttctgttagggtaggaaatgaatcatagggtaaaatggatgagtagatagaagtctctcatttaaaaagtgtcttttgcaatcttgatgtaatgcactttttataaggacttgagatctcaaataaaatttctgtaaagaatttccaaa

SEQ ID NO: 5448 - DNA, 1054 bp, Homo sapiens
  source 1..1054: mol_type = unassigned DNA
atgaagatccagtttcagacatgagactcgttgggtgatcatttcattgagatcaacctgaatgaccaggtgtaaagtgcaagagtaatatgctatgactgaggcaactcaaattttttaattgccaatttctgtttcttttgattctacaaaagtaactatgtttccggtagcccctaaaccccaggattccagtcaaccatcagacagactcatgactgaaaaacagcaggaagaagcagaatgggaaagcataaatgtgctattgatgatgcatggcttaaaacctttgtctctagtcaaaagaacagatctcaaagatctcatcatttttgacaaacagtcatcacaaaggatgagacagaatttgaaattgttggtggaagaaacatcatgtcaacagaacatgatacaggagcttatagaaactaatcaacagcttagaaatgaacttcagctagagcaaagccgagcagccaatcaagaacaacgagctaatgacttggaacaaattatggaaagtgtgaaatccaaaattggtgaattggaggatgaatcactaagtagggcttgccaccaacagaataaaataaaagatcttcaaaaggagcagaaaactttacaggtgaagtgccagcattataagaaaaaacgaacggagcaagaagaaactattgcttctttgcaaatggaagtctgtagattaaaaaaggaggaagaagatcgcattgtcactcaaaacagagtgtttgcctatctgtgcaaaagagttcctcataccgtcttggatagacagtaattttgctacataaattgatatgtagctagattcattgttgtgtttgtttgtttgttttacctgatattatcttgggggtggttataactcttataaactagaaaagcctctctctcctcctcttctgcattgtttttccctgctcatcctgttcttttttttttttttttttgttctagaggtcctttgaagaatggaattgaacatttactaaaaataacactaaacttttaaataaattcataattaatcaga

SEQ ID NO: 5449 - DNA, 551 bp, Homo sapiens
  source 1..551: mol_type = unassigned DNA
ataagcctccatgtaagtgacagggcacccaaggagtgcgttggaagcgccagcgtgcccgagaccagcacatcgcaccgacgccttcgtttgcgatgaagatccagtttcagacatgagactcgttgggtgatcatttcattgagatcaacctgaatgaccaggtgtaaagtgcaagagtaatatgctatgactgagtaactatgtttccggtagcccctaaaccccaggattccagtcaaccatcagacagactcatgactgaaaaacagcaggaagaagcagaatgggaaagcataaatgtgctattgatgatgcatggcttaaaacctttgtctctagtcaaaagaacagatctcaaagatctcatcatttttgacaaacagtcatcacaaaggatgagacagaatttgaaattgttggtggaagaaacatcatgtcaacagaacatgatacaggagcttatagaaactaatcaacagcttagaaatgaacttcagctagagcaaagccgagcagccaatcaagaacaacgagctaatgacttggaa

SEQ ID NO: 5450 - DNA, 2037 bp, Homo sapiens
  source 1..2037: mol_type = unassigned DNA
agcctaacctggcccggctggctgctggtgggaggccggcgactgagtaagatgaagatccagtttcagacatgagactcgttgggtgatcatttcattgagatcaacctgaatgaccaggtgtaaagtgcaagagtaatatgctatgactgagtaactatgtttccggtagcccctaaaccccaggattccagtcaaccatcagacagactcatgactgaaaaacagcaggaagaagcagaatgggaaagcataaatgtgctattgatgatgcatggcttaaaacctttgtctctagtcaaaagaacagatctcaaagatctcatcatttttgacaaacagtcatcacaaaggatgagacagaatttgaaattgttggtggaagaaacatcatgtcaacagaacatgatacaggagcttatagaaactaatcaacagcttagaaatgaacttcagctagagcaaagccgagcagccaatcaagaacaacgagctaatgacttggaacaaattatggaaagtgtgaaatccaaaattggtgaattggaggatgaatcactaagtagggcttgccaccaacagaataaaataaaagatcttcaaaaggagcagaaaactttacaggtgaagtgccagcattataagaaaaaacgaacggagcaagaagaaactattgcttctttgcaaatggaagtctgtagattaaaaaaggaggaagaagatcgcattgtcactcaaaacagagtgtttgcctatctgtgcaaaagagttcctcataccgtcttggatagacagttgctttgtctaattgattactatgaatctaaaattagaaaaattcatacacaaaggcaatataaagaagatgaaagtcagtcagaagaagaaaacgactacagaaatctggatgcctcaccaacttataaaggccttttaatgtcattacagaatcaactcaaggaatcaaaatctaagattgatgcactttcaagtgaaaagctgaacctccaaaaagatttggaaaccaggcctacgcagcatgaattaagactttataaacagcaggtgaagaagctggaaaaagcccttaagaaaaacgtcaaattacaggagcttattaatcataagaaggctgaggacacagagaagaaagatgagcccagcaaatataatcagcaacaggccctaattgaccagagatactttcaggtgctgtgtagcatcaattcaattatccacaatccaagagctccagtaataatttataaacagaccaaagggggagtccaaaattttaataaagatcttgttcaagattgtggatttgagcatcttgttcctgtaatagaaatgtgggcagatcaactgacatccttaaaggatttgtataagtccttgaaaacactatctgcagaactggtaccttggcttaatttgaagaagcaggatgaaaatgaaggtatcaaagttgaagatttgttgtttatagtagatactatgctggaagaagttgaaaataaggaaaaggacagcaatatgccacactttcaaactttgcaagctattgtttctcacttccaaaagttatttgatgtgccttctttaaatggagtctatccccgaatgaatgaagtttatactaggcttggagaaatgaacaatgctgtgagaaacctccaagaactcttagaattagatagttcatcctcattgtgtgtgctagtaagcactgttggaaaactctgtaggctgattaatgaagatgtgaatgagcaggttatgcaggtattaggacctgaagacctccagaggtatttgttttaaaagtttacaaagtatcatccagaatggctgggtgtggtggcacacgcctgtagtcccagctacttgggaggctgatgtgggaggatcacttgaacccaggagtttaagtccagtctgagcaaggcagtgagaccctgtctctaaacaataaaaattaaaataagtattatcgagagttcctggaggggtgaaattaaagactttcaaaactta

SEQ ID NO: 5451 - DNA, 1993 bp, Homo sapiens
  source 1..1993: mol_type = unassigned DNA
ctggtgggaggccggcgactgagtaagatgaagatccagtttcagacatgagactcgttgggtgatcatttcattgagatcaacctgaatgaccaggtgtaaagtgcaagagtaatatgctatgactgaggcaactcaaattttttaattgccaatttctgtttcttttgattctacaaaagtaactatgtttccggtagcccctaaaccccaggattccagtcaaccatcagacagactcatgactgaaaaacagcaggaagaagcagaatgggaaagcataaatgtgctattgatgatgcatggcttaaaacctttgtctctagtcaaaagaacagatctcaaagatctcatcatttttgacaaacagtcatcacaaaggatgagacagaatttgaaattgttggtggaagaaacatcatgtcaacagaacatgatacaggagcttatagaaactaatcaacagcttagaaatgaacttcagctagagcaaagccgagcagccaatcaagaacaacgagctaatgacttggaacaaattatggaaagtgtgaaatccaaaattggtgaattggaggatgaatcactaagtagggcttgccaccaacagaataaaataaaagatcttcaaaaggagcagaaaactttacaggtgaagtgccagcattataagaaaaaacgaacggagcaagaagaaactattgcttctttgcaaatggaagtctgtagattaaaaaaggaggaagaagatcgcattgtcactcaaaacagagtgtttgcctatctgtgcaaaagagttcctcataccgtcttggatagacagttgctttgtctaattgattactatgaatctaaaattagaaaaattcatacacaaaggcaatataaagaagatgaaagtcagtcagaagaagaaaacgactacagaaatctggatgcctcaccaacttataaaggccttttaatgtcattacagaatcaactcaaggaatcaaaatctaagattgatgcactttcaagtgaaaagctgaacctccaaaaagatttggaaaccaggcctacgcagcatgaattaagactttataaacagcaggtgaagaagctggaaaaagcccttaagaaaaacgtcaaattacaggagcttattaatcataagaaggctgaggacacagagaagaaagatgagcccagcaaatataatcagcaacaggccctaattgaccagagatactttcaggtgctgtgtagcatcaattcaattatccacaatccaagagctccagtaataatttataaacagaccaaagggggagtccaaaattttaataaagatcttgttcaagattgtggatttgagcatcttgttcctgtaatagaaatgtgggcagatcaactgacatccttaaaggatttgtataagtccttgaaaacactatctgcagaactggtaccttggcttaatttgaagaagcaggatgaaaatgaaggtatcaaagttgaagatttgttgtttatagtagatactatgctggaagaagttgaaaataaggaaaaggacagcaatatgccacactttcaaactttgcaagctattgtttctcacttccaaaagttatttgatgtgccttctttaaatggagtctatccccgaatgaatgaagtttatactaggcttggagaaatgaacaatgctgtgagaaacctccaagaactcttagaattagatagttcatcctcattgtgtgtgctagtaagcactgttggaaaactctgtaggctgattaatgaagatgtgaatgagcaggttatgcaggtattaggacctgaagacctccagagcattatctacaaattggaagaacacgaggaatttttcccagcatttcaggcatttactaatgatctacttgaaatcttagaaattgatgacttggatgccattgtacctgcagtaaagaaattaaaagtactttcatactgaaaacaaatcaaa

SEQ ID NO: 5452 - DNA, 598 bp, Homo sapiens
  source 1..598: mol_type = unassigned DNA
tcacctgggcctaaaagtggtcagactgacccttgtcggggaggagccatctgggacagggtcgcgccaattaaaaatccctgcgtaagggtttggggatcggacaaaactgcctccagtcccagctccccaggctttgtgttctttggcttctcctttaatgtctcagcgcctccgattctttatttgtatactaaagctggtaattcttgccttacaaggtggttgtgagggttaaatgaggcagtaagagtaaagcttagaatcacgtcgggcacagactcgatttaagctgtaggtaattactccatcccccaaaatcgacccgggctgaagcgctagttttgtgtcaaacaaccgcgaaggttgtttggggagtgaggactcggagcagaagggggcggttaggcgaatagcacagatgaagatccagtttcagacatgagactcgttgggtgatcatttcattgagatcaacctgaatgaccaggtgtaaagtgcaagagtaatatgctatgactgagtaactatgtttccggtagcccctaaaccccaggattccagtcaaccatcagacagactcatgactgaaaaacag

SEQ ID NO: 5453 - DNA, 2359 bp, Homo sapiens
  source 1..2359: mol_type = unassigned DNA
agcctaacctggcccggctggctgctggtgggaggccggcgactgagtaagatgaagatccagtttcagacatgagactcgttgggtgatcatttcattgagatcaacctgaatgaccaggtgtaaagtgcaagagtaatatgctatgactgagcaggaagaagcagaatgggaaagcataaatgtgctattgatgatgcatggcttaaaacctttgtctctagtcaaaagaacagatctcaaagatctcatcatttttgacaaacagtcatcacaaaggatgagacagaatttgaaattgttggtggaagaaacatcatgtcaacagaacatgatacaggagcttatagaaactaatcaacagcttagaaatgaacttcagctagagcaaagccgagcagccaatcaagaacaacgagctaatgacttggaacaaattatggaaagtgtgaaatccaaaattggtgaattggaggatgaatcactaagtagggcttgccaccaacagaataaaataaaagatcttcaaaaggagcagaaaactttacaggtgaagtgccagcattataagaaaaaacgaacggagcaagaagaaactattgcttctttgcaaatggaagtctgtagattaaaaaaggaggaagaagatcgcattgtcactcaaaacagagtgtttgcctatctgtgcaaaagagttcctcataccgtcttggatagacagttgctttgtctaattgattactatgaatctaaaattagaaaaattcatacacaaaggcaatataaagaagatgaaagtcagtcagaagaagaaaacgactacagaaatctggatgcctcaccaacttataaaggccttttaatgtcattacagaatcaactcaaggaatcaaaatctaagattgatgcactttcaagtgaaaagctgaacctccaaaaagatttggaaaccaggcctacgcagcatgaattaagactttataaacagcaggtgaagaagctggaaaaagcccttaagaaaaacgtcaaattacaggagcttattaatcataagaaggctgaggacacagagaagaaagatgagcccagcaaatataatcagcaacaggccctaattgaccagagatactttcaggtgctgtgtagcatcaattcaattatccacaatccaagagctccagtaataatttataaacagaccaaagggggagtccaaaattttaataaagatcttgttcaagattgtggatttgagcatcttgttcctgtaatagaaatgtgggcagatcaactgacatccttaaaggatttgtataagtccttgaaaacactatctgcagaactggtaccttggcttaatttgaagaagcaggatgaaaatgaaggtatcaaagttgaagatttgttgtttatagtagatactatgctggaagaagttgaaaataaggaaaaggacagcaatatgccacactttcaaactttgcaagctattgtttctcacttccaaaagttatttgatgtgccttctttaaatggagtctatccccgaatgaatgaagtttatactaggcttggagaaatgaacaatgctgtgagaaacctccaagaactcttagaattagatagttcatcctcattgtgtgtgctagtaagcactgttggaaaactctgtaggctgattaatgaagatgtgaatgagcaggttatgcaggtattaggacctgaagacctccagagcattatctacaaattggaagaacacgaggaatttttcccagcatttcaggcatttactaatgatctacttgaaatcttagaaattgatgacttggatgccattgtacctgcagtaaagaaattaaaagtactttcatactgaaaacaaatcaaatcatttttactgtgtaaattgtattcttaacattttgtattttgtaggattgatcttattttgagacaagggttgtaaaatgtatttgctctcagaattcatccccttcttagtattaggtcattcttcatctgtataatttttattaactttgagattcttatacagaaaatagttgcaagggtaaggtaattaactttagatcccttcatttctaaagcaattattgagtgcttaaaatttaaggttgttttagagtggagtttgtgagtaaaagaggagcccagggagacagattgcaagtagtaggttgcaatcttttagattcagcttgtaataatctttgagccacaccaaaaggaatgccaagggctctctaaatttagccagtaggaagctactgctctcctggcaaggattaattggcacattctgttaagatatccctcatgacagttgccctttcaa

SEQ ID NO: 5454 - DNA, 4367 bp, Homo sapiens
  source 1..4367: mol_type = unassigned DNA
gaggggcggagccccggcccggaggtctgtcatgctgttcccgctccaggtggccgctgtaacctcttcggtccgcgacgatcctctagagcactgtgtgtctccccggacgcgagcccgctcccctgaaatctgcaaaatggctgataatttggatgaatttattgaagagcaaaaagccagattggccgaagacaaagcagagttggaaagtgatccaccttacatggaaatgaagggaaagttgtcagcgaagctttctgaaaacagtaagatactgatctctatggctaaggaaaacataccaccaaatagtcaacagaccaggggttccttaggaattgattatggattaagtttaccacttggagaagactatgaacggaagaaacataaattaaaagaagaattgcggcaagattacagacgttatcttactcaggaaaggttgaaacttgaacgtaacaaagaatacaatcagtttctcaggggtaaggaagaatccagtgaaaagttcaggcaggtggaaaagagtactgagcccaagagtcagagaaataaaaaacctattggtcaagttaagcctgatctaacttcacaaatacagacatcttgtgaaaattcagagggtcctagaaaagatgtcttaactccttcagaggcatatgaagaacttctgaaccaaagacgactagaggaggacagataccgacaactagatgatgaaatcgaattaaggaatagaagaattattaaaaaagcaaatgaagaagtgggcatttccaacctaaaacatcaaaggtttgcaagcaaggctggcattccagatagaagatttcacagatttaatgaggatcgtgtttttgatagacggtatcatagaccagaccaagatcctgaagtaagtgaagaaatggatgagaggtttagatatgaaagtgattttgatagaagactttcgagagtgtatacaaatgacaggatgcacaggaacaaacgagggaatatgcctcctatggaacatgatggggatgttatagaacagtcaaacataagaatttcatctgctgaaaataaaagtgctccagacaatgaaacatccaaatctgctaatcaagatacctgtagtccttttgcagggatgctctttggaggtgaagatcgagaacttattcagagaaggaaagagaaatacagactagaactgttggaacaaatggctgagcaacagaggaacaagagacgagaaaaagatttagaactcagggttgcagcgtctggagcacaagaccctgagaaatcgcctgatagactaaagcagtttagtgtggcaccaagacactttgaagagatgataccacctgaaagacccagaatagctttccagacacctctccctcctttatctgccccatctgtcccacccatcccatcagttcatcctgttccttctcaaaatgaagatttgcgcagtggactcagcagcgcccttggtgaaatggtgtctcccaggattgcacctctgcctccacctcccctactaccacctttggctactaactatcgaactccttatgatgatgcatactatttttatgggtccaggaatactttcgatcccagtcttgcttattatggttcaggaatgatgggcgtacagcctgcagcttatgttagtgctcctgtcacccaccaactagcacaacctgttgtgaatacggttggacagaatgaactgaagattacaagtgatcaagtgataaattcaggattgatttttgaagataaaccgaaaccttccaaacagtcacttcagtcttaccaagaggctttgcagcagcagattcgggaaagagaagaaagaaggaagaaagaacgtgaagaaaaagaagaatatgaagctaaattagaagctgaaatgagaacatataatccctggggaaaaggtggaggtggtgctcctctcagggatgcaaaaggaaatctgataactgatttgaataggatgcacagacaaaatatagatgcctaccataacccagatgcaagaacatatgaagataaaagggctgttgtatctctagacccaaatttagccacttcaaatgctgagaacctagaagatgctgcaaataaaagctcaggtcatatgcaaacacagagctctccttttgctcggggaaatgtatttggtgagcctccaactgaacttcagattaaacagcaagaattatacaagaattttcttcgtttccagattgaggaaaagaaacaaagagaggaagcagagcgagagagactgagaattgcagaagaaaaagaagaaagacggcttgcagaacagagggcacgaattcagcaggagtatgaagaggaacaggaaaagaaaagagagaaagaggaggagcaaaggctaaaaaatgaagagcatattcggttagctgaagaaagacaaaaagaagcagaaagaaagaagaaagaagaagaagaaaaatataacctgcaacttcagcactactgtgaaagagacaatttgattggggaagaaacaaagcacatgagacagccttctcctatagttcctgctcttcagaacaaaattgcaagcaaactccaaagacctccttcagttgacagcatcatacgttcctttattcatgaaagttccatgtccagggcacagtcacccccggtacctgccaggaaaaatcagctccgtgcagaagaggagaaaaaaaatgtaattatggaattatcagaaatgagaaaacagcttcgtagtgaagagaggcgtctacaagagcgattgctacacatggacagtgatgatgaaattcctatcaggaaaaaggaaaggaatcccatggatatatttgatatggctagacatcggttgcaagctcctgtcagaagacagtcccctaagggcttagacgctgccacttttcagaatgttcatgattttaatgagctgaaagatagagattcagaaacacgagttgatctgaaatttatgtacctggatcctccaagagatcatcacaccttagagattcagcagcaagccctgctaagagagcagcagaagaggctgaacagaataaaaatgcaggaaggtgccaaagttgacttagatgccatcccaagtgctaaagtacgagagcaaagaatgcccagagatgacactagtgatttcttgaaaaactcattattggaatctgatagtgcttttattggggcttacggtgagacatatcctgccattgaagatgacgtcctccctccaccatcacagttgccctctgcacgggagcgcaggaggaacaaatggaaaggactagacattgatagcagtcgtcctaatgtagcaccagatggtctctctctaaaatctatatccagtgtaaatgttgatgagcttagagtgagaaatgaggaacgaatgcgaagactgaatgaatttcacaataaacctattaatacagatgatgagagttcactggttgaccctgatgacatcatgaaacacataggggatgacggatcaaactctgtagcaactgagccctggctccgccctggcacttcagaaacgctgaaacgtttcatggcagagcagctgaaccaggagcagcagcagattcctggaaaaccaggcactttcacttggcagggcctgtcgactgcacatggttaaaataaacctgtactggacccagtagtgccttttaaggtgaaaggaatggtaaatctgtacctttaatatgtcctacttttggcccctacctgaaagttactttttttccatcatctgtatataaaattatttttatcatgatgtatattatgtacataaataaaaggccatgattattgatttatataatagaattgtatagattatttttgcacagttttgtcataaattagggtggtaatgaactggattgaactactatatgtgcattatattgaattctgcttgtcattaagataaggtgaataagtgtcttaaacgtcctgtaaaaccggactcccctttgttacatgcacattttccattgttacctcgatgcaaaagaattcatttagtaggtacatctattgtagctgtgattattccagtttctgtgtgatgcaatcaaatgtcctattaattaattattatttcatgtcatttgtagctactgatacagcagaaatgaagggaactgtaattacttgtatttttgtaagccatacgttaaatgtttgttacatcatctttctgcttctatttttatgccaatgaaggcatttgtcttgttactaattacatgatgtaactacttcttgatataaataaatttttattttaattactaaaa

SEQ ID NO: 5455 - DNA, 4468 bp, Homo sapiens
  source 1..4468: mol_type = unassigned DNA
gaggggcggagccccggcccggaggtctgtcatgctgttcccgctccaggtggccgctgtaacctcttcggtccgcgacgatcctctagagcactgtgtgtctccccggacgcgagcccgctcccctgaaatctgcaaaatggctgataatttggatgaatttattgaagagcaaaaagccagattggccgaagacaaagcagagttggaaagtgatccaccttacatggaaatgaagggaaagttgtcagcgaagctttctgaaaacagtaagatactgatctctatggctaaggaaaacataccaccaaatagtcaacagaccaggggttccttaggaattgattatggattaagtttaccacttggagaagactatgaacggaagaaacataaattaaaagaagaattgcggcaagattacagacgttatcttactcagaaggttttcagtggtactagcaaaaaaaattttctatctacgagtgaaacagatccatctactttgggagtttctcttcctattggtgagaggttatctgctaaggaaaggttgaaacttgaacgtaacaaagaatacaatcagtttctcaggggtaaggaagaatccagtgaaaagttcaggcaggtggaaaagagtactgagcccaagagtcagagaaataaaaaacctattggtcaagttaagcctgatctaacttcacaaatacagacatcttgtgaaaattcagagggtcctagaaaagatgtcttaactccttcagaggcatatgaagaacttctgaaccaaagacgactagaggaggacagataccgacaactagatgatgaaatcgaattaaggaatagaagaattattaaaaaagcaaatgaagaagtgggcatttccaacctaaaacatcaaaggtttgcaagcaaggctggcattccagatagaagatttcacagatttaatgaggatcgtgtttttgatagacggtatcatagaccagaccaagatcctgaagtaagtgaagaaatggatgagaggtttagatatgaaagtgattttgatagaagactttcgagagtgtatacaaatgacaggatgcacaggaacaaacgagggaatatgcctcctatggaacatgatggggatgttatagaacagtcaaacataagaatttcatctgctgaaaataaaagtgctccagacaatgaaacatccaaatctgctaatcaagatacctgtagtccttttgcagggatgctctttggaggtgaagatcgagaacttattcagagaaggaaagagaaatacagactagaactgttggaacaaatggctgagcaacagaggaacaagagacgagaaaaagatttagaactcagggttgcagcgtctggagcacaagaccctgagaaatcgcctgatagactaaagcagtttagtgtggcaccaagacactttgaagagatgataccacctgaaagacccagaatagctttccagacacctctccctcctttatctgccccatctgtcccacccatcccatcagttcatcctgttccttctcaaaatgaagatttgcgcagtggactcagcagcgcccttggtgaaatggtgtctcccaggattgcacctctgcctccacctcccctactaccacctttggctactaactatcgaactccttatgatgatgcatactatttttatgggtccaggaatactttcgatcccagtcttgcttattatggttcaggaatgatgggcgtacagcctgcagcttatgttagtgctcctgtcacccaccaactagcacaacctgttgtgaatacggttggacagaatgaactgaagattacaagtgatcaagtgataaattcaggattgatttttgaagataaaccgaaaccttccaaacagtcacttcagtcttaccaagaggctttgcagcagcagattcgggaaagagaagaaagaaggaagaaagaacgtgaagaaaaagaagaatatgaagctaaattagaagctgaaatgagaacatataatccctggggaaaaggtggaggtggtgctcctctcagggatgcaaaaggaaatctgataactgatttgaataggatgcacagacaaaatatagatgcctaccataacccagatgcaagaacatatgaagataaaagggctgttgtatctctagacccaaatttagccacttcaaatgctgagaacctagaagatgctgcaaataaaagctcaggtcatatgcaaacacagagctctccttttgctcggggaaatgtatttggtgagcctccaactgaacttcagattaaacagcaagaattatacaagaattttcttcgtttccagattgaggaaaagaaacaaagagaggaagcagagcgagagagactgagaattgcagaagaaaaagaagaaagacggcttgcagaacagagggcacgaattcagcaggagtatgaagaggaacaggaaaagaaaagagagaaagaggaggagcaaaggctaaaaaatgaagagcatattcggttagctgaagaaagacaaaaagaagcagaaagaaagaagaaagaagaagaagaaaaatataacctgcaacttcagcactactgtgaaagagacaatttgattggggaagaaacaaagcacatgagacagccttctcctatagttcctgctcttcagaacaaaattgcaagcaaactccaaagacctccttcagttgacagcatcatacgttcctttattcatgaaagttccatgtccagggcacagtcacccccggtacctgccaggaaaaatcagctccgtgcagaagaggagaaaaaaaatgtaattatggaattatcagaaatgagaaaacagcttcgtagtgaagagaggcgtctacaagagcgattgctacacatggacagtgatgatgaaattcctatcaggaaaaaggaaaggaatcccatggatatatttgatatggctagacatcggttgcaagctcctgtcagaagacagtcccctaagggcttagacgctgccacttttcagaatgttcatgattttaatgagctgaaagatagagattcagaaacacgagttgatctgaaatttatgtacctggatcctccaagagatcatcacaccttagagattcagcagcaagccctgctaagagagcagcagaagaggctgaacagaataaaaatgcaggaaggtgccaaagttgacttagatgccatcccaagtgctaaagtacgagagcaaagaatgcccagagatgacactagtgatttcttgaaaaactcattattggaatctgatagtgcttttattggggcttacggtgagacatatcctgccattgaagatgacgtcctccctccaccatcacagttgccctctgcacgggagcgcaggaggaacaaatggaaaggactagacattgatagcagtcgtcctaatgtagcaccagatggtctctctctaaaatctatatccagtgtaaatgttgatgagcttagagtgagaaatgaggaacgaatgcgaagactgaatgaatttcacaataaacctattaatacagatgatgagagttcactggttgaccctgatgacatcatgaaacacataggggatgacggatcaaactctgtagcaactgagccctggctccgccctggcacttcagaaacgctgaaacgtttcatggcagagcagctgaaccaggagcagcagcagattcctggaaaaccaggcactttcacttggcagggcctgtcgactgcacatggttaaaataaacctgtactggacccagtagtgccttttaaggtgaaaggaatggtaaatctgtacctttaatatgtcctacttttggcccctacctgaaagttactttttttccatcatctgtatataaaattatttttatcatgatgtatattatgtacataaataaaaggccatgattattgatttatataatagaattgtatagattatttttgcacagttttgtcataaattagggtggtaatgaactggattgaactactatatgtgcattatattgaattctgcttgtcattaagataaggtgaataagtgtcttaaacgtcctgtaaaaccggactcccctttgttacatgcacattttccattgttacctcgatgcaaaagaattcatttagtaggtacatctattgtagctgtgattattccagtttctgtgtgatgcaatcaaatgtcctattaattaattattatttcatgtcatttgtagctactgatacagcagaaatgaagggaactgtaattacttgtatttttgtaagccatacgttaaatgtttgttacatcatctttctgcttctatttttatgccaatgaaggcatttgtcttgttactaattacatgatgtaactacttcttgatataaataaatttttattttaattact

SEQ ID NO: 5456 - DNA, 4315 bp, Homo sapiens
  source 1..4315: mol_type = unassigned DNA
gaggggcggagccccggcccggaggtctgtcatgctgttcccgctccaggtggccgctgtaacctcttcggtccgcgacgatcctctagagcactgtgtgtctccccggacgcgagcccgctcccctgaaatctgcaaaatggctgataatttggatgaatttattgaagagcaaaaagccagattggccgaagacaaagcagagttggaaagtgatccaccttacatggaaatgaagggaaagttgtcagcgaagctttctgaaaacagtaagatactgatctctatggctaaggaaaacataccaccaaatagtcaacagaccaggggttccttaggaattgattatggattaagtttaccacttggagaagactatgaacggaagaaacataaattaaaagaagaattgcggcaagattacagacgttatcttactcagggcattacacaagggaaaagaaagaaaaattttctatctacgagtgaaacagatccatctactttgggagtttctcttcctattggtgagaggttatctgctaaggaaaggttgaaacttgaacgtaacaaagaatacaatcagtttctcaggggtaaggaagaatccagtgaaaagttcaggcaggtggaaaagagtactgagcccaagagtcagagaaataaaaaacctattggtcaagttaagcctgatctaacttcacaaatacagacatcttgtgaaaattcagagggtcctagaaaagatgtcttaactccttcagaggcatatgaagaacttctgaaccaaagacgactagaggaggacagataccgacaactagatgatgaaatcgaattaaggaatagaagaattattaaaaaagcaaatgaagaagtgggcatttccaacctaaaacatcaaaggtttgcaagcaaggctggcattccagatagaagatttcacagatttaatgaggatcgtgtttttgatagacggtatcatagaccagaccaagatcctgaagtaagtgaagaaatggatgagaggtttagatatgaaagtgattttgatagaagactttcgagagtgtatacaaatgacaggatgcacaggaacaaacgagggaatatgcctcctatggaacatgatggggatgttatagaacagtcaaacataagaatttcatctgctgaaaataaaagtgctccagacaatgaaacatccaaatctgctaatcaagatacctgtagtccttttgcagggatgctctttggaggtgaagatcgagaacttattcagagaaggaaagagaaatacagactagaactgttggaacaaatggctgagcaacagaggaacaagagacgagaaaaagatttagaactcagggttgcagcgtctggagcacaagaccctgagaaatcgcctgatagactaaagcagtttagtgtggcaccaagacactttgaagagatgataccacctgaaagacccagaatagctttccagacacctctccctcctttatctgccccatctgtcccacccatcccatcagttcatcctgttccttctcaaaatgaagatttgcgcagtggactcagcagcgcccttggtgaaatggtgtctcccaggattgcacctctgcctccacctcccctactaccacctttggctactaactatcgaactccttatgatgatgcatactatttttatgggtccaggaatactttcgatcccagtcttgcttattatggttcaggaatgatgggcgtacagcctgcagcttatgttagtgctcctgtcacccaccaactagcacaacctgttgtgaatacggttggacagaatgaactgaagattacaagtgatcaagtgataaattcaggattgatttttgaagataaaccgaaaccttccaaacagtcacttcagtcttaccaagaggctttgcagcagcagattcgggaaagagaagaaagaaggaagaaagaacgtgaagaaaaagaagaatatgaagctaaattagaagctgaaatgagaacatataatccctggggaaaaggtggaggtggtgctcctctcagggatgcaaaaggaaatctgataagtcatatgcaaacacagagctctccttttgctcggggaaatgtatttggtgagcctccaactgaacttcagattaaacagcaagaattatacaagaattttcttcgtttccagattgaggaaaagaaacaaagagaggaagcagagcgagagagactgagaattgcagaagaaaaagaagaaagacggcttgcagaacagagggcacgaattcagcaggagtatgaagaggaacaggaaaagaaaagagagaaagaggaggagcaaaggctaaaaaatgaagagcatattcggttagctgaagaaagacaaaaagaagcagaaagaaagaagaaagaagaagaagaaaaatataacctgcaacttcagcactactgtgaaagagacaatttgattggggaagaaacaaagcacatgagacagccttctcctatagttcctgctcttcagaacaaaattgcaagcaaactccaaagacctccttcagttgacagcatcatacgttcctttattcatgaaagttccatgtccagggcacagtcacccccggtacctgccaggaaaaatcagctccgtgcagaagaggagaaaaaaaatgtaattatggaattatcagaaatgagaaaacagcttcgtagtgaagagaggcgtctacaagagcgattgctacacatggacagtgatgatgaaattcctatcaggaaaaaggaaaggaatcccatggatatatttgatatggctagacatcggttgcaagctcctgtcagaagacagtcccctaagggcttagacgctgccacttttcagaatgttcatgattttaatgagctgaaagatagagattcagaaacacgagttgatctgaaatttatgtacctggatcctccaagagatcatcacaccttagagattcagcagcaagccctgctaagagagcagcagaagaggctgaacagaataaaaatgcaggaaggtgccaaagttgacttagatgccatcccaagtgctaaagtacgagagcaaagaatgcccagagatgacactagtgatttcttgaaaaactcattattggaatctgatagtgcttttattggggcttacggtgagacatatcctgccattgaagatgacgtcctccctccaccatcacagttgccctctgcacgggagcgcaggaggaacaaatggaaaggactagacattgatagcagtcgtcctaatgtagcaccagatggtctctctctaaaatctatatccagtgtaaatgttgatgagcttagagtgagaaatgaggaacgaatgcgaagactgaatgaatttcacaataaacctattaatacagatgatgagagttcactggttgaccctgatgacatcatgaaacacataggggatgacggatcaaactctgtagcaactgagccctggctccgccctggcacttcagaaacgctgaaacgtttcatggcagagcagctgaaccaggagcagcagcagattcctggaaaaccaggcactttcacttggcagggcctgtcgactgcacatggttaaaataaacctgtactggacccagtagtgccttttaaggtgaaaggaatggtaaatctgtacctttaatatgtcctacttttggcccctacctgaaagttactttttttccatcatctgtatataaaattatttttatcatgatgtatattatgtacataaataaaaggccatgattattgatttatataatagaattgtatagattatttttgcacagttttgtcataaattagggtggtaatgaactggattgaactactatatgtgcattatattgaattctgcttgtcattaagataaggtgaataagtgtcttaaacgtcctgtaaaaccggactcccctttgttacatgcacattttccattgttacctcgatgcaaaagaattcatttagtaggtacatctattgtagctgtgattattccagtttctgtgtgatgcaatcaaatgtcctattaattaattattatttcatgtcatttgtagctactgatacagcagaaatgaagggaactgtaattacttgtatttttgtaagccatacgttaaatgtttgttacatcatctttctgcttctatttttatgccaatgaaggcatttgtcttgttactaattacatgatgtaactacttcttgatataaataaatttttattttaattact

SEQ ID NO: 5457 - DNA, 3715 bp, Homo sapiens
  source 1..3715: mol_type = unassigned DNA
cagtcagaccgctaacaggagaaatggaatattaagtatagtatattgttccccctcaccttttctcatttcttcctctgtctcaggcactcattcatatattcatttgcagatttattcaatgaacattttcttgggttaaagttatgtgccagcattataaaattgaatagcgcatgggccttgccttcatagattttatagtttagttttatatatgatgttccattctgaacatgagaatcaaaactttctctccttaggcttaaattctgtatctttaaaaaaaggtttagattccttcaaaaggaaacagttcctttctaggatgatttaaaattccaagcatatggaatgctttagtttcttttggaagagagttagaagcatgtgtaagaggtgtccctaaggaatcctctgttataccctctatcatcaaggagttaaataggccagaaatgtttatcaagagaattccagtgttgatagcggaattgattatggattaagtttaccacttggagaagactatgaacggaagaaacataaattaaaagaagaattgcggcaagattacagacgttatcttactcaggaaaggttgaaacttgaacgtaacaaagaatacaatcagtttctcaggggtaaggaagaatccagtgaaaagttcaggcaggtggaaaagagtactgagcccaagagtcagagaaataaaaaacctattggtcaagttaagcctgatctaacttcacaaatacagacatcttgtgaaaattcagagggtcctagaaaagatgtcttaactccttcagaggcatatgaagaacttctgaaccaaagacgactagaggaggacagataccgacaactagatgatgaaatcgaattaaggaatagaagaattattaaaaaagcaaatgaagaagtgggcatttccaacctaaaacatcaaaggtttgcaagcaaggctggcattccagatagaagatttcacagatttaatgaggatcgtgtttttgatagacggtatcatagaccagaccaagatcctgaagtaagtgaagaaatggatgagaggtttagatatgaaagtgattttgatagaagactttcgagagtgtatacaaatgacaggatgcacaggaacaaacgagggaatatgcctcctatggaacatgatggggatgttatagaacagtcaaacataagaatttcatctgctgaaaataaaagtgctccagacaatgaaacatccaaatctgctaatcaagatacctgtagtccttttgcagggatgctctttggaggtgaagatcgagaacttattcagagaaggaaagagaaatacagactagaactgttggaacaaatggctgagcaacagaggaacaagagacgagaaaaagatttagaactcagggttgcagcgtctggagcacaagaccctgagaaatcgcctgatagactaaagcagtttagtgtggcaccaagacactttgaagagatgataccacctgaaagacccagaatagctttccagacacctctccctcctttatctgccccatctgtcccacccatcccatcagttcatcctgttccttctcaaaatgaagatttgcgcagtggactcagcagcgcccttggtgaaatggtgtctcccaggattgcacctctgcctccacctcccctactaccacctttggctactaactatcgaactccttatgatgatgcatactatttttatgggtccaggaatactttcgatcccagtcttgcttattatggttcaggaatgatgggcgtacagcctgcagcttatgttagtgctcctgtcacccaccaactagcacaacctgttgtgaatacggttggacagaatgaactgaagattacaagtgatcaagtgataaattcaggattgatttttgaagataaaccgaaaccttccaaacagtcacttcagtcttaccaagaggctttgcagcagcagattcgggaaagagaagaaagaaggaagaaagaacgtgaagaaaaagaagaatatgaagctaaattagaagctgaaatgagaacatataatccctggggaaaaggtggaggtggtgctcctctcagggatgcaaaaggaaatctgataagtcatatgcaaacacagagctctccttttgctcggggaaatgtatttggtgagcctccaactgaacttcagattaaacagcaagaattatacaagaattttcttcgtttccagattgaggaaaagaaacaaagagaggaagcagagcgagagagactgagaattgcagaagaaaaagaagaaagacggcttgcagaacagagggcacgaattcagcaggagtatgaagaggaacaggaaaagaaaagagagaaagaggaggagcaaaggctaaaaaatgaagagcatattcggttagctgaagaaagacaaaaagaagcagaaagaaagaagaaagaagaagaagaaaaatataacctgcaacttcagcactactgtgaaagagacaatttgattggggaagaaacaaagcacatgagacagccttctcctatagttcctgctcttcagaacaaaattgcaagcaaactccaaagacctccttcagttgacagcatcatacgttcctttattcatgaaagttccatgtccagggcacagtcacccccggtacctgccaggaaaaatcagctccgtgcagaagaggagaaaaaaaatgtaattatggaattatcagaaatgagaaaacagcttcgtagtgaagagaggcgtctacaagagcgattgctacacatggacagtgatgatgaaattcctatcaggaaaaaggaaaggaatcccatggatatatttgatatggctagacatcggttgcaagctcctgtcagaagacagtcccctaagggcttagacgctgccacttttcagaatgttcatgattttaatgagctgaaagatagagattcagaaacacgagttgatctgaaatttatgtacctggatcctccaagagatcatcacaccttagagattcagcagcaagccctgctaagagagcagcagaagaggctgaacagaataaaaatgcaggaaggtgccaaagttgacttagatgccatcccaagtgctaaagtacgagagcaaagaatgcccagagatgacactagtgatttcttgaaaaactcattattggaatctgatagtgcttttattggggcttacggtgagacatatcctgccattgaagatgacgtcctccctccaccatcacagttgccctctgcacgggagcgcaggaggaacaaatggaaaggactagacattgatagcagtcgtcctaatgtagcaccagatggtctctctctaaaatctatatccagtgtaaatgttgatgagcttagagtgagaaatgaggaacgaatgcgaagactgaatgaatttcacaataaacctattaatacagatgatgagagttcactggttgaccctgatgacatcatgaaacacataggggatgacggatcaaactctgtagcaactgagccctggctccgccctggcacttcagaaacgctgaaacgtttcatggcagagcagctgaaccaggagcagcagcagattcctggaaaaccaggcactttcacttggcagggcctgtcgactgcacatggttaaaataaacctgtactggac

SEQ ID NO: 5458 - DNA, 1677 bp, Homo sapiens
  source 1..1677: mol_type = unassigned DNA
atgccctggaggaggcgcaggaaccgggtgagtgccctggagggcggccgggaggaagaggcgcccccggaggctgccgctgtgcctccggcgctgttaacgtccccgcagcagacggaggcggcggccgagcggattctgctccggggcatcttcgagatcgggagggacagttgtgacgtggtgctgagcgagcgagcactgcggtggcggcccattcagcccgagcgcccggcgggtgattctaagtatgacttgctatgtaaagaagaatttattgaactcaaagacatattctctgtgaaactgaaacggcgttgttctgttaaacagcagagaagtggtactttattaggtatcacactcttcatctgcttgaaaaaggaacaaaataaactaaagaattctacacttgatcttattaatttaagtgaagaccactgtgacatatggtttagacagttcaagaaaatattggcaggctttccaaacagaccgaagtcattaaaaatactccttaacccccaaagtcacaaaaaagaagctacccaggtttattatgagaaggttgaacctctgttgaagcttgcaggaataaaaactgatgtaacaataatggaatatgaagggcacgctctgtcactgcttaaggaatgtgaactccagggatttgatggtgggcatcggaaaccattgttcgcaatacattggagtgtacagagattgttcactggcatgcaaacgttagaaccaagtgttgtctgtgttggtggagatggatctgctagcgaagtagcccatgctttgcttctgagagctcagaagaatgctgggatggaaacagaccgaatcctgactcctgtcagagcacagcttccacttggcttaataccagcaggatctaccaatgtattggcacattctcttcatggagttcctcatgtgataactgcaacattgcacattataatggggcatgtacagctggtcgacgtctgcaccttcagcaccgctggcaagcttcttcgctttgggttctcagccatgtttggctttggtggaagaactttggctctggcagaaaaatatcgatggatgtcccctaaccaacggagagattttgctgttgttaaggcactggcaaaacttaaggcagaagactgtgaaatatcatttttaccatttaacagctctgatgatgtgcaagaaaggagggcacagggatctcccaaatctgactgtaatgatcaatggcaaatgatccagggtcagttcttgaatgtcagcattatggcaattccttgcctgtgttcagtggcacctagaggcttggcacctaataccagattaaataatggaagtatggctcttataattgcccgaaacacttctcggccagaatttataaaacacctgaaaagatatgccagtgtaaaaaatcagttcaattttccatttgttgagacttacactgttgaggaagtaaaagttcatccaaggaataatactggtggatataatccagaggaggaggaggatgaaactgcttcagaaaattgtttcccttggaatgtagatggtgacttaatggaagttgcatcagaggtccatattagattgcatccaagacttatcagtctttatggaggaagcatggaagaaatgattccaaagtaa

SEQ ID NO: 5459 - DNA, 1330 bp, Homo sapiens
  source 1..1330: mol_type = unassigned DNA
atgccctggaggaggcgcaggaaccgggtgagtgccctggagggcggccgggaggaagaggcgcccccggaggctgccgctgtgcctccggcgctgttaacgtccccgcagcagacggaggcggcggccgagcggattctgctccggggcatcttcgagatcgggagggacagttgtgacgtggtgctgagcgagcgagcactgcggtggcggcccattcagcccgagcgcccggcgggtgattctaagtatgacttgctatgtaaagaagaatttattgaactcaaagacatattctctgtgaaactgaaacggcgttgttctgttaaacagcagagaagtggtactttattaggtatcacactcttcatctgcttgaaaaaggaacaaaataaactaaagaattctacacttgatcttattaatttaagtgaagaccactgtgacatatggtttagacagttcaagaaaatattggcaggatctaccaatgtattggcacattctcttcatggagttcctcatgtgataactgcaacattgcacattataatggggcatgtacagctggtcgacgtctgcaccttcagcaccgctggcaagcttcttcgctttgggttctcagccatgtttggctttggtggaagaactttggctctggcagaaaaatatcgatggatgtcccctaaccaacggagagattttgctgttgttaaggcactggcaaaacttaaggcagaagactgtgaaatatcatttttaccatttaacagctctgatgatgtgcaagaaaggagggcacagggatctcccaaatctgactgtaatgatcaatggcaaatgatccagggtcagttcttgaatgtcagcattatggcaattccttgcctgtgttcagtggcacctagaggcttggcacctaataccagattaaataatggaagtatggctcttataattgcccgaaacacttctcggccagaatttataaaacacctgaaaagatatgccagtgtaaaaaatcagttcaattttccatttgttgagacttacactgttgaggaagtaaaagttcatccaaggaataatactggtggatataatccagaggaggaggaggatgaaactgcttcagaaaattgtttcccttggaatgtagatggtgacttaatggaagttgcatcagaggtccatattagattgcatccaagacttatcagtctttatggaggaagcatggaagaaatgattccaaagtaacatgtaattgtttctaaaagaaatgtacaaactagaattttaatataaagaaatgtggccatgctttaaa

SEQ ID NO: 5460 - DNA, 1392 bp, Homo sapiens
  source 1..1392: mol_type = unassigned DNA
atgccctggaggaggcgcaggaaccgggtgagtgccctggagggcggccgggaggaagaggcgcccccggaggctgccgctgtgcctccggcgctgttaacgtccccgcagcagacggaggcggcggccgagcggattctgctccggggcatcttcgagatcgggagggacagttgtgacgtggtgctgagcgagcgagcactgcggtggcggcccattcagcccgagcgcccggcgggtgattctaagtatgacttgctatgtaaagaagaatttattgaactcaaagacatattctctgtgaaactgaaacggcgttgttctgttaaacagcagagaagtggtactttattaggtatcacactcttcatctgcttgaaaaaggaacaaaataaactaaagaattctacacttgatcttattaatttaagtgaagaccactgtgacatatggtttagacagttcaagaaaatattggcaggctttccaaacagaccgaagtcattaaaaatactccttaacccccaaagtcacaaaaaagaagctacccaggtttattatgagaaggttgaacctctgttgaagcttgcaggaataaaaactgatgtaacaagatctaccaatgtattggcacattctcttcatggagttcctcatgtgataactgcaacattgcacattataatggggcatgtacagctggtcgacgtctgcaccttcagcaccgctggcaagcttcttcgctttgggttctcagccatgtttggctttggtggaagaactttggctctggcagaaaaatatcgatggatgtcccctaaccaacggagagattttgctgttgttaaggcactggcaaaacttaaggcagaagactgtgaaatatcatttttaccatttaacagctctgatgatgtgcaagaaaggagggcacagggatctcccaaatctgactgtaatgatcaatggcaaatgatccagggtcagttcttgaatgtcagcattatggcaattccttgcctgtgttcagtggcacctagaggcttggcacctaataccagattaaataatggaagtatggctcttataattgcccgaaacacttctcggccagaatttataaaacacctgaaaagatatgccagtgtaaaaaatcagttcaattttccatttgttgagacttacactgttgaggaagtaaaagttcatccaaggaataatactggtggatataatccagaggaggaggaggatgaaactgcttcagaaaattgtttcccttggaatgtagatggtgacttaatggaagttgcatcagaggtccatattagattgcatccaagacttatcagtctttatggaggaagcatggaagaaatgattccaaagtaa

SEQ ID NO: 5461 - DNA, 3208 bp, Homo sapiens
  source 1..3208: mol_type = unassigned DNA
gcagcgctggacgcggctagagctggggctgccgcgccctccacctccttctccaaaggcctccccggacccctggctcgggcccagcctgcgactccgccatgccctggaggaggcgcaggaaccgggtgagtgccctggagggcggccgggaggaagaggcgcccccggaggctgccgctgtgcctccggcgctgttaacgtccccgcagcagacggaggcggcggccgagcggattctgctccggggcatcttcgagatcgggagggacagttgtgacgtggtgctgagcgagcgagcactgcggtggcggcccattcagcccgagcgcccggcgggtgattctaagtatgacttgctatgtaaagaagaatttattgaactcaaagacatattctctgtgaaactgaaacggcgttgttctgttaaacagcagagaagtggtactttattaggtatcacactcttcatctgcttgaaaaaggaacaaaataaactaaagaattctacacttgatcttattaatttaagtgaagaccactgtgacatatggtttagacagttcaagaaaatattggcaggctttccaaacagaccgaagtcattaaaaatactccttaacccccaaagtcacaaaaaagaagctacccaggtttattatgagaaggttgaacctctgttgaagcttgcaggaataaaaactgatgtaacaataatggaatatgaagggcacgctctgtcactgcttaaggaatgtgaactccagggatttgatggtgttgtctgtgttggtggagatggatctgctagcgaagtagcccatgctttgcttctgagagctcagaagaatgctgggatggaaacagaccgaatcctgactcctgtcagagcacagcttccacttggcttaataccagcaggatctaccaatgtattggcacattctcttcatggagttcctcatgtgataactgcaacattgcacattataatggggcatgtacagctggtcgacgtctgcaccttcagcaccgctggcaagcttcttcgctttgggttctcagccatgtttggctttggtggaagaactttggctctggcagaaaaatatcgatggatgtcccctaaccaacggagagattttgctgttgttaaggcactggcaaaacttaaggcagaagactgtgaaatatcatttttaccatttaacagctctgatgatgtgcaagaaaggagggcacagggatctcccaaatctgactgtaatgatcaatggcaaatgatccagggtcagttcttgaatgtcagcattatggcaattccttgcctgtgttcagtggcacctagaggcttggcacctaataccagattaaataatggaagtatggctcttataattgcccgaaacacttctcggccagaatttataaaacacctgaaaagatatgccagtgtaaaaaatcagttcaattttccatttgttgagacttacactgttgaggaagtaaaagttcatccaaggaataatactggtggatataatccagaggaggaggaggatgaaactgcttcagaaaattgtttcccttggaatgtagatggtgacttaatggaagttgcatcagaggtccatattagattgcatccaagacttatcagtctttatggaggaagcatggaagaaatgattccaaagtaacatgtaattgtttctaaaagaaatgtacaaactagaattttaatataaagaaatgtggccatgctttaaacctgtggtccccaccctttttgggaccagtttcatggaagacaatttttccgtggatgggggaatggtttcaggatgaactgttccacctcagatcatcaggcattagattctcttgaggaacatggcactctagatccctcacataccagttcaccatatggttcgcacttctatgagaatctaatgctgctgctgatctgacagggggaggaactcagtaatgctccattgctctaacctcctgctgtgtggccaaacggatatcctaatagaaattgatgttactaacaattagcctctagggctttaaaagtcaagatgaaatatcaattcaaattctgtttttagatatcaattcaaattcttttttttacaatgtgtttattggacacacaaaaaaactttgcaaccatcataatacatcaatatttaacctagataattctgaaataatttggattctttcatttttcaggatttgagctcatcaattatgttaaatttcctatattctgttacaaatataatacagatttcataagtctgccttgattcactgctccctaatccagagcagttaaatttcaaaatcacatagttatatagcctacctgccaaaaaagaataacccatccctgtcttcttaaagtggtagggttttaaaattcatgatacaagtaacaaagtaagttgataacaaatactattttgaactgggcaaaatctagcccaatatgtaattgtgttccccttgtatctgagaggcctgtgttggacaaccatagtactctgctttcactgtgctcagataacctgaaatatatagttgtttctgagtagttctgagtaggaaagaaccaaatgtaaatttccttagagaccatcctggagaagacagttctaaatcggggcttgatttttcatctatgatcctagatgttctcctgaaagaatgactagcctttttataacgatacaaagttttttaaaaatacataaatgtcataaagtttattcctgtgtatacacactctgggttcaggaggttttgtgcttacatttcactactcaaatgccttcgcaaatctcagaacattcctcaccatcactgcaggcctgtgaacagataactttcatcaattaggatggctggctagtggcagggacttcatataaagaaatctttcccagaattgtttttccacattgccttctaatttgatcactccctataacagatgttcaaaattcggccacagctctcttatgaaggcagagtcagataaaatgatattctgcaattatctagatcataagcataaaataaatattacaaaaatgattgtatttaaagaaattttttaaaatccagaaagtcatttaaaatagaacctcatatagtatgaacaaactataaaaatattttacatttcatg

SEQ ID NO: 5462 - DNA, 2425 bp, Homo sapiens
  source 1..2425: mol_type = unassigned DNA
gcagcgctggacgcggctagagctggggctgccgcgccctccacctccttctccaaaggcctccccggacccctggctcgggcccagcctgcgactccgccatgccctggaggaggcgcaggaaccgggtgagtgccctggagggcggccgggaggaagaggcgcccccggaggctgccgctgtgcctccggcgctgttaacgtccccgcagcagacggaggcggcggccgagcggattctgctccggggcatcttcgagatcgggagggacagttgtgacgtggtgctgagcgagcgagcactgcggtggcggcccattcagcccgagcgcccggcgggtgattctaagtatgacttgctatgtaaagaagaatttattgaactcaaagacatattctctgtgaaactgaaacggcgttgttctgttaaacagcagagaagtggtactttattaggtatcacactcttcatctgcttgaaaaaggaacaaaataaactaaagaattctacacttgatcttattaatttaagtgaagaccactgtgacatatggtttagacagttcaagaaaatattggcagtaatggaatatgaagggcacgctctgtcactgcttaaggaatgtgaactccagggatttgatggtgggcatcggaaaccattgttcgcaatacattggagtgtacagagattgttcactggcatgcaaacgttagaaccaagtgttgtctgtgttggtggagatggatctgctagcgaagtagcccatgctttgcttctgagagctcagaagaatgctgggatggaaacagaccgaatcctgactcctgtcagagcacagcttccacttggcttaataccagcaggatctaccaatgtattggcacattctcttcatggagttcctcatgtgataactgcaacattgcacattataatggggcatgtacagctggtcgacgtctgcaccttcagcaccgctggcaagcttcttcgctttgggttctcagccatgtttggctttggtggaagaactttggctctggcagaaaaatatcgatggatgtcccctaaccaacggagagattttgctgttgttaaggcactggcaaaacttaaggcagaagactgtgaaatatcatttttaccatttaacagctctgatgatgtgcaagaaaggagggcacagggatctcccaaatctgactgtaatgatcaatggcaaatgatccagggtcagttcttgaatgtcagcattatggcaattccttgcctgtgttcagtggcacctagaggcttggcacctaataccagattaaataatggaagtatggctcttataattgcccgaaacacttctcggccagaatttataaaacacctgaaaagatatgccagtgtaaaaaatcagttcaattttccatttgttgagacttacactgttgaggaagtaaaagttcatccaaggaataatactggtggatataatccagaggaggaggaggatgaaactgcttcagaaaattgtttcccttggaatgtagatggtgacttaatggaagttgcatcagaggtccatattagattgcatccaagacttatcagtctttatggaggaagcatggaagaaatgattccaaagtaacatgtaattgtttctaaaagaaatgtacaaactagaattttaatataaagaaatgtggccatgctttaaacctgtggtccccaccctttttgggaccagtttcatggaagacaatttttccgtggatgggggaatggtttcaggatgaactgttccacctcagatcatcaggcattagattctcttgaggaacatggcactctagatccctcacataccagttcaccatatggttcgcacttctatgagaatctaatgctgctgctgatctgacagggggaggaactcagtaatgctccattgctctaacctcctgctgtgtggccaaacggatatcctaatagaaattgatgttactaacaattagcctctagggctttaaaagtcaagatgaaatatcaattcaaattctgtttttagatatcaattcaaattcttttttttacaatgtgtttattggacacacaaaaaaactttgcaaccatcataatacatcaatatttaacctagataattctgaaataatttggattctttcatttttcaggatttgagctcatcaattatgttaaatttcctatattctgttacaaatataatacagatttcataagtctgccttgattcactgctccctaatccagagcagttaaatttcaaaatcacatagttatatagcctacctgccaaaaaagaataacccatccctgtcttcttaaagtggtagggttttaaaattcatgatacaagtaacaaagtaagttgataacaaatactat

SEQ ID NO: 5463 - DNA, 1215 bp, Homo sapiens
  source 1..1215: mol_type = unassigned DNA
ctttgggcctcatcatttacaaaagaagcttgggcccctgacagcatgcatctcctcttatttcagctgctggtactcctgcctctaggaaagaccacacggcaccaggatggccgccagaatcagagttctctttcccccgtactcctgccaaggaatcaaagagagcttcccacaggcaaccatgaggaagctgaggagaagccagatctgtttgtcgcagtgccacaccttgtagccaccagccctgcaggggaaggccagaggcagagagagaagatgctgtccagatttggcaggttctggaagaagcctgagagagaaatgcatccatccagggactcagatagtgagcccttcccacctgggacccagtccctcatccagccgatagatggaatgaaaatggagaaatctcctcttcgggaagaagccaagaaattctggcaccacttcatgttcagaaaaactccggcttctcagggggtcatcttgcccatcaaaagccatgaagtacattgggagacctgcaggacagtgcccttcagccagactataacccacgaaggctgtgaaaaagtagttgttcagaacaacctttgctttgggaaatgcgggtctgttcattttcctggagccgcgcagcactcccatacctcctgctctcactgtttgcctgccaagttcaccacgatgcacttgccactgaactgcactgaactttcctccgtgatcaaggtggtgatgctggtggaggagtgccagtgcaaggtgaagacggagcatgaagatggacacatcctacatgctggctcccaggattcctttatcccaggagtttcagcttgaagagctatcccactattacctttgaaaagcaaaaccacaacagcaaagatgctgattattcagtctgaaaatgttaagtgggtacataacattttcagggaaaggtgacttgaaacgtagttttaaattagaacgatagaggaaatgatattagtctagttattggtacacgtttgagaccttgtctcagctctgccactaactagccgtagaatgttaagttgtaaaacctttctccatctaaagattttcatctataaatgacggacccgacctagatgattgctaaaatcctttccactactaatattccgtgatgcattttctccaagtttgggtaaaagccctccatctaaagaaggaaaa

SEQ ID NO: 5464 - DNA, 1299 bp, Homo sapiens
  source 1..1299: mol_type = unassigned DNA
ttgttggaagacatgaagatgctggaagacacagagatgctggaagacgtggagatgttggaagacgagcagatgctggaagccctggagatgctggaagacctggagatataggaagacatggatttgttggaagacgtagcttagttggaagacatatattttctggaagacgtggattttctggaagacatggcttggttggaagacgtggattttctggaagacgtacctttgttggaagacatacctttgttggaagacgtacctttgttggaagacgtacctttgttggaagacacaagtaggctggaagacattaatttgatggaagacatggctttgttggaagacgtggatttgctggaagacacggatttcctggaagacctggatttttcggaagctatggatttgagggaagacaaggattttctggaagacatggatagtctggaagacatggctttgttggaagacgtggacttgctggaagacacggatttcctggaagacccggattttttggaagctatagatttaagggaagacaaggattttctggaagacatggatagtctggaagacctggaggccattggaagatgtggattttctggaagacatggcttttttggaagacgtagattttcaggaagacccaaattatccggaagacttggattgttgggaagacgtggattttctggaagactgggaggttactggaagacatggattttctggaagacatggattttctggaagacgtggatcttcaggaagacatatattggctggaagacctggattttttccggaagatgtggattgactggaagacctggatttggtggaagacgtagatttttctggaagacactgactgactggaagacctggatttctttctggaagacactgattgactggaagacctggatttctttctggaagacactgattgactggaagatctagatttttctggaagaactagatttactggaagacttggatttggtggaagacacagatttttctggaagacatggattagctggaagatctgtatttgatggaagaccttgaaattattggaagacatggatttcctggaagacgtggattttcctggaagatctggatttggtggaagaccagtaattgctggaagactggatttgctggaagacttgatttactggaagacttggagcttcttggaagacatggattgtccggaagacatggattgtctggaagatgtggattttctggaagctcaggattatctgg

SEQ ID NO: 5465 - DNA, 2702 bp, Homo sapiens
  source 1..2702: mol_type = unassigned DNA
gccaaagtgccacgttgggcccggcggcggcgtgaagactggcggctgcgtgagactccggctccaggcgttcgcaccgtaatgcccggccgttggggccgtcggtaggcgcgaggcgagtcgaggcagccggccggtcggcggccgccggcgggaacggggctgaggcggcgcagcggagtctgggcggcggcgcgtcccgcccgagggcggctctggctgagggcggaggggccggggaagagcccggggcagcggctgaggcgggacggcggcgggggccgctgcccctagaagacccagccgagatgctggcggaaaacctggtagaggagtttgagatgaaggaggacgagccgtggtacgaccaccaggacctccagcaagatcttcaacttgctgctgagcttgggaagacattactggatcggaacacagagttggaggactctgttcagcagatgtatacaaccaatcaggagcagttacaggaaattgagtatctgacgaagcaagtggaacttctacggcagatgaacgaacaacatgcaaaggtttatgaacaattagacgtcacagcaagggaactggaagaaacaaatcaaaagctagttgctgacagcaaggcctcacagcaaaagattctgagcctgactgaaacgattgaatgcctgcaaaccaacattgatcacctccagagccaagtggaggagctgaagtcatctggccaagggagaaggagcccgggaaagtgtgaccaggagaaaccggcacccagctttgcatgtctgaaggagctgtatgacctccgccaacacttcgtgtatgatcatgtgttcgctgagaagatcacttccttgcaaggtcagccaagccctgatgaagaggaaaatgagcacttgaaaaaaacagtgacaatgttgcaggcccagctgagcctggagcggcagaagcgggtgactatggaggaggaatatgggctcgtgttaaaggagaacagtgaactggagcagcagctgggggccacaggtgcctaccgagcacgggcgctggaactagaggccgaggtggcagagatgcgacagatgttgcagtcagagcatccatttgtgaatggagttgagaagctggtgccagactctctgtatgttcctttcaaagagcccagccagagcctgctggaagagatgttcctgactgtgccggaatcacatagaaagcctctcaagcgcagcagcagtgagacgatcctcagcagcttggcagggagtgacatcgtgaagggccacgaggagacctgcatcaggagggccaaggctgtgaaacagaggggcatctcccttctgcacgaagtggacacgcagtacagcgccctgaaggtgaagtatgaagagttgctgaagaagtgccaagaggaacaggactccctgtcacacaaggctgtgcagacctccagggctgcagccaaggacctgactggagtgaacgcccagtctgagcctgttgccagcggctgggaactggcctctgtcaacccagagcccgtgagttcccctacaacacctccagaatacaaagcgttgtttaaggagatctttagttgcatcaagaaaactaagcaggaaatagatgaacagagaacaaaataccgatcactctcctctcattcttaattgaacctctagctctactactaatttgcctattgcctatcgcctctctctcccattcagacaagtgtttgtagactctgaagcctaatgttactcatgacgtttgcctcattgctttgcttatttagcaaatgcatacaacgaggaaaggaggtggctagtggtatcagttctctgatccacttccatttaagctccccaggaaatcccatgacaaactggcctctggctggcgcgctgattagacttcagttcctgaaaaggaccagtggagggaagagctatacttctggagaagtaggcctggagttactacagtatgggggaaaagggtcgagttagaacaaagctaaggcaattcctattgcttccttgcgcaacttctcaaaacgatgaaagtcagaaggctgtcaaactcaaatatctttgcaaacagtttgaatactgtgaattcattacgaagaatgttcgagagaaagcaggggtctaatccaaaagaaatgtcattaaccaatactccaagtccttgagttttgttatatctgaactagttgaactgtgactgacaggtaatcctaatatatccaaatccaactgaataccaaattgagatggcaaatttttgtttgatataagttagcttgttagcatatgccctagagggcctccatccctgtattctaatgtttttactcaaagctctagcctttaggataggtgaatatgtaaatcttttatcactttctcaaattcaaactaaaggggaaagatcaaaccccttcccttcctacctgttttctgagctggctgacttgccagccacaagctgctcttgcagagttcttaccattcctgtaaatgttttgacttgttgcagaaattcctatctactttattaagcagtattgatctgactgtggaaacatcctctcacttgcattcttttaacttaaaactatttaagaactgatgttccgattattgtatatatttttctaaaaaccaaataaagctacctatgaaaatgaa

SEQ ID NO: 5466 - DNA, 2346 bp, Homo sapiens
  source 1..2346: mol_type = unassigned DNA
gggctgttgatttgtgggggattttgaagagaggaagagtaggaggaaggggttgaggggctgcctctggcatatgcacacactcacacattctgtcacacccgtcacacacacataccatgttctccatccccccaggtccagccctcagtgctgtcccatccagcagggctgccctgaagctctggctgcagccctcccgtccagtgggcaggcggcttcatccctcctttctctcccaaagcccaactgctgtcactgcatgctctgccaaggaggagggaactgcagtgacagcaggagtaagagtgggaggcaggacagagctgggacacaggtatggagagggggttcagcgagcctagagagggcagacgatcagggtgccggcggtgagaatccagggagaggagcggaaacagaagaggggcagaagaccggggcacttgtgggttgcagagcccctcagccatgttgggagccaagccacactggctaccaggtcccctacacagtcccgggctgcccttggttctggtgcttctggccctgggggccgggtgggcccaggaggggtcagagcccgtcctgctggagggggagtgcctggtggtctgtgagcctggccgagctgctgcaggggggcccgggggagcagccctgggagaggcaccccctgggcgagtggcatttgctgcggtccgaagccaccaccatgagccagcaggggaaaccggcaatggcaccagtggggccatctacttcgaccaggtcctggtgaacgagggcggtggctttgaccgggcctctggctccttcgtagcccctgtccggggtgtctacagcttccggttccatgtggtgaaggtgtacaaccgccaaactgtccaggtgagcctgatgctgaacacgtggcctgtcatctcagcctttgccaatgatcctgacgtgacccgggaggcagccaccagctctgtgctactgcccttggaccctggggaccgagtgtctctgcgcctgcgtcgggggaatctactgggtggttggaaatactcaagtttctctggcttcctcatcttccctctctgaggacccaagtctttcaagcacaagaatccagcccctgacaactttcttctgccctctcttgccccagaaacagcagaggcaggagagagactccctctggctcctatcccacctctttgcatgggaccctgtgccaaacacccaagtttaagagaagagtagagctgtggcatctccagaccaggcctttccacccacccacccccagttaccctcccagccacctgctgcatctgttcctgcctgcagccctaggatcagggcaaggtttggcaagaaggaagatctgcactactttgcggcctctgctcctccggttcccccaccccagcttcctgctcaatgctgatcagggacaggtggcgcaggtgagcctgacaggcccccacaggagcccagatggacaagcctcagcgtaccctgcaggcttcttcctgtgaggaaagccagcatcacggatctcagccagcaccgtcagaagctgaaccagcaccgtatgggctagggtgggaggctcagccacaggcagaagggtgggaagggcctggagtctgtggctggtgaggaaggaaggagggtgtattgtctagactgaacatggtacacattctgcatgtatagcagagcagccagcaggtagcaatcctggctgtccttctatgctggatcccagatggactctggcccttacctccccacctgagattagggtgagtgtgtttgctctggctgagagcagagctgagagcaggtatacagagctggaagtggaccatggaaaacatcgataaccatgcatcctcttgcttggccacctcctgaaactgctccacctttgaagtttgaactttagtccctccacactctgactgctgcctccttcctcccagctctctcactgagttatcttcactgtacctgttccagcatatccccactatctctctttctcctgatctgtgctgtcttattctcctccttaggcttcctattacctgggattccatgattcattccttcagaccctctcctgccagtatgctaaaccctccctctctctttcttatcccgctgtcccattggcccagcctggatgaatctatcaataaaacaactagagaatggtggtcagtgagacactatagaattactaaggagaagatgcctctggagtttggatcgggtgttacaggtacaagtaggtatgttgcagaggaaaataaatatcaaactgtatactaaaattacattttaaaa

SEQ ID NO: 5467 - DNA, 2206 bp, Homo sapiens
  source 1..2206: mol_type = unassigned DNA
gcctcctttgcgggtaaacagacatggccggcgaaggagatcagcaggacgctgcgcacaacatgggcaaccacctgccgctcctgcctgcagagagtgaggaagaagatgaaatggaagttgaagaccaggatagtaaagaagccaaaaaaccaaacatcataaattttgacaccagtctgccgacatcacatacatacctaggtgctgatatggaagaatttcatggcaggactttgcacgatgacgacagctgtcaggtgattccagttcttccacaagtgatgatgatcctgattcccggacagacattacctcttcagctttttcaccctcaagaagtcagtatggtgcggaatttaattcagaaagatagaacctttgctgttcttgcatacagcaatgtacaggaaagggaagcacagtttggaacaacagcagagatatatgcctatcgagaagaacaggattttggaattgagatagtgaaagtgaaagcaattggaagacaaaggttcaaagtccttgagctaagaacacagtcagatggaatccagcaagctaaagtgcaaattcttcccgaatgtgtgttgccttcaaccatgtctgcagttcaattagaatccctcaataagtgccagatatttccttcaaaacctgtctcaagagaagaccaatgttcatataaatggtggcagaaataccagaagagaaagtttcattgtgcaaatctaacttcatggcctcgctggctgtattccttatatgatgctgagaccttaatggacagaatcaagaaacagctacgtgaatgggatgaaaatctaaaagatgattctcttccttcaaatccaatagatttttcttacagagtagctgcttgtcttcctattgatgatgtattgagaattcagctccttaaaattggcagtgctatccagcgacttcgctgtgaattagacattatgaataaatgtacttccctttgctgtaaacaatgtcaagaaacagaaataacaaccaaaaatgaaatattcagtttatccttatgtgggccgatggcagcttatgtgaatcctcatggatatgtgcatgagacacttactgtgtataaggcttgcaacttgaatctgataggccggccttctacagaacacagctggtttcctgggtatgcctggactgttgcccagtgtaagatctgtgcaagccatattggatggaagtttacggccaccaaaaaagacatgtcacctcaaaaattttggggcttaacgcgatctgctctgttgcccacgatcccagacactgaagatgaaataagtccagacaaagtaatactttgcttgtaaacagatgtgatagagataaagttatctaacaaattggttatattctaagatctgctttggaaattattgcctctgatacatacctaagtaaacataacattaatacctaagtaaacataacattacttggagggttgcagtttctaagtgaaactgtatttgaaacttttaagtatactttaggaaacaagcatgaacggcagtctagaataccagaaacatctacttgggtagcttggtgccattatcctgtggaatctgatatgtctggtagcatgtcattgatgggacatgaagacatctttggaaatgatgagattatttcctgtgttaaaaaaaaaaaaaatcttaaattcctacaatgtgaaactgaaactaataatttgatcctgatgtatgggacagcgtatctgtaccagtgctctaaataacaaaagctagggtgacaagtacatgttccttttggaaagaagcaaggcaatgtatattaattattctaaaagggctttgttcctttccattttctttaacttctctgagatactgatttgtaaattttgaaaattagttaaaatatgcagttttttgagcccacgaatagttgtcatttcctttatgtgcctgttagtaaaaagtagtattgtgtatttgctcagtatctgaactataagcccatttatactgttccatacaaaagctatttttcaaaaattaatttgaaccaaaactactactatagggaaaagatgccaaaacatgtcccctcacccagactaaacttgatactgtattattttgttcaatgtaaattgaagaaaatctgtaagtaagtaaaccttaagtgtgaaactaaa

SEQ ID NO: 5468 - DNA, 1468 bp, Homo sapiens
  source 1..1468: mol_type = unassigned DNA
ctttgcgggtaaacagacatggccggcgaaggagatcagcaggacgctgcgcacaacatgggcaaccacctgccgctcctgcctgtacctaggtgctgatatggaagaatttcatggcaggactttgcacgatgacgacagctgtcaggtgattccagttcttccacaagtgatgatgatcctgattcccggacagacattacctcttcagctttttcaccctcaagaagtcagtatggtgcggaatttaattcagaaagatagaacctttgctgttcttgcatacagcaatgtacaggaaagggaagcacagtttggaacaacagcagagatatatgcctatcgagaagaacaggattttggaattgagatagtgaaagtgaaagcaattggaagacaaaggttcaaagtccttgagctaagaacacagtcagatggaatccagcaagctaaagtgcaaattcttcccgaatgtgtgttgccttcaaccatgtctgcagttcaattagaatccctcaataagtgccagatatttccttcaaaacctgtctcaagagaagaccaatgttcatataaatggtggcagaaataccagaagagaaagtttcattgtgcaaatctaacttcatggcctcgctggctgtattccttatatgatgctgagaccttaatggacagaatcaagaaacagctacgtgaatgggatgaaaatctaaaagatgattctcttccttcaaatttttcttacagagtagctgcttgtcttcctattgatgatgtattgagaattcagctccttaaaattggcagtgctatccagcgacttcgctgtgaattagacattatgaataaatgtacttccctttgctgtaaacaatgtcaagaaacagaaataacaaccaaaaatgaaatattcagtttatccttatgtgggccgatggcagcttatgtgaatcctcatggatatgtgcatgagacacttactgtgtataaggcttgcaacttgaatctgataggccggccttctacagaacacagctggtttcctgggtatgcctggactgttgcccagtgtaagatctgtgcaagccatattggatggaagtttacggccaccaaaaaagacatgtcacctcaaaaattttggggcttaacgcgatctgctctgttgcccacgatcccagacactgaagatgaaataagtccagacaaagtaatactttgcttgtaaacagatgtgatagagataaagttatctaacaaattggttatattctaagatctgctttggaaattattgcctctgatacatacctaagtaaacataacattaatacctaagtaaacataacattacttggagggttgcagtttctaagtgaaactgtatttgaaacttttaagtatactttaggaaacaagcatgaacggcagtctagaataccagaaacatctacttgggtagctt

SEQ ID NO: 5469 - DNA, 2203 bp, Homo sapiens
  source 1..2203: mol_type = unassigned DNA
gcctcctttgcgggtaaacagacatggccggcgaaggagatcagcaggacgctgcgcacaacatgggcaaccacctgccgctcctgcctgagagtgaggaagaagatgaaatggaagttgaagaccaggatagtaaagaagccaaaaaaccaaacatcataaattttgacaccagtctgccgacatcacatacatacctaggtgctgatatggaagaatttcatggcaggactttgcacgatgacgacagctgtcaggtgattccagttcttccacaagtgatgatgatcctgattcccggacagacattacctcttcagctttttcaccctcaagaagtcagtatggtgcggaatttaattcagaaagatagaacctttgctgttcttgcatacagcaatgtacaggaaagggaagcacagtttggaacaacagcagagatatatgcctatcgagaagaacaggattttggaattgagatagtgaaagtgaaagcaattggaagacaaaggttcaaagtccttgagctaagaacacagtcagatggaatccagcaagctaaagtgcaaattcttcccgaatgtgtgttgccttcaaccatgtctgcagttcaattagaatccctcaataagtgccagatatttccttcaaaacctgtctcaagagaagaccaatgttcatataaatggtggcagaaataccagaagagaaagtttcattgtgcaaatctaacttcatggcctcgctggctgtattccttatatgatgctgagaccttaatggacagaatcaagaaacagctacgtgaatgggatgaaaatctaaaagatgattctcttccttcaaatccaatagatttttcttacagagtagctgcttgtcttcctattgatgatgtattgagaattcagctccttaaaattggcagtgctatccagcgacttcgctgtgaattagacattatgaataaatgtacttccctttgctgtaaacaatgtcaagaaacagaaataacaaccaaaaatgaaatattcagtttatccttatgtgggccgatggcagcttatgtgaatcctcatggatatgtgcatgagacacttactgtgtataaggcttgcaacttgaatctgataggccggccttctacagaacacagctggtttcctgggtatgcctggactgttgcccagtgtaagatctgtgcaagccatattggatggaagtttacggccaccaaaaaagacatgtcacctcaaaaattttggggcttaacgcgatctgctctgttgcccacgatcccagacactgaagatgaaataagtccagacaaagtaatactttgcttgtaaacagatgtgatagagataaagttatctaacaaattggttatattctaagatctgctttggaaattattgcctctgatacatacctaagtaaacataacattaatacctaagtaaacataacattacttggagggttgcagtttctaagtgaaactgtatttgaaacttttaagtatactttaggaaacaagcatgaacggcagtctagaataccagaaacatctacttgggtagcttggtgccattatcctgtggaatctgatatgtctggtagcatgtcattgatgggacatgaagacatctttggaaatgatgagattatttcctgtgttaaaaaaaaaaaaaatcttaaattcctacaatgtgaaactgaaactaataatttgatcctgatgtatgggacagcgtatctgtaccagtgctctaaataacaaaagctagggtgacaagtacatgttccttttggaaagaagcaaggcaatgtatattaattattctaaaagggctttgttcctttccattttctttaacttctctgagatactgatttgtaaattttgaaaattagttaaaatatgcagttttttgagcccacgaatagttgtcatttcctttatgtgcctgttagtaaaaagtagtattgtgtatttgctcagtatctgaactataagcccatttatactgttccatacaaaagctatttttcaaaaattaatttgaaccaaaactactactatagggaaaagatgccaaaacatgtcccctcacccagactaaacttgatactgtattattttgttcaatgtaaattgaagaaaatctgtaagtaagtaaaccttaagtgtgaaactaaa

SEQ ID NO: 5470 - DNA, 1894 bp, Homo sapiens
  source 1..1894: mol_type = unassigned DNA
ggggcgcggccggggcggagacttcgggcccggctggcgggcggcgccgggagcgcgggggcggcgggcccgggtcgagcatgtagcggctgctggcggcggggctcccggggcgggccgggcgggccgcgggagccgcacgcggcgatatggaagaggagggcaagaagggcaagaagcctggaattgtctcgccatttaaacgagtattcctaaaaggtgaaaagagtagagataagaaagcccatgagaaggtgacagagaggcgccctctgcacactgtggtgttgtcattgcctgagcgcgtcgagccagacagactgctgagcgactatattgagaaggaggtaaagtatttaggtcagttaacgtccataccaggatacctgaatccctccagtaggactgaaatcctgcatttcatagacaatgcaaagagagcccaccagcttccgggacacttgactcaggagcacgatgctgtgctcagcctgtctgcgtacaacgtcaagctggcctggagggacggggaggatatcatcctcagggtgcccatccatgacatcgccgccgtctcctatgttcgggatgacgctgcacacctggtggtcctgaagacagcccaggacccagggatctcccccagccagagtctgtgtgcggaaagttccagaggcctcagtgcaggctccctgtcggagagtgcagttgggcccgtggaggcatgctgcctggtcatcctggctgcagagagcaaggtcgctgcggaggagctttgctgtctgctaggccaggtcttccaggttgtttacacggagtccaccatcgactttctggacagagcgatatttgatggggcctctaccccgacccaccacctgtccctgcacagcgatgactcttctacaaaagtggacattaaggagacctacgaggtggaagccagcactttctgcttccctgaatctgtggatgtgggtggtgcatcaccccacagcaagaccatcagtgagagcgagctgagcgccagcgccactgagctgctgcaggactacatgctgacgctgcgcaccaagctgtcatcacaggagatccagcagtttgcagcactgctgcacgagtaccgcaatggggcctctatccacgagttctgcatcaacctgcggcagctctacggggacagccgcaagttcctgctgcttggtctgaggcccttcatccctgagaaggacagccagcacttcgagaacttcctggagaccattggcgtgaaggatggccgcggcatcatcactgacagctttggcaggcaccggcgggccctgagcaccacatccagttccaccaccaatgggaacagggccacgggcagctctgatgaccggtcggcaccctcagagggggatgagtgggaccgcatgatctcggacatcagcagcgacattgaggcgctgggctgcagcatggaccaggactcagcatgatggacagtggatgggggggcacccacaccttccgcgcagtcgtcataggccttcccagaaggagctgcccagacctgcgtgtcagcccttggtggtggccagggagaggcgcccggtgcagatggccccgggcggcccaggtcctctactgtgaaggagcagggagctgccgagggacacgagcctcagtgcggggtggaaggctctttgccttgtccaccagggctcagccaagccctgcagtgtgtccccgctcggggagggcccggccgagcgggcagggagagccagtcctgtcggctgggcccttggacggctgtcagttttgcacatgatgttcctattgtaactctcagagaccttaaaaagaagtttactgcaatgtgaataatttaatctctggttgccaa

SEQ ID NO: 5471 - DNA, 2471 bp, Homo sapiens
  source 1..2471: mol_type = unassigned DNA
gaagaagtgagcttggccagaggcacgctgtttaatttcaaagtgctgctgactcaaactcatgagtcctggaggcaggtagaggcacttgtaggctgaggacccgtagagcccggtgtgccctgcccaagccccacctgggaatggagttatctctgtaaagatcttgctgcctttgagcaagcactgcaaatggggtaactggaacagccttgtcgcgtgtttccacccttcgtatgaggcaggtaccatgggtcttcaccaacagcacggcctgttgtctccaggaaatggtagcccctcacagtgctttctgtctgcttgtttagctttggcatttgaatgtgcagaatggtggactttgaaattaatgtccttctgttgactgcagaatttctgctggaaatgcagggaggctgcttgtggggttcgcgtgctgtgggaagtagggaaaatgagctggtttactttgtgtctttttgtgcatgcagactgtttggattttgccaacagtttctgggtgctgcctgctttttaaacttttaaaaaattgtaaacagcttcagtggctttgcagaaggaagctgtggtttctggtcttcctgttcagtcatgtttttttcagagggagggctaacatctggccatatttttcaacaaattcagaagtgagtagagaatgcatagtagctgtcggcagaggaggaaccagaatctctccaaagaaattcctcaaacagaatttcacacagggtattccatggagaatgagcctggaattgtctcgccatttaaacgagtattcctaaaaggtgaaaagagtagagataagaaagcccatgagaaggtgacagagaggcgccctctgcacactgtggtgttgtcattgcctgagcgcgtcgagccagacagactgctgagcgactatattgagaaggaggtaaagtatttaggtcagttaacgtccataccaggatacctgaatccctccagtaggactgaaatcctgcatttcatagacaatgcaaagagagcccaccagcttccgggacacttgactcaggagcacgatgctgtgctcagcctgtctgcgtacaacgtcaagctggcctggagggacggggaggatatcatcctcagggtgcccatccatgacatcgccgccgtctcctatgttcgggatgacgctgcacacctggtggtcctgaagacagcccaggacccagggatctcccccagccagagtctgtgtgcggaaagttccagaggcctcagtgcaggctccctgtcggagagtgcagttgggcccgtggaggcatgctgcctggtcatcctggctgcagagagcaaggtcgctgcggaggagctttgctgtctgctaggccaggtcttccaggttgtttacacggagtccaccatcgactttctggacagagcgatatttgatggggcctctaccccgacccaccacctgtccctgcacagcgatgactcttctacaaaagtggacattaaggagacctacgaggtggaagccagcactttctgcttccctgaatctgtggatgtgggtggtgcatcaccccacagcaagaccatcagtgagagcgagctgagcgccagcgccactgagctgctgcaggactacatgctgacgctgcgcaccaagctgtcatcacaggagatccagcagtttgcagcactgctgcacgagtaccgcaatggggcctctatccacgagttctgcatcaacctgcggcagctctacggggacagccgcaagttcctgctgcttggtctgaggcccttcatccctgagaaggacagccagcacttcgagaacttcctggagaccattggcgtgaaggatggccgcggcatcatcactgacagctttggcaggcaccggcgggccctgagcaccacatccagttccaccaccaatgggaacagggccacgggcagctctgatgaccggtcggcaccctcagagggggatgagtgggaccgcatgatctcggacatcagcagcgacattgaggcgctgggctgcagcatggaccaggactcagcatgatggacagtggatgggggggcacccacaccttccgcgcagtcgtcataggccttcccagaaggagctgcccagacctgcgtgtcagcccttggtggtggccagggagaggcgcccggtgcagatggccccgggcggcccaggtcctctactgtgaaggagcagggagctgccgagggacacgagcctcagtgcggggtggaaggctctttgccttgtccaccagggctcagccaagccctgcagtgtgtccccgctcggggagggcccggccgagcgggcagggagagccagtcctgtcggctgggcccttggacggctgtcagttttgcacatgatgttcctattgtaactctcagagaccttaaaaagaagtttactgcaatgtgaataattt

SEQ ID NO: 5472 - DNA, 2471 bp, Homo sapiens; identical to SEQ ID NO: 5471
  source 1..2471: mol_type = unassigned DNA

SEQ ID NO: 5473 - DNA, 1719 bp, Homo sapiens
  source 1..1719: mol_type = unassigned DNA
gcgcggccggggcggagacttcgggcccggctggcgggcggcgccgggagcgcgggggcggcgggcccgggtcgagcatgtagcggctgctggcggcggggctcccggggcgggccgggcgggccgcgggagccgcacgcggcgatatggaagaggagggcaagaagggcaagaagtatttaggtcagttaacgtccataccaggatacctgaatccctccagtaggactgaaatcctgcatttcatagacaatgcaaagagagcccaccagcttccgggacacttgactcaggagcacgatgctgtgctcagcctgtctgcgtacaacgtcaagctggcctggagggacggggaggatatcatcctcagggtgcccatccatgacatcgccgccgtctcctatgttcgggatgacgctgcacacctggtggtcctgaagacagcccaggacccagggatctcccccagccagagtctgtgtgcggaaagttccagaggcctcagtgcaggctccctgtcggagagtgcagttgggcccgtggaggcatgctgcctggtcatcctggctgcagagagcaaggtcgctgcggaggagctttgctgtctgctaggccaggtcttccaggttgtttacacggagtccaccatcgactttctggacagagcgatatttgatggggcctctaccccgacccaccacctgtccctgcacagcgatgactcttctacaaaagtggacattaaggagacctacgaggtggaagccagcactttctgcttccctgaatctgtggatgtgggtggtgcatcaccccacagcaagaccatcagtgagagcgagctgagcgccagcgccactgagctgctgcaggactacatgctgacgctgcgcaccaagctgtcatcacaggagatccagcagtttgcagcactgctgcacgagtaccgcaatggggcctctatccacgagttctgcatcaacctgcggcagctctacggggacagccgcaagttcctgctgcttggtctgaggcccttcatccctgagaaggacagccagcacttcgagaacttcctggagaccattggcgtgaaggatggccgcggcatcatcactgacagctttggcaggcaccggcgggccctgagcaccacatccagttccaccaccaatgggaacagggccacgggcagctctgatgaccggtcggcaccctcagagggggatgagtgggaccgcatgatctcggacatcagcagcgacattgaggcgctgggctgcagcatggaccaggactcagcatgatggacagtggatgggggggcacccacaccttccgcgcagtcgtcataggccttcccagaaggagctgcccagacctgcgtgtcagcccttggtggtggccagggagaggcgcccggtgcagatggccccgggcggcccaggtcctctactgtgaaggagcagggagctgccgagggacacgagcctcagtgcggggtggaaggctctttgccttgtccaccagggctcagccaagccctgcagtgtgtccccgctcggggagggcccggccgagcgggcagggagagccagtcctgtcggctgggcccttggacggctgtcagttttgcacatgatgttcctattgtaactctcagagaccttaaaaagaagtttactgcaatgtgaataatttaatctctggttgccaagc

SEQ ID NO: 5474 - DNA, 2844 bp, Homo sapiens
  source 1..2844: mol_type = unassigned DNA
cccgggtcgagcatgtagcggctgctggcggcggggctcccggggcgggccgggcgggccgcgggagccgcacgcggcgatatggaagaggagggcaagaagggcaagaagcctggaattgtctcgccatttaaacgagtattcctaaaaggtgaaaagagtagagataagaaagcccatgagaaggtgacagagaggcgccctctgcacactgtggtgttgtcattgcctgagcgcgtcgagccagacagactgctgagcgactatattgagaaggaggtaaagggctcccattaatcacatattgatatttattttatttttcatgccctttcatttttctctcatttttcctattctttactcttcccaatgccttctgggaatgtttcaaaccactctccgtcttatgaattcattcctcaactgtattcattcaaccctgaattaaattgtttgtttctactatatctgattggtccttttttataactccttgtccctatttgtttccagtgccctcctacatgcccttgagaatatttattaggattattgtaaattcttgttttctctggcttatcagttcttctccctccagaattagttgtttagtttgtgatcttgcctttccagtgcttgaggtctgtgttccacagatctgtctttattttttccattccctccagcctgggtgacagagtgagactttgcctcaaaaaaacaaaacaaaacaaaacaaactcagacaaacaagatatgtttttgaacaatgaatatgtggatatcaaaattaaatcaataccattcacaatcacttaaaaaatgaaacacgggtataaatcttacaaaacatgaataagatttgtatgctgaaaactatagaacactgatgaaagaaatcaaagatctgaataagtggagagacacactgaattcatggattggaagactcaacctaattagtatgttacttgtccctaagttgatataaatggaccaactccttgaaaagcacaaactactactacaagtcatccaatatgaaataatttgaatagcttgtaactattaaaagtgaattctacaattcctatcaaaatttcagcaagaattttttgtagatataaacaagactattcttaaagtgcagtggcacgatcttaaatttcaagctattcttgaaatttaaatggagaggcaaaataagtagaatagctaataataattttgaaaaagaagaaaatgagaagagtcagcctgtctgatttcaagatagatcatactgctatcacaatcaagactgtggtatctgcagagggactgacacagagatcaggggagcaaaatgaactagaaacagatccacacatatatgcccagctgattcttgacaaaggttcataagcaattcagtggagaagggataggatagccttttaacaaatggtgctggagcagttggacatttgtaggcaaaaattgaaccttgccctgaatttcacaacttaaacacaaaaattaactcaaaatggatcataggcttaaatataaaatacaacttctaggataaaacatagaaaatcttcaggatgcagggctacgcagagttctgagacttgatacctaaagcataattcataaaagaaaaaactgataaactggacttcatcaaaatttaaaactcttgctctataaaagacaatgaaaacatatgctacagactgagaggagatatttttaaaccacatatctgacagagggttggtatctacagtatataaagaactctcaaaactcaacagtaaaacaaacaatccgattaagacataagcaaaagacaggaggagatacttcaatgaagaggatatacagatggcagtaagcacatgaaaatatgctcagcatcattagccatcagggaaatgcacattaaaaccataatgagctgccaatacacacctaacagaatgtttaaaaaaagtagaacacaagatgctggagaagatgtggaggaactggacccctcattcattgctggtagggatgtaaaatggtaccgccactctagaaagcagtctggcagtttcttcaaatctccacgtgcaactacgaacaacttggcaattgcactcctaggcatttatcccagggaaatgaaaatttatgttcacatgaaaacctgcctactaatattcaaaacagttgtattcatagtagcccaaaactggaaacaactccatgtcctttggtggataaatggttaaacaaaatgaggtccatccatgccacagaagactattcaataatacaaagggctgggcatggtggcacctgcctgtagtcccacctactggggaggctgaggctggaggattgcttgagcccaggaagtccaggctgcagtgagccatgatcatgccactgtgctccatcctggatgacagtgagaccctgtcttaaagcaacaacaaaggaacaaactacacagcaacctggatgggcctccagagaattatgttgagtgaaaaaagccgttcctaaaggtttcacactgtatgttcctttctgtaacatctttgaaatgacacagttgctgaggtggagaacagattagggtttgctaggggtggagagaagtaggtgtgcctataaagggcaacaggaggggtcctcacagtgatgggtgctctggctgtgtttacatccatgtcctggtgtgatgtgctgtagttctgcaagatgtcactgctgggggcaatagggtaaagggagcgatggatctccctgtatcatttcttataataagagaatttacaattaccttaaaataaaagtttaatt

SEQ ID NO: 5475 - DNA, 1620 bp, Homo sapiens
  source 1..1620: mol_type = unassigned DNA
gcgcggccggggcggagacttcgggcccggctggcgggcggcgccgggagcgcgggggcggcgggcccgggtcgagcatgtagcggctgctggcggcggggctcccggggcgggccgggcgggccgcgggagccgcacgcggcgatatggaagaggagggcaagaagggcaagaagcctggaattgtctcgccatttaaacgagtattcctaaaaggtgaaaagagtagagataagaaagcccatgagaaggtgacagagaggcgccctctgcacactgtggtgttgtcattgcctgagcgcgtcgagccagacagactgctgagcgactatattgagaaggaggtaaagtatttaggtcagttaacgtccataccaggatacctgaatccctccagtaggactgaaatcctgcatttcatagacaatgcaaagagagcccaccagcttccgggacacttgactcaggagcacgatgctgtgctcagcctgtctgcgtacaacgtcaagctggcctggagggacggggaggatatcatcctcagggtgcccatccatgacatcgccgccgtctcctatgttcgggatgacgctgcacacctggtggtcctgaagacagatgactcttctacaaaagtggacattaaggagacctacgaggtggaagccagcactttctgcttccctgaatctgtggatgtgggtggtgcatcaccccacagcaagaccatcagtgagagcgagctgagcgccagcgccactgagctgctgcaggactacatgctgacgctgcgcaccaagctgtcatcacaggagatccagcagtttgcagcactgctgcacgagtaccgcaatggggcctctatccacgagttctgcatcaacctgcggcagctctacggggacagccgcaagttcctgctgcttggtctgaggcccttcatccctgagaaggacagccagcacttcgagaacttcctggagaccattggcgtgaaggatggccgcggcatcatcactgacagctttggcaggcaccggcgggccctgagcaccacatccagttccaccaccaatgggaacagggccacgggcagctctgatgaccggtcggcaccctcagagggggatgagtgggaccgcatgatctcggacatcagcagcgacattgaggcgctgggctgcagcatggaccaggactcagcatgatggacagtggatgggggggcacccacaccttccgcgcagtcgtcataggccttcccagaaggagctgcccagacctgcgtgtcagcccttggtggtggccagggagaggcgcccggtgcagatggccccgggcggcccaggtcctctactgtgaaggagcagggagctgccgagggacacgagcctcagtgcggggtggaaggctctttgccttgtccaccagggctcagccaagccctgcagtgtgtccccgctcggggagggcccggccgagcgggcagggagagccagtcctgtcggctgggcccttggacggctgtcagttttgcacatgatgttcctattgtaactctcagagaccttaaaaagaagtttactgcaatgtgaataatttaatctctggttgccaagc

SEQ ID NO: 5476 - DNA, 4064 bp, Homo sapiens
  source 1..4064: mol_type = unassigned DNA
tttttttttttttttaaagctgttcctgctgattgctttttaagctaggctcaagtgtggggccacggaatccttcaggtgcccttcaaatcagacattacatttcagctctcagggctagaatgcttccccctcttatcttgggcaggtctttgaagaagccagtttagccttggtaattttgaatttggccatagtatacggaggagagctaggtagctatcaaaacgcttagacaaacgtatggtaaaatgcagcccagcctgaacctccgcaaaacccccaaacctggagcagcaagtgggcaaaggagtgtgtgtttggggcagggtactgagtcccatatgtaatcaagagacctggagggcccaaggaagtcagtgacacccccacaagctacatatcctccaatggattgtggtggtcatctccggctaccgaagccaccttgcttattcccataggcttacaaacattatgatgcttcacacgagttgtgggtgaagtgaaggaattggaaagtcccggtctaaggccctgcaaaactgctgtctggtaaaaacaagtgactatggcaaggccctgaatgtactacgtatagacttaagtcagtatttgtgcctaacagcaaagcatgccacaagaggctcctcaaaagccgggtaattgatgccattgttttcttgacctagttgaagagtcaaagaagagaaggtgatgcagaaacttctttccagtgaagtgacagatccaagcaaggaacacctgcctgtgaggggagcggtaggggagggggtagattcggcagcactcgggtagtggcagggaccacatattgtcggtgttaaccactgttatcactggcccaggtcgagtgaggacgagtcatttccccactaagcacttggggagtggcagggaccacatattgtcagtgttaaccactgttatgactggcccaggtcgggtgacgacgagccatttccgcactattgtcccttcttcctcactgcacccccagccctgcaccctcagctccaaatacacattctcgttcactcaacgtttgttgacacctagcgtgggccctgtgggatggggtaaaagttcggtgttgggaggagccccggtgacagatttttggttttggtggtggcttttgggcaaggacaggtcaattcataaaagatgacgccccaggtctggatcgaattctcctgggagccagaccaaagcaccttcctggactgcaaagtgtggaagccgccgcgggccgggcgcggggaggtgtcatgcgccggaacctgcgcttggggccaagctctggagctgacgcgcaggggcaaggcgccccgcgtcccggactggcggctccgcgcatgctcctcccaccggcgtcgcaggcctcgagaggctccggaagtactgggtgcagcctgatggcgcaggaggtagacacggcacagggcgccgagatgcggcggggcgcgggcgcggctcggggacgcgcttcctggtgctgggccctggcgctgctttggctcgcggtggttccgggctggtcccgggtctcgggcatcccctcccggcgccactggccggtgccctacaagcgctttgacttccgtccaaaacctgatccttattgtcaagctaagtatactttctgtccaactggctcacctatcccagttatggagggtgatgatgacattgaagtttttcgattacaagccccagtatgggaatttaaatatggagacctcctgggacacttgaaaattatgcatgatgccattggattcagaagtacattaactggcaagaactacacaatggaatggtatgaacttttccaacttggcaactgtacatttccccatctccgacctgaaatggatgcccctttctggtgtaatcaaggcgctgcctgcttttttgagggaattgatgatgttcactggaaggaaaatgggacattagttcaagtagcaactatatcaggaaacatgttcaaccaaatggcaaagtgggtgaaacaggacaatgaaacaggaatttattatgagacatggaatgtaaaagccagcccagaaaagggggcagagacatggtttgattcctacgactgttccaaatttgtgttaaggacctttaacaagttggctgaatttggagcagagttcaagaacatagaaaccaactatacaagaatatttctttacagtggagaacctacttatctgggaaatgaaacatctgtttttgggccaacaggaaacaagactcttggtttagccataaaaagattttattaccccttcaaaccacatttgccaactaaagaatttctgttgagtctcttgcaaatttttgatgcagtgattgtgcacaaacagttctatttgttttataattttgaatattggtttttacctatgaaattcccttttattaaaataacatatgaagaaatccctttacctatcagaaacaaaacactctctggtttataaaacaccttaattctactgctcttttttctccaatcaccagcatctgtttttcagggggtgattttacttttgtgaattccttagcctttcttccttggtgcataaagttaaaatgcacatcagcagaattgctgcatattaacatctcaggactcttctcttgtaaagaagctgaaattcgtactatattggccaaagtgagcgagttaggtgatcttggtttcaatttccgagcctttgttaatatggagaattatggttcatatcagttatgtaggacctttggacccagggtcctacagatagatatggtgtgcccagattttaaaaataccttcaaaaataaaaaatacattcagtgacattttcatggtgggagctcttctttctgatatggcagttacactttttcacttaagtgctttagtttagactaactttacaacttctataacttttggaaccaagtttagtatagtctgattacattccattcacctaactttagacattcgtttagacaccataactggagtgattgtgcttctagatgtggcaaatccagtgttaacacatatttctggctgagattttggaactagctagtaactggcttgtgttctttaagcatactaacatcactaaatcttaggatttaggattgctgtaaagatgtaagttgtgtatgtttggcaggtcacattgaatggcagtgataatgattaatcaaagaacaaatgtcatccttgatcttgcctaatgtagtttatgtgccaaactttccagggttttgtagtcacctagattttaagctgatagcatagtgcttcagcggttcttctaaccggggtatgcaggaacatggctgcagacacgtttgggtaaacaggcaccttctgacttcttcattgtttcctgtagttctccctcttcccacaaagctgtcagcgcagtggaagaggttgcacttctccgagagaggacaggtttctgttaagatcaccaagtagctgtgctttaattagagccagacaagctttcaaggtcctttaagtatttgatgatcaactgaacacgtttctattcaaggagaaaacaccattcagtaagaagatggagtagatatcagataaaacaattcacgtttaatatgtaaatgtaccaattatgtgattcagtttcaactttcaagtacttcctgagaggttagtacattattattgagctctcacagaaagcttaatcatagatataattaacctgatccaaatgagtaaagtggaccttagaaaggctaagtgatctttctctggctatccagctagtagtaatgaagtcaggtcttgaaccccggttctgctgactgaattggatgcactatagtacaggcttttagcaccgaagtgtggtcctcagaccagtgcctgccaaccagatgttactggtctgtgaggaaataagtacagatactgacaggaagcttttataaacaatttattggagtgtttttgtttctgttgggtctaattaaaaaaattggagcttgta

SEQ ID NO: 5477 - DNA, 1407 bp, Homo sapiens
  source 1..1407: mol_type = unassigned DNA
actgggtgcagcctgatggcgcaggaggtagacacggcacagggcgccgagatgcggcggggcgcgggcgcggctcggggacgcgcttcctggtgccctacaagcgctttgacttccgtccaaaacctgatccttattgtcaagctaagtatactttctgtccaactggctcacctatcccagttatggagggtgatgatgacattgaagtttttcgattacaagccccagtatgggaatttaaatatggagacctcctgggacacttgaaaattatgcatgatgccattggattcagaagtacattaactggcaagaactacacaatggaatggtatgaacttttccaacttggcaactgtacatttccccatctccgacctgaaatggatgcccctttctggtgtaatcaaggcgctgcctgcttttttgagggaattgatgatgttcactggaaggaaaatgggacattagttcaagtagcaactatatcaggaaacatgttcaaccaaatggcaaagtgggtgaaacaggacaatgaaacaggaatttattatgagacatggaatgtaaaagccagcccagaaaagggggcagagacatggtttgattcctacgactgttccaaatttgtgttaaggacctttaacaagttggctgaatttggagcagagttcaagaacatagaaaccaactatacaagaatatttctttacagtggagaacctacttatctgggaaatgaaacatctgtttttgggccaacaggaaacaagactcttggtttagccataaaaagattttattaccccttcaaaccacatttgccaactaaagaatttctgttgagtctcttgcaaatttttgatgcagtgattgtgcacaaacagttctatttgttttataattttgaatattggtttttacctatgaaattcccttttattaaaataacatatgaagaaatccctttacctatcagaaacaaaacactctctggtttataaaacaccttaattctactgctcttttttctccaatcaccagcatctgtttttcagggggtgattttacttttgtgaattccttagcctttcttccttggtgcataaagttaaaatgcacatcagcagaattgctgcatattaacatctcaggactcttctcttgtaaagaagctgaaattcgtactatattggccaaagtgagcgagttaggtgatcttggtttcaatttccgagcctttgttaatatggagaattatggttcatatcagttatgtaggacctttggacccagggtcctacagatagatatggtgtgcccagattttaaaaataccttcaaaaataaaaaatacattcagtgacattttcatggtgggagctcttctttctgatatggcag

SEQ ID NO: 5478 - DNA, 2120 bp, Homo sapiens
  source 1..2120: mol_type = unassigned DNA
actgggtgcagcctgatggcgcaggaggtagacacggcacagggcgccgagatgcggcggggcgcgggcgcggctcggggacgcgcttcctggtgctgggccctggcgctgctttggctcgcggtggttccgggctggtcccgggtctcgggcatcccctcccggcgccactggccggtgccctacaagcgctttgacttccgtccaaaacctgatccttattgtcaagctaagtatactttctgtccaactggctcacctatcccagttatggagggtgatgatgacattgaagtttttcgattacaagccccagtatgggaatttaaatatggagacctcctgggacacttgaaaattatgcatgatgccattggattcagaagtacattaactggcaagaactacacaatggaatggtatgaacttttccaacttggcaactgtacatttccccatctccgacctgaaatggatgcccctttctggtgtaatcaaggcgctgcctgcttttttgagggaattgatgatgttcactggaaggaaaatgggacattagttcaagtagcaactatatcaggaaacatgttcaaccaaatggcaaagtgggtgaaacaggacaatgaaacaggaatttattatgagacatggaatgtaaaagccagcccagaaaagggggcagagacatggtttgattcctacgactgttccaaatttgtgttaaggacctttaacaagttggctgaatttggagcagagttcaagaacatagaaaccaactatacaagaatatttctttacagtggagaacctacttatctgggaaatgaaacatctgtttttgggccaacaggaaacaagactcttggtttagccataaaaagattttattaccccttcaaaccacatttgccaactaaagaatttctgttgagtctcttgcaaatttttgatgcagtgattgtgcacaaacagttctatttgttttataattttgaatattggtttttacctatgaaattcccttttattaaaataacatatgaagaaatccctttacctatcagaaacaaaacactctctggtttataaaacaccttaattctactgctcttttttctccaatcaccagcatctgtttttcagggggtgattttacttttgtgaattccttagcctttcttccttggtgcataaagttaaaatgcacatcagcagaattgctgcatattaacatctcaggactcttctcttgtaaagaagctgaaattcgtactatattggccaaagtgagcgagttaggtgatcttggtttcaatttccgagcctttgttaatatggagaattatggttcatatcagttatgtaggacctttggacccagggtcctacagatagatatggtgtgcccagattttaaaaataccttcaaaaataaaaaatacattcagtgacattttcatggtgggagctcttctttctgatatggcagttacactttttcacttaagtgctttagtttagactaactttacaacttctataacttttggaaccaagtttagtatagtctgattacattccattcacctaactttagacattcgtttagacaccataactggagtgattgtgcttctagatgtggcaaatccagtgttaacacatatttctggctgagattttggaactagctagtaactggcttgtgttctttaagcatactaacatcactaaatcttaggatttaggattgctgtaaagatgtaagttgtgtatgtttggcaggtcacattgaatggcagtgataatgattaatcaaagaacaaatgtcatccttgatcttgcctaatgtagtttatgtgccaaactttccagggttttgtagtcacctagattttaagctgatagcatagtgcttcagcggttctgctgactgaattggatgcactatagtacaggcttttagcaccgaagtgtggtcctcagaccagtgcctgccaaccagatgttactggtctgtgaggaaataagtacagatactgacaggaagcttttataaacaatttattggagtgtttttgtttctgttgggtctaattaaaaaaattggagcttgt

SEQ ID NO: 5479 - DNA, 2242 bp, Homo sapiens
  source 1..2242: mol_type = unassigned DNA
gtccgcagccccgcctgttcctcccgagggccgcgcgctctcgccggcccgccccgaaccgccccgcgctgggaatttgcggcggcctccgccggggcagccgagctgaaccggtctcttcctcggaaaggcagggccgaggggcctgcggggcagccatggaggcgacgcggaggcggcagcacctgggagcgacgggcggcccaggcgcgcagctgggcgcctccttcctgcaggccaggcatggctctgtgagcgctgatgaggctgcccgcacggctcccttccacctcgacctctggttctacttcacactgcagaactgggttctggactttgggcgtcccattgccatgctggtattccctctcgagtggtttccactcaacaagcccagtgttggggactacttccacatggcctacaacgtcatcacgccctttctcttgctcaagctcatcgagcggtccccccgcaccctgccacgctccatcacgtacgtgagcatcatcatcttcatcatgggtgccagcatccacctggtgggtgactctgtcaaccaccgcctgctcttcagtggctaccagcaccacctgtctgtccgtgagaaccccatcatcaagaatctcaagccggagacgctgatcgactcctttgagctgctctactattatgatgagtacctgggtcactgcatgtggtacatccccttcttcctcatcctcttcatgtacttcagcggctgctttactgcctctaaagctgagagcttgattccagggcctgccctgctcctggtggcacccagtggcctgtactactggtacctggtcaccgagggccagatcttcatcctcttcatcttcaccttcttcgccatgctggccctcgtcctgcaccagaagcgcaagcgcctcttcctggacagcaacggcctcttcctcttctcctccttcgcactgaccctcttgcttgtggcgctctgggtcgcctggctgtggaatgaccctgttctcaggaagaagtacccgggtgtcatctacgtccctgagccctgggctttctacacccttcacgtcagcagtcggcactgagtccctggcaccaggctctggcgctctgctgggtgggagggtgggccatggagggcatctgaatacaggagtagggggggtgtgggtgtgtaaccagagaccgagagcatgagtggggtgtgcctcgtgtgcgtggattcgtgtgtgtgtgtgtgtgtgtcttgtatatgtgtgcgcagagtgcatcattttcagactctactatttccgtcaagtttctgtttgatttggatcatctcaggatcggattctgttttagagtgtttctgggccaggatccgggcccctgccctcctctgcacctgaccacactccctactcagggctagtctgttcttcccggacatcttctggtagccgtgcaggagagggctgggtggggcagaggccaggaggggacctggtgtgtcacctgcccaccacctggctcatccctcaggcccaccctgaccctacattacataggttacgtcagcctactgtggctgttgagcaaagcatttctcctttctgggcctcatttgcactagatgggcctgtggtcccaaagtaggtcagtaggttggggttgctgacaccccttgggtgcagctttgggacagatgagtggctctgtcctgtcactgccctctccctgcctgggggctatgtgcactccagacccctgcccaggctcaggcccatgaggtatggagacaccctggcccccaggagctggaggcaccgcccactcccctggcattccagctttgcaggtgaccctcctctacccaaagctctgtccccctgctcccactccagaagaactgcggcacgcgcttcgggcagcctagccacaggctttgagcgcctgcattcctgggggctggagggtggggtgccaaaggccctgagcaaaagccagagctcctctcatcaaagcctttacaaggtgctgggcccagaggctttgccttgacagagtggcccagggtttcaagggaggaggaacctccccctacctaggacccttcctgtggggggtctacagagtcagggacagaagggaagggacccacaggaagtcacagtggtgcccagggatgtgtcagcccccagccacggggacgcgggattcaagaatgaagtaaatacagtcacagccccaa

SEQ ID NO: 5480 - DNA, 945 bp, Homo sapiens
  source 1..945: mol_type = unassigned DNA
gaatttgcggcggcctccgccggggcagccgagctgaaccggtctcttcctcggaaaggcagggccgaggggcctgcggggcagccatggaggcgacgcggaggcggcagcacctgggagcgacgggcggcccaggcgcgcagctgggcgcctccttcctgcaggccaggcatggctctgtgagcgctgatgaggctgcccgcacggctcccttccacctcgacctctggttctacttcacactgcagaactgggttctggactttgggcgtcccattgccatgctggtattccctctcgagtggtttccactcaacaagcccagtgttggggactacttccacatggcctacaacgtcatcacgccctttctcttgctcaagcggctgctttactgcctctaaagctgagagcttgattccagggcctgccctgctcctggtggcacccagtggcctgtactactggtacctggtcaccgagggccagatcttcatcctcttcatcttcaccttcttcgccatgctggccctcgtcctgcaccagaagcgcaagcgcctcttcctggacagcaacggcctcttcctcttctcctccttcgcactgaccctcttgcttgtggcgctctgggtcgcctggctgtggaatgaccctgttctcaggaagaagtacccgggtgtcatctacgtccctgagccctgggctttctacacccttcacgtcagcagtcggcactgagtccctggcaccaggctctggcgctctgctgggtgggagggtgggccatggagggcatctgaatacaggagtagggggggtgtgggtgtgtaaccagagaccgagagcatgagtggggtgtgcctcgtgtgcgtggattcgtgtgtgtgtgtgtgtgtgtcttgtatatgtgtgcgcagagtgcatcattttcagactctactattt

SEQ ID NO: 5481 - DNA, 1343 bp, Homo sapiens
  source 1..1343: mol_type = unassigned DNA
agaagtcaggccaggtgtctctctttcccttgggcccgcggcccaaccgcatggcaccaggcagcccccagcggtattgcgacctctgcgtcagtcgcgctcagtccctagatacaggtgtgccggagaagcccagggaagggatgcgtgaccatcactacaccctgccccacgacgcggtgggacgcgcaccctgaccctccccagagccgcgcccaggaccttgcctgggcggaaaatggcagccgttgccgggaaggagcggcgagcgagaggcaggccccggccagagacactgggagccatccctaggagggagggaggcgaggcgggcttgagccgagccttcaagccactggcgcaggcgccattgtcctgtgagacttcgctgagaaaactcaaattcaaaggtaaaaagcatggctctgtgagcgctgatgaggctgcccgcacggctcccttccacctcgacctctggttctacttcacactgcagaactgggttctggactttgggcgtcccattgccatgctggtattccctctcgagtggtttccactcaacaagcccagtgttggggactacttccacatggcctacaacgtcatcacgccctttctcttgctcaagctcatcgagcggtccccccgcaccctgccacgctccatcacgtacgtgagcatcatcatcttcatcatgggtgccagcatccacctggtgggtgactctgtcaaccaccgcctgctcttcagtggctaccagcaccacctgtctgtccgtgagaaccccatcatcaagaatctcaagccggagacgctgatcgactcctttgagctgctctactattatgatgagtacctgggtcactgcatgtggtacatccccttcttcctcatcctcttcatgtacttcagcggctgctttactgcctctaaagctgagagcttgattccagggcctgccctgctcctggtggcacccagtggcctgtactactggtacctggtcaccgagggccagatcttcatcctcttcatcttcaccttcttcgccatgctggccctcgtcctgcaccagaagcgcaagcgcctcttcctggacagcaacggcctcttcctcttctcctccttcgcactgaccctcttgcttgtggcgctctgggtcgcctggctgtggaatgaccctgttctcaggaagaagtacccgggtgtcatctacgtccctgagccctgggctttctacacccttcacgtcagcagtcggcactgagtccctggcaccaggctctggcgctctgctgggtgggagggtgggccatggagggcatctgaatacaggagta

SEQ ID NO: 5482 - DNA, 7113 bp, Homo sapiens
  source 1..7113: mol_type = unassigned DNA
gtgcgcgggcggtgtttgaggccggccagtcgtgactgggcggcaatgaggtcagtgactgccgggagtcctgcaggggcggggcggcgccaagcgcagggagcccggctgagtggcagcccagattgaagatggatacgtgacaatcccagggaccgctgcactgacttcatttccttagacaagacacagtgtagggcccggcccgtgttggccccaggactcctttggaatatagctgtggacaatgaatcctgcgagcgatgggggcacatcagagagcatttttgacctggactatgcatcctgggggatccgctccacgctgatggtcgctggctttgtcttctacttgggcgtctttgtggtctgccaccagctgtcctcttccctgaatgccacttaccgttctttggtggccagagagaaggtcttctgggacctggcggccacgcgtgcagtctttggtgttcagagcacagccgcaggcctgtgggctctgctgggggaccctgtgctgcatgccgacaaggcgcgtggccagcagaactggtgctggtttcacatcacgacagcaacgggattcttttgctttgaaaatgttgcagtccacctgtccaacttgatcttccggacatttgacttgtttctggttatccaccatctctttgcctttcttgggtttcttggctgcttggtcaatctccaagctggccactatctagctatgaccacgttgctcctggagatgagcacgccctttacctgcgtttcctggatgctcttaaaggcgggctggtccgagtctctgttttggaagctcaaccagtggctgatgattcacatgtttcactgccgcatggttctaacctaccacatgtggtgggtgtgtttctggcactgggacggcctggtcagcagcctgtatctgcctcatttgacactgttccttgtcggactggctctgcttacgctaatcattaatccatattggacccataagaagactcagcagcttctcaatccggtggactggaacttcgcacagccagaagccaagagcaggccagaaggcaacgggcagctgctgcggaagaagaggccatagctgctccagccggggctccggggcggcagcagagctggcacaccgattctgggaagccccgcgaatgatggcttttgaattaatgaggcagtgaatgttttgtgtttacttctaagggaaatactaactttctttcgcattagtattaattttgaagtagctacaaagtatttttaagaaattataattttatgactgtctggcaggctctgtcagtttagccgcgccggaccgtgtcaagcatctaggagaggagtccatggtgtccaggcatcggggcgtcacacctgttgaggagtggggtggctttgaatgctggaaatggcttcatagtgaagtgcctcccacagggcgggtgggtcagcgttgactctttccagctgcacactcatatgccgtgtgtcttattcagaagtcacattcttttcagttggagagaattgggctaagatagaaaataacatgatttgttccttattaaagcttcccagcgtatgaaattctaagctgggtggggtggctcacacccgacgtaatcccagcacgttgggaggccgaggcaggtggatcacttgaggccaggagttcgagaccagcctggtcaagatggtgaaaccccatctctactaaaattacaaaaattagccgggtgtcgtggcacacacctgtaatcccagctatttgggaggccaaggcaggagaattgcctgaacccgggaggcggaggttgcagtgagctgagatcgcaccactgcactccagcactccagcctgggtgacagagcaagactctctctcaaaaaaaaaaaaaaaaaaaaattctagaccgaagtgtacggcagtgccatctggtggcaagtggtacaaagacaacgctgaggggtagtgactcctgtagcagcagagacgccttggagtttaacccccaccaaccagagcgtgggctggtaaagatgaaatcttgcaagttttttttttttttaaatcatggtacctgttttaaaatgagaagttattattcatactgtgttgctcatttgacaaaataaggtaaggatttcataatcaggttgtctgggtttcagagctgtttttaattgactgagttacctacaggcacccaatctagaccctaattctgtggttggtgttcctctgtagatttcaagacaagtagtgatgtcattttctccctgagctgtagggtggacctggacccctcagagatgctcgactgcagggtcctggggtccctagagtggtcctgcagcagcccctggcaatgagctgcctgatgatgagtcccaaggtacattgttctactgttttatacccaggtagaagttacacagcaatttagcaatgttgttaacagacatacagaattgtgtgtgtgtgtgtgtgtgtgtgtgtgagtgttttgatataaacgtgcaattaaaattcaaagtttattttttatcacaagcacctttgaaatgtacgtggaaaacgtcggctgctcgtgagaatcatgtgtgacttacgttccttatgttttatggaactctcggaacagtgttttgtttttgtttagtttttgttttcgtttttttgagacggagcctggctttggctcccaggctggagtccagtggtgtgatctcggctcactgcaacctccacctcccgggttccagggattctcctgcctcaccctttcaagtagctgggattacaggtacctctaccatgcctggctgattttttgtatttttagtagagacagggtttcaccatgttggccaggctggtctctgactcctgactaaaagtgatctgcccacctcggcctcccaaagttctgggattacgggcgtgagccacttcacccggcccggagcggtgtattttgattgctggtgctttaactatattgaccaaggtgtatagtaacctatttatcacattttacgaagcaattttaatcttaaacacatccagcaaatggtgtccctgctgaaacttttaactggaaacctcacacctggcaggcagcactctctgcagccgtgcccttgtggagtcagcaggagctggtgtttttcagccagacagaggcataataaagtgactgatgtttacagaacccaaatgatgtcttcctctctctcaaaataaactaacctattcatattgctgtgaatgctttatcttggagatagaaaatataatgataaattcatcatgtgttcagaattcgatttggagttggaagtggacagcctaatttttatctcacctccactaggactttgaccttcccaggggtccacactttacctcctgtatcttcatacgcgtgtgtggatgcatagagatggaggtgctgtagagaagcacaggctcacccgctccgtccagtgtcacccacacattggtccggggacccctcagtgcagagcctgaagttgggggtttaggggtggaaaaggcttcgtgaaatgttaatgatgcgtacaccttccagatggcacagcactttcccatggtcctcactggcctcagtctccctgaccggcagtgtgaggggatgtagctatagtggagcatggtacaagcgacattcatgagctctgacttcttggtgccaggttggtgtgagcctgggcccggcccactcagcggcccacattggccagcattcagctgcacgtgtgtgctgcgtgcttcacatcctctattgagagttacagcaagtgttaaacgaggtgagttcacataacaggaattctggaactgcttgaaaactaggacgattgggcaatatcggccttaactccacctgatggcaggtgacccggatagaaaatggccctgcgtttagccaggatgtggctctccagcttggcttcagtgtgatcacttgtcagtgcgctttctctttcgatagtgaaatccttctctatacctatgttttgttttgtttcttaagttgggaaacagaatgggccagggaggttgagtgactgaagaccaagggttggtgcagcctcctcgccgcgctgcgggggctgggccgcacaggcttctgcccttctcggtgtccaggctccttgggtgatgctggagttgtcatggccgcagttcagtgtgagattttttaccaggtattgcgcttaagggacatgattttccattttcttcgcccggacaacttgaatgaaatgggcactgttgattccacttctgtcgaggagcttcggggctcagagaggtgatgacgtgcccaaggtgacgcaactcgtgaacagccgtgcctgccttgggcgcagcctccggcgccagagctgggctcttcaacacggcatttagcgcagaaagtcgtggttcaggcagtatgggccgctgtgacaaaacacctaagactgggtagtttataaagaacagacattcaggccaggcacggtgactcacgcctgtaatcccagcactttgggaggccgaggcgggtggatcatttgaggtcaggagtttgaaaccagcctggccaacatggtgaaaccccatctctactaaaaaaacaaaactagctgggggtggtggtgcatgcctgtggtcccagctacttgggaggctaaggtagaagaattgcttgaacctgggaggcagagattgcagtgagccgagatcacgccattgcactccagcctgggtgacacagtgagactccatctcaaaaaaaaaaaaagaacggacatcatttctcacagttctggaggctggaagtccaagataaaggtgtgggctgattagtttctgctgggaacactgcatcctcacgtggtggaggggatggaaggtcaacaggcctcagctagttctccgctgcctttttatgaggcattaagccatttgcaagagtagggggccccacctcttaataccaccgcaatgacaattacaatgtcatgtgaattctggaggggacacggtcacactgcagcatcagcacccggtgaatgtggttctcttcccatgtccgaattttgtgagctccacacgggcagggttgcatctgttttattctctgattgattctaagccccatgtccctggcacaggatggctgcttggcagtagggagtggatgaaccagtagtacccagggctgccaggcagggccctgcaggggacagacccaagggctgatatggggacacctgctgaggggggaatttaccacggtaagggcagggctgggaggctgggcagccagtttcaccctcgcacaggctgcctggcaagaccagcggctggaggtgatgtcctcagtagagaacggtggccactggaaacgtgtggccagaaggggaaacgctcgggcctctggtgggggccagcctggggtggggtcggccagggtcagctgcctttccttcatgctggggaggagatgttgtgtgcatgtgagaaagcatttgatagcatgccaaaagtttcctccattatgtgcgtgtcaagtgtttgaccaggtcagaactcttgttctatgcgaatgtgctcacgcagacagaagcggaggggctccgtcgctctgccctcacgccgctgaaccgcgagggtctcccgctcctcaggcttgcggctcggccgcgaagtgtgtcaggtgtgcatcctgggtgctcctttgtgctctgtcctacggtgacacaggcggcgtggggttagacaggtaccggtcagactacggtgacacaggcggcgtgcggttagacaggtaccggtcagattacggtggcacaggcggcgtggggttagacaggtaccggtcagattacggtggcacaggcggcgtggggttagacaggtaccggtcagattacggtggcacaggcggcgtggggttagacaggtaccggtcagattacggtggcacaggcggcgtggggttagacaggtaccggtcagattacggtggcacaggcagcgtggggttagacaggtaccggtcagattacggtggcacaggcggcgtggggttagacaggtaccggtcagattacggtggcacaggcggcgtggggttagacaggtaccggtcagattacggtgacacaggcggcgtggggttagacaggtaccggtcagattacggtggcacaggctgcgtggggttagacaggtaccggtcagattacggtggcacaggcggcgtggggttagacaggtactggtcagatgcacgggctccctaaacccctgctgtggcttcggcagtaaagacaggacgcacccatgtcacaagaggagcacaggcaggggtgttggtgttggggcagccctcagggtctccagaccccagccccactcacacagcagcctaggaaggaagggcagagtcccaggtgtcagctggtgggtctcccaggagctgcccctccctggaagtcacaggacaggaatgacagatcagggaactgcaggaagctgccacctctggggtcagaatatgcccagcctgcgggggctctctatcggggtcttcgagagccagacagcctgccttgtgctgcatacctggctttgctctgtgcagaacccagcacacgtgattttgtgtgacatgccagcagcctggctcccaggacaggaggcctgccctgggggaggggctgcaggaggagggggggcaggcacccatgagtctgtccagccttgtcacagatgcatcgcccaccctgcggtcctgatttcagctcacctcagagtaaatcagaataaactgcacccagactttcacgaatgcatgttgacgctttcagttcacccctttctttgctaactttcttcctattttcttctaatgcgagagcttattaattccatatttatcattttgaataacttttctcctttttagtaacaaaatgtacttcactcttagtaaaatgtatttactattttagtaacaaaaatatacttgcctaatcatgtttaaaatatagtgatgtgaaaaattcaga

SEQ ID NO: 5483 - DNA, 2037 bp, Homo sapiens
  source 1..2037: mol_type = unassigned DNA
caaaaaagtttcaatccagagttgggttccagctttctgtagctgtaagcattggtggccacaccacctccttacaaagcaactagaacctgcggcatacattggagagatttttttaattttctggacatgaagtaaatttagagtgctttctaatttcaggtagaagacatgtccaccttctgattatttttggagaacattttgatttttttcatctctctctccccacccctaagattgtgcaaaaaaagcgtaccttgcctaattgaaataatttcattggattttgatcagaactgattatttggttttctgtgtgaagttttgaggtttcaaactttccttctggagaatgccttttgaaacaattttctctagctgcctgatgtcaactgcttagtaatcagtggatattgaaatattcaaaatgtacagagagtgggtagtggtgaatgttttcatgatgttgtacgtccagctggtgcagggctccagtaatgaacatggaccagtgaagcgatcatctcagtccacattggaacgatctgaacagcagatcagggctgcttctagtttggaggaactacttcgaattactcactctgaggactggaagctgtggagatgcaggctgaggctcaaaagttttaccagtatggactctcgctcagcatcccatcggtccactaggtttgcggcaactttctatgacattgaaacactaaaagttatagatgaagaatggcaaagaactcagtgcagccctagagaaacgtgcgtggaggtggccagtgagctggggaagagtaccaacacattcttcaagcccccttgtgtgaacgtgttccgatgtggtggctgttgcaatgaagagagccttatctgtatgaacaccagcacctcgtacatttccaaacagctctttgagatatcagtgcctttgacatcagtacctgaattagtgcctgttaaagttgccaatcatacaggttgtaagtgcttgccaacagccccccgccatccatactcaattatcagaagatccatccagatccctgaagaagatcgctgttcccattccaagaaactctgtcctattgacatgctatgggatagcaacaaatgtaaatgtgttttgcaggaggaaaatccacttgctggaacagaagaccactctcatctccaggaaccagctctctgtgggccacacatgatgtttgacgaagatcgttgcgagtgtgtctgtaaaacaccatgtcccaaagatctaatccagcaccccaaaaactgcagttgctttgagtgcaaagaaagtctggagacctgctgccagaagcacaagctatttcacccagacacctgcagctgtgaggacagatgcccctttcataccagaccatgtgcaagtggcaaaacagcatgtgcaaagcattgccgctttccaaaggagaaaagggctgcccaggggccccacagccgaaagaatccttgattcagcgttccaagttccccatccctgtcatttttaacagcatgctgctttgccaagttgctgtcactgtttttttcccaggtgttaaaaaaaaaatccattttacacagcaccacagtgaatccagaccaaccttccattcacaccagctaaggagtccctggttcattgatggatgtcttctagctgcagatgcctctgcgcaccaaggaatggagaggaggggacccatgtaatccttttgtttagttttgtttttgttttttggtgaatgagaaaggtgtgctggtcatggaatggcaggtgtcatatgactgattactcagagcagatgaggaaaactgtagtctctgagtcctttgctaatcgcaactcttgtgaattattctgattcttttttatgcagaatttgattcgtatgatcagtactgactttctgattactgtccagcttatagtcttccagtttaatgaactaccatctgatgtttcatatttaagtgtatttaaagaaaataaacaccattattcaagccatataa

SEQ ID NO: 5484 - DNA, 4495 bp, Homo sapiens
  source 1..4495: mol_type = unassigned DNA
aatgctgctcggcggttgctggggaccgcctacgggctctgccataggcggtgcaggcggacggggcgcggcgggggacacggcggccgccgcggggctcgatcgggcaacggcggcgacggcggcagcgacggatcctcctcctcccttattcccttgctcctctttcttccttttcttttcctttccggccgggcctcgtccactttccctaacggcggcctcgatcctacgtaaaggcatgacttcctggcaccacagggaaaatcgggtgcaagcccagaaactatttccccaccaccacttgttgaaaaactgatttgaaggcatctccggggttgaacaaacggaaagtgccaggatttgatgcgtctctggtttcgctctggagaccattccctgctaagtatcaagacgaaaaaaactggaaactaatccgaaccatatttatttagagtcagaatggagcgatttgtagtaacagcaccacctgctcgaaaccgttctaagactgctttgtatgtgactcccctggatcgagtcactgagtttggaggtgagctgcatgaagatggaggaaaactcttctgcacttcttgcaatgtggttctgaatcatgttcgcaagtctgccattagtgaccacctcaagtcaaagactcataccaagaggaaggcagaatttgaagagcagaatgtgagaaagaagcagaggcccctaactgcatctcttcagtgcaacagtactgcgcaaacagagaaagtcagtgttatccaggactttgtgaaaatgtgcctggaagccaacatcccacttgagaaggctgatcacccagcagtccgtgctttcctatctcgccatgtgaagaatggaggctccatacctaagtcagaccagctacggagggcatatcttcctgatggatatgagaatgagaatcaactcctcaactcacaagattgttgactaggaggttaccaccattgtgatcaagataaatgtggagtattaaagttatgtgttgattgtgtggttcatttttgtatttatttcatttaaaatcatgtgacgcagaatagttttgcaatgtgtatatagttgcaggcaaaaaaaaaaccacctcactgcaaaacttattgttaattttagtcaccaatggtataaagcaaaacctaggtttagagtgtgctaggatacctgaaacctgatggttatctttaaaattaatggtttttctcctgaaatgtttgtgcatggaagaactgccctgcttttttaccctgttgccatgtatgattattccttgtgagattacttaattacttggattgaagactagcctattgaagctgctgccaggcaacaccacttaacagtaacttaaaggaattattttctttagaggatcctcttcaaaaaggaagggagatagtggaaaactgttcttatatcttcagatccctagcagaaatgactgtttatttcaaactatgttttacttgtatatgatgtagtcaccttaactatctttcaattccatacttcccccgcccccattttaaaggcttattgttgtattttgtagcagcttcaagtgaccaaaagactaaaatctttcaacgtcaatgccaaaagccaaggggaattttgcagtgacaggattttagtctcttactatgaatactaatttcgaaccatagctttcattttaagcatcatcttgaatttctaaacttttttctatgtcttggtgttaaaagatttcaagattggcatttttacttaaacagacattttatggttgagttttctctttattatagagaattagtaatttttttttggctgacagatcagataaaattactttctattcattaatttttctctacaactttatgagtttatttaggtgaatagtctagactagaaacaagtttactttatctgctttgcctctggtggtacaaggtttttaacatggatggtaaacaattgtctagaaattctggcaggttttttgtattggagatctggcagtatcctgcataactttgggtgaggaaattgttctcttaaagatcagccatgttcaggaaatgatctctgtttgaacctcactatcctgtaaggttatccaagtagcttagcccagctaagttctatcagagacccaaattatattttttaaaaatttaacagctggaaacttggactagagctttaataaaaaatcttaaattctttgaaattcaagttaaaaatacttatatatttctattacaaagcagtgacaaatgatgccctgtgtgacttggagttatctttgacttttaccacaaatcttcatttataaaagaaaaagccaaagtgaaaaaaagttagattgtgtatttttcagtaacagctttccatgtcttaagatttttttacagacttaagtttctaattcaggttgtcaaactggccatttgacttcagagatttgttttcattaaaaaataagcctgccgccaaaataaatcacttatcaaaatgtgaactgttttcctcatgttcagttatgttaaagtagtatgataaatgcatgcctagagtagtgctctcgttgatgaagcacatgtatgaggagaccagcagcaaaacataaccatatgtgttttgcgtttacttcctctagaaaagaatttgcaggcaaccatgtttaatttgaactatctaagatggtagattttagaagctaggaataattgagttttatagcactattttcagaatacgaaaagatacacaatcattctgttttttgaaattccatgtgattcaaactgctccctattatttgggtattaatttgcactaatagcaaaatgtaatggcagatcagctttgagagtggtcctaagcagtaaactggatgatgttgcattagaaaaacatcaataattcatatttaagttttagtagttactactgatttgataatcacttaaattttatatatcttaatgtattttttcagactcctaattaattcccacattcactgtaactaggggcatagtccattctgttaggattatatcctctccttagaaatgttttccatcctgttgtggggatttggtattaatgtttcttcattgattatggaacttttgttccctgaagctagttaactgtgtctaaagttaaataaatacagcagaatgattgttttagcctgctcgaactgatacaaatccctgaaaccatgattggcatatgttagataacaaatgaggatgtctaagaggcatatgctgctttggaggtgtagtgaacgtgtgtacagaagttttcaatcttaactatatagtgttagtgtgatgctatactattggaaaaatagcagcttttttctattttataagttgtatgcataaacataagatttgtaatgtttcatttataaactgccttcttcaacacatgttaatagtgttttctcaaagtattgatagtatgtcttccagaatttcacaatatgcttacagtaaatatttcctagcttgttgaaatgttcaattctttgttggctttcttcttgattctgtgggggtgtataacaagcctgaaggacattgtaatcatttcttacaaggtgaaaattaagaaagattgtgtatgagagcctatatagttgttttatccattatcatctttgattaagactttaaaaaaatgctatttccagttaatgcatttggccctattgaattttcagggaccagaaaacattaaaaagttctgcatcttataatggtaaccaattaagcttgagattgttctgaaagtatcaattgctttaaaactgttgtaagtacagttggcaagatctccaagctgaaacttccacgttaaaacttttgcctgtaagaatttgcacatgaatgttaatggaaaacacaaaacttaagatggcccaaaacaaaagccacaaacagttcatcatttggtgcttagtctttgtaagggctctctgtggtttgacttaccccagctaccgttaaatgaggacaaatcaccttaaaacatgttcatttgattcataacaaggaaaattgggtctatgattttttgccaatcttagcctaaaagaaattgctttagcttctggtcagcactgattaaaatgtgaatagtgaagtggctatcctaaactggtttatctccacccacactatcatagatttcttaggtaaatacaattcttatctagtggtattctacttgtattcagaatactgtattaaaattttactatttcatttttgtattctgtgcttattttttttgctcacgcatgtatgcttagtataaatgtgtcacttctaaagttttgtctctgacttttagaaataaatttcagaaaaattgtttcaaaagattttgaaagcacattttgttttgtgagtcaatgacaaatatatttcctgattacaaaacagcagaa

SEQ ID NO: 5485 - DNA, 5298 bp, Homo sapiens
  source 1..5298: mol_type = unassigned DNA
tttatcgtacttttcagaatttctgtggaatgtttaatcttctggatccatgactgtctgatacgttggcaatttaaagtccttttgaaagagagttcatgttacccagctattctctagtatgtattcatggaatactccatcgtttctgattacacttatgagacataattcttcagagcacacttagaattatttctctaacatatttatgcagacagaattccatcttgaattttatcaaattcactttaacttcttaagtcttggttattgtaagagcccaaaggtatggccccagggaacaattaagacttgatgatttgtcacctaccaaaatatgttcattatgtaaaggtttcaatgcccataaggctgtcatttggtatttagtgcagtgctcataaaagtgtgttattaggataaattgagaaattaattaagctgcttctagattaaataaatataaatatttggacaaatattgaagatacgtactttttccatcaaattttaattgaggttctgctgtatactagactctatgttcttgattttgttcttactagttaagtgaagtaagtattaacaaatgtaattattaattttaatgggaaaaggaaacaagtattagagaagtaagactttgcatatcttaacaccttttggaaaacggaggtatacatgcattacaaaataactttgaactgtatattttggctttacaatttaatgtcattgttgcttttagttgtatttggtctggtttttttttgtggtttttcctcagaacaattttggaaactatattcatcttcatatagaattatggcagtttataggcccacctgtttgaaaaaactttatccacagttgtgttcctaaaatcagttgtcccagaattgtgacaggaaagaagctcttttgaacttgaatgcatatctaagttagatgagattaatacaatttatatcctgaatgtaatttatatcctaaatgttgaactgtgattaggtttccctaaataatggtgacatctgggatagtttgagttctttctttatagtctaatttacttgaatttcgtaaaaatcaaggaatggacctgattgcgactggttagtaacttgttctagttttgccttcccttatatatttcaggtaagttaagattaatagacacacagtctactaatttgaattaagttttttgaagtatttgaagtgtttatatactgccttttattgttcattacttccagaatgaactgttgttataatactcatctttgtttcttttgtcttgaaagaaccatatttatttagagtcagaatggagcgatttgtagtaacagcaccacctgctcgaaaccgttctaagactgctttgtatgtgactcccctggatcgagtcactgagtttggaggtgagctgcatgaagatggaggaaaactcttctgcacttcttgcaatgtggttctgaatcatgttcgcaagtctgccattagtgaccacctcaagtcaaagactcataccaagaggaaggcagaatttgaagagcagaatgtgagaaagaagcagaggcccctaactgcatctcttcagtgcaacagtactgcgcaaacagagaaagtcagtgttatccaggactttgtgaaaatgtgcctggaagccaacatcccacttgagaaggctgatcacccagcagtccgtgctttcctatctcgccatgtgaagaatggaggctccatacctaagtcagaccagctacggagggcatatcttcctgatggatatgagaatgagaatcaactcctcaactcacaagattgttgactaggaggttaccaccattgtgatcaagataaatgtggagtattaaagttatgtgttgattgtgtggttcatttttgtatttatttcatttaaaatcatgtgacgcagaatagttttgcaatgtgtatatagttgcaggcaaaaaaaaaaccacctcactgcaaaacttattgttaattttagtcaccaatggtataaagcaaaacctaggtttagagtgtgctaggatacctgaaacctgatggttatctttaaaattaatggtttttctcctgaaatgtttgtgcatggaagaactgccctgcttttttaccctgttgccatgtatgattattccttgtgagattacttaattacttggattgaagactagcctattgaagctgctgccaggcaacaccacttaacagtaacttaaaggaattattttctttagaggatcctcttcaaaaaggaagggagatagtggaaaactgttcttatatcttcagatccctagcagaaatgactgtttatttcaaactatgttttacttgtatatgatgtagtcaccttaactatctttcaattccatacttcccccgcccccattttaaaggcttattgttgtattttgtagcagcttcaagtgaccaaaagactaaaatctttcaacgtcaatgccaaaagccaaggggaattttgcagtgacaggattttagtctcttactatgaatactaatttcgaaccatagctttcattttaagcatcatcttgaatttctaaacttttttctatgtcttggtgttaaaagatttcaagattggcatttttacttaaacagacattttatggttgagttttctctttattatagagaattagtaatttttttttggctgacagatcagataaaattactttctattcattaatttttctctacaactttatgagtttatttaggtgaatagtctagactagaaacaagtttactttatctgctttgcctctggtggtacaaggtttttaacatggatggtaaacaattgtctagaaattctggcaggttttttgtattggagatctggcagtatcctgcataactttgggtgaggaaattgttctcttaaagatcagccatgttcaggaaatgatctctgtttgaacctcactatcctgtaaggttatccaagtagcttagcccagctaagttctatcagagacccaaattatattttttaaaaatttaacagctggaaacttggactagagctttaataaaaaatcttaaattctttgaaattcaagttaaaaatacttatatatttctattacaaagcagtgacaaatgatgccctgtgtgacttggagttatctttgacttttaccacaaatcttcatttataaaagaaaaagccaaagtgaaaaaaagttagattgtgtatttttcagtaacagctttccatgtcttaagatttttttacagacttaagtttctaattcaggttgtcaaactggccatttgacttcagagatttgttttcattaaaaaataagcctgccgccaaaataaatcacttatcaaaatgtgaactgttttcctcatgttcagttatgttaaagtagtatgataaatgcatgcctagagtagtgctctcgttgatgaagcacatgtatgaggagaccagcagcaaaacataaccatatgtgttttgcgtttacttcctctagaaaagaatttgcaggcaaccatgtttaatttgaactatctaagatggtagattttagaagctaggaataattgagttttatagcactattttcagaatacgaaaagatacacaatcattctgttttttgaaattccatgtgattcaaactgctccctattatttgggtattaatttgcactaatagcaaaatgtaatggcagatcagctttgagagtggtcctaagcagtaaactggatgatgttgcattagaaaaacatcaataattcatatttaagttttagtagttactactgatttgataatcacttaaattttatatatcttaatgtattttttcagactcctaattaattcccacattcactgtaactaggggcatagtccattctgttaggattatatcctctccttagaaatgttttccatcctgttgtggggatttggtattaatgtttcttcattgattatggaacttttgttccctgaagctagttaactgtgtctaaagttaaataaatacagcagaatgattgttttagcctgctcgaactgatacaaatccctgaaaccatgattggcatatgttagataacaaatgaggatgtctaagaggcatatgctgctttggaggtgtagtgaacgtgtgtacagaagttttcaatcttaactatatagtgttagtgtgatgctatactattggaaaaatagcagcttttttctattttataagttgtatgcataaacataagatttgtaatgtttcatttataaactgccttcttcaacacatgttaatagtgttttctcaaagtattgatagtatgtcttccagaatttcacaatatgcttacagtaaatatttcctagcttgttgaaatgttcaattctttgttggctttcttcttgattctgtgggggtgtataacaagcctgaaggacattgtaatcatttcttacaaggtgaaaattaagaaagattgtgtatgagagcctatatagttgttttatccattatcatctttgattaagactttaaaaaaatgctatttccagttaatgcatttggccctattgaattttcagggaccagaaaacattaaaaagttctgcatcttataatggtaaccaattaagcttgagattgttctgaaagtatcaattgctttaaaactgttgtaagtacagttggcaagatctccaagctgaaacttccacgttaaaacttttgcctgtaagaatttgcacatgaatgttaatggaaaacacaaaacttaagatggcccaaaacaaaagccacaaacagttcatcatttggtgcttagtctttgtaagggctctctgtggtttgacttaccccagctaccgttaaatgaggacaaatcaccttaaaacatgttcatttgattcataacaaggaaaattgggtctatgattttttgccaatcttagcctaaaagaaattgctttagcttctggtcagcactgattaaaatgtgaatagtgaagtggctatcctaaactggtttatctccacccacactatcatagatttcttaggtaaatacaattcttatctagtggtattctacttgtattcagaatactgtattaaaattttactatttcatttttgtattctgtgcttattttttttgctcacgcatgtatgcttagtataaatgtgtcacttctaaagttttgtctctgacttttagaaataaatttcagaaaaattgtttcaaaa

SEQ ID NO: 5486 - DNA, 1063 bp, Homo sapiens
  source 1..1063: mol_type = unassigned DNA
aaacgcagtgccctcacttgtggttccgggctggggacggagtgaagtcccacgtatctcaattaagggaagtgctgggtttatatggagaacatagactatccgcaagggagctggttaccgaaagagaagtccctcctccaaaagagcgccttggagggctgcgcaggtgcagatacctctactaagaagacagaagacttactttcatcatctgaatcaaatccaaagagtgtctgacatttcttttgtgcaagatgagcctcaagtgcttctgcattacataaaggcatgacttcctggcaccacagggaaaatcgggtgcaagcccagaaactatttccccaccaccacttgttgaaaaactgatttgaaggcatctccggggttgaacaaacggaaagtgccaggatttgatgcgtctctggtttcgctctggagaccattccctgctaagtatcaagacgaaaaaaactggaaactaatccgaaccatatttatttagagtcagaatggagcgatttgtagtaacagcaccacctgctcgaaaccgttctaagactgctttgtatgtgactcccctggatcgagtcactgagtttggaggtgagctgcatgaagatggaggaaaactcttctgcacttcttgcaatgtggttctgaatcatgttcgcaagtctgccattagtgaccacctcaagtcaaagactcataccaagaggaaggcagaatttgaagagcagaatgtgagaaagaagcagaggcccctaactgcatctcttcagtgcaacagtactgcgcaaacagagaaagtcagtgttatccaggactttgtgaaaatgtgcctggaagccaacatcccacttgagaaggctgatcacccagcagtccgtgctttcctatctcgccatgtgaagaatggaggctccatacctaagtcagaccagctacggagggcatatcttcctgatggatatgagaatgagaatcaactcctcaactcacaagattgttgactaggaggttaccaccattgtgatcaagataaatgtggagtattaaa

SEQ ID NO: 5487 - DNA, 556 bp, Homo sapiens
  source 1..556: mol_type = unassigned DNA
agtgctgggtttatatggagaacatagactatccgcaagggagctggttaccgaaagagaagtccctcctccaaaagagcgccttggagggctgcgcaggtgcagatacctctactaagaagacagaagacttactttcatcatctgaatcaaatccaaagagtgtctgacatttcttttgtgcaagatgagcctcaagtgcttctgcattacaaaccatatttatttagagtcagaatggagcgatttgtagtaacagcaccacctgctcgaaaccgttctaagactgctttgtatgtgactcccctggatcgagtcactgagtttggaggtgagctgcatgaagatggaggaaaactcttctgcacttcttgcaatgtggttctgaatcatgttcgcaagtctgccattagtgaccacctcaagtcaaagactcataccaagaggaaggcagaatttgaagagcagaatgtgagaaagaagcagaggcccctaactgcatctcttcagtgcaacagtactgcgcaaacagagaaagtcagtgttatccaggact

SEQ ID NO: 5488 - DNA, 1147 bp, Homo sapiens
  source 1..1147: mol_type = unassigned DNA
aaaccggccgtctgttggtcaatgctgctcggcggttgctggggaccgcctacgggctctgccataggcggtgcaggcggacggggcgcggcgggggacacggcggccgccgcggggctcgatcgggcaacggcggcgacggcggcagcgacggatcctcctcctcccttattcccttgctcctctttcttccttttcttttcctttccggccgggcctcgtccactttccctaacggcggcctcgatcctacgtaaaggcatgacttcctggcaccacagggaaaatcgggtgcaagcccagaaactatttccccaccaccacttgttgaaaaactgatttgaaggcatctccggggttgaacaaacggaaagtgccaggatttgatgcgtctctggtttcgctctggagaccattccctgctaagtatcaagacgaaaaaaactggaaactaatccgaatttctgtggaatgtttaatcttctggatccatgactgtctgatacgttggcaatttaaagtccttttgaaagagagttcatgttacccagctattctctaaaccatatttatttagagtcagaatggagcgatttgtagtaacagcaccacctgctcgaaaccgttctaagactgctttgtatgtgactcccctggatcgagtcactgagtttggaggtgagctgcatgaagatggaggaaaactcttctgcacttcttgcaatgtggttctgaatcatgttcgcaagtctgccattagtgaccacctcaagtcaaagactcataccaagaggaaggcagaatttgaagagcagaatgtgagaaagaagcagaggcccctaactgcatctcttcagtgcaacagtactgcgcaaacagagaaagtcagtgttatccaggactttgtgaaaatgtgcctggaagccaacatcccacttgagaaggctgatcacccagcagtccgtgctttcctatctcgccatgtgaagaatggaggctccatacctaagtcagaccagctacggagggcatatcttcctgatggatatgagaatgagaatcaactcctcaactcacaagattgttgactaggaggttaccaccattgtgatcaagataaatgtggagtattaaagttatgtgttga

SEQ ID NO: 5489 - DNA, 2041 bp, Homo sapiens
  source 1..2041: mol_type = unassigned DNA
agtgtgaaaggctgcgtttccggcccgtggggctccaatcaaaatgggacgcctgctggcggtaacgacaggccggggccccgccccccgaagtagggcgtgtggcgtcacttccggcttccttcagtccgctggtcccgagcacgagctgtgaggggattcacttgtgtgcggaactcctcggaaccatggcgtccctttcccttgcacctgttaacatctttaaggcaggagctgatgaagagagagcagagacagctcgtctgacttcttttattggtgccatcgccattggagacttggtaaagagcaccttgggacccaaaggcatggacaaaattcttctaagcagtggacgagatgcctctcttatggtaaccaatgatggtgccactattctaaaaaacattggtgttgacaatccagcagctaaagttttagttgatatgtcaagggttcaagatgatgaagttggtgatggcactacctctgttaccgttttagcagcagaattattaagggaagcagaatctttaattgcaaaaaagattcatccacagaccatcatagcgggttggagagaagccacgaaggctgcaagagaggcgctgttgagttctgcagttgatcatggttccgatgaagttaaattccgtcaagatttaatgaatattgcgggcacaacattatcctcaaaacttcttactcatcacaaagaccactttacaaagttagctgtagaagcagttctcagactgaaaggctctggcaacctggaggcaattcatattatcaagaagctaggaggaagtttggcagattcctatttagatgaaggcttcctgttggataaaaaaattggagtaaatcaaccaaaacgaattgaaaatgctaaaattcttattgcaaatactggtatggatacagacaaaataaagatatttggttcccgggtaagagttgactctacagcaaaggttgcagaaatagaacatgcggaaaaggaaaaaatgaaggagaaagttgaacgtattcttaagcatggaataaattgctttattaacaggcaattaatttataattatcctgaacagctctttggtgctgctggtgtcatggctattgagcatgcagattttgcaggtgtggaacgcctagctcttgtcacaggtggtgaaattgcctctacctttgatcacccagaactggtgaagcttggaagttgcaaacttatcgaggaagtcatgattggagaagacaaactcattcacttttctggggttgcccttggtgaggcttgtaccattgttttgcgtggtgccactcaacaaattttagatgaagcagaaagatcattgcatgatgctctttgtgttcttgcgcaaactgtaaaggactctagaacagtttatggaggaggctgttctgagatgttgatggctcatgctgtgacacagcttgccaatagaacaccaggcaaagaagctgttgcaatggagtcttatgctaaagcactgagaatgttgccaaccatcatagctgacaatgcaggctatgacagtgcagacctggtggcacagctcagggctgctcacagtgaaggcaataccactgctggattggatatgagggaaggcaccattggagatatggctatcctgggtataacagaaagttttcaagtgaagcgacaggttcttctgagtgcagctgaagcagcagaggtgattctgcgtgtggacaacatcatcaaagcggcacccaggaaacgtgtccctgatcaccacccctgttaagcattcccacgtgctgtcgatctttggaccagtttctagcaaagttgtgtttgaaagatactctattaaagaagactgtggaatctgtttatcggtgcccattatatccttaagtttggatatttagctgaccttcgctttaacataggtctaatttatttgccgtgtcattttccatacaaatcagttgatttaaaaaagttcatttctcatactgtgcattaaaataaaaatttgaacaatta

SEQ ID NO: 5490 - DNA, 2189 bp, Homo sapiens
  source 1..2189: mol_type = unassigned DNA
gcgtgcggcctgcgccaggccagccggtggagctcaccacgagggggaggggtggaccgcaaagccagcgtctccttgtgcctaggtctttgcatagtcccggcagcccaggtccgcgcctcacccggagcgaagaaatttctagtgtgggacccgctccgccctccttctaggggcggagcctggagcgacggggtctgagccatcagagggtggaggggccgcagccttccgagggtggaagatggaggccgcgttccctcgcccgcccggcaggcgtcaccttgatggcctgcaacccctccctgcctcattcttagttcaagatcgtctttagtctcgctgcgtccctttcccttgcacctgttaacatctttaaggcaggagctgatgaagagagagcagagacagctcgtctgacttcttttattggtgccatcgccattggagacttggtaaagagcaccttgggacccaaaggcatggacaaaattcttctaagcagtggacgagatgcctctcttatggtaaccaatgatggtgccactattctaaaaaacattggtgttgacaatccagcagctaaagttttagttgatatgtcaagggttcaagatgatgaagttggtgatggcactacctctgttaccgttttagcagcagaattattaagggaagcagaatctttaattgcaaaaaagattcatccacagaccatcatagcgggttggagagaagccacgaaggctgcaagagaggcgctgttgagttctgcagttgatcatggttccgatgaagttaaattccgtcaagatttaatgaatattgcgggcacaacattatcctcaaaacttcttactcatcacaaagaccactttacaaagttagctgtagaagcagttctcagactgaaaggctctggcaacctggaggcaattcatattatcaagaagctaggaggaagtttggcagattcctatttagatgaaggcttcctgttggataaaaaaattggagtaaatcaaccaaaacgaattgaaaatgctaaaattcttattgcaaatactggtatggatacagacaaaataaagatatttggttcccgggtaagagttgactctacagcaaaggttgcagaaatagaacatgcggaaaaggaaaaaatgaaggagaaagttgaacgtattcttaagcatggaataaattgctttattaacaggcaattaatttataattatcctgaacagctctttggtgctgctggtgtcatggctattgagcatgcagattttgcaggtgtggaacgcctagctcttgtcacaggtggtgaaattgcctctacctttgatcacccagaactggtgaagcttggaagttgcaaacttatcgaggaagtcatgattggagaagacaaactcattcacttttctggggttgcccttggtgaggcttgtaccattgttttgcgtggtgccactcaacaaattttagatgaagcagaaagatcattgcatgatgctctttgtgttcttgcgcaaactgtaaaggactctagaacagtttatggaggaggctgttctgagatgttgatggctcatgctgtgacacagcttgccaatagaacaccaggcaaagaagctgttgcaatggagtcttatgctaaagcactgagaatgttgccaaccatcatagctgacaatgcaggctatgacagtgcagacctggtggcacagctcagggctgctcacagtgaaggcaataccactgctggattggatatgagggaaggcaccattggagatatggctatcctgggtataacagaaagttttcaagtgaagcgacaggttcttctgagtgcagctgaagcagcagaggtgattctgcgtgtggacaacatcatcaaagcggcacccaggaaacgtgtccctgatcaccacccctgttaagcattcccacgtgctgtcgatctttggaccagtttctagcaaagttgtgtttgaaagatactctattaaagaagactgtggaatctgtttatcggtgcccattatatccttaagtttggatatttagctgaccttcgctttaacataggtctaatttatttgccgtgtcattttccatacaaatcagttgatttaaaaaagttcatttctcatactgtgcattaaaataaaaatttgaac

SEQ ID NO: 5491 - DNA, 2150 bp, Homo sapiens
  source 1..2150: mol_type = unassigned DNA
actgcgcaagcgcctgtgccctcccagtgccttcgtcgtgcgctctctgtctaacttgtctggccgttcttgcgtagggggcgggactaaggctgtcaattggtctgtttttgtgccgatcaatgagatgggtgcggtgattggcgactaccttgagagtagcgggttgaggtgtaagccctgaggaggcagcgttttctgggcttctgtctggttctctctctccagaaggttctgccggttcccccagctctgggtacccggctctgcatcgcgtcgccatgatgggccatcgtccagtgctcgtgctcagccagaacacaaagcgtgaatccggaagaaaagttcaatctggaaacatcaatgctgccaagactattgcagatatcatccgaacatgtttgggacccaagtccatgatgaagatgcttttggacccaatgggaggcattgtgatgaccaatgatggcaatgccattcttcgagagattcaagtccagcatccagcggccaagtccatgatcgaaattagccggacccaggatgaagaggttggagatgggaccacatcagtaattattcttgcaggggaaatgctgtctgtagctgagcacttcctggagcagcagatgcacccaacagtggtgatcagtgcttaccgcaaggcattggatgatatgatcagcaccctaaagaaaataagtatcccagtcgacatcagtgacagtgatatgatgctgaacatcatcaacagctctattactaccaaagccatcagtcggtggtcatctttggcttgcaacattgccctggatgctgtcaagatggtacagtttgaggagaatggtcggaaagagattgacataaaaaaatatgcaagagtggaaaagatacctggaggcatcattgaagactcctgtgtcttgcgtggagtcatgattaacaaggatgtgacccatccacgtatgcggcgctatatcaagaaccctcgcattgtgctgctggattcttctctggaatacaagaaaggagaaagccagactgacattgagattacacgagaggaggacttcacccgaattctccagatggaggaagagtacatccagcagctctgtgaggacattatccaactgaagcccgatgtggtcatcactgaaaagggcatctcagatttagctcagcactaccttatgcgggccaatatcacagccatccgcagagtccggaagacagacaataatcgcattgctagagcctgtggggcccggatagtcagccgaccagaggaactgagagaagatgatgttggaacaggagcaggcctgttggaaatcaagaaaattggagatgaatactttactttcatcactgactgcaaagaccccaaggcctgcaccattctcctccggggggctagcaaagagattctctcggaagtagaacgcaacctccaggatgccatgcaagtgtgtcgcaatgttctcctggaccctcagctggtgccagggggtggggcctccgagatggctgtggcccatgccttgacagaaaaatccaaggccatgactggtgtggaacaatggccatacagggctgttgcccaggccctagaggtcattcctcgtaccctgatccagaactgtggggccagcaccatccgtctacttacctcccttcgggccaagcacacccaggagaactgtgagacctggggtgtaaatggtgagacgggtactttggtggacatgaaggaactgggcatatgggagccattggctgtgaagctgcagacttataagacagcagtggagacggcagttctgctactgcgaattgatgacatcgtttcaggccacaaaaagaaaggcgatgaccagagccggcaaggcggggctcctgatgctggccaggagtgagtgctaggcaaggctacttcaatgcacagaaccagcagagtctccccttttcctgagccagagtgccaggaacactgtggacgtctttgttcagaagggatcaggttggggggcagcccccagtccctttctgtcccagctcagttttccaaaagacactgacatgtaattcttctctattgtaaggtttccatttagtttgcttccgatgattaaatctaagtcatttga

SEQ ID NO: 5492 - DNA, 1815 bp, Homo sapiens
  source 1..1815: mol_type = unassigned DNA
ctctccagaaggttctgccggttcccccagctctgggtacccggctctgcatcgcgtcgccatgatgggccatcgtccagtgctcgtgctcagccagaacacaaagcgtgaatccggaagaaaagttcaatctggaaacatcaatgctgccaagattcaagtccagcatccagcggccaagtccatgatcgaaattagccggacccaggatgaagaggttggagatgggaccacatcagtaattattcttgcaggggaaatgctgtctgtagctgagcacttcctggagcagcagatgcacccaacagtggtgatcagtgcttaccgcaaggcattggatgatatgatcagcaccctaaagaaaataagtatcccagtcgacatcagtgacagtgatatgatgctgaacatcatcaacagctctattactaccaaagccatcagtcggtggtcatctttggcttgcaacattgccctggatgctgtcaagatggtacagtttgaggagaatggtcggaaagagattgacataaaaaaatatgcaagagtggaaaagatacctggaggcatcattgaagactcctgtgtcttgcgtggagtcatgattaacaaggatgtgacccatccacgtatgcggcgctatatcaagaaccctcgcattgtgctgctggattcttctctggaatacaagaaaggagaaagccagactgacattgagattacacgagaggaggacttcacccgaattctccagatggaggaagagtacatccagcagctctgtgaggacattatccaactgaagcccgatgtggtcatcactgaaaagggcatctcagatttagctcagcactaccttatgcgggccaatatcacagccatccgcagagtccggaagacagacaataatcgcattgctagagcctgtggggcccggatagtcagccgaccagaggaactgagagaagatgatgttggaacaggagcaggcctgttggaaatcaagaaaattggagatgaatactttactttcatcactgactgcaaagaccccaaggcctgcaccattctcctccggggggctagcaaagagattctctcggaagtagaacgcaacctccaggatgccatgcaagtgtgtcgcaatgttctcctggaccctcagctggtgccagggggtggggcctccgagatggctgtggcccatgccttgacagaaaaatccaaggccatgactggtgtggaacaatggccatacagggctgttgcccaggccctagaggtcattcctcgtaccctgatccagaactgtggggccagcaccatccgtctacttacctcccttcgggccaagcacacccaggagaactgtgagacctggggtgtaaatggtgagacgggtactttggtggacatgaaggaactgggcatatgggagccattggctgtgaagctgcagacttataagacagcagtggagacggcagttctgctactgcgaattgatgacatcgtttcaggccacaaaaagaaaggcgatgaccagagccggcaaggcggggctcctgatgctggccaggagtgagtgctaggcaaggctacttcaatgcacagaaccagcagagtctccccttttcctgagccagagtgccaggaacactgtggacgtctttgttcagaagggatcaggttggggggcagcccccagtccctttctgtcccagctcagttttccaaaagacactgacatgtaattcttctctattgtaaggtttccatttagtttgcttccgatgattaaatctaagtcatttg

SEQ ID NO: 5493 - DNA, 2048 bp, Homo sapiens
  source 1..2048: mol_type = unassigned DNA
ctctctccagaaggttctgccggttcccccagctctgggtacccggctctgcatcgcgtcgccatgatgggccatcgtccagtgctcgtgctcaagacggagtttcaccatgttgaccaggctggtctccaactgctgatgagctcaggtgatccgcccacctcggcctcccaaagtgctgagattacaggcgtgagccaccgcgcccggtcccttatttttttctgatgagcaccacctccattgtcttcctttggccagaacacaaagcgtgaatccggaagaaaagttcaatctggaaacatcaatgctgccaagactattgcagatatcatccgaacatgtttgggacccaagtccatgatgaagatgcttttggacccaatgggaggcattgtgatgaccaatgatggcaatgccattcttcgagagattcaagtccagcatccagcggccaagtccatgatcgaaattagccggacccaggatgaagaggttggagatgggaccacatcagtaattattcttgcaggggaaatgctgtctgtagctgagcacttcctggagcagcagatgcacccaacagtggtgatcagtgcttaccgcaaggcattggatgatatgatcagcaccctaaagaaaataagtatcccagtcgacatcagtgacagtgatatgatgctgaacatcatcaacagctctattactaccaaagccatcagtcggtggtcatctttggcttgcaacattgccctggatgctgtcaagatggtacagtttgaggagaatggtcggaaagagattgacataaaaaaatatgcaagagtggaaaagatacctggaggcatcattgaagactcctgtgtcttgcgtggagtcatgattaacaaggatgtgacccatccacgtatgcggcgctatatcaagaaccctcgcattgtgctgctggattcttctctggaatacaagaaaggagaaagccagactgacattgagattacacgagaggaggacttcacccgaattctccagatggaggaagagtacatccagcagctctgtgaggacattatccaactgaagcccgatgtggtcatcactgaaaagggcatctcagatttagctcagcactaccttatgcgggccaatatcacagccatccgcagagtccggaagacagacaataatcgcattgctagagcctgtggggcccggatagtcagccgaccagaggaactgagagaagatgatgttggaacaggagcaggcctgttggaaatcaagaaaattggagatgaatactttactttcatcactgactgcaaagaccccaaggcctgcaccattctcctccggggggctagcaaagagattctctcggaagtagaacgcaacctccaggatgccatgcaagtgtgtcgcaatgttctcctggaccctcagctggtgccagggggtggggcctccgagatggctgtggcccatgccttgacagaaaaatccaaggccatgactggtgtggaacaatggccatacagggctgttgcccaggccctagaggtcattcctcgtaccctgatccagaactgtggggccagcaccatccgtctacttacctcccttcgggccaagcacacccaggagaactgtgagacctggggtgtaaatggtgagacgggtactttggtggacatgaaggaactgggcatatgggagccattggctgtgaagctgcagacttataagacagcagtggagacggcagttctgctactgcgaattgatgacatcgtttcaggccacaaaaagaaaggcgatgaccagagccggcaaggcggggctcctgatgctggccaggagtgagtgctaggcaaggctacttcaatgcacagaaccagcagagtctccccttttcctgagccagagtgccaggaacactgtggacgtctttgttcagaagggatcaggttggggggcagcccccagtccctttctgtcccagctcagttttccaaaagacactgacatgtaattcttctctattgtaa

SEQ ID NO: 5494 - DNA, 842 bp, Homo sapiens
  source 1..842: mol_type = unassigned DNA
gagaaggtaatgaatgtatgaaggtgatctggaaggacaatctatgaattggacaagtgaagaaggaagaggagacattataagaagtgggaccaacatagaccgagcctggcagtgccagaacacaaagcgtgaatccggaagaaaagttcaatctggaaacatcaatgctgccaagactattgcagatatcatccgaacatgtttgggacccaagtccatgatgaagatgcttttggacccaatgggaggcattgtgatgaccaatgatggcaatgccattcttcgagagattcaagtccagcatccagcggccaagtccatgatcgaaattagccggacccaggatgaagaggttggagatgggaccacatcagtaattattcttgcaggggaaatgctgtctgtagctgagcacttcctggagcagcagatgcacccaacagtggtgatcagtgcttaccgcaaggcattggatgatatgatcagcaccctaaagaaaataagtatcccagtcgacatcagtgacagtgatatgatgctgaacatcatcaacagctctattactaccaaagccatcagtcggtggtcatctttggcttgcaacattgccctggatgctgtcaagatggtacagtttgaggagaatggtcggaaagagattgacataaaaaaatatgcaagagtggaaaagatacctggaggcatcattgaagactcctgtgtcttgcgtggagtcatgattaacaaggatgtgacccatccacgtatgcggcgctatatcaagaaccctcgcattgtgctgctggattcttctctggaatacaagaaaggagaaagcc

SEQ ID NO: 5495 - DNA, 513 bp, Homo sapiens
  source 1..513: mol_type = unassigned DNA
tctgggtacccggctctgcatcgcgtcgccatgatgggccatcgtccagtgctcgtgctcagccagaacacaaagcgtgaatccggaagaaaagttcaatctggaaacatcaatgctgccaagactattgcagatatcatccgaacatgtttgggacccaagtccatgatgaagatgcttttggacccaatgggaggcattgtgatgaccaatgatggcaatgccattcttcgagagattcaagtccagcatccagcggccaagtccatgatcgaaattagccggacccaggatgaagaggttggagatgggaccacatcagtaattattcttgagtctcactctgtcaccatgctggagtgtggtggtgcgatcttggctcactgcaacctctgcctcccagcaggggaaatgctgtctgtagctgagcacttcctggagcagcagatgcacccaacagtggtgatcagtgcttaccgcaaggcattggatgatatgatcagcaccctaaag

SEQ ID NO: 5496 - DNA, 593 bp, Homo sapiens
  source 1..593: mol_type = unassigned DNA
gagaattgcttcctgagaaggtaatgaatgtatgaaggtgatctggaaggacaatctatgaattggacaagtgaagaaggaagaggagacattataagaagtgggaccaacatagaccgagcctggcagtgccagaacacaaagcgtgaatccggaagaaaagttcaatctggaaacatcaatgctgccaagattcaagtccagcatccagcggccaagtccatgatcgaaattagccggacccaggatgaagaggttggagatgggaccacatcagtaattattcttgcaggggaaatgctgtctgtagctgagcacttcctggagcagcagatgcacccaacagtggtgatcagtgcttaccgcaaggcattggatgatatgatcagcaccctaaagaaaataagtatcccagtcgacatcagtgacagtgatatgatgctgaacatcatcaacagctctattactaccaaagccatcagtcggtggtcatctttggcttgcaacattgccctggatgctgtcaagatggtacagtttgaggagaatggtcggaaagagattgacataaaaaaatatgcaagagtggaaaa

SEQ ID NO: 5497 - DNA, 1858 bp, Homo sapiens
  source 1..1858: mol_type = unassigned DNA
gtctggttctctctctccagaaggttctgccggttcccccagctctgggtacccggctctgcatcgcgtcgccatgatgggccatcgtccagtgctcgtgctcattaggtctagctttatattcttggcccatcccttagtagcggtaatttaaatgtttcaatctgtattacggagttaacagtatttcctagtagaattgtgagaattaaatgaggccagaacacaaagcgtgaatccggaagaaaagttcaatctggaaacatcaatgctgccaagactattgcagatatcatccgaacatgtttgggacccaagtccatgatgaagatgcttttggacccaatgggaggcattgtgatgaccaatgatggcaatgccattcttcgagagattcaagtccagcatccagcggccaagtccatgatcgaaattagccggacccaggatgaagaggttggagatgggaccacatcagtaattattcttgcaggggaaatgctgtctgtagctgagcacttcctggagcagcagatgcacccaacagtggtgatcagtgcttaccgcaaggcattggatgatatgatcagcaccctaaagaaaataagtatcccagtcgacatcagtgacagtgatatgatgctgaacatcatcaacagctctattactaccaaagccatcagtcggtggtcatctttggcttgcaacattgccctggatgctgtcaagatggtacagtttgaggagaatggtcggaaagagattgacataaaaaaatatgcaagagtggaaaagatacctggaggcatcattgaagactcctgtgtcttgcgtggagtcatgattaacaaggatgtgacccatccacgtatgcggcgctatatcaagaaccctcgcattgtgctgctggattcttctctggaatacaagaaaggagaaagccagactgacattgagattacacgagaggaggacttcacccgaattctccagatggaggaagagtacatccagcagctctgtgaggacattatccaactgaagcccgatgtggtcatcactgaaaagggcatctcagatttagctcagcactaccttatgcgggccaatatcacagccatccgcagagtccggaagacagacaataatcgcattgctagagcctgtggggcccggatagtcagccgaccagaggaactgagagaagatgatgttggaacaggagcaggcctgttggaaatcaagaaaattggagatgaatactttactttcatcactgactgcaaagaccccaaggcctgcaccattctcctccggggggctagcaaagagattctctcggaagtagaacgcaacctccaggatgccatgcaagtgtgtcgcaatgttctcctggaccctcagctggtgccagggggtggggcctccgagatggctgtggcccatgccttgacagaaaaatccaaggccatgactggtgtggaacaatggccatacagggctgttgcccaggccctagaggtcattcctcgtaccctgatccagaactgtggggccagcaccatccgtctacttacctcccttcgggccaagcacacccaggagaactgtgagacctggggtgtaaatggtgagacgggtactttggtggacatgaaggaactgggcatatgggagccattggctgtgaagctgcagacttataagacagcagtggagacggcagttctgctactgcgaattgatgacatcgtttcaggccacaaaaagaaaggcgatgaccagagccggcaaggcggggctcctgatgctggccaggagtgagtgctaggcaaggctacttcaatgcacagaacca

SEQ ID NO: 5498 - DNA, 2520 bp, Homo sapiens
  source 1..2520: mol_type = unassigned DNA
gcgtaaaggttcccccggcgctcttcacccacagcgccccgggcgtacaatctcgccagcccggagcccaccgcacgcatcctcctcgcccggcgcgcagcggacagcctcctacgtcacgccagcgccgcgcggcaaggaaggcccccttctccgcctccgcctcctcccgacgccggcgccgctttctggaaggttcgtgaaggcagtgagggcttaccgttattacactgcggccggccagaatccgggtccatccgtccttcccgagccaacccagacacagcggagtttgccatgcccgagaatgtggcaccccggagcggggcgactgccggggctgccggcggccgcgggaaaggcgcctatcaggaccgcgacaagccagcccagatccgcttcagcaacatttccgccgccaaagcggttgctgatgctattagaacaagccttggaccaaaaggaatggataaaatgattcaagatggaaaaggtgatgtaaccattacaaatgatggtgctaccattctgaaacaaatgcaagtattacatccagcagccagaatgctggtggagctgtctaaggctcaagatatagaagcaggagatggcaccacatcagtagtcatcattgctggctccctcttagattcttgtaccaagcttcttcagaaagggattcatccaaccatcatttctgagtcattccagaaggccctggaaaagggcattgaaatcttgactgacatgtctcgacctgtggaactgagtgacagagaaactttgttaaatagtgcaaccacttcactgaactcaaaggtggtttctcagtattcaagtctgctttctccaatgagtgtaaatgcagtgatgaaagtgattgacccagccacagccaccagtgtagatcttagagatattaaaatagttaagaagcttggtgggacaattgatgactgtgagttggtggaagggctggttctcacccaaaaagtgtcaaattctggcataaccagagttgaaaaggccaagattgggcttattcagttttgcttatctgctcccaaaacagacatggataatcaaatagtggtttctgactatgcccagatggaccgagtgctgcgagaagagagagcctatattttaaatttagtgaagcaaattaaaaaaacaggatgtaatgtccttctcatacagaaatctattctaagagatgctcttagtgatcttgcattacactttctgaataaaatgaagatcatggtgattaaggatattgaaagagaagacattgaattcatttgtaagacaattggaaccaagccagttgctcatattgaccaatttactgctgacatgctgggttctgctgagttagctgaggaggtcaatttaaatggttctggcaaactgctcaagattacaggctgtgccagccctggaaaaacagttacaattgttgttcgtggttctaacaaactggtgattgaagaagctgagcgctccattcatgatgccctatgtgttattcgttgtttagtgaagaagagggctcttattgcaggaggtggtgctccagaaatagagttggccctacgattaactgaatattcacgaacactgagtggtatggaatcctactgcgttcgtgcttttgcagatgctatggaggtcattccatctacactagctgaaaatgccggcctgaatcccatttctacagtaacagaactaagaaaccggcatgcccagggagaaaaaactgcaggcattaatgtccgaaagggtggtatttccaacattttggaggaactggttgtccagcctctgttggtatcagtcagtgctctgactcttgcaactgaaactgttcggagcattctgaaaatagatgatgtggtaaacactcgataatctggataactgactagcaccattatgatcaccagtattgtggctggaatggaagaagatcaccttggtgttccttgtttggaagattatttcctctgaatttctgggcttggtcttccagttggcatttgcctgaagttgtattgaaacaatttaatgaaaatattaaatatttggtttcaaaaggcagatttatcttctcccaacattctgttatttctgatacttttgaaaaactaataaaaactaataaaagaagcgtaaaaagtgagtttacatgttgaggaaaaaaatggcccaatatgctcatcactgataaatgctccctggccttaaaaactaccaacatataatatatatgctgtcttaaaagttaatgatccaagtggcacctctctgaacctactttggcttgggaggctgcccagttaaaacaaaaataagttaatggtacagaaagagaatgaaaaatgaaagcctccttttatcctatcatcctaattccttttcccagtaataatgactgctgtgttggattccttctgcaaataaaagtgtatacatatatgtagcaaatcttacttaaacaaaagggtttcttaa

SEQ ID NO: 5499 - DNA, 2039 bp, Homo sapiens
  source 1..2039: mol_type = unassigned DNA
gaaggttcgtgaaggcagtgagggcttaccgttattacactgcggccggccagaatccgggtccatccgtccttcccgagccaacccagacacagcggagtttgccatgcccgagaatgtggcaccccggagcggggcgactgccggggctgccggcggccgcgggaaaggcgcctatcaggaccgcgacaagccagcccagatccgcttcagcaacatttccgccgccaaagaagcagcccagtggagggatccttatttctgtttttctgccgatgatcgccaacccggagtatggaggcctttggacttgccccattttgcatcttaatctcccttagtttttcatcctgcactgtgcatcattcatattggagccgaaagcagttcaaaatgccgaggattgcatgcagtcttcactagggatctgacgcttgagggctgtcgcttattgcttattggaactgcggttgctgatgctattagaacaagccttggaccaaaaggaatggataaaatgattcaagatggaaaaggtgatgtaaccattacaaatgatggtgctaccattctgaaacaaatgcaagtattacatccagcagccagaatgctggtggagctgtctaaggctcaagatatagaagcaggagatggcaccacatcagtagtcatcattgctggctccctcttagattcttgtaccaagcttcttcagaaagggattcatccaaccatcatttctgagtcattccagaaggccctggaaaagggcattgaaatcttgactgacatgtctcgacctgtggaactgagtgacagagaaactttgttaaatagtgcaaccacttcactgaactcaaaggtggtttctcagtattcaagtctgctttctccaatgagtgtaaatgcagtgatgaaagtgattgacccagccacagccaccagtgtagatcttagagatattaaaatagttaagaagcttggtgggacaattgatgactgtgagttggtggaagggctggttctcacccaaaaagtgtcaaattctggcataaccagagttgaaaaggccaagattgggcttattcagttttgcttatctgctcccaaaacagacatggataatcaaatagtggtttctgactatgcccagatggaccgagtgctgcgagaagagagagcctatattttaaatttagtgaagcaaattaaaaaaacaggatgtaatgtccttctcatacagaaatctattctaagagatgctcttagtgatcttgcattacactttctgaataaaatgaagatcatggtgattaaggatattgaaagagaagacattgaattcatttgtaagacaattggaaccaagccagttgctcatattgaccaatttactgctgacatgctgggttctgctgagttagctgaggaggtcaatttaaatggttctggcaaactgctcaagattacaggctgtgccagccctggaaaaacagttacaattgttgttcgtggttctaacaaactggtgattgaagaagctgagcgctccattcatgatgccctatgtgttattcgttgtttagtgaagaagagggctcttattgcaggaggtggtgctccagaaatagagttggccctacgattaactgaatattcacgaacactgagtggtatggaatcctactgcgttcgtgcttttgcagatgctatggaggtcattccatctacactagctgaaaatgccggcctgaatcccatttctacagtaacagaactaagaaaccggcatgcccagggagaaaaaactgcaggcattaatgtccgaaagggtggtatttccaacattttggaggaactggttgtccagcctctgttggtatcagtcagtgctctgactcttgcaactgaaactgttcggagcattctgaaaatagatgatgtggtaaacactcgataatctggataactgactagcaccattatgatcaccagtattgtggctggaatggaagaagatcaccttggtgttccttgtt

SEQ ID NO: 5500 - DNA, 1935 bp, Homo sapiens
  source 1..1935: mol_type = unassigned DNA
cttctccgcctccgcctcctcccgacgccggcgccgctttctggaaggttcgtgaaggcagtgagggcttaccgttattacactgcggccggccagaatccgggtccatccgtccttcccgagccaacccagacacagcggagtttgccatgcccgagaatgtggcaccccggagcggggcgactgccggggctgccggcggccgcgggaaaggcgcctatcaggaccgcgacaagccagcccagatccgcttcagcaacatttccgccgccaaagcggttgctgatgctattagaacaagccttggaccaaaaggaatggataaaatgctggtggagctgtctaaggctcaagatatagaagcaggagatggcaccacatcagtagtcatcattgctggctccctcttagattcttgtaccaagcttcttcagaaagggattcatccaaccatcatttctgagtcattccagaaggccctggaaaagggcattgaaatcttgactgacatgtctcgacctgtggaactgagtgacagagaaactttgttaaatagtgcaaccacttcactgaactcaaaggtggtttctcagtattcaagtctgctttctccaatgagtgtaaatgcagtgatgaaagtgattgacccagccacagccaccagtgtagatcttagagatattaaaatagttaagaagcttggtgggacaattgatgactgtgagttggtggaagggctggttctcacccaaaaagtgtcaaattctggcataaccagagttgaaaaggccaagattgggcttattcagttttgcttatctgctcccaaaacagacatggataatcaaatagtggtttctgactatgcccagatggaccgagtgctgcgagaagagagagcctatattttaaatttagtgaagcaaattaaaaaaacaggatgtaatgtccttctcatacagaaatctattctaagagatgctcttagtgatcttgcattacactttctgaataaaatgaagatcatggtgattaaggatattgaaagagaagacattgaattcatttgtaagacaattggaaccaagccagttgctcatattgaccaatttactgctgacatgctgggttctgctgagttagctgaggaggtcaatttaaatggttctggcaaactgctcaagattacaggctgtgccagccctggaaaaacagttacaattgttgttcgtggttctaacaaactggtgattgaagaagctgagcgctccattcatgatgccctatgtgttattcgttgtttagtgaagaagagggctcttattgcaggaggtggtgctccagaaatagagttggccctacgattaactgaatattcacgaacactgagtggtatggaatcctactgcgttcgtgcttttgcagatgctatggaggtcattccatctacactagctgaaaatgccggcctgaatcccatttctacagtaacagaactaagaaaccggcatgcccagggagaaaaaactgcaggcattaatgtccgaaagggtggtatttccaacattttggaggaactggttgtccagcctctgttggtatcagtcagtgctctgactcttgcaactgaaactgttcggagcattctgaaaatagatgatgtggtaaacactcgataatctggataactgactagcaccattatgatcaccagtattgtggctggaatggaagaagatcaccttggtgttccttgtttggaagattatttcctctgaatttctgggcttggtcttccagttggcatttgcctgaagttgtattgaaacaatttaatgaaaatattaaatatttggtttcaaaaggcagatttatcttctcccaacattctgttatttctgatacttttgaaaaactaataaaaactaataaaag

SEQ ID NO: 5501 - DNA, 1619 bp, Homo sapiens
  source 1..1619: mol_type = unassigned DNA
acacagcggagtttgccatgcccgagaatgtggcaccccggagcggggcgactgccggggctgccggcggccgcgggaaaggcgcctatcaggaccgcgacaagccagcccagatccgcttcagcaacatttccgccgccaaagcggttgctgatgctattagaacaagccttggaccaaaaggaatggataaaatgattcaagatggaaaaggtgatgtaaccattacaaatgatggtgctaccattctgaaacaaatgcaagtattacatccagcagccagaatgggattcatccaaccatcatttctgagtcattccagaaggccctggaaaagggcattgaaatcttgactgacatgtctcgacctgtggaactgagtgacagagaaactttgttaaatagtgcaaccacttcactgaactcaaaggtggtttctcagtattcaagtctgctttctccaatgagtgtaaatgcagtgatgaaagtgattgacccagccacagccaccagtgtagatcttagagatattaaaatagttaagaagcttggtgggacaattgatgactgtgagttggtggaagggctggttctcacccaaaaagtgtcaaattctggcataaccagagttgaaaaggccaagattgggcttattcagttttgcttatctgctcccaaaacagacatggataatcaaatagtggtttctgactatgcccagatggaccgagtgctgcgagaagagagagcctatattttaaatttagtgaagcaaattaaaaaaacaggatgtaatgtccttctcatacagaaatctattctaagagatgctcttagtgatcttgcattacactttctgaataaaatgaagatcatggtgattaaggatattgaaagagaagacattgaattcatttgtaagacaattggaaccaagccagttgctcatattgaccaatttactgctgacatgctgggttctgctgagttagctgaggaggtcaatttaaatggttctggcaaactgctcaagattacaggctgtgccagccctggaaaaacagttacaattgttgttcgtggttctaacaaactggtgattgaagaagctgagcgctccattcatgatgccctatgtgttattcgttgtttagtgaagaagagggctcttattgcaggaggtggtgctccagaaatagagttggccctacgattaactgaatattcacgaacactgagtggtatggaatcctactgcgttcgtgcttttgcagatgctatggaggtcattccatctacactagctgaaaatgccggcctgaatcccatttctacagtaacagaactaagaaaccggcatgcccagggagaaaaaactgcaggcattaatgtccgaaagggtggtatttccaacattttggaggaactggttgtccagcctctgttggtatcagtcagtgctctgactcttgcaactgaaactgttcggagcattctgaaaatagatgatgtggtaaacactcgataatctggataactgactagcaccattatgatcaccagtattgtggctggaatggaagaagatcaccttggtgttccttgtttggaagattatt

SEQ ID NO: 5502 - DNA, 3675 bp, Homo sapiens
  source 1..3675: mol_type = unassigned DNA
aaaaaaaaaaaaaaccggaaatgggtcctaccatcttctcggagccggagtgcgaagaaataaagaaatagtgctttaagtcaatgaattcctccttgggacccactatcgagaaactatcagtggtaacgttttaaaaaatgacaaattcaatctgctcttgacttgtgtgtcctaagatttccactaagtgtcttcaaacctccccctccccggcttcctggataatagaagttcccgaaggccgccgattccagaagatactgtctggcgtgaaattagtctcagtagaaacataagtcccgcgcgtcttgtgctgcgcgtgcgcaagcttttgggccctcccgagaaagggaagtgcattctcgcttccgtagcggtctccgccggttggggggaagtaattccggttgttgcaccatggcgtccatggggaccctcgccttcgatgaatatgggcgccctttcctcatcatcaaggatcaggaccgcaagtcccgtcttatgggacttgaggccctcaagtctcatataatggcagcaaaggctgtagcaaatacaatgagaacatcacttggaccaaatgggcttgataagatgatggtggataaggatggagatgtgactgtaactaatgatggggccaccatcttaagcatgatggatgttgatcatcagattgccaagctgatggtggaactgtccaagtctcaggatgatgaaattggagatggaaccacaggagtggttgtcctggctggtgccttgttagaagaagcggagcaattgctagaccgaggcattcacccaatcagaatagccgatggctatgagcaggctgctcgtgttgctattgaacacctggacaagatcagcgatagcgtccttgttgacataaaggacaccgaacccctgattcagacagcaaaaaccacgctgggctccaaagtggtcaacagttgtcaccgacagatggctgagattgctgtgaatgccgtcctcactgtagcagatatggagcggagagacgttgactttgagcttatcaaagtagaaggcaaagtgggcggcaggctggaggacactaaactgattaagggcgtgattgtggacaaggatttcagtcacccacagatgccaaaaaaagtggaagatgcgaagattgcaattctcacatgtccatttgaaccacccaaaccaaaaacaaagcataagctggatgtgacctctgtcgaagattataaagcccttcagaaatacgaaaaggagaaatttgaagagatgattcaacaaattaaagagactggtgctaacctagcaatttgtcagtggggctttgatgatgaagcaaatcacttacttcttcagaacaacttgcctgcggttcgctgggtaggaggacctgaaattgagctgattgccatcgcaacaggagggcggatcgtccccaggttctcagagctcacagccgagaagctgggctttgctggtcttgtacaggagatctcatttgggacaactaaggataaaatgctggtcatcgagcagtgtaagaactccagagctgtaaccatttttattagaggaggaaataagatgatcattgaggaggcgaaacgatcccttcacgatgctttgtgtgtcatccggaacctcatccgcgataatcgtgtggtgtatggaggaggggctgctgagatatcctgtgccctggcagttagccaagaggcggataagtgccccaccttagaacagtatgccatgagagcgtttgccgacgcactggaggtcatccccatggccctctctgaaaacagtggcatgaatcccatccagactatgaccgaagtccgagccagacaggtgaaggagatgaaccctgctcttggcatcgactgtttgcacaaggggacaaatgatatgaagcaacagcatgtcatagaaaccttgattggcaaaaagcaacagatatctcttgcaacacaaatggttagaatgattttgaagattgatgacattcgtaagcctggagaatctgaagaatgaagacattgagaaaactatgtagcaagatccacttctgtgattaagtaaatggatgtctcgtgatgcatctacagttatttattgttacatccttttccagacactgtagatgctataataaaaatagctgtttggtaaccatagtttcacttgttcaaagctgtgtaatcgtgggggtaccatctcaactgcttttgtattcattgtattaaaagaatctgtttaaacaacctttatcttctcttcgggtttaagaaacgtttattgtaacagtaattaaatgctgccttaattgaaggggtttgggtggatttttttttctcaaaataagctgtagggactattttaacagcttaaacaggagctctcaagatgcactttcatattgagaggaatatgggcttgatcctcttcctatctaaatgggtgggccatttgattgtagagggtccaccacagaattatgggatgccttaagtgctgttactaggttgctcacagcctaacctggcgtgttgtttagggctgatggagacccatgtgagcctttgctttcctctggccccggccccaccctgaacacagctcatacacagaatcaggaccagcatgtgcagagctggccaccagcacaggcttagggcagttcagaacccacttgtttccctatcagagggacacagtgaagtggaggttaaagtaaattacaggaaataagggagaaatcttgcagttaccatgttcagatagagtgactgaaattaattgtacttactaaagtattaactagctaacagtgatgggccaagacgctccgagaactctaccgggattgtctgttctgacaacccagtgaggcagatacactttcttactgctcacatcttacaggtgagtactcataattggccagcatctcaccaccagcaagtagtagggccaggtcaatcccaggcagtctgaccccagagtggcccagctcatcccctactctgttatttgcttgttaatgattctctagattttctaaaataatgtttcttagcattgtgatgataaagctcatgatgaactttatcactagttatgccaccttaactagtcagatttcctagaattaggaaatggtgactcttgtctaaatttggttaagtgatgaatttgggttaccgtctcatgtgaacctggagattcaccagtcttaacttttgggtcattgtgttttctctacattcatgcattggatgttttgctaaataactcctgtggatttaggaatgtgtgctaatagcaatcttcctaattttcatgtttatatggaactatgcagttgagtattgaaagctttaaactgagtttatttacaaggactgagtctagcctacagagaacatacagcagccttctttggaccacagtcttatccgaggggtctgtggttgtatcagaagagccactaaaccaatccccctttccaaaattgaacctcacagacgttcctgttttttgtgattgagaaactggtcaatgaacaggaagacttagagatgtttcacaagcctttgatttttgtttcatttatttgtaataaacctcttccacgtgatgtcttttatttttcacgttcca

SEQ ID NO: 5503 - DNA, 1812 bp, Homo sapiens
  source 1..1812: mol_type = unassigned DNA
attctcgcttccgtagcggtctccgccggttggggggaagtaattccggttgttgcaccatggcgtccatggggaccctcgccttcgatgaatatgggcgccctttcctcatcatcaaggatcaggaccgcaagtcccgtcttatgggacttgaggccctcaagtctcatataatggcagcaaaggctgtagcaaatacaatgagaacatcacttggaccaaatgggcttgataagatgatggtggataaggatggagatgtgactgtaactaatgatgaaattggagatggaaccacaggagtggttgtcctggctggtgccttgttagaagaagcggagcaattgctagaccgaggcattcacccaatcagaatagccgatggctatgagcaggctgctcgtgttgctattgaacacctggacaagatcagcgatagcgtccttgttgacataaaggacaccgaacccctgattcagacagcaaaaaccacgctgggctccaaagtggtcaacagttgtcaccgacagatggctgagattgctgtgaatgccgtcctcactgtagcagatatggagcggagagacgttgactttgagcttatcaaagtagaaggcaaagtgggcggcaggctggaggacactaaactgattaagggcgtgattgtggacaaggatttcagtcacccacagatgccaaaaaaagtggaagatgcgaagattgcaattctcacatgtccatttgaaccacccaaaccaaaaacaaagcataagctggatgtgacctctgtcgaagattataaagcccttcagaaatacgaaaaggagaaatttgaagagatgattcaacaaattaaagagactggtgctaacctagcaatttgtcagtggggctttgatgatgaagcaaatcacttacttcttcagaacaacttgcctgcggttcgctgggtaggaggacctgaaattgagctgattgccatcgcaacaggagggcggatcgtccccaggttctcagagctcacagccgagaagctgggctttgctggtcttgtacaggagatctcatttgggacaactaaggataaaatgctggtcatcgagcagtgtaagaactccagagctgtaaccatttttattagaggaggaaataagatgatcattgaggaggcgaaacgatcccttcacgatgctttgtgtgtcatccggaacctcatccgcgataatcgtgtggtgtatggaggaggggctgctgagatatcctgtgccctggcagttagccaagaggcggataagtgccccaccttagaacagtatgccatgagagcgtttgccgacgcactggaggtcatccccatggccctctctgaaaacagtggcatgaatcccatccagactatgaccgaagtccgagccagacaggtgaaggagatgaaccctgctcttggcatcgactgtttgcacaaggggacaaatgatatgaagcaacagcatgtcatagaaaccttgattggcaaaaagcaacagatatctcttgcaacacaaatggttagaatgattttgaagattgatgacattcgtaagcctggagaatctgaagaatgaagacattgagaaaactatgtagcaagatccacttctgtgattaagtaaatggatgtctcgtgatgcatctacagttatttattgttacatccttttccagacactgtagatgctataataaaaatagctgtttggtaaccatagtttcacttgttcaaagctgtgtaatcgtgggggtaccatctcaactgcttttgtattcattgta

SEQ ID NO: 5504 - DNA, 1933 bp, Homo sapiens
  source 1..1933: mol_type = unassigned DNA
aaaaaaccggaaatgggtcctaccatcttctcggagccggagtgcgaagaaataaagaaatagtgctttaagtcaatgaattcctccttgggacccactatcgagaaactatcagtgtctcatataatggcagcaaaggctgtagcaaatacaatgagaacatcacttggaccaaatgggcttgataagatgatggtggataaggatggagatgtgactgtaactaatgatggggccaccatcttaagcatgatggatgttgatcatcagattgccaagctgatggtggaactgtccaagtctcaggatgatgaaattggagatggaaccacaggagtggttgtcctggctggtgccttgttagaagaagcggagcaattgctagaccgaggcattcacccaatcagaatagccgatggctatgagcaggctgctcgtgttgctattgaacacctggacaagatcagcgatagcgtccttgttgacataaaggacaccgaacccctgattcagacagcaaaaaccacgctgggctccaaagtggtcaacagttgtcaccgacagatggctgagattgctgtgaatgccgtcctcactgtagcagatatggagcggagagacgttgactttgagcttatcaaagtagaaggcaaagtgggcggcaggctggaggacactaaactgattaagggcgtgattgtggacaaggatttcagtcacccacagatgccaaaaaaagtggaagatgcgaagattgcaattctcacatgtccatttgaaccacccaaaccaaaaacaaagcataagctggatgtgacctctgtcgaagattataaagcccttcagaaatacgaaaaggagaaatttgaagagatgattcaacaaattaaagagactggtgctaacctagcaatttgtcagtggggctttgatgatgaagcaaatcacttacttcttcagaacaacttgcctgcggttcgctgggtaggaggacctgaaattgagctgattgccatcgcaacaggagggcggatcgtccccaggttctcagagctcacagccgagaagctgggctttgctggtcttgtacaggagatctcatttgggacaactaaggataaaatgctggtcatcgagcagtgtaagaactccagagctgtaaccatttttattagaggaggaaataagatgatcattgaggaggcgaaacgatcccttcacgatgctttgtgtgtcatccggaacctcatccgcgataatcgtgtggtgtatggaggaggggctgctgagatatcctgtgccctggcagttagccaagaggcggataagtgccccaccttagaacagtatgccatgagagcgtttgccgacgcactggaggtcatccccatggccctctctgaaaacagtggcatgaatcccatccagactatgaccgaagtccgagccagacaggtgaaggagatgaaccctgctcttggcatcgactgtttgcacaaggggacaaatgatatgaagcaacagcatgtcatagaaaccttgattggcaaaaagcaacagatatctcttgcaacacaaatggttagaatgattttgaagattgatgacattcgtaagcctggagaatctgaagaatgaagacattgagaaaactatgtagcaagatccacttctgtgattaagtaaatggatgtctcgtgatgcatctacagttatttattgttacatccttttccagacactgtagatgctataataaaaatagctgtttggtaaccatagtttcacttgttcaaagctgtgtaatcgtgggggtaccatctcaactgcttttgtattcattgtattaaaagaatctgtttaaacaacctttatcttctcttcgggtttaagaaacgtttattgtaacagtaattaaatgctgccttaattg

SEQ ID NO: 5505 - DNA, 1939 bp, Homo sapiens
  source 1..1939: mol_type = unassigned DNA
gtgctccccggaaaggtcgagaatctccgtctccctgcggtctccggccgctcagcccgcttactgagctcgggagacgccggcgcctaatcctgggctcggaatgtgggggccagccaggctgggccgccagcgcccttcggagctgggtggggccgctcagtccggtcgcccgcgggagcaaagcgggaccgcctccccgcccggctcctccagcctgacggccgcgtgggactgcgctccagtgggagggcgccggggagatgctctgtcacctgtcggttaaggcgctgctgcttaacctttcgctggtccacccgcaacggcccttccgttttctttgtcactcgtaaagtctcatataatggcagcaaaggctgtagcaaatacaatgagaacatcacttggaccaaatgtcctggctggtgccttgttagaagaagcggagcaattgctagaccgaggcattcacccaatcagaatagccgatggctatgagcaggctgctcgtgttgctattgaacacctggacaagatcagcgatagcgtccttgttgacataaaggacaccgaacccctgattcagacagcaaaaaccacgctgggctccaaagtggtcaacagttgtcaccgacagatggctgagattgctgtgaatgccgtcctcactgtagcagatatggagcggagagacgttgactttgagcttatcaaagtagaaggcaaagtgggcggcaggctggaggacactaaactgattaagggcgtgattgtggacaaggatttcagtcacccacagatgccaaaaaaagtggaagatgcgaagattgcaattctcacatgtccatttgaaccacccaaaccaaaaacaaagcataagctggatgtgacctctgtcgaagattataaagcccttcagaaatacgaaaaggagaaatttgaagagatgattcaacaaattaaagagactggtgctaacctagcaatttgtcagtggggctttgatgatgaagcaaatcacttacttcttcagaacaacttgcctgcggttcgctgggtaggaggacctgaaattgagctgattgccatcgcaacaggagggcggatcgtccccaggttctcagagctcacagccgagaagctgggctttgctggtcttgtacaggagatctcatttgggacaactaaggataaaatgctggtcatcgagcagtgtaagaactccagagctgtaaccatttttattagaggaggaaataagatgatcattgaggaggcgaaacgatcccttcacgatgctttgtgtgtcatccggaacctcatccgcgataatcgtgtggtgtatggaggaggggctgctgagatatcctgtgccctggcagttagccaagaggcggataagtgccccaccttagaacagtatgccatgagagcgtttgccgacgcactggaggtcatccccatggccctctctgaaaacagtggcatgaatcccatccagactatgaccgaagtccgagccagacaggtgaaggagatgaaccctgctcttggcatcgactgtttgcacaaggggacaaatgatatgaagcaacagcatgtcatagaaaccttgattggcaaaaagcaacagatatctcttgcaacacaaatggttagaatgattttgaagattgatgacattcgtaagcctggagaatctgaagaatgaagacattgagaaaactatgtagcaagatccacttctgtgattaagtaaatggatgtctcgtgatgcatctacagttatttattgttacatccttttccagacactgtagatgctataataaaaatagctgtttggtaaccatagtttcacttgttcaaagctgtgtaatcgtgggggtaccatctcaactgcttttgtattcattgtattaaaagaatctgtttaaac

SEQ ID NO: 5506 - DNA, 1728 bp, Homo sapiens
  source 1..1728: mol_type = unassigned DNA
ataagtcccgcgcgtcttgtgctgcgcgtgcgcaagcttttgggccctcccgagaaagggaagtgcattctcgcttccgtagcggtctccgccggttggggggaagtaattccggttgttgcaccatggcgtccatggggaccctcgccttcgatgaatatgggcgccctttcctcatcatcaaggatcaggaccgcaagtcccgtcttatgggacttgaggccctcaagtctcatataatggcagcaaaggctgtagcaaatacaatgagaacatcacttggaccaaatgtcctggctggtgccttgttagaagaagcggagcaattgctagaccgaggcattcacccaatcagaatagccgatggctatgagcaggctgctcgtgttgctattgaacacctggacaagatcagcgatagcgtccttgttgacataaaggacaccgaacccctgattcagacagcaaaaaccacgctgggctccaaagtggtcaacagttgtcaccgacagatggctgagattgctgtgaatgccgtcctcactgtagcagatatggagcggagagacgttgactttgagcttatcaaagtagaaggcaaagtgggcggcaggctggaggacactaaactgattaagggcgtgattgtggacaaggatttcagtcacccacagatgccaaaaaaagtggaagatgcgaagattgcaattctcacatgtccatttgaaccacccaaaccaaaaacaaagcataagctggatgtgacctctgtcgaagattataaagcccttcagaaatacgaaaaggagaaatttgaagagatgattcaacaaattaaagagactggtgctaacctagcaatttgtcagtggggctttgatgatgaagcaaatcacttacttcttcagaacaacttgcctgcggttcgctgggtaggaggacctgaaattgagctgattgccatcgcaacaggagggcggatcgtccccaggttctcagagctcacagccgagaagctgggctttgctggtcttgtacaggagatctcatttgggacaactaaggataaaatgctggtcatcgagcagtgtaagaactccagagctgtaaccatttttattagaggaggaaataagatgatcattgaggaggcgaaacgatcccttcacgatgctttgtgtgtcatccggaacctcatccgcgataatcgtgtggtgtatggaggaggggctgctgagatatcctgtgccctggcagttagccaagaggcggataagtgccccaccttagaacagtatgccatgagagcgtttgccgacgcactggaggtcatccccatggccctctctgaaaacagtggcatgaatcccatccagactatgaccgaagtccgagccagacaggtgaaggagatgaaccctgctcttggcatcgactgtttgcacaaggggacaaatgatatgaagcaacagcatgtcatagaaaccttgattggcaaaaagcaacagatatctcttgcaacacaaatggttagaatgattttgaagattgatgacattcgtaagcctggagaatctgaagaatgaagacattgagaaaactatgtagcaagatccacttctgtgattaagtaaatggatgtctcgtgatgcatctacagttatttattgttacatccttttccagacactgtagatgctataataaaaatagctgtttggtaaccat

SEQ ID NO: 5507 - DNA, 1997 bp, Homo sapiens
  source 1..1997: mol_type = unassigned DNA
atgtgctccccggaaaggtcgagaatctccgtctccctgcggtctccggccgctcagcccgcttactgagctcgggagacgccggcgcctaatcctgggctcggaatgtgggggccagccaggctgggccgccagcgcccttcggagctgggtggggccgctcagtccggtcgcccgcgggagcaaagcgggaccgcctccccgcccggctcctccagcctgacggccgcgtgggactgcgctccagtgggagggcgccggggagatgctctgtcacctgtcggttaaggcgctgctgcttaacctttcgctggtccacccgcaacggcccttccgttttctttgtcactcgtaaagtctcatataatggcagcaaaggctgtagcaaatacaatgagaacatcacttggaccaaatgggcttgataagatgatggtggataaggatggagatgtgactgtaactaatgatggggccaccatcttaagcatgatggatgttgatcatcagattgccaagctgatggtggaactgtccaagtctcaggatgatgaaattggagatggaaccacaggagtggttgtcctggctggtgccttgttagaagaagcggagcaattgctagaccgaggcattcacccaatcagaatagccgatggctatgagcaggctgctcgtgttgctattgaacacctggacaagatcagcgatagcgtccttgttgacataaaggacaccgaacccctgattcagacagcaaaaaccacgctgggctccaaagtggtcaacagttgtcaccgacagatggctgagattgctgtgaatgccgtcctcactgtagcagatatggagcggagagacgttgactttgagcttatcaaagtagaaggcaaagtgggcggcaggctggaggacactaaactgattaagggcgtgattgtggacaaggatttcagtcacccacagatgccaaaaaaagtggaagatgcgaagattgcaattctcacatgtccatttgaaccacccaaaccaaaaacaaagcataagctggatgtgacctctgtcgaagattataaagcccttcagaaatacgaaaaggagaaatttgaagagatgattcaacaaattaaagagactggtgctaacctagcaatttgtcagtggggctttgatgatgaagcaaatcacttacttcttcagaacaacttgcctgcggttcgctgggtaggaggacctgaaattgagctgattgccatcgcaacaggagggcggatcgtccccaggttctcagagctcacagccgagaagctgggctttgctggtcttgtacaggagatctcatttgggacaactaaggataaaatgctggtcatcgagcagtgtaagaactccagagctgtaaccatttttattagaggaggaaataagatgatcattgaggaggcgaaacgatcccttcacgatgctttgtgtgtcatccggaacctcatccgcgataatcgtgtggtgtatggaggaggggctgctgagatatcctgtgccctggcagttagccaagaggcggataagtgccccaccttagaacagtatgccatgagagcgtttgccgacgcactggaggtcatccccatggccctctctgaaaacagtggcatgaatcccatccagactatgaccgaagtccgagccagacaggtgaaggagatgaaccctgctcttggcatcgactgtttgcacaaggggacaaatgatatgaagcaacagcatgtcatagaaaccttgattggcaaaaagcaacagatatctcttgcaacacaaatggttagaatgattttgaagattgatgacattcgtaagcctggagaatctgaagaatgaagacattgagaaaactatgtagcaagatccacttctgtgattaagtaaatggatgtctcgtgatgcatctacagttatttattgttacatccttttccagacactgtagatgctataat

SEQ ID NO: 5508 - DNA, 1814 bp, Homo sapiens
  source 1..1814: mol_type = unassigned DNA
ggccgaggctcaagagagcgtggcgtcgcattgccgtttttgctcagaatcgcgactaaggctttttttttttctccctctgaacggttaggctatggctgcgataaaggccgtcaactccaaggctgaggtggcgcgggcccgggcagctttggctgtcaatatatgcgccgcccgagggctgcaggatgtgctgcggaccaacttgggtcctaaaggcaccatgaaaatgcttgtttctggtgcaggtgacatcaaactcaccaaagatggcaatgtgctgctcgatgagatgcaaattcaacatccaacagcttccttgatagcaaaagtagcaacagctcaggatgacgtcacaggagatggtactacttcaaatgttctaattattggagagttattaaaacaagctgacctgtacatttctgagggcctgcaccctagaataatagctgaaggatttgaagctgcaaagataaaagcacttgaagttttggaggaagttaaagtgacaaaggagatgaaaagaaaaatcctcttagatgtagctagaacatcattacaaactaaagttcatgctgaactggctgatgtcttaacagaggttgtggtggattctgttttggctgttagaagaccaggttaccctattgatctcttcatggtagaaataatggagatgaagcataaattaggaacagatacaaagttgatccaaggattagttttggatcatggtgcccgtcatccagatatgaagaagcgagtagaagatgcatttatccttatttgcaacgtttcactggaatatgaaaaaacagaggtgaactctggtttcttttataagactgcagaagagaaagagaaattggtaaaagctgaaagaaaatttattgaagatagagtacaaaaaataatagacctgaaggacaaagtctgtgctcagtcaaataaaggatttgtcgtcattaatcaaaagggaattgatccattttccttagattctcttgcaaaacatggaatagtagctcttcgcagagcaaaaagaagaaatatggaaagactctctcttgcttgtggtggaatggccgtgaattcttttgaagatctcactgtagattgcttgggacatgctggtcttgtgtatgagtatacattaggtgaagaaaagttcacttttattgaggagtgtgttaacccttgctctgttaccttgttggttaaaggaccaaataagcatactctcacacaagtcaaggatgccataagagatggacttcgtgctatcaaaaatgccattgaagatggttgtatggttcctggagctggtgcaattgaagtggcaatggctgaagctcttgttacatataagaacagtataaaaggaagagctcgtcttggagtccaagcttttgctgatgccttactcattattcccaaggttcttgctcagaatgctggttatgacccacaggaaacattagtaaaagttcaggctgagcatgtcgagtcaaaacaacttgtgggcgtagatttgaatacaggtgagccaatggtagcagcagatgcaggagtttgggataattattgtgtaaaaaaacaacttcttcactcttgcacagtgattgccaccaacattctcctggttgatgaaattatgcgagctgggatgtcttctctcaaatgatgattgaattcaaaatcaacccttctagaagatgaaatttagtacactttacatctgactactattgtgtagcctgagccattctgaatttctacacaataaatgcagtttatgtcttttgggtctt

SEQ ID NO: 5509 - DNA, 1676 bp, Homo sapiens
  source 1..1676: mol_type = unassigned DNA
aggctatggctgcgataaaggccgtcaactccaaggctgaggtggcgcgggcccgggcagctttggctgtcaatatatgcgccgcccgagggctgcaggatgtgctgcggaccaacttgggtcctaaaggcaccatgaaaatgcttgtttctggtgcaggtgacatcaaactcaccaaagatggcaatgtgctgctcgatgagatgcaaattcaacatccaacagcttccttgatagcaaaagtagcaacagctcaggatgacgtcacaggagatggtactacttcaaatgttctaattattggagagttattaaaacaagctgacctgtacatttctgagggcctgcaccctagaataatagctgaaggatttgaagctgcaaagataaaagcacttgaagttttggaggaagttaaagtgacaaaggagatgaaaagaaaaatcctcttagatgtagctagaacatcattacaaactaaagttcatgctgaactggctgatgtcttaacagaggttgtggtggattctgttttggctgttagaagaccaggttaccctattgatctcttcatggtagaaataatggagatgaagcataaattaggaacagatacaaaagaggtgaactctggtttcttttataagactgcagaagagaaagagaaattggtaaaagctgaaagaaaatttattgaagatagagtacaaaaaataatagacctgaaggacaaagtctgtgctcagtcaaataaaggatttgtcgtcattaatcaaaagggaattgatccattttccttagattctcttgcaaaacatggaatagtagctcttcgcagagcaaaaagaagaaatatggaaagactctctcttgcttgtggtggaatggccgtgaattcttttgaagatctcactgtagattgcttgggacatgctggtcttgtgtatgagtatacattaggtgaagaaaagttcacttttattgaggagtgtgttaacccttgctctgttaccttgttggttaaaggaccaaataagcatactctcacacaagtcaaggatgccataagagatggacttcgtgctatcaaaaatgccattgaagatggttgtatggttcctggagctggtgcaattgaagtggcaatggctgaagctcttgttacatataagaacagtataaaaggaagagctcgtcttggagtccaagcttttgctgatgccttactcattattcccaaggttcttgctcagaatgctggttatgacccacaggaaacattagtaaaagttcaggctgagcatgtcgagtcaaaacaacttgtgggcgtagatttgaatacaggtgagccaatggtagcagcagatgcaggagtttgggataattattgtgtaaaaaaacaacttcttcactcttgcacagtgattgccaccaacattctcctggttgatgaaattatgcgagctgggatgtcttctctcaaatgatgattgaattcaaaatcaacccttctagaagatgaaatttagtacactttacatctgactactattgtgtagcctgagccattctgaatttctacacaataaatgcagtttatgtcttttgggtcttaatagtctcaaaaatatttcatcaaggtataaagaacacaataaatacttttacagtaaagg

SEQ ID NO: 5510 - DNA, 1627 bp, Homo sapiens
  source 1..1627: mol_type = unassigned DNA
gctcagaatcgcgactaaggctttttttttttctccctctgaacggttaggctatggctgcgataaaggccgtcaactccaaggctgaggtggcgcgggcccgggcagctttggctgtcaatatatgcgccgcccgagggctgcaggatgtgctgcggaccaacttgggtcctaaaggcaccatgaaaatgcttgtttctggtgcaggtgacatcaaactcaccaaagatggcaatgtgctgctcgatgagatgggcctgcaccctagaataatagctgaaggatttgaagctgcaaagataaaagcacttgaagttttggaggaagttaaagtgacaaaggagatgaaaagaaaaatcctcttagatgtagctagaacatcattacaaactaaagttcatgctgaactggctgatgtcttaacagaggttgtggtggattctgttttggctgttagaagaccaggttaccctattgatctcttcatggtagaaataatggagatgaagcataaattaggaacagatacaaagttgatccaaggattagttttggatcatggtgcccgtcatccagatatgaagaagcgagtagaagatgcatttatccttatttgcaacgtttcactggaatatgaaaaaacagaggtgaactctggtttcttttataagactgcagaagagaaagagaaattggtaaaagctgaaagaaaatttattgaagatagagtacaaaaaataatagacctgaaggacaaagtctgtgctcagtcaaataaaggatttgtcgtcattaatcaaaagggaattgatccattttccttagattctcttgcaaaacatggaatagtagctcttcgcagagcaaaaagaagaaatatggaaagactctctcttgcttgtggtggaatggccgtgaattcttttgaagatctcactgtagattgcttgggacatgctggtcttgtgtatgagtatacattaggtgaagaaaagttcacttttattgaggagtgtgttaacccttgctctgttaccttgttggttaaaggaccaaataagcatactctcacacaagtcaaggatgccataagagatggacttcgtgctatcaaaaatgccattgaagatggttgtatggttcctggagctggtgcaattgaagtggcaatggctgaagctcttgttacatataagaacagtataaaaggaagagctcgtcttggagtccaagcttttgctgatgccttactcattattcccaaggttcttgctcagaatgctggttatgacccacaggaaacattagtaaaagttcaggctgagcatgtcgagtcaaaacaacttgtgggcgtagatttgaatacaggtgagccaatggtagcagcagatgcaggagtttgggataattattgtgtaaaaaaacaacttcttcactcttgcacagtgattgccaccaacattctcctggttgatgaaattatgcgagctgggatgtcttctctcaaatgatgattgaattcaaaatcaacccttctagaagatgaaatttagtacactttacatctgactactattgtgtagcctgagccattctgaatttctacacaataaatgcagtttatgtc

SEQ ID NO: 5511 - DNA, 629 bp, Homo sapiens
  source 1..629: mol_type = unassigned DNA
atttaaattctgcagctcagagattcacacagaagtctggacacaattcagaagagccacccagaaggagacaacaatgtccctgctacccgtgccatacacagaggctgcctctttgtctactggttctactgtgacaatcaaagggcgaccacttgcctgtttcttgaatgaaccatatctgcaggtggatttccacactgagatgaaggaggaatcagacattgtcttccatttccaagtgtgctttggtcgtcgtgtggtcatgaacagccgtgagtatggggcctggaagcagcaggtggaatccaagaatatgccctttcaggatggccaagaatttgaactgagcatctcagtgctgccagataagtaccaggtaatggtcaatggccaatcctcttacacctttgaccatagaatcaagcctgaggctgtgaagatggtgcaagtgtggagagatatctccctgaccaaatttaatgtcagctatttaaagagataaccagacttcatgttgccaaggaatccctgtctctacgtgaacttgggattccaaagccagctaacagcatgatcttttctcacttcaatccttactcctgctcattaaaacttaatcaaacttc

SEQ ID NO: 5512 - DNA, 2332 bp, Homo sapiens
  source 1..2332: mol_type = unassigned DNA
ccggaagtggggcggcgaccccggaagtccccgccgggtgcagcttggtcggttcgatcgccgccgggacctgacaccgcccggagttggcgtcccttctccctctccgagtgctgctcctgtcattgtggccatggacgttcacggcgaagcagctggagaagctggccaagaaggcggagaaggactccaaggcggagcaggccaaagtgaagaaggcccttctgcagaaaaatgtagagtgtgcccgtgtgtatgccgagaacgccatccgcaagaagaacgaaggtgtgaactggcttcggatggcgtcccgcgtagacgcagtggcctccaaggtgcagacagctgtgactatgaagggggtgaccaagaatatggcccaggtgaccaaagccctggacaaggccctgagcaccatggacctgcagaaggtctcctcagtgatggacaggttcgagcagcaggtgcagaacctggacgtccatacatcggtgatggaggactccatgagctcggccaccaccctgaccacgccgcaggagcaggtggacagcctcatcatgcagatcgccgaggagaatggcctggaggtgctggaccagctcagccagctgcccgagggcgcctctgccgtgggcgagagctctgtgcgcagccaggaggaccagctgtcacggaggttggccgccttgaggaactagccgtgccccgccggtgtgcaccgcctctgccccgtgatgtgctggaaggctcctgtcctctccccaccgcgtcttgcctttgtgctgaccccgcggggctgcggccggcagccactctgcgtctctcacctgccaggcctgcgtggccttagggttgttcctgttcttttaggttgggcggtgggtctgtgtcctggtgttgagtttctgcaaatttctgggggtgatttctgtgactctgggcccacagcggggaggccaagaggggccctgtggactttcacccagcactgtgggggccttcagactctggggcagcagacatgctgcttcccatcagccagagggggtcagggctgccctgttgccaaacaactccctgaggcctctccgcaccacctcagcgggcaggaggtcccaccatgtggacagacatagcccaaggaggcaccacaggtctatgtgtgctgggggatgtcaggtgccacccaacgctgtcctggtggtatttacaatgacatcctcctcctccatcactccaggggtggtgtctcggccgcccctaccagctggctgagccccctggcctcctgcgctccctcacttccctcagttcccaaagctgcccagtccatggggacagaaccgtcactcagatccacattcaagtgtgcccaccctgcagtcttcatcctcactcagctgctgcctctggaggtgcctttggccacatgtgctgtgctgtttgtctcctcgacagggagcctgtccaccagcaggctgcggtcccagcgggtgcgtctgcagctcctccccttgggcagcctggttctcccggaggacctttccttggggccctgcttcatgacgatgctgcctgtgtcaccctctaccatctgtaaacaactgggtgccttccccgaccacaccccaatgccttcccagcttggaagccaaggcagctgatgaagggagctcaggagagccgtcttcagctgggctggggttggggctgctgtgaggaaaacctgccattgtggccctggagagtcaccagcagctcttgggaaggacttgctgggaggctgagagaggctttgggcacagcctgctgtcttttccatttcctaaagtttacttcattgtcttgaggcttccaggttttgtttttgtttttgccaaagtagaaaaggcaggtggtgggcggctggcagggagtgcgggtccccgcccctcttcagtcctgccctcccctcctcagtcctgcccaccccgtgcagcccatgctgaggctgcagtggtgtcgtgggtgttacgtgcaggaacgtggagaccctgacgtgggctcactgcgtttggttttcttttcagaacttgggagcccccagggaggggctagtgttggtaggtcctagacgtggttccctccagcctccccaaaatcaaccctggtgttgagagaacgtccttctgtccatcgtgggtaacagccttggggagggtgcagagctctgcagagccatgggccaggtggggctgcctcagtcctgtccccttgggcactgaggagaggggcccattcacctttctcctagaatgctgttgtaaataaacaaatggatccctgg

SEQ ID NO: 5513 - DNA, 2483 bp, Homo sapiens
  source 1..2483: mol_type = unassigned DNA
agcgactcacaaaaggtcctcgcgccagcggcgtgcgtcaccatggcgaccgcgcgccgcgcagccgcgccccgcccctctggcgggaccggccaccatcctctcgcgagagcatcccgtgcgaccggaagtggggcggcgaccccggaagtccccgccgggtgcagcttggtcggttcgatcgccgccgggacctgacaccgcccggagttggcgtcccttctccctctccgagtgctgctcctgtcattgtggccatggacgataccctgttccagttgaagttcacggcgaagcagctggagaagctggccaagaaggcggagaaggactccaaggcggagcaggccaaagtgaagaaggcccttctgcagaaaaatgtagagtgtgcccgtgtgtatgccgagaacgccatccgcaagaagaacgaaggtgtgaactggcttcggatggcgtcccgcgtagacgcagtggcctccaaggtgcagacagctgtgactatgaagggggtgaccaagaatatggcccaggtgaccaaagccctggacaaggccctgagcaccatggacctgcagaaggtctcctcagtgatggacaggttcgagcagcaggtgcagaacctggacgtccatacatcggtgatggaggactccatgagctcggccaccaccctgaccacgccgcaggagcaggtggacagcctcatcatgcagatcgccgaggagaatggcctggaggtgctggaccagctcagccagctgcccgagggcgcctctgccgtgggcgagagctctgtgcgcagccaggaggaccagctgtcacggaggttggccgccttgaggaactagccgtgccccgccggtgtgcaccgcctctgccccgtgatgtgctggaaggctcctgtcctctccccaccgcgtcttgcctttgtgctgaccccgcggggctgcggccggcagccactctgcgtctctcacctgccaggcctgcgtggccttagggttgttcctgttcttttaggttgggcggtgggtctgtgtcctggtgttgagtttctgcaaatttctgggggtgatttctgtgactctgggcccacagcggggaggccaagaggggccctgtggactttcacccagcactgtgggggccttcagactctggggcagcagacatgctgcttcccatcagccagagggggtcagggctgccctgttgccaaacaactccctgaggcctctccgcaccacctcagcgggcaggaggtcccaccatgtggacagacatagcccaaggaggcaccacaggtctatgtgtgctgggggatgtcaggtgccacccaacgctgtcctggtggtatttacaatgacatcctcctcctccatcactccaggggtggtgtctcggccgcccctaccagctggctgagccccctggcctcctgcgctccctcacttccctcagttcccaaagctgcccagtccatggggacagaaccgtcactcagatccacattcaagtgtgcccaccctgcagtcttcatcctcactcagctgctgcctctggaggtgcctttggccacatgtgctgtgctgtttgtctcctcgacagggagcctgtccaccagcaggctgcggtcccagcgggtgcgtctgcagctcctccccttgggcagcctggttctcccggaggacctttccttggggccctgcttcatgacgatgctgcctgtgtcaccctctaccatctgtaaacaactgggtgccttccccgaccacaccccaatgccttcccagcttggaagccaaggcagctgatgaagggagctcaggagagccgtcttcagctgggctggggttggggctgctgtgaggaaaacctgccattgtggccctggagagtcaccagcagctcttgggaaggacttgctgggaggctgagagaggctttgggcacagcctgctgtcttttccatttcctaaagtttacttcattgtcttgaggcttccaggttttgtttttgtttttgccaaagtagaaaaggcaggtggtgggcggctggcagggagtgcgggtccccgcccctcttcagtcctgccctcccctcctcagtcctgcccaccccgtgcagcccatgctgaggctgcagtggtgtcgtgggtgttacgtgcaggaacgtggagaccctgacgtgggctcactgcgtttggttttcttttcagaacttgggagcccccagggaggggctagtgttggtaggtcctagacgtggttccctccagcctccccaaaatcaaccctggtgttgagagaacgtccttctgtccatcgtgggtaacagccttggggagggtgcagagctctgcagagccatgggccaggtggggctgcctcagtcctgtccccttgggcactgaggagaggggcccattcacctttctcctagaatgctgttgtaaataaacaaatggatccctggaaacttt

SEQ ID NO: 5514 - DNA, 3010 bp, Homo sapiens
  source 1..3010: mol_type = unassigned DNA
ggacttaccttaccttctctgccttcggcgcgcttctcagccgggccgccgacccaaaggagccgtccgactatgtctaacatggagaaacacctgttcaacctgaagttcgcggccaaagaactgagtaggagtgccaaaaaatgcgataaggaggaaaaggccgaaaaggccaaaattaaaaaggccattcagaagggcaacatggaagttgcgaggatacacgccgaaaatgccatccgccagaagaaccaggcggtgaatttcttgagaatgagtgcgcgagtcgatgcagtggctgccagggtccagacggcggtgacgatgggcaaggtgaccaagtcgatggctggtgtggttaagtcgatggatgcgacattgaagaccatgaatctggagaagatttctgctttgatggacaaattcgagcaccagtttgagactctggacgtccagacgcagcaaatggaagacacgatgagcagcacgacgacgctcaccactccccagaaccaagtggatatgctgctccaggaaatggcagatgaggcgggcctcgacctcaacatggagctgccgcagggccagaccggctccgtgggcacgagcgtggcttcggcggagcaggatgaactgtctcagagactggcccgccttcgggatcaagtgtgacggcagaacccgctctgaggtttcctggccatagccaccctttgaaatgctctctgtgtgttagagagatactataccctagaaactctgaacacgccagaatgctgaaatgcccttctacctttgggtttacagccccctccacataaattaagaaattcagtatttctgcactcttagctggattctaaagttctgtatagctcgtaatgatggtatttttatagcagccttttaacagaactagttaatttcgtgtatatgaatctttctcgaagatctggtcaaaactgtattcagtttcctgcccagaatgatcagattgaaggtggttggtttttattattatttagtgtgattgatagtatctagaatggcaggtggtgcataaaagttaaagagaggggaaagattacttagtttggttatacagttataaacaccatgcagtgtattcggtggactgtgctatttctgtttatcctttgggttttggtttttgttttttttttttttgccttcacagtgagactgcaaatgattgttctcataacgtatattattaataaatgtggtcctataatttatactgaaattaccttaggatatttttgcataatactctcttactgcttacattctataaatttttcacgtgataattgtctttgcgtaactgggaaaaatgccgaataacttcctttattatctggaaaaattaaatttgttcatttatattttctacttactaaattgagtttttaaaaagacttagtgtgacatttgacagtgtctttcaaacgaacttctctaacaagtttatagttattttcctgtttcaacactattagaagtcttataaattatgctaattagcatggcagtcatgttacacactcttaacattgccaaagaactgttgatttcgtttgagaaaaccctaggactgtgtgtgtgtaggttttgttttgattttaacaaccaaaaatagaaataaaattagaactgcgttttaagttctaatttgcatttattaatttgtccaaaagcaagaactcttggaaatccttgaaaatataagctggaatgttttacttagccatgcaagtcatttatgtatacatccagccagctggaaatctgagaagtaaagaggtaggactggaaggaaggagaaagcttgagtctttaaggctagagcccagctgtgctgcctgccatcttctcaggaatggcagtgcgtattttctggctgaaaagtaaagcatgtatccaccgctttctcatagcctcgaaacatggagaaaagcaacttgcttttgccttggcaagcatgctaacctaagttaattcaagttttttttaacttaccctttccttcactggaagatttttccataagagaattccattgtttcagaaaataattataggggcccttccaagttctttgaaagattcataaccaactattcactattataacatgtttcccagtgtaaatgagtaaggaaaaaaaaagtgtaacaggtgcgtgcagatgaggagtgaccctcatatttaagttattttatatttgactggacattgttcagaagtgtgctttaagggacacttgttagttgtctgcccagcatctctcaagaatatccctcctgtcctccacatggttgtgcagggccatgtgtgaagacagcatgagtcttaacccctcttttattttatttttgagacagagtctcgctctgttgcccaggctggagtgctgtggcgcgatctctgctcactgcaacctccacctcccgggttcaagtgattctcctgcctcagcctgccgagtagctggaattacaggtgtgcaccaccatgcccagctagtttttttgtatttttagtagagacagggtttcactatgttggccaggctggtcttgaactcctgacctcaggtgatccgcccacctcagcctcccaaagtgctgggattacaggcatgagccactgcacctggccttaacccctctttagattggaaaaaataattacaactttaaaaatagcttagtgttgaaccctttggtaaactaaagacccttttataatgcacatattcccaacaaaattaatatattttgtgagattaaacaatgcttgtatatgcttgaactttcttaaaatatgtccatgtcatactattatgaatgtacatttttatgagtcataaatattattttcaaaagcactacaggcccatgaattacttcctcacttttgcagttgattactgaaatgtaaatcacaagaatttgtcaattaaatcattttaaactgcatgtta

SEQ ID NO: 5515 - DNA, 907 bp, Homo sapiens
  source 1..907: mol_type = unassigned DNA
acgtcacgtcgtttaatccggaaacggcggcggcggcgacaggaccgaggggccttagttggtgggcaagtcggggatcccagaaagagaagcgtgacccggaagcggaaacgggtgtccgtcccagctccggcctgccagtgagcttctaccatcatggacctattgttcgggcgccggaagacgccagaggagctactgcggcagaaccagagggccctgaaccgtgccatgcgggagctggaccgcgagcgacagaaactagagacccaggagaagaaaatcattgcagacattaagaagatggccaagcaaggccagatggatgctgttcgcatcatggcaaaagacttggtgcgcacccggcgctatgtgcgcaagtttgtattgatgcgggccaacatccaggctgtgtccctcaagatccagacactcaagtccaacaactcgatggcacaagccatgaagggtgtcaccaaggccatgggcaccatgaacagacagctgaagttgccccagatccagaagatcatgatggagtttgagcggcaggcagagatcatggatatgaaggaggagatgatgaatgatgccattgatgatgccatgggtgatgaggaagatgaagaggagagtgatgctgtggtgtcccaggttctggatgagctgggacttagcctaacagatgagctgtcgaacctcccctcaactgggggctcgcttagtgtggctgctggtgggaaaaaagcagaggccgcagcctcagccctagctgatgctgatgcagacctggaggaacggcttaagaacctgcggagggactgagtgcccctgccactccgagataaccagtggatgcccaggatcttttaccacaacccctctgtaataaaagagatttgacact

SEQ ID NO: 5516 - DNA, 885 bp, Homo sapiens
  source 1..885: mol_type = unassigned DNA
ctggaccgtggatcccgggcgggcgtgcgggcggcagcgtacgaggccttctactcgcccgggtgtccggtgcctcgcttctccctgggaccctgtcgtcaacatcgaggcctgccagtgagcttctaccatcatggacctattgttcgggcgccggaagacgccagaggagctactgcggcagaaccagagggccctgaaccgtgccatgcgggagctggaccgcgagcgacagaaactagagacccaggagaagaaaatcattgcagacattaagaagatggccaagcaaggccagatggatgctgttcgcatcatggcaaaagacttggtgcgcacccggcgctatgtgcgcaagtttgtattgatgcgggccaacatccaggctgtgtccctcaagatccagacactcaagtccaacaactcgatggcacaagccatgaagggtgtcaccaaggccatgggcaccatgaacagacagctgaagttgccccagatccagaagatcatgatggagtttgagcggcaggcagagatcatggatatgaaggaggagatgatgaatgatgccattgatgatgccatgggtgatgaggaagatgaagaggagagtgatgctgtggtgtcccaggttctggatgagctgggacttagcctaacagatgagctgtcgaacctcccctcaactgggggctcgcttagtgtggctgctggtgggaaaaaagcagaggccgcagcctcagccctagctgatgctgatgcagacctggaggaacggcttaagaacctgcggagggactgagtgcccctgccactccgagataaccagtggatgcccaggatcttttaccacaacccctctgtaataaaagagatttgacacta

SEQ ID NO: 5517 - DNA, 2606 bp, Homo sapiens
  source 1..2606: mol_type = unassigned DNA
agaagtgacttctccaaaaagtgtgttagttcccggtcacctgagctccgggtgacgcggctgcggtagctgcggatacaagccttccgcgggtcctgcctggcgaccccgacctcctcctgctgtctctccgctccgccaccccgaacccgccaaggtcctgtccttttcctcctgtcctttgccagcgttgggccggaccgggccgagccgggccgcccgggcgcagtctttaaccatggcgtccctcttcaagaagaaaaccgtggatgatgtaataaaggaacagaatcgagagttacgaggtacacagagggctataatcagagatcgagcagctttagagaaacaagaaaaacagctggaattagaaattaagaaaatggccaagattggtaataaggaagcttgcaaagttttagccaaacaacttgtgcatctacggaaacagaagacgagaacttttgctgtaagttcaaaagttacttctatgtctacacaaacaaaagtgatgaattcccaaatgaagatggctggagcaatgtctactacagcaaaaacaatgcaggcagttaacaagaagatggatccacaaaagacattacaaacaatgcagaatttccagaaggaaaacatgaaaatggaaatgactgaagaaatgatcaatgatacacttgatgacatctttgacggttctgatgacgaagaagaaagccaggatattgtgaatcaagttcttgatgaaattggaattgaaatttctggaaagatggccaaagctccatcagctgctcgaagcttaccatctgcctctacttcaaaggctacaatctcagatgaagagattgaacggcaactcaaggctttaggagtagattagtcaaaagaagtcatactattttgcttacttataattatgtagtataaaccaagcacagtgcagatttcttttacaaaacacatgtattttgcaaaaaaaaaaaaaatgaagaccatgagtgaacagttgtttcctaacccatggctatttagaatcttttgccaaagaatgacaatgatgcaaaaatgggaacagtttggattttaattagaactgtttaggagtgatgatgtgtaaaaagttgacttctcttttgcatggcacagagaaattatattccttacttcatgtcagtttatgttctaaatctttttcactgaatataaaaatcttgttaaatgccattaggcaccaacttaaagagggttgtaaaaatattaaaagtatatcgttaattctgtatctgttgcttgtcttttgtaagtgattatgtgttatgaccataggtggttacagctgccaaattatttttaaatggtcaaaaagaagagtgctatttaaacatctgtcttaaacaaaaactgtcataacttttcttttttctttttccattaggagaacattctagttggtaaatttcaaaatgtgcttgacacctgccttaaatagcacagacctattgtgcacatctttaaattatttcagctggcagaaaagaattacatttaaaactgaaatcaaggcctcaatacaaagattatcctggctcttttctatctctgtgggcctaattgaaatatgtactcttattttagacacgcctctgttaaaacagaccaggttttcctggtctcagacctatgatgacttgtccctttgatgtcactactgtgaattgaatataattagtaaaaatagacgatgaataaataacactttatagtaagaaaacaatatattttggccatctaaaaatgagaattataattatatgaattataatttaaactgtttaattttgtttaatgtgtatattgaatcttccaaattgaagccattattctcaattaagtactacaactatgacaatgcttgacctacatttctaaaataaaaattcacattttttgataaataaactacagttttaccagaaattactatctaaatgtgtattagcagtattttttaaggtgaaattgccttggtatctaatgaatgtgtagacagggagataaaatgaaggattgccagactagttagaatagaatttaggattaggttagttttgaaaaatgatgttgtaatatatgggttctaacacatcctaccataaaaactggaggagatatgtgtaacctggttaatttgggatggtggacattttgggctaatactgacaaaatacatcttaggactagtatacatgtgacacggattgctaggaggaatgaaaaactaaactgtatagtttatattccgtaaaccattttataatgttcaaagattaggttttgttattgatagtattaaatacacagtttctcttaacagtgatgggtgaaaacattttaccggattatggaatgtttaccagaacatgttttgattcttgaatgtacataataatgccatctaacttatttacgttcttgtttacatgtgggagcttttgttttcaaaaattattttgttaaaaaatctcaataaagatttattattgttgttcttttcttaccttttttgctctttttggttcctgctaaaattaaaaattttatgcata

SEQ ID NO: 5518 - DNA, 894 bp, Homo sapiens
  source 1..894: mol_type = unassigned DNA
cgcaggcgccgcctagaagtgacttctccaaaaagtgtgttagttcccggtcacctgagctccgggtgacgcggctgcggtagctgcggatacaagccttccgcgggtcctgcctggcgaccccgacctcctcctgctgtctctccgctccgccaccccgaacccgccaaggtcctgtccttttcctcctgtcctttgccagcgttgggccggaccgggccgagccgggccgcccgggcgcagtctttaaccatggcgtccctcttcaagaagaaaaccgtggatggaattagaaattaagaaaatggccaagattggtaataaggaagcttgcaaagttttagccaaacaacttgtgcatctacggaaacagaagacgagaacttttgctgtaagttcaaaagttacttctatgtctacacaaacaaaagtgatgaattcccaaatgaagatggctggagcaatgtctactacagcaaaaacaatgcaggcagttaacaagaagatggatccacaaaagacattacaaacaatgcagaatttccagaaggaaaacatgaaaatggaaatgactgaagaaatgatcaatgatacacttgatgacatctttgacggttctgatgacgaagaagaaagccaggatattgtgaatcaagttcttgatgaaattggaattgaaatttctggaaagatggccaaagctccatcagctgctcgaagcttaccatctgcctctacttcaaaggctacaatctcagatgaagagattgaacggcaactcaaggctttaggagtagattagtcaaaagaagtcatactattttgcttacttataattatgtagtataaaccaagcacagtgcagatttcttttacaaaacacatgtattttgc

SEQ ID NO: 5519 - DNA, 3171 bp, Homo sapiens
  source 1..3171: mol_type = unassigned DNA
tgccgccgctccctactctgggggttgggactacctccttttccgcgggccccgcccaggcggctgcccgtgacctgcctgggcgcggggaactgaaagccggaaggggcaagacgggttcagttcgtcatggggctgtttggaaagacccaggagaagccgcccaaagaactggtcaatgagtggtcattgaagataagaaaggaaatgagagttgttgacaggcaaataagggatatccaaagagaagaagaaaaagtgaaacgatctgtgaaagatgctgccaagaagggccagaaggatgtctgcatagttctggccaaggagatgatcaggtcaaggaaggctgtgagcaagctgtatgcatccaaagcacacatgaactcagtgctcatggggatgaagaaccagctcgcggtcttgcgagtggctggttccctgcagaagagcacagaagtgatgaaggccatgcaaagtcttgtgaagattccagagattcaggccaccatgagggagttgtccaaagaaatgatgaaggctgggatcatagaggagatgttagaggacacttttgaaagcatggacgatcaggaagaaatggaggaagaagcagaaatggaaattgacagaattctctttgaaattacagcaggggccttgggcaaagcacccagtaaagtgactgatgcccttccagagccagaacctccaggagcgatggctgcctcagaggatgaggaggaggaggaagaggctctggaggccatgcagtcccggctggccacactccgcagctaggggctgcctaccccgctgggtgtgcacacactcctctcaagagctgccattttatgtgtctcttgcactacacctctgttgtgaggactaccattttggagaaggttctgtttgtctcttttcattctctgcccaggttttgggatcgcaaagggattgttcttataaaagtggcataaataaatgcatcatttttaggagtatagacagatatatcttattgtggggaggggaaagaaatccatctgctcatgaagcacttctgaaaatataggtgattgcctgaatgtcgaagactctacttttgtctataaaacactatataaatgaattttaataaatttttgctttagcacttggccccattgtagattgccctgtgcagtaaactttcaaggtgtcggctgccccagattgcttcatttgctgggtgtggaaagagttgctatggccaggcatatgggatttggaagctcagcagaagtgacttctgctctgtggttgctgctccccggctttcacagacatggtatggcagccattcttttatctatttaaccaagaggatgctggggaattgtgctgcttgtcctgttggctggtggctgcattatgtcctggggtgtgcatgtgggtctatttagagcttctgtcccttccttcccattgcaagttgcacccagatgagacagctgtagtactaggtctctttcacctctcattgcctgtccctgcttcgagctggttgtcttgtgcgtgggacatgggccttcctatctgtgttttctcaaagtcaggagctgaccaggagcacactaaggtgtggtcatgcatcataaccaacattcactcatctgggacattcttaagatacatttataaatcatttcagcagtagtactttgtatgtgttgagagtttacagagctctttgacatacgcgatcttagtctttacaaataaggaaaacagctcagtttgggaagtatcagagatgggattcaaacccagatcctctggtccaagttgtatgtgcactgaactaatcaggcaggaaaaaagcccagccactgtctcacagattgttttttgtatattgtagcaaaatcctgaaacaatggggtccttccagtctcatcatacaaaatggcaatcttggctgggtgcggtggttcatgcctataatcccagtgctttacaaggctgaggcaggaggctctcttgagaataggagttcaagaccagcctgggcaacatagcaagatcctgtctctccaaaaaaaaaaaaaaaaaaaaaaaaaaatttcatttttgagtccagaggaccctcctattactcttgatttcatcttcagagtgtagttaaaaaattattttaaataattatttttttaaatcagttgtaggttcacagcaaaagtggacaaaaagaaatttctcatatatcccctgccctcacacatgcatagcctcccaccactatcagtatcccacaccagagtggtacatttgttacaatcaataaacctccattgacacatcattatcacccaaagtccatagtttacatgaagattcactctggtgttgtacattgtatgggcttagacaaatgtatgatgatatctacaattatagaatcatacagaatagtttcactgccctaaaacttctctatgcttcacctgttcatccctttcttccctaatcccctggcaaccactttaaaaaaaaaattaggttcagggggtacatgtgcaggtaaactcgtgacaagggggtttgttatacagattatttagtgacccaggtactaagcctagtacccaatagttacttttctggtcctgtcccttttcccaccctccaccctcaggtaggccccagtatgttattcctttgtgtccatgttatttcactcccacttgtgagaacatggaatatttggtttcctgttcctatgttagtttgttaaggataatggcctccagccccatccatgttcctgcaaaggacatgatctttctttggcaaccactttttactgtcgccatagttcttccttttctagaatgtcatattggaatcatatagtatgtagccttttcagactggcttctttcacttaataatatgcaattaaggttcctccatgtcatttcatggcttaatagtgcatttatttttagcactgaataatactccattgtctagatgaatagtttatccattcacctattgaaagacttcttggtggtttccaagttttggcaattatgaataaagctgttgtaaacatctttgtgcaggtttttctatgggcatgtttttaattcatttgaataaataccaagagcttcagtgctggatcat

SEQ ID NO: 5520 - DNA, 1099 bp, Homo sapiens
  source 1..1099: mol_type = unassigned DNA
agtgccgccgctccctactctgggggttgggactacctccttttccgcgggccccgcccaggcggctgcccgtgacctgcctgggcgcggggaactgaaagccggaaggggcaagacgggttcagttcgtcatggggctgtttggaaagacccaggagaagccgcccaaagaactgatatccaaagagaagaagaaaaagtgaaacgatctgtgaaagatgctgccaagaagggccagaaggatgtctgcatagttctggccaaggagatgatcaggtcaaggaaggctgtgagcaagctgtatgcatccaaagcacacatgaactcagtgctcatggggatgaagaaccagctcgcggtcttgcgagtggctggttccctgcagaagagcacagaagtgatgaaggccatgcaaagtcttgtgaagattccagagattcaggccaccatgagggagttgtccaaagaaatgatgaaggctgggatcatagaggagatgttagaggacacttttgaaagcatggacgatcaggaagaaatggaggaagaagcagaaatggaaattgacagaattctctttgaaattacagcaggggccttgggcaaagcacccagtaaagtgactgatgcccttccagagccagaacctccaggagcgatggctgcctcagaggatgaggaggaggaggaagaggctctggaggccatgcagtcccggctggccacactccgcagctaggggctgcctaccccgctgggtgtgcacacactcctctcaagagctgccattttatgtgtctcttgcactacacctctgttgtgaggactaccattttggagaaggttctgtttgtctcttttcattctctgcccaggttttgggatcgcaaagggattgttcttataaaagtggcataaataaatgcatcatttttaggagtatagacagatatatcttattgtggggaggggaaagaaatccatctgctcatgaagcacttctgaaaatataggtgattgcctgaatgtcgaagactctacttttgtctataaaacactatataaatgaattttaataaatttttgctttagcacttgg

SEQ ID NO: 5521 - DNA, 1135 bp, Homo sapiens
  source 1..1135: mol_type = unassigned DNA
actcgggggtcggcagtttgcaggtgcgatgggcggccccctcacccacgtttatccggactggagcccgccgctcccggctgggtttccgggtggttcgcgctccttctgaattggcagcgaggtcgcggcaggttcgaggctttgacaccagcacctctctatgaagaaaagagtgtgttgtgaacgaagtcagaatttcctgtgttccctttgccgctcctggagttcactggtgacttgatggagggtgagctctattctgctctcaaggaagaagaagcatccgaatcggtttctagtaccaatttcagtggtgaaatgcacttctatgagcttgtggaagacacaaaagatggcatctggctggttcaggtcaatgagtggtcattgaagataagaaaggaaatgagagttgttgacaggcaaataagggatatccaaagagaagaagaaaaagtgaaacgatctgtgaaagatgctgccaagaagggccagaaggatgtctgcatagttctggccaaggagatgatcaggtcaaggaaggctgtgagcaagctgtatgcatccaaagcacacatgaactcagtgctcatggggatgaagaaccagctcgcggtcttgcgagtggctggttccctgcagaagagcacagaagtgatgaaggccatgcaaagtcttgtgaagattccagagattcaggccaccatgagggagttgtccaaagaaatgatgaaggctgggatcatagaggagatgttagaggacacttttgaaagcatggacgatcaggaagaaatggaggaagaagcagaaatggaaattgacagaattctctttgaaattacagcaggggccttgggcaaagcacccagtaaagtgactgatgcccttccagagccagaacctccaggagcgatggctgcctcagaggatgaggaggaggaggaagaggctctggaggccatgcagtcccggctggccacactccgcagctaggggctgcctaccccgctgggtgtgcacacactcctctcaagagctgccattttatgtgtctcttgcactacacctctgttgtgaggactaccattttggagaaggttctgtttgtctcttttcattctctgcccag

SEQ ID NO: 5522 - DNA, 1851 bp, Homo sapiens
  source 1..1851: mol_type = unassigned DNA
aaggggcaagacgggttcagttcgtcatggggctgtttggaaagacccaggagaagccgcccaaagaactggtcaatgagtggtcattgaagataagaaaggaaatgagagttgttgacaggcaaataagggatatccaaagagaagaagaaaaagtgaaacgatctgtgaaagatgctgccaagaagggccagaaggatgtctgcatagttctggccaaggagatgatcaggtcaaggaaggccatgcaaagtcttgtgaagattccagagattcaggccaccatgagggagttgtccaaagaaatgatgaaggctgggatcatagaggagatgttagaggacacttttgaaagcatggacgatcaggaagaaatggaggaagaagcagaaatggaaattgacagaattctctttgaaattacagcaggggccttgggcaaagcacccagtaaagtgactgatgcccttccagagccagaacctccaggagcgatggctgcctcagaggatgaggaggaggaggaagaggctctggaggccatgcagtcccggctggccacactccgcagctaggggctgcctaccccgctgggtgtgcacacactcctctcaagagctgccattttatgtgtctcttgcactacacctctgttgtgaggactaccattttggagaaggttctgtttgtctcttttcattctctgcccaggttttgggatcgcaaagggattgttcttataaaagtggcataaataaatgcatcatttttaggagtatagacagatatatcttattgtggggaggggaaagaaatccatctgctcatgaagcacttctgaaaatataggtgattgcctgaatgtcgaagactctacttttgtctataaaacactatataaatgaattttaataaatttttgctttagcacttggccccattgtagattgccctgtgcagtaaactttcaaggtgtcggctgccccagattgcttcatttgctgggtgtggaaagagttgctatggccaggcatatgggatttggaagctcagcagaagtgacttctgctctgtggttgctgctccccggctttcacagacatggtatggcagccattcttttatctatttaaccaagaggatgctggggaattgtgctgcttgtcctgttggctggtggctgcattatgtcctggggtgtgcatgtgggtctatttagagcttctgtcccttccttcccattgcaagttgcacccagatgagacagctgtagtactaggtctctttcacctctcattgcctgtccctgcttcgagctggttgtcttgtgcgtgggacatgggccttcctatctgtgttttctcaaagtcaggagctgaccaggagcacactaaggtgtggtcatgcatcataaccaacattcactcatctgggacattcttaagatacatttataaatcatttcagcagtagtactttgtatgtgttgagagtttacagagctctttgacatacgcgatcttagtctttacaaataaggaaaacagctcagtttgggaagtatcagagatgggattcaaacccagatcctctggtccaagttgtatgtgcactgaactaatcaggcaggaaaaaagcccagccactgtctcacagattgttttttgtatattgtagcaaaatcctgaaacaatggggtccttccagtctcatcatacaaaatggcaatcttggctgggtgcggtggttcatgcctataatcccagtgctttacaaggctgaggcaggaggctctcttgagaataggagttcaagaccagcctgggcaacatagcaagatcctgtctctcc

SEQ ID NO: 5523 - DNA, 1393 bp, Homo sapiens
  source 1..1393: mol_type = unassigned DNA
atgtgagacattagactgcatcaggtttgccatctaaacttagggcaaccccaagtgcttgaacctataccaccccactttcctgagctctgtaaagagcatgaagttttcccactgaccccatacactgaggtgccatcacactgcacatttccttccggagaacaagcacgtactcaggtggagatagaactgtctttttacttaatagaaaatgatgtggcagctttaagaggagcgcgtcggtctggggctggtggcttgggtcacgtgacaccggtggtctcgtttgcgcctcttgatgtcgcggcggcgccctgaggacggattgggcaaggctggtccctgtgtgatgagacatcaccctcccaggagcaaggcggaagtctggaggacgctgaggggcggaggcgggagaggcgagctcgcgatgagtggtctcggcaggctcttcgggaaggggaagaaggagaaagggccaacccctgaagaagcaatacagaaactgaaggagacagagaagatactgatcaagaaacaggaatttttggagcagaagattcaacaggagctacaaacagccaagaagtatgggaccaagaataagagagctgccctacaggctttgcggaggaagaaaagattcgaacagcagctggcacaaactgacgggacattatccaccctggagtttcagcgtgaggccattgagaatgccactaccaatgcagaagtccttcgtaccatggagcttgctgcccaaagcatgaagaaggcctaccaggacatggacattgacaaggtagatgaactgatgactgacatcacggaacaacaggaggtggcccagcagatctcagatgccatttctcggcctatgggctttggagatgatgtggatgaggatgaactgctggaggagctagaggagctggagcaggaggaattggcccaggagttgttaaatgtgggcgacaaggaagaagaaccctcagtcaaattgcctagtgtaccttctactcatctgccggcagggccagctcccaaagtggatgaagatgaagaagcactaaagcagttggctgagtgggtatcctgataaatctgggcttgtcttcctaatgctacctttgttggtcctttcttccttaagtgccaagtgctgagctaaaggaggataactttttggggaagtcatgctgagggtggtagtgtgaccctgcctgaaaaaagggtctcttaccctcccagccctggctcaactctgaagaaggatcttgctacagaaggagcccttgggctcccttctctttgatagcagttataatgcccttgttcccaataaaactgggcagatggaatcctagtgtctatactgccttgtctacccctg

SEQ ID NO: 5524 - DNA, 1646 bp, Homo sapiens
  source 1..1646: mol_type = unassigned DNA
ggtggcgcggccgggcccagctgcggggcggaggcggaggcggaggagaggcctgcggcggcagggagcggcgggactgggagcgggcgccggagccgacccgagccgagccgagccgagccgagccggagcgggcggcgaaggccggcgcggcgagcagcaaccatgtcggtgttcgggaagctgttcggggctggagggggtaaggccggcaagggcggcccgaccccccaggaggccatccagcggctgcgggacacggaagagatgttaagcaagaaacaggagttcctggagaagaaaatcgagcaggagctgacggccgccaagaagcacggcaccaaaaacaagcgcgcggccctccaggcactgaagcgtaagaagaggtatgagaagcagctggcgcagatcgacggcacattatcaaccatcgagttccagcgggaggccctggagaatgccaacaccaacaccgaggtgctcaagaacatgggctatgccgccaaggccatgaaggcggcccatgacaacatggacatcgataaagttgatgagttaatgcaggacattgctgaccagcaagaacttgcagaggagatttcaacagcaatttcgaaacctgtagggtttggagaagagtttgacgaggatgagctcatggcggaattagaagaactagaacaggaggaactagacaagaatttgctggaaatcagtggacccgaaacagtccctctaccaaatgttccctctatagccctaccatcaaaacccgccaagaagaaagaagaggaggacgacgacatgaaggaattggagaactgggctggatccatgtaatggggtccagcgctggctgggcccagacagactgtggtggcctgcgcagcgagcaggcgtgtgcgtgtgtggggcaggcaggatgtggtgcaggcaggttccatcgctttcgactctcactccaaagcagtagggccgcgttgctgctcactctctgcatagcatggtctgcacctgggagatgggcggggggaggggggcgggcggggtgggaagtgcctgctgtttataatgttgaatttctgtaaaataaactgtatttgcaaatccaacattgagcttctggactacgctgactccactgctgaatcctcaatggaaagggtcgactggttgcagttgaaatgacctgaaatgtagcctctgtccttgtaagtcagttgacttgccgcacatctctttgtgtacttgtacggtactggcagaaaagtcatttttcaaaagccataggcttttccttgcccttagctgtaataatgcatctgattttgatttcctccagagctgtgtttctgtccatcacctgtgtattggccctgtgtttaccactctggcccactcctcacccccttgctcccctggtcttctggagtttgtgacattgatttgaaatggatggtgttctcttgagagcaagtgagattgttagaattaagttccaactatacagttttctaacatagctataaggtccttgttgctgtttgtgataactgatagataactcattggaaacgtgcatacatttatattcagatgaaattatggtttgcactgtctattaaatatctcgattaattttcata

SEQ ID NO: 5525 - DNA, 1465 bp, Homo sapiens
  source 1..1465: mol_type = unassigned DNA
aatccggaaaaagaatcgggaaacgccaggaggcatattgcgcttgcgcacggaggggccggaagtcgaggcgggagtgactctgcttccgtttctggttttgctctagtgtttgggtttcttcgcggctgctcaagatgaaccgactcttcgggaaagcgaaacccaaggctccgccgcccagcctgactgactgcattggcacggtggacagtagagcagaatccattgacaagaagatttctcgattggatgctgagctagtgaagtataaggatcagatcaagaagatgagagagggtcctgcaaagaatatggtcaagcagaaagccttgcgagttttaaagcaaaagaggatgtatgagcagcagcgggacaatcttgcccaacagtcattcaacatggaacaagccaattataccatccagtctttgaaggacaccaagaccacggttgatgctatgaaactgggagtaaaggaaatgaagaaggcatacaagcaagtgaagatcgaccagattgaggatttacaagaccagctagaggatatgatggaagatgcaaatgaaatccaagaagcactgagtcgcagttatggcaccccagaactggatgaagatgatttagaagcagagttggatgcactaggtgatgagcttctggctgatgaagacagttcttatttggatgaggcagcatctgcacctgcaattccagaaggtgttcccactgatacaaaaaacaaggatggagttctggtggatgaatttggattgccacagatccctgcttcatagatttgcatcattcaagcatatcttgtaaaacaaacacatattatgggactaggaaatatttatctttccaaatttgccataacagatttaggtttctttcctttctttgaaggaaagtttaattacattgctcttttattttttccattaagagactcattgcttgggaaatgctttcttcgtactaaaatttgattcctttttttcttatgaaaaacgaactcagtttaaaagtatttttagctcgtatgacttgttttcattcattaataataatttgaaataaaactaaggaaatggaatcttaaaagtctatgacagtgtaactctacagtctcaaaatgacctgataaattgataagacaaagatgagattattggggctgttcatattatgattcagaatcattttctattgtggtattataggttggttaaagtgatggcctttttgatgggttttgttgtgtcttgtgaacaagtcgttactgtgtccattattggaatggaattatcactactgtatcatgagtgggtattttgattctatggttccctcagtattacatcttgacttgtaatcaattatgaatatttcttgatatttaatgtataggacatttatttatactcaataaatatttttcaaaaggatataattttaataa

SEQ ID NO: 5526 - DNA, 1707 bp, Homo sapiens
  source 1..1707: mol_type = unassigned DNA
gttttgctctagtgtttgggtttcttcgcggctgctcaagatgaaccgactcttcgggaaagcgaaacccaaggctccgccgcccagcctgactgactgcattggcacggtggacagtagagcagaatccattgacaagaagatttctcgattggatgctgagctagtgaagtataaggatcagatcaagaagatgagagagggtcctgcaaagaatatggtcaagcagaaagccttgcgagttttaaagcaaaagaggatgtatgagcagcagcgggacaatcttgcccaacagtcattcaacatggaacaagccaattataccatccagtctttgaaggacaccaagaccacggttgatgctatgaaactgggagtaaaggaaatgaagaaggcatacaagcaagtgaagatcgaccagattgaggatttacaagaccagctagaggatatgatggaagatgcaaatgaaatccaagaagcactgagtcgcagttatggcaccccagaactggatgaagatgatttagaagcaggatggagttctggtggatgaatttggattgccacagatccctgcttcatagatttgcatcattcaagcatatcttgtaaaacaaacacatattatgggactaggaaatatttatctttccaaatttgccataacagatttaggtttctttcctttctttgaaggaaagtttaattacattgctcttttattttttccattaagagactcattgcttgggaaatgctttcttcgtactaaaatttgattcctttttttcttatgaaaaacgaactcagtttaaaagtatttttagctcgtatgacttgttttcattcattaataataatttgaaataaaactaaggaaatggaatcttaaaagtctatgacagtgtaactctacagtctcaaaatgacctgataaattgataagacaaagatgagattattggggctgttcatattatgattcagaatcattttctattgtggtattataggttggttaaagtgatggcctttttgatgggttttgttgtgtcttgtgaacaagtcgttactgtgtccattattggaatggaattatcactactgtatcatgagtgggtattttgattctatggttccctcagtattacatcttgacttgtaatcaattatgaatatttcttgatatttaatgtataggacatttatttatactcaataaatatttttcaaaaggatataattttaataatatcacttcagcttaaaacctctactgcggaaaccaaatttaatagaattttaatgtcatttcagcctataactccactacagaaaccaaattaaccagtagcattgtgaggaaagagcaaggaacaatctgggcttgggccctgggtctaccatttactaactactgagtagtctattcaacctctctaaccttctgtttccttattagtaaaatcatgcttaactcacagagcttttgtgaggaataattgaggtaatggtcataagtaccttgttaactgcaaggggctattcttatatgagggattgttaacaataaaaaagaaactgcttcattcttttcttggaaggtgcctggagtactacagcaagttcaaactcctgcccaatttcagggtctttaatgatcctgtcctcccttcctcattcaacttgttgccaacagcatgg

SEQ ID NO: 5527 - DNA, 1663 bp, Homo sapiens
  source 1..1663: mol_type = unassigned DNA
aggacccgagctacggtggccgcggggcggcggtggcgattggacttggtgggtcccgggccaggggcgggcgccgccatgggtaacctgttcggccgcaagaagcagagccgcgtcacggagcaggacaaggccatcctgcaactgaagcagcagcgggacaagctgaggcagtaccagaagaggatcgcccagcagctggagcgcgagcgcgccctggcccggcagctgctgcgggacggcaggaaggaacgggccaagctgctgctcaagaagaagcgataccaggagcagctcctggacaggacggagaaccagatcagcagcctggaggccatggttcagagtattgagttcacccagatcgaaatgaaagtgatggaggggctgcagtttggaaatgagtgtctgaacaagatgcaccaggtgatgtccattgaagaggtggagaggatcctggacgagacgcaggaggccgtggagtaccagcggcaaatagacgagctcctggcaggaagcttcactcaggaggatgaagacgccatcctggaggagctgagcgcaatcactcaggaacaaatagagctgccagaggttccctccgagccccttcctgagaagatcccagaaaacgtccctgtcaaggccaggcccaggcaggcggagctggtggcagcttcgtaacgtggcctcgtcttgtgggactcacggggatgccccagggactgtggcccacagagagtttgggtcacggccagcccctgaccgggttccctggagcccagtgcgcacggtgctgagcagagctgcagccacgcaggcgcattgcaggaggactccagagcgtctcctggagaccttgagcctgaacgcactcaggcgccactggcctgctctcagtccggattaactctcgaccgagcccagcttctgccggttgtgggctcccccggtggccgaggcccaggcccaacgcctctggtgctgttcccctgcagtcccagccccgcgtggctcgcgctcgtctgtgaggaagacacctccagaccttggggtccccgcgcttcctcttgctcctcgctgctcccattagctggtgcaggcttccgttaaggggtccctcccttggcctggcttcccggcgcacctcagcttccctgctggtggggggatccccaggagaccagcatgtgctgaacctctctgtgcctctgcctccgcaccctagacacccacctccagtttgaaggtggcgggccaggggctttcttgctgaattgacgactccgagagccctgactcccgccttgccactcacggctctgtccactagggctcagccctgctgagaaaggacctccgatgcttgggagacgctgctccggcaggtgcagccccggaagtttgtccatgggggtccccgcggctggggctcatggaactgcgagacccgggaccctcctgccctgcgggtccccgagccaccagcagccaggactggaggctgtggggcatggcgtgacttctcgtgcacagggctggtttggttatgagacgatctcgctgggaccgcccctgcccgtggaaagccacaaggacaaagggagcggccacctcgacccccagacaggccggcccgtattaaagttggccctgcacgccc

SEQ ID NO: 5528 - DNA, 2814 bp, Homo sapiens
  source 1..2814: mol_type = unassigned DNA
agcggaccagggccaggcttgtgttcgcagccttgccggggctggggttccgatgtggtccccggagcgggaggccgaggccccagccgggggagacccggcgggccttctgccccccgagtgggaggaggacgaggagcgcatgtccttcctgttctccgctttcaagaggagtcgcgaggtgaacagcaccgactgggacagcaagatgggcttctgggcgccgttggtgctgagccacagccgccgccagggggtggtgcgcctgcgtctgcgggacttgcaggaggcctttcagcgcaaggggagcgtcccgctggggctggccacggtgctgcaggacctgctgcgtcgaggggagctgcagcgggagtcagacttcatggccagtgtagacagcagctggatctcctggggggttggggtcttcctgctgaagcctctcaagtggactctttctaacatgctgggagataataaggttccagctgaggaggtccttgtcgctgtggagctgttgaaggaaaaggctgaggaggtgtatcgtctgtatcagaactcgcccctctcctcccaccccgtggtggccctgtcagagctcagcaccctctgtgctaactcctgcccagatgagaggaccttctacttggtgttgctgcagctgcagaaggagaagagggtcacagtcctcgagcagaacggggagaagattgtgaagtttgcccgagggccacgtgccaaggtctctccagtcaatgacgtagatgttggggtgtaccagctgatgcagagtgaacagcttctctcacgcaaagtggagtccttatcccaggaagcagagaggtgtaaagaagaagcccgccgggcatgccgagcaggaaagaagcagctggcactgaggtctctcaaggccaagcaacggacagagaagcgcatcgaggccttgcatgccaagctggacactgttcaaggcatcctggaccggatctatgcctcccagacagatcagatggtttttaacgcctaccaggctggggtaggagcactcaaactctccatgaaggatgtcacagtggagaaggcagagagcctcgtggatcagatccaagagctctgtgacacccaggatgaagtttctcagactctggctggtggggtaacaaatggcttagattttgacagtgaagaactggagaaggaattggacatcctccttcaggataccaccaaagaacctttggatctgcctgacaacccccgcaataggcattttaccaacagcgtgcctaaccctaggatctcagatgctgaacttgaagctgaacttgagaaactgtccttatcagagggaggtttggtcccaagcagtaaatctccaaaaaggcaattggaaccgactctaaagccattgtaggaccctcaagtgaaggaccctcatgtaaaagagagaccaggcttgctgggtgtgtacatagttatttaaacaagaaactctcagaatgtgtttggaagaggagaaaggagaaccactgattttatctggatgctactacttactacaggacagatagaatttctggaagcgatgctccaaaggcttgctcccagctgtatcatggacctgccttctcatctttatagtgccacgatttatacagtcctgtgtctgacctgtcatttcatagcctgcagttcttgccattggcacacttagatttgtcttcacccaccagcttcgttccagcccatgaaggggaaagatttgcagctttgccaaatctgaatcagttcccactcccccctgcggttttttagaggggtttatcctgtcgctaatgtcagttaaatagcttattcctgtcccacttgatttcactggtaagaatgagaatgaaatacttaaaggttttatttgaggggacttagctgccattttatggaaaaacatgtagtataaaaggtttttctccagggtcatttgacagaattctccaggtgttcagagaaagaggtcgccccaagtggcccagagtcgtgacagtccggaggggctggtgtggccggtgggcgctgcctcttcatctgatggagccaggaggtccgccggtgggggaaaggcttcttccgaggcttctgcactcgcctgggaagaggcccagtcactacaggaccctgagatgtccagaccccttatgcaaagaggcaaaattgttgccttggccccatcatggagtaacttaaaaatacatatctatcttccagaacaagccacacaacaacacacctcccctccttgagcctggcacacagcaccgggctctctgaatttggaaagtgtttcattttgtggcctactgctcggggcaggggggctgagccaggatgtgcaatagaagcaggggttgtcccctctgccagatctgtggggagctgcccaggccacccgtgcacctgtcctgcttcctgcagtccccactccctgcctcctttgagggactgggggacttggggtagggggacagacgggaaagggtctgaatgctctggcaatggcgagaagaagcgatcgccacactgccactctgctgcccagccaccaggatttctgcctggagccctttgccctgtccctgctgcctgaggtggcgtagagcagaggagaagaatttgctccaggccaggagcacaaatcgttgttcaatgaatttctctccaactcgaccttggtaaacggaaatgttgggggtgaagagaaacaatcactatttttttcttttttatctggtaaataattaaaagaaaaaccgaacactt

SEQ ID NO: 5529 - DNA, 3403 bp, Homo sapiens
  source 1..3403: mol_type = unassigned DNA
gctgcctcctctgactgttatgcagcaggccggcaggtcaataaacttgcttgcctgactttgagtatactcgtcttttctcttggccaaccttacggtagctgtaccagtttgcatttccaccagcaatgaatgagagttcctgttgctctgcatcctcaccagcatttggtgtggtcagtattttggattttcaccattctaatagagattcacggatccatccgggtggtccgggcaccactggcgcccctctgcggctattccccagttccattttctgaagccacaggtcagaagccgctgtacaacgctttgccgaactccagaatcttgaaggagacgtaaggtgcagccacctgccgcgcaggcgcaagcctttctttcggcacaaagaccgtgggaggaggggtcggcgcaagcgctcggtgtctctctgaaaagaacttcatcatactgcctcctggctgacggagcgcagcgcaacgcatgcgccttgaagacttatggaacttatttcacgctcagggcggcggtgacgtgtgaacgagaaggaggtggtcaaggaacggaagccgggagggaacgagggcggaagcggaccagggccaggcttgtgttcgcagccttgccggggctggggttccgatgtggtccccggagcgggaggccgaggccccagccgggggagacccggcgggccttctgccccccgagtgggaggaggacgaggagcgcatgtccttcctgttctccgctttcaagaggagtcgcgaggtgaacagcaccgactgggacagcaagatgggcttctgggcgccgttggtgctgagccacagccgccgccagggggtggtgcgcctgcgtctgcgggacttgcaggaggcctttcagcgcaaggggagcgtcccgctggggctggccacggtgctgcaggacctgctgcgtcgaggggagctgcagcgggagtcagacttcatggccagtgtagacagcagctggatctcctggggggttggggtcttcctgctgaagcctctcaagtggactctttctaacatgctgggagataataaggttccagctgaggaggtccttgtcgctgtggagctgttgaaggaaaaggctgaggaggtgtatcgtctgtatcagaactcgcccctctcctcccaccccgtggtggccctgtcagagctcagcaccctctgtgctaactcctgcccagatgagaggaccttctacttggtgttgctgcagctgcagaaggagaagagggtcacagtcctcgagcagaacggggagaagattgtgaagtttgcccgagggccacgtgccaaggtctctccagtcaatgacgtagatgttggggtgtaccagctgatgcagagtgaacagcttctctcacgcaaagtggagtccttatcccaggaagcagagaggtgtaaagaagaagcccgccgggcatgccgagcaggaaagaagcagctggcactgaggtctctcaaggccaagcaacggacagagaagcgcatcgaggccttgcatgccaagctggacactgttcaaggcatcctggaccggatctatgcctcccagacagatcagatggtttttaacgcctaccaggctggggtaggagcactcaaactctccatgaaggatgtcacagtggagaaggcagagagcctcgtggatcagatccaagagctctgtgacacccaggatgaagtttctcagactctggctggtggggtaacaaatggcttagattttgacagtgaagaactggagaaggaattggacatcctccttcaggataccaccaaagaacctttggatctgcctgacaacccccgcaataggcattttaccaacagcgtgcctaaccctaggatctcagatgctgaacttgaagctgaacttgagaaactgtccttatcagagggaggtttggtcccaagcagtaaatctccaaaaaggcaattggaaccgactctaaagccattgtaggaccctcaagtgaaggaccctcatgtaaaagagagaccaggcttgctgggtgtgtacatagttatttaaacaagaaactctcagaatgtgtttggaagaggagaaaggagaaccactgattttatctggatgctactacttactacaggacagatagaatttctggaagcgatgctccaaaggcttgctcccagctgtatcatggacctgccttctcatctttatagtgccacgatttatacagtcctgtgtctgacctgtcatttcatagcctgcagttcttgccattggcacacttagatttgtcttcacccaccagcttcgttccagcccatgaaggggaaagatttgcagctttgccaaatctgaatcagttcccactcccccctgcggttttttagaggggtttatcctgtcgctaatgtcagttaaatagcttattcctgtcccacttgatttcactggtaagaatgagaatgaaatacttaaaggttttatttgaggggacttagctgccattttatggaaaaacatgtagtataaaaggtttttctccagggtcatttgacagaattctccaggtgttcagagaaagaggtcgccccaagtggcccagagtcgtgacagtccggaggggctggtgtggccggtgggcgctgcctcttcatctgatggagccaggaggtccgccggtgggggaaaggcttcttccgaggcttctgcactcgcctgggaagaggcccagtcactacaggaccctgagatgtccagaccccttatgcaaagaggcaaaattgttgccttggccccatcatggagtaacttaaaaatacatatctatcttccagaacaagccacacaacaacacacctcccctccttgagcctggcacacagcaccgggctctctgaatttggaaagtgtttcattttgtggcctactgctcggggcaggggggctgagccaggatgtgcaatagaagcaggggttgtcccctctgccagatctgtggggagctgcccaggccacccgtgcacctgtcctgcttcctgcagtccccactccctgcctcctttgagggactgggggacttggggtagggggacagacgggaaagggtctgaatgctctggcaatggcgagaagaagcgatcgccacactgccactctgctgcccagccaccaggatttctgcctggagccctttgccctgtccctgctgcctgaggtggcgtagagcagaggagaagaatttgctccaggccaggagcacaaatcgttgttcaatgaatttctctccaactcgaccttggtaaacggaaatgttgggggtgaagagaaacaatcactatttttttcttttttatctggtaaataattaaaagaaaaaccg

SEQ ID NO: 5530 - DNA, 3258 bp, Homo sapiens
  source 1..3258: mol_type = unassigned DNA
ctcttgacagcggcggcggcgcagccggttccgggttcggcgcggggcggggatgtgaatcccgatggagcggcccgaggaaggcaagcagtcgccgccgccgcagccctggggacggctcctgcgtctgggcgcggaggagggcgagccgcacgtcctcctgaggaagcgggagtggaccatcgggcggagacgaggttgcgacctttccttccccagcaataaactggtctctggagatcactgtagaattgtagtggatgaaaaatcaggtcaggtgacactggaagataccagcaccagtggaacagtgattaacaagctgaaggttgttaagaagcagacatgccctttacagactggggatgtcatctacttggtgtacaggaagaatgaaccggaacacaacgtggcatacctctatgaatctttaagtgaaaagcaaggcatgacacaagaatcctttgaagctaacaaggaaaatgtgttccatgggaccaaagatacctcaggtgcaggtgcagggcgaggggccgatccccgggtccctccgtcgtcgcccgccactcaggtgtgctttgaggaaccacagccatcaacatcgacgtcagacctcttccccacagcctcggcctcttccacggagccttctcctgcagggcgagagcgttcctccagttgtgggtctgggggtggtggcatctcccctaaaggaagtggtccctctgtggcaagtgatgaagtctccagctttgcctcagctctcccagacagaaagactgcgtccttttcgtcgttggaaccccaggatcaggaggatttggagcccgtgaagaagaaaatgagaggagatggggaccttgacctgaacgggcagttgttggtcgcacaaccgcgtagaaatgcccaaaccgtccacgaggacgtcagagcagcggctgggaagccagacaagatggaggagacgctgacatgcatcatctgccaggacctgctgcacgactgcgtgagtttgcagccctgcatgcacacgttctgcgcggcttgctactcgggctggatggagcgctcgtccctgtgtcctacctgccgctgtcccgtggagcggatctgtaaaaaccacatcctcaacaacctcgtggaagcatacctcatccagcatccaggcaatagtcgcagtgaagaagatgtgcaaagtatggatgccagaaataaaatcactcaagacatgctgcagcccaaagtcaggcggtctttttctgatgaagaagggagttcagaggacctgctggagctgtcagacgttgacagtgagtcctcagacattagccagccatacgtcgtgtgccggcagtgtcctgagtacagaaggcaggcggcgcagcctccccactgcccagcacccgagggcgagccaggagccccacaggccctgggggatgcaccctccacgtccgtcagcctgacgacagtccaggattacgtgtgccctctgcaaggaagccacgccctgtgcacctgctgcttccagcccatgcccgaccggagagcggagcgcgagcaggacccgcgtgtcgcccctcagcagtgtgcggtctgcctgcagcctttctgccacctgtactggggctgcacccggaccggctgctacggctgcctggccccgttttgtgagctcaacctgggtgacaagtgtctggacggcgtgctgaacaacaacagctacgagtcagacatcctgaagaattacctggcaaccagaggtttgacatggaaaaacatgttgaccgagagcctcgtggctctccagcggggagtgtttctgctgtctgattacagagtcacgggagacaccgttctgtgttactgctgtggcctgcgcagcttccgtgagctgacctatcagtatcggcagaacattcctgcttccgagttgccagtggccgtaacatcccgtcctgactgctactggggccgtaactgccgcactcaggtgaaagctcaccacgccatgaaattcaatcatatctgtgaacagacaaggttcaaaaactaagcatccagaggccctgagcagctttcagcactggaggtgaagagagcgtgtttttaaaatacagagacaagcacgtcaaggtgttttcacagccccctgagggaagggacgcagggtctccgacaggtgctctggggtgactcttctgtggagctttaccctctgagtgagaccctccccagagccccgggggccgcagcccgccctcctggtgagcgctgggcagggctcgtggtggcatcagcagcagagacgaagcctttctgtaacatgcggccgtcccgccgagaggggcagttttgctcttttgtacattttccgaaactacagttaaagcagaagtctgtttttaggaaaagtttcaagggagaagggcaagtttatcaaaaacattgtttcaggagaagggagcataagtttacagcctacaggacgtacacaatatcctgctgctgggaaaaccacagcattttatctattttttattttaataggtttggtgcttatcttctaataagatttaaatgtcacaaactgtagcacaaataatataatttataatttacaaattgactaaaattgggtatagtatggtatttgaaagaataagcatatgcttctgtttattaaaaaaagaaaccttccaatgtccaaaactgctaaccctcgacgtggccgccaagttagtcgctccttgctaaccggtgagtgaccgcggccccgagcctggggctggacgcaggtcccaggacatgctgctcccttgtgtgagtgaccgcggccccgagcctggggctggacgcaggtcccaggacgtgctgctcccttgtgtgagtgaccacggccccaagcccagggctggaggcaggtcccaggacgcgccgctccctcatgctgcccgggcccttcctccaagaccctacagagcctgaggggcaccttggcttccgcctgtgctagctttgccatgtcatctggaataatacttgaaattttgatttttggaaaaaaaagttttttatcttttgttgaaatcacctgttatccttgtttgtaaactgataacttttttgcttcttctcaggaatacagttttcaactgttgtcttgctcttgatagaaactgagaagcagcaatctgtatttgtggaggaaagtcctctcttttgcatattctaataaatgagccgcgtttgctcctc

SEQ ID NO: 5531 - DNA, 3139 bp, Homo sapiens
  source 1..3139: mol_type = unassigned DNA
ctcttgacagcggcggcggcgcagccggttccgggttcggcgcggggcggggatgtgaatcccgatggagcggcccgaggaaggcaagcagtcgccgccgccgcagccctggggacggctcctgcgtctgggcgcggaggagggcgagccgcacgtcctcctgaggaagcgggagtggaccatcgggcggagacgaggttgcgacctttccttccccagcaataaactggtctctggagatcactgtagaattgtagtggatgaaaaatcaggtcaggtgacactggaagataccagcaccagtggaacagtgattaacaagctgaaggttgttaagaagcagacatgccctttacagactggggatgtcatctacttggtgtacaggaagaatgaaccggaacacaacgtggcatacctctatgaatctttaagtgaaaagcaaggcatgacacaagaatcctttgagatggtgccttgctgtgttgcccaggctggtctaaaactcctgggatcaagtgatcctcccaccttggcctcccaaagtattgtgattacagggtctgggggtggtggcatctcccctaaaggaagtggtccctctgtggcaagtgatgaagtctccagctttgcctcagctctcccagacagaaagactgcgtccttttcgtcgttggaaccccaggatcaggaggatttggagcccgtgaagaagaaaatgagaggagatggggaccttgacctgaacgggcagttgttggtcgcacaaccgcgtagaaatgcccaaaccgtccacgaggacgtcagagcagcggctgggaagccagacaagatggaggagacgctgacatgcatcatctgccaggacctgctgcacgactgcgtgagtttgcagccctgcatgcacacgttctgcgcggcttgctactcgggctggatggagcgctcgtccctgtgtcctacctgccgctgtcccgtggagcggatctgtaaaaaccacatcctcaacaacctcgtggaagcatacctcatccagcatccagacaagagtcgcagtgaagaagatgtgcaaagtatggatgccagaaataaaatcactcaagacatgctgcagcccaaagtcaggcggtctttttctgatgaagaagggagttcagaggacctgctggagctgtcagacgttgacagtgagtcctcagacattagccagccatacgtcgtgtgccggcagtgtcctgagtacagaaggcaggcggcgcagcctccccactgcccagcacccgagggcgagccaggagccccacaggccctgggggatgcaccctccacgtccgtcagcctgacgacagcagtccaggattacgtgtgccctctgcaaggaagccacgccctgtgcacctgctgcttccagcccatgcccgaccggagagcggagcgcgagcaggacccgcgtgtcgcccctcagcagtgtgcggtctgcctgcagcctttctgccacctgtactggggctgcacccggaccggctgctacggctgcctggccccgttttgtgagctcaacctgggtgacaagtgtctggacggcgtgctgaacaacaacagctacgagtcagacatcctgaagaattacctggcaaccagaggtttgacatggaaaaacatgttgaccgagagcctcgtggctctccagcggggagtgtttctgctgtctgattacagagtcacgggagacaccgttctgtgttactgctgtggcctgcgcagcttccgtgagctgacctatcagtatcggcagaacattcctgcttccgagttgccagtggccgtaacatcccgtcctgactgctactggggccgtaactgccgcactcaggtgaaagctcaccacgccatgaaattcaatcatatctgtgaacagacaaggttcaaaaactaagcatccagaggccctgagcagctttcagcactggaggtgaagagagcgtgtttttaaaatacagagacaagcacgtcaaggtgttttcacagccccctgagggaagggacgcagggtctccgacaggtgctctggggtgactcttctgtggagctttaccctctgagtgagaccctccccagagccccgggggccgcagcccgccctcctggtgagcgctgggcagggctcgtggtggcatcagcagcagagacgaagcctttctgtaacatgcggccgtcccgccgagaggggcagttttgctcttttgtacattttccgaaactacagttaaagcagaagtctgtttttaggaaaagtttcaagggagaagggcaagtttatcaaaaacattgtttcaggagaagggagcataagtttacagcctacaggacgtacacaatatcctgctgctgggaaaaccacagcattttatctattttttattttaataggtttggtgcttatcttctaataagatttaaatgtcacaaactgtagcacaaataatataatttataatttacaaattgactaaaattgggtatagtatggtatttgaaagaataagcatatgcttctgtttattaaaaaaagaaaccttccaatgtccaaaactgctaaccctcgacgtggccgccaagttagtcgctccttgctaaccggtgagtgaccgcggccccgagcctggggctggacgcaggtcccaggacatgctgctcccttgtgtgagtgaccgcggccccgagcctggggctggacgcaggtcccaggacgtgctgctcccttgtgtgagtgaccacggccccaagcccagggctggaggcaggtcccaggacgcgccgctccctcatgctgcccgggcccttcctccaagaccctacagagcctgaggggcaccttggcttccgcctgtgctagctttgccatgtcatctggaataatacttgaaattttgatttttggaaaaaaaagttttttatcttttgttgaaatcacctgttatccttgtttgtaaactgataacttttttgcttcttctcaggaatacagttttcaactgttgtcttgctcttgatagaaactgagaagcagcaatctgtatttgtggaggaaagtcctctcttttgcatattctaataaatgagccgcgtttgctcctcc

SEQ ID NO: 5532 - DNA, 2648 bp, Homo sapiens
  source 1..2648: mol_type = unassigned DNA
gccgcaatgtctcttgacagcggcggcggcgcagccggttccgggttcggcgcggggcggggatgtgaatcccgatggagcggcccgaggaaggcaagcagtcgccgccgccgcagccctggggacggctcctgcgtctgggcgcggaggagggcgagccgcacgtcctcctgaggaagcgggagtggaccatcgggcggagacgaggttgcgacctttccttccccagcaataaactggtctctggagatcactgtagaattgtagtggatgaaaaatcaggtcaggtgacactggaagataccagcaccagtggaacagtgattaacaagctgaaggttgttaagaagcagacatgccctttacagactggggatgtcatctacttggtgtacaggaagaatgaaccggaacacaacgtggcatacctctatgaatctttaagtgaaaagcaaggcatgacacaagaatcctttgaagctaacaaggaaaatgtgttccatgggaccaaagatacctcaggtgcaggtgcagggcgaggggccgatccccgggtccctccgtcgtcgcccgccactcaggtgtgctttgaggaaccacagccatcaacatcgacgtcagacctcttccccacagcctcggcctcttccacggagccttctcctgcagggcgagagcgttcctccagttgtgggtctgggggtggtggcatctcccctaaaggaagtggtccctctgtggcaagtgatgaagtctccagctttgcctcagctctcccagacagaaagactgcgtccttttcgtcgttggaaccccaggatcaggaggatttggagcccgtgaagaagaaaatgagaggagatggggaccttgacctgaacgggcagttgttggtcgcacaaccgcgtagaaatgcccaaaccgtccacgaggacgtcagagcagcggctgggaagccagacaagatggaggagacgctgacatgcatcatctgccaggacctgctgcacgactgcgtgagtttgcagccctgcatgcacacgttctgcgcggcttgctactcgggctggatggagcgctcgtccctgtgtcctacctgccgctgtcccgtggagcggatctgtaaaaaccacatcctcaacaacctcgtggaagcatacctcatccagcatccagacaagagtcgcagtgaagaagatgtgcaaagtatggatgccagaaataaaatcactcaagacatgctgcagcccaaagtcaggcggtctttttctgatgaagaagggagttcagaggacctgctggagctgtcagacgttgacagtgagtcctcagacattagccagccatacgtcgtgtgccggcagtgtcctgagtacagaaggcaggcggcgcagcctccccactgcccagcacccgagggcgagccaggagccccacaggccctgggggatgcaccctccacgtccgtcagcctgacgacagcagtccaggattacgtgtgccctctgcaaggaagccacgccctgtgcacctgctgcttccagcccatgcccgaccggagagcggagcgcgagcaggacccgcgtgtcgcccctcagcagtgtgcggtctgcctgcagcctttctgccacctgtactggggctgcacccggaccggctgctacggctgcctggccccgttttgtgagctcaacctgggtgacaagtgtctggacggcgtgctgaacaacaacagctacgagtcagacatcctgaagaattacctggcaaccagaggtttgacatggaaaaacatgttgaccgagagcctcgtggctctccagcggggagtgtttctgctgtctgattacagagtcacgggagacaccgttctgtgttactgctgtggcctgcgcagcttccgtgagctgacctatcagtatcggcagaacattcctgcttccgagttgccagtggccgtaacatcccgtcctgactgctactggggccgtaactgccgcactcaggtgaaagctcaccacgccatgaaattcaatcatatctgtgaacagacaaggttcaaaaactaagcatccagaggccctgagcagctttcagcactggaggtgaagagagcgtgtttttaaaatacagagacaagcacgtcaaggtgttttcacagccccctgagggaagggacgcagggtctccgacaggtgctctggggtgactcttctgtggagctttaccctctgagtgagaccctccccagagccccgggggccgcagcccgccctcctggtgagcgctgggcagggctcgtggtggcatcagcagcagagacgaagcctttctgtaacatgcggccgtcccgccgagaggggcagttttgctcttttgtacattttccgaaactacagttaaagcagaagtctgtttttaggaaaagtttcaagggagaagggcaagtttatcaaaaacattgtttcaggagaagggagcataagtttacagcctacaggacgtacacaatatcctgctgctgggaaaaccacagcattttatctattttttattttaataggtttggtgcttatcttctaataagatttaaatgtcacaaactgtagcacaaataatataatttataatttacaaattgactaaaa

SEQ ID NO: 5533 - DNA, 3250 bp, Homo sapiens
  source 1..3250: mol_type = unassigned DNA
ggatcagctgagggagccgcaatgtctcttgacagcggcggcggcgcagccggttccgggttcggcgcggggcggggatgtgaatcccgatggagcggcccgaggaaggcaagcagtcgccgccgccgcagccctggggacggctcctgcgtctgggcgcggaggagggcgagccgcacgtcctcctgaggaagcgggagtggaccatcgggcggagacgaggttgcgacctttccttccccagcaataaactggtctctggagatcactgtagaattgtagtggatgaaaaatcaggtcaggtgacactggaagataccagcaccagtggaacagtgattaacaagctgaaggttgttaagaagcagacatgccctttacagactggggatgtcatctacttggtgtacaggaagaatgaaccggaacacaacgtggcatacctctatgaatctttaagtgaaaagcaaggcatgacacaagaatcctttgatacctcaggtgcaggtgcagggcgaggggccgatccccgggtccctccgtcgtcgcccgccactcaggtgtgctttgaggaaccacagccatcaacatcgacgtcagacctcttccccacagcctcggcctcttccacggagccttctcctgcagggcgagagcgttcctccagttgtgggtctgggggtggtggcatctcccctaaaggaagtggtccctctgtggcaagtgatgaagtctccagctttgcctcagctctcccagacagaaagactgcgtccttttcgtcgttggaaccccaggatcaggaggatttggagcccgtgaagaagaaaatgagaggagatggggaccttgacctgaacgggcagttgttggtcgcacaaccgcgtagaaatgcccaaaccgtccacgaggacgtcagagcagcggctgggaagccagacaagatggaggagacgctgacatgcatcatctgccaggacctgctgcacgactgcgtgagtttgcagccctgcatgcacacgttctgcgcggcttgctactcgggctggatggagcgctcgtccctgtgtcctacctgccgctgtcccgtggagcggatctgtaaaaaccacatcctcaacaacctcgtggaagcatacctcatccagcatccagacaagagtcgcagtgaagaagatgtgcaaagtatggatgccagaaataaaatcactcaagacatgctgcagcccaaagtcaggcggtctttttctgatgaagaagggagttcagaggacctgctggagctgtcagacgttgacagtgagtcctcagacattagccagccatacgtcgtgtgccggcagtgtcctgagtacagaaggcaggcggcgcagcctccccactgcccagcacccgagggcgagccaggagccccacaggccctgggggatgcaccctccacgtccgtcagcctgacgacagcagtccaggattacgtgtgccctctgcaaggaagccacgccctgtgcacctgctgcttccagcccatgcccgaccggagagcggagcgcgagcaggacccgcgtgtcgcccctcagcagtgtgcggtctgcctgcagcctttctgccacctgtactggggctgcacccggaccggctgctacggctgcctggccccgttttgtgagctcaacctgggtgacaagtgtctggacggcgtgctgaacaacaacagctacgagtcagacatcctgaagaattacctggcaaccagaggtttgacatggaaaaacatgttgaccgagagcctcgtggctctccagcggggagtgtttctgctgtctgattacagagtcacgggagacaccgttctgtgttactgctgtggcctgcgcagcttccgtgagctgacctatcagtatcggcagaacattcctgcttccgagttgccagtggccgtaacatcccgtcctgactgctactggggccgtaactgccgcactcaggtgaaagctcaccacgccatgaaattcaatcatatctgtgaacagacaaggttcaaaaactaagcatccagaggccctgagcagctttcagcactggaggtgaagagagcgtgtttttaaaatacagagacaagcacgtcaaggtgttttcacagccccctgagggaagggacgcagggtctccgacaggtgctctggggtgactcttctgtggagctttaccctctgagtgagaccctccccagagccccgggggccgcagcccgccctcctggtgagcgctgggcagggctcgtggtggcatcagcagcagagacgaagcctttctgtaacatgcggccgtcccgccgagaggggcagttttgctcttttgtacattttccgaaactacagttaaagcagaagtctgtttttaggaaaagtttcaagggagaagggcaagtttatcaaaaacattgtttcaggagaagggagcataagtttacagcctacaggacgtacacaatatcctgctgctgggaaaaccacagcattttatctattttttattttaataggtttggtgcttatcttctaataagatttaaatgtcacaaactgtagcacaaataatataatttataatttacaaattgactaaaattgggtatagtatggtatttgaaagaataagcatatgcttctgtttattaaaaaaagaaaccttccaatgtccaaaactgctaaccctcgacgtggccgccaagttagtcgctccttgctaaccggtgagtgaccgcggccccgagcctggggctggacgcaggtcccaggacatgctgctcccttgtgtgagtgaccgcggccccgagcctggggctggacgcaggtcccaggacgtgctgctcccttgtgtgagtgaccacggccccaagcccagggctggaggcaggtcccaggacgcgccgctccctcatgctgcccgggcccttcctccaagaccctacagagcctgaggggcaccttggcttccgcctgtgctagctttgccatgtcatctggaataatacttgaaattttgatttttggaaaaaaaagttttttatcttttgttgaaatcacctgttatccttgtttgtaaactgataacttttttgcttcttctcaggaatacagttttcaactgttgtcttgctcttgatagaaactgagaagcagcaatctgtatttgtggaggaaagtcctctcttttgcatattctaataaatgagccgcgtttgctcctc

SEQ ID NO: 5534 - DNA, 875 bp, Homo sapiens
  source 1..875: mol_type = unassigned DNA
cgagggggctgcggcgggcggcgaagggggacctggttgcggccgtgggagggggcgcccgccggcgtccaggccgggctgcggggctgcgtgggcgcgggcggccgggccggggcccgcggggtggggcgggcgccgagtctcggcctctggggtcgggagtctccatgggcgtttccggggtctccgcagatgtgaatcccgatggagcggcccgaggaaggcaagcagtcgccgccgccgcagccctggggacggctcctgcgtctgggcgcggaggagggcgagccgcacgtcctcctgaggaagcgggagtggaccatcgggcggagacgaggttgcgacctttccttccccagcaataaactggtctctggagatcactgtagaattgtagtggatgaaaaatcaggtcaggtgacactggaagataccagcaccagtggaacagtgattaacaagctgaaggttgttaagaagcagacatgccctttacagactggggatgtcatctacttggtgtacaggaagaatgaaccggaacacaacgtggcatacctctatgaatctttaagtgaaaagcaaggcatgacacaagaatcctttgatacctcaggtgcaggtgcagggcgaggggccgatccccgggtccctccgtcgtcgcccgccactcaggtgtgctttgaggaaccacagccatcaacatcgacgtcagacctcttccccacagcctcggcctcttccacggagccttctcctgcagggcgagagcgttcctccagttgtgggtctgggggtggtggcatctcccctaaaggaagtggtccctctgtggcaagtgatgaagtctccagctttgcctcagctctcccaga

SEQ ID NO: 5535 - DNA, 2446 bp, Homo sapiens
  source 1..2446: mol_type = unassigned DNA
agaatgctgatattcaggccaggcacggtggctcatgcctgtaatcccagcagtttgggaggccaaaacaggaggatctcttgaccctgttgcgacctttccttccccagcaataaactggtctctggagatcactgtagaattgtagtggatgaaaaatcaggtcaggtgacactggaagataccagcaccagtggaacagtgattaacaagctgaaggttgttaagaagcagacatgccctttacagactggggatgtcatctacttggtgtacaggaagaatgaaccggaacacaacgtggcatacctctatgaatctttaagtgaaaagcaaggcatgacacaagaatcctttgggtctgggggtggtggcatctcccctaaaggaagtggtccctctgtggcaagtgatgaagtctccagctttgcctcagctctcccagacagaaagactgcgtccttttcgtcgttggaaccccaggatcaggaggatttggagcccgtgaagaagaaaatgagaggagatggggaccttgacctgaacgggcagttgttggtcgcacaaccgcgtagaaatgcccaaaccgtccacgaggacgtcagagcagcggctgggaagccagacaagatggaggagacgctgacatgcatcatctgccaggacctgctgcacgactgcgtgagtttgcagccctgcatgcacacgttctgcgcggcttgctactcgggctggatggagcgctcgtccctgtgtcctacctgccgctgtcccgtggagcggatctgtaaaaaccacatcctcaacaacctcgtggaagcatacctcatccagcatccagacaagagtcgcagtgaagaagatgtgcaaagtatggatgccagaaataaaatcactcaagacatgctgcagcccaaagtcaggcggtctttttctgatgaagaagggagttcagaggacctgctggagctgtcagacgttgacagtgagtcctcagacattagccagccatacgtcgtgtgccggcagtgtcctgagtacagaaggcaggcggcgcagcctccccactgcccagcacccgagggcgagccaggagccccacaggccctgggggatgcaccctccacgtccgtcagcctgacgacagcagtccaggattacgtgtgccctctgcaaggaagccacgccctgtgcacctgctgcttccagcccatgcccgaccggagagcggagcgcgagcaggacccgcgtgtcgcccctcagcagtgtgcggtctgcctgcagcctttctgccacctgtactggggctgcacccggaccggctgctacggctgcctggccccgttttgtgtgtcgggcagacagtgctttcctgcgacatcattataaacaggtaacattgccccttcatctcggcagagctcaacctgggtgacaagtgtctggacggcgtgctgaacaacaacagctacgagtcagacatcctgaagaattacctggcaaccagaggtttgacatggaaaaacatgttgaccgagagcctcgtggctctccagcggggagtgtttctgctgtctgattacagagtcacgggagacaccgttctgtgttactgctgtggcctgcgcagcttccgtgagctgacctatcagtatcggcagaacattcctgcttccgagttgccagtggccgtaacatcccgtcctgactgctactggggccgtaactgccgcactcaggtgaaagctcaccacgccatgaaattcaatcatatctgtgaacagacaaggttcaaaaactaagcatccagaggccctgagcagctttcagcactggaggtgaagagagcgtgtttttaaaatacagagacaagcacgtcaaggtgttttcacagccccctgagggaagggacgcagggtctccgacaggtgctctggggtgactcttctgtggagctttaccctctgagtgagaccctccccagagccccgggggccgcagcccgccctcctggtgagcgctgggcagggctcgtggtggcatcagcagcagagacgaagcctttctgtaacatgcggccgtcccgccgagaggggcagttttgctcttttgtacattttccgaaactacagttaaagcagaagtctgtttttaggaaaagtttcaagggagaagggcaagtttatcaaaaacattgtttcaggagaagggagcataagtttacagcctacaggacgtacacaatatcctgctgctgggaaaaccacagcattttatctattttttattttaataggtttggtgcttatcttctaataagatttaaatgtcacaaactgtagcacaaataatataatttataatttacaaattgactaaaattgggtatagtatggtatttgaaagaataagcatatgcttctgtttattaaaaaaagaaaccttc

SEQ ID NO: 5536 - DNA, 2990 bp, Homo sapiens
  source 1..2990: mol_type = unassigned DNA
aatgtctcttgacagcggcggcggcgcagccggttccgggttcggcgcggggcggggatgtgaatcccgatggagcggcccgaggaaggcaagcagtcgccgccgccgcagccctggggacggctcctgcgtctgggcgcggaggagggcgagccgcacgtcctcctgaggaagcgggagtggaccatcgggcggagacgaggttgcgacctttccttccccagcaataaactggtctctggagatcactgtagaattgtagtggatgaaaaatcaggtcaggtgacactggaagataccagcaccagtggaacagtgattaacaagctgaaggttgttaagaagcagacatgccctttacagactggggatgtcatctacttggtgtacaggaagaatgaaccggaacacaggtctgggggtggtggcatctcccctaaaggaagtggtccctctgtggcaagtgatgaagtctccagctttgcctcagctctcccagacagaaagactgcgtccttttcgtcgttggaaccccaggatcaggaggatttggagcccgtgaagaagaaaatgagaggagatggggaccttgacctgaacgggcagttgttggtcgcacaaccgcgtagaaatgcccaaaccgtccacgaggacgtcagagcagcggctgggaagccagacaagatggaggagacgctgacatgcatcatctgccaggacctgctgcacgactgcgtgagtttgcagccctgcatgcacacgttctgcgcggcttgctactcgggctggatggagcgctcgtccctgtgtcctacctgccgctgtcccgtggagcggatctgtaaaaaccacatcctcaacaacctcgtggaagcatacctcatccagcatccagacaagagtcgcagtgaagaagatgtgcaaagtatggatgccagaaataaaatcactcaagacatgctgcagcccaaagtcaggcggtctttttctgatgaagaagggagttcagaggacctgctggagctgtcagacgttgacagtgagtcctcagacattagccagccatacgtcgtgtgccggcagtgtcctgagtacagaaggcaggcggcgcagcctccccactgcccagcacccgagggcgagccaggagccccacaggccctgggggatgcaccctccacgtccgtcagcctgacgacagcagtccaggattacgtgtgccctctgcaaggaagccacgccctgtgcacctgctgcttccagcccatgcccgaccggagagcggagcgcgagcaggacccgcgtgtcgcccctcagcagtgtgcggtctgcctgcagcctttctgccacctgtactggggctgcacccggaccggctgctacggctgcctggccccgttttgtgagctcaacctgggtgacaagtgtctggacggcgtgctgaacaacaacagctacgagtcagacatcctgaagaattacctggcaaccagaggtttgacatggaaaaacatgttgaccgagagcctcgtggctctccagcggggagtgtttctgctgtctgattacagagtcacgggagacaccgttctgtgttactgctgtggcctgcgcagcttccgtgagctgacctatcagtatcggcagaacattcctgcttccgagttgccagtggccgtaacatcccgtcctgactgctactggggccgtaactgccgcactcaggtgaaagctcaccacgccatgaaattcaatcatatctgtgaacagacaaggttcaaaaactaagcatccagaggccctgagcagctttcagcactggaggtgaagagagcgtgtttttaaaatacagagacaagcacgtcaaggtgttttcacagccccctgagggaagggacgcagggtctccgacaggtgctctggggtgactcttctgtggagctttaccctctgagtgagaccctccccagagccccgggggccgcagcccgccctcctggtgagcgctgggcagggctcgtggtggcatcagcagcagagacgaagcctttctgtaacatgcggccgtcccgccgagaggggcagttttgctcttttgtacattttccgaaactacagttaaagcagaagtctgtttttaggaaaagtttcaagggagaagggcaagtttatcaaaaacattgtttcaggagaagggagcataagtttacagcctacaggacgtacacaatatcctgctgctgggaaaaccacagcattttatctattttttattttaataggtttggtgcttatcttctaataagatttaaatgtcacaaactgtagcacaaataatataatttataatttacaaattgactaaaattgggtatagtatggtatttgaaagaataagcatatgcttctgtttattaaaaaaagaaaccttccaatgtccaaaactgctaaccctcgacgtggccgccaagttagtcgctccttgctaaccggtgagtgaccgcggccccgagcctggggctggacgcaggtcccaggacatgctgctcccttgtgtgagtgaccgcggccccgagcctggggctggacgcaggtcccaggacgtgctgctcccttgtgtgagtgaccacggccccaagcccagggctggaggcaggtcccaggacgcgccgctccctcatgctgcccgggcccttcctccaagaccctacagagcctgaggggcaccttggcttccgcctgtgctagctttgccatgtcatctggaataatacttgaaattttgatttttggaaaaaaaagttttttatcttttgttgaaatcacctgttatccttgtttgtaaactgataacttttttgcttcttctcaggaatacagttttcaactgttgtcttgctcttgatagaaactgagaagcagcaatctgtatttgtggaggaaagtcctctcttttgcatattctaataaatgagccgcgtttgctcctc

SEQ ID NO: 5537 - DNA, 1367 bp, Homo sapiens
  source 1..1367: mol_type = unassigned DNA
taagaaaaataaaagcatcagtattgcaaagactttccatgatcctacacccacctcgaaagccccctctcaccacaggaagtgcactgaccactggaggcataaaagaggtcctcaaagagcccgatcctcactctccttgcacagctcagcaggacctcagccatgagacttctcatcctggccctccttggcatctgctctctcactgcatacattgtggaaggtgtagggagtgaagtctcagataagaggacctgtgtgagcctcactacccagcgactgccggttagcagaatcaagacctacaccatcacggaaggctccttgagagcagtaatttttattaccaaacgtggcctaaaagtctgtgctgatccacaagccacatgggtgagagacgtggtcaggagcatggacaggaaatccaacaccagaaataacatgatccagaccaagccaacaggaacccagcaatcgaccaatacagctgtgactctgactggctagtagtctctggcaccctgtccgtctccagccagccagctcatttcactttacacgctcatggactgagtttatactcaccttttatgaaagcactgcatgaataaaattattcctttgtatttttacttttaaatgtcttctgtattcacttatatgttctaattaataaattatttattattaagaatagttccctagtctattcattatatttagggaaaggtagtgtatcattgttgtttgatttctgaccttgtacctctctttgatggtaaccataatggaagagattctggctagtgtctatcagaggtgaaagctatatcaatctctcttagagtccagcttgtaatggttctttacacatcagtcacaagttacagctgtgacaatggcaacaatttgagatgtatttcaacttgtctctataatagaattctgtttatagaataagggagaaaataatccagtcttcactgggttcccattctgagggtccactactcaaaaatttgcttcactcaatttttttcacctctttgtgttttattttggtgtcctattaaaggaataaaatgacacaacttgtcccttttttgtcccattagcaaaaattagaattttggtataaagaaactttattcaagtaaaaatcaataccctttgaattggacaataatctcactaccttattaggatttctgtatttgccattacgctagttatcatgcatgttatgctttactgcgaataagcttttaatgctccaaatgctgacccatgcaatatttcctcatgtgatcacaatttgcagtaaacttttaattaaatgctcatctggtaactcaacaccccag

SEQ ID NO: 5538 - DNA, 565 bp, Homo sapiens
  source 1..565: mol_type = unassigned DNA
actctccctgcacagctcagcgggacctcagccatgagacttctcatcctggccctccttggcatctgctctctcactgcatacattgtggaaggtgtagggagtgaagtctcacataggaggacctgtgtgagcctcactacccagcgactgccagttagcagaatcaagacctacaccatcacggaaggctccttgagagcagtaatttttattaccaaacgtggcctaaaagtctgtgctgatccacaagccacgtgggtgagagacgtggtcaggagcatggacaggaaatccaacaccagaaataacatgatccagaccaagccaacaggaacccagcaatcgaccaatacagctgtgaccctgactggctagtagtctctggcaccctgtccgtctccagccagccagctcatttcactttacaccctcatggactgagattatactcaccttttatgaaagcactgcatgaataaaattattcctttgtatttttacttttaaatgtcttctgtattcacttatatgttctaattaataaattatttattattaagaa

SEQ ID NO: 5539 - DNA, 5281 bp, Homo sapiens
  source 1..5281: mol_type = unassigned DNA
gttcatctggattcatggagtaggcgtttctattcaaacatgcaggctcttttctttatccagggcttgcagcttgattttcaggctgttcttggtttgaaggagttccaccaaggatccaccctaactgcctgcctgactggcttcttccttcctcctctctcactagctgtccccctctggccccctggctctctctgagactcctcccatcctcctcctccagccttctgggcaggacaggtgtttcagtttctttaagtgaaatatgaaacagagaagcaccatttctgcctcaagacgcatgtaaagaggtgtagattcagatgctctaaacgtccctgccatctggtccagatggagtcctcaggcaacccagagagcaccacctttttttactatgaccttcagagccagccgtgtgagaaccaggcctgggtctttgctaccctcgccaccactgtcctatactgcctggtgtttctcctcagcctagtgggcaacagcctggtcctgtgggtcctggtgaagtatgagagcctggagtccctcaccaacatcttcatcctcaacctgtgcctctcagacctggtgttcgcctgcttgttgcctgtgtggatctccccataccactggggctgggtgctgggagacttcctctgcaaactcctcaatatgatcttctccatcagcctctacagcagcatcttcttcctgaccatcatgaccatccaccgctacctgtcggtagtgagccccctctccaccctgcgcgtccccaccctccgctgccgggtgctggtgaccatggctgtgtgggtagccagcatcctgtcctccatcctcgacaccatcttccacaaggtgctttcttcgggctgtgattattccgaactcacgtggtacctcacctccgtctaccagcacaacctcttcttcctgctgtccctggggattatcctgttctgctacgtggagatcctcaggaccctgttccgctcacgctccaagcggcgccaccgcacggtcaagctcatcttcgccatcgtggtggcctacttcctcagctggggtccctacaacttcaccctgtttctgcagacgctgtttcggacccagatcatccggagctgcgaggccaaacagcagctagaatacgccctgctcatctgccgcaacctcgccttctcccactgctgctttaacccggtgctctatgtcttcgtgggggtcaagttccgcacacacctgaaacatgttctccggcagttctggttctgccggctgcaggcacccagcccagcctcgatcccccactcccctggtgccttcgcctatgagggcgcctccttctactgaggggcctgtggcggtgcaggcgcaggtgcaggtggacagggactggaatgggggtcatggagaagcgggcctggaaggagcattgcagaacacagcagggtggagacgtctcctccgctgcaggcgtgcagtgaaggtcattcattacaccagtgggtcccgccagcctctcatctgcgggaaagtggcttcctacctgggaattttatactgccatccaaaaaaacatttcttgaactctgagttcatcttgcacgctccttcatttagacatgtgtttctaatcactgtttagttcagaaggttctaagacatgaaaggattctgggaaaggtgcttccttggagactttacagggcctaaagctcattgtgataactgcacgatgctgacaagacaatgcctcccttccctgactgtaaggttgtccctactggtttattcactttggaggcgcctggctccgtattcctcaggtactgctggatgaggctgtctggaagacaaaagtcgccataccctgagataagcagtcatgttgatatctggattctaaaaatccacaactagactggagaaatgttctgtatcctggattcaagtcctagcccacgaactggcccttaaaaatttagctcataaatatttgattgaaggaatgaatttaataagtgctaccttctgcactaagtatttattcagagaatacaaagatgaatgagatacagttgctaccctccaggggccaacagcccagctccaaaggctcacctaccttggtgaacacccaccttggtgaaggcatctagggtggactcctccgacatctcatccttcccaggtggatagtgagctgacttcacatttatcactttgtacctaaagtgtcctcctcctatttggttgatggtggtagctccccccacccacccacactccaaacctcaagtcctcttggaggcctgtgttttcttttcctcaactcccacagccaggtccaaatgactatgcctgtctagtggctttcagagttgactcattcttgccattgcatgcccatggtttcatccctgaaacagggcctcacttccttggcatctccccactgctcctctctttccccaccaggctgttctctgcccttacaccaggtgcttcaaaacccttagtggctcctcattacttacaaatgaagtccatacactttagcaaggctttcaaggcctccacaatccgatgccagccaacttttccattcttattccactctaagcctcctccccacagcagcttgggatccaaccccaaaacaccactggccttctttcagacacatatctccccagtaccctacctctaggcatttgtcatgctgtcacctgggcctggaacatgttctagctgacaggccagcttctccaggaagccctccctaatctgcaaattagaacattctctgggttgtcgtgggattctgcttgtcccctctaaaataaaacaaccttgtgttgtagttacacacatgcaatgtcttatctccctgccccatcaggctgcaagcttcttgagggcaggaacctggtcttgaaccccagtgttctatcactgtgtgctcagtgggagcaaagaatcaacagctgttattatccttcagatttatgcttcttggggagccatgccctggggcacactttaccttctttgtcccaggctgcttctctataaatattaacctttctttcctagtctacactctcagagagtagtagaaagagagtagggtgtagtagtagagagattgcttatctctctctgtggcgatggctatgcttcaccttgccttctagttcatggtacgcatccctgcctctcacactggcccattgcttcacacccaagggcataaataaaagccactctctaaactttgccatgccacaaagacctgggcccaatctgtgaacctgatttggctctggcgtggggatttggaaaagcttcccatgcgattctgacatgcaccttcattaggtacatttggctgcaacttttttaaaaaatgaggagtccagagtcttctacagtcccttgagcagggatttgcacacagaagacactcaatatcttgttattgaataaagtagataccaatgtagccctctggccaacctagagagagcttgtaaggcatttccccttcagttccagatgcaacttcaatgatctatttgccaatggggcagtagatctggaggagtttatcggtctagggaagagccagggcctagttttaataatgaggccagtagcacctgctggacagggctgggcggcataccagtgaagggaaggggctcccatggacctacctgccagcctacaggtggggccactactcaccaccgatgggagaaacagcataaggaagagataatgaggtagtttgtggtatcagagctaagcctatgggcttctagttggcctaatctttcaaacacagtttcacactgattcttaacattttgttcaacttttactcagagggcaggctgagccagggagcaaaaaggcaaaggactcctactcacatacccacttagcaaaaccaaagcaccttgggctttgaacccacccttcttagaaggcaggtttgggggttgaggccccttgagaagctcacttcaccctctccccatgccatcccattcctacccatcccaagatgcttctcttgtatttctttcagcacatccagccatctccctgggagcgtttcatatctgactctttatacttccagtgatgttttggcatccctaatagactggctcccaaggcagtctttaatcaggagtcttcccctaatctagctcctcaagaacccaagggaagaggcacaaagagaagtatgaataggaagatagaagggtaacccagtcagagagggagtggcagatgacactgctgaaaaggagtttccagagagttgcacaccatgagccacgctgtctgtccctgaccacaacctccactggccaccacctcctgggcttcccctccctccacccacagaaaccattgctcaatctcaactggactcttgcaggcctatctctccctccaaacagagatgtcctggacacagagctgcagacctctaaccactcctggaacataaaaaaacccacggtggttctacagcatttacacctccagtttccctcagacagaatccagaagagaagaacctcgctgatctctgagcggagcatgtctccaagctcaggccagccccagaactccaatggcctcaactggagtggaaatccctcaaaggcacaaacccagttcctaccatctccctcagtgcctggcaatgtttgtggttggttgagtgagttaacaggagaccatcttttggccttttttctacctctgttttctcttactatacttgcctacatctcatcttctggtcaacaccaggtactcaccccatgagcttcttgtgaacttgtctggggcccaccggcctaaacatcatcttttttgtttggaattaagctttgttgaacttttcacaggtttcatttatgcaaatgcctgtgatgggacaaaaaggtctgcaaacatggaaacctggtctaaagatgtccaaagtaaactgtctgtggagtcgaatgacatttgagccctggacctaaactccaaatccaagctctttcccactgtgaccttgggcctctcaaggctcagtttcctcacctataaactgtagagaagccaataacagactcatccacactatgaggctgtgcataaggtcatgtatgtaaaactacttgctttgttgatcattctgtcccagataagtatgaattattatgcatcatttcattaaacaagaaagcttcactgtgtt

SEQ ID NO: 5540 - DNA, 332 bp, Homo sapiens
  source 1..332: mol_type = unassigned DNA
ctttaagtgaaatatgaaacagagaagcaccatttctgcctcaagacgcatgtaaagaggtgtagattcaggttggagtgcagtggcatgatcacagctctctgcagtctcgccctcctgggctcaagcaatctttccccaccccccggtttcctgagtagctgggactataggcatgcgccaccacacccggatgctctaaacgtccctgccatctggtccagatggagtcctcaggcaacccagagagcaccacctttttttactatgaccttcagagccagccgtgtgagaaccaggcctgggtctttgctaccctcgccaccactgtc

SEQ ID NO: 5541 - DNA, 1373 bp, Homo sapiens
  source 1..1373: mol_type = unassigned DNA
ctttaagtgaaatatgaaacagagaagcaccatttctgcctcaagacgcatgtaaagaggtgtagattcaggttggagtgcagtggcatgatcacagctctctgcagtctcgccctcctgggctcaagcaatctttccccaccccccggtttcctgagtagctgggactataggcatgcgccaccacacccggatgctctaaacgtccctgccatctggtccagatggagtcctcaggcaacccagagagcaccacctttttttactatgaccttcagagccagccgtgtgagaaccaggcctgggtctttgctaccctcgccaccactgtcctatactgcctggtgtttctcctcagcctagtgggcaacagcctggtcctgtgggtcctggtgaagtatgagagcctggagtccctcaccaacatcttcatcctcaacctgtgcctctcagacctggtgttcgcctgcttgttgcctgtgtggatctccccataccactggggctgggtgctgggagacttcctctgcaaactcctcaatatgatcttctccatcagcctctacagcagcatcttcttcctgaccatcatgaccatccaccgctacctgtcggtagtgagccccctctccaccctgcgcgtccccaccctccgctgccgggtgctggtgaccatggctgtgtgggtagccagcatcctgtcctccatcctcgacaccatcttccacaaggtgctttcttcgggctgtgattattccgaactcacgtggtacctcacctccgtctaccagcacaacctcttcttcctgctgtccctggggattatcctgttctgctacgtggagatcctcaggaccctgttccgctcacgctccaagcggcgccaccgcacggtcaagctcatcttcgccatcgtggtggcctacttcctcagctggggtccctacaacttcaccctgtttctgcagacgctgtttcggacccagatcatccggagctgcgaggccaaacagcagctagaatacgccctgctcatctgccgcaacctcgccttctcccactgctgctttaacccggtgctctatgtcttcgtgggggtcaagttccgcacacacctgaaacatgttctccggcagttctggttctgccggctgcaggcacccagcccagcctcgatcccccactcccctggtgccttcgcctatgagggcgcctccttctactgaggggcctgtggcggtgcaggcgcaggtgcaggtggacagggactggaatgggggtcatggagaagcgggcctggaaggagcattgcagaacacagcagggtggagacgtctcctccgctgcaggcgtgcagtgaaggtcattcatta

SEQ ID NO: 5542 - DNA, 520 bp, Homo sapiens
  source 1..520: mol_type = unassigned DNA
accaggctcatcaaagctgctccaggaaggcccaagccagaccagaagacatgcagatcatcaccacagccctggtgtgcttgctgctagctgggatgtggccggaagatgtggacagcaagagcatgcaggtacccttctccagatgttgcttctcatttgcggagcaagagattcccctgagggcaatcctgtgttacagaaataccagctccatctgctccaatgagggcttaatattcaagctgaagagaggcaaagaggcctgcgccttggacacagttggatgggttcagaggcacagaaaaatgctgaggcactgcccgtcaaaaagaaaatgagcagatttctttccattgtgggctctggaaaccacatggcttcacctgtccccgaaactaccagccctacaccattccttctgccctgcttttgctaggtcacagaggatctgcttggtcttgataagctatgttgttgcactttaaacatttaaattatacaatcatcaacccccaac

SEQ ID NO: 5543 - DNA, 851 bp, Homo sapiens
  source 1..851: mol_type = unassigned DNA
aaaaggccggcggaacagccagaggagcagagaggcaaagaaacattgtgaaatctccaactcttaaccttcaacatgaaagtctctgcagtgcttctgtgcctgctgctcatgacagcagctttcaacccccagggacttgctcagccagatgcactcaacgtcccatctacttgctgcttcacatttagcagtaagaagatctccttgcagaggctgaagagctatgtgatcaccaccagcaggtgtccccagaaggctgtcatcttcagaaccaaactgggcaaggagatctgtgctgacccaaaggagaagtgggtccagaattatatgaaacacctgggccggaaagctcacaccctgaagacttgaactctgctacccctactgaaatcaagctggagtacgtgaaatgacttttccattctcctctggcctcctcttctatgctttggaatacttctaccataattttcaaataggatgcattcggttttgtgattcaaaatgtactatgtgttaagtaatattggctattatttgacttgttgctggtttggagtttatttgagtattgctgatcttttctaaagcaaggccttgagcaagtaggttgctgtctctaagcccccttcccttccactatgagctgctggcagtgggtttgtattcggttcccaggggttgagagcatgcctgtgggagtcatggacatgaagggatgctgcaatgtaggaaggagagctctttgtgaatgtgaggtgttgctaaatatgttattgtggaaagatgaatgcaatagtaggactgctgacattttgcagaaaatacattttatttaaaatctccta

SEQ ID NO: 5544 - DNA, 850 bp, Homo sapiens
  source 1..850: mol_type = unassigned DNA
ccgcaggagcctctgaagctcccaccaggccagctctcctcccacaacagcttcccacagcatgaagatctccgtggctgccattcccttcttcctcctcatcaccatcgccctagggaccaagactgaatcctcctcacggggaccttaccacccctcagagtgctgcttcacctacactacctacaagatcccgcgtcagcggattatggattactatgagaccaacagccagtgctccaagcccggaattgtcttcatcaccaaaaggggccattccgtctgtaccaaccccagtgacaagtgggtccaggactatatcaaggacatgaaggagaactgagtgacccagaaggggtggcgaaggcacagctcagagacataaagagaagatgccaaggccccctcctccacccaccgctaactctcagccccagtcaccctcttggagcttccctgctttgaattaaagaccactcatgctcttccctggcctcattcctttctacgggatttactcattggccatgcactgaggacaccagggtgtggcaccctcggcatcaagcctcgctctgcagaagttttgctggagcctggtacaaaaaataggtcaggcctgcaatgcaggtagtgagaagcagaaagtgagaaagaaaagcagtgtaaagaccgtctcctcctcagcaacaacagtagcagaccccgttttcttaatgctttctatactccaagcactctgctaggcagtctgtatgcattatcttatttaagcttcatgacaagtgtaaaagctacaaatcatcatttgattttttaggtaacacttcataaagggctctctatagca

SEQ ID NO: 5545 - DNA, 554 bp, Homo sapiens
  source 1..554: mol_type = unassigned DNA
tttctcaacaattcctcaccgcaggagcctctgaagctcccaccaggccagctctcctcccacaacagcttcccacagcatgaagatctccgtggctgccattcccttcttcctcctcatcaccatcgccctagggaccaagactgaatcctcctcacaaactggggggaaaccgaaggttgttaaaatacagctaaagttggtggggggaccttaccacccctcagagtgctgcttcacctacactacctacaagatcccgcgtcagcggattatggattactatgagaccaacagccagtgctccaagcccggaattgtcttcatcaccaaaaggggccattccgtctgtaccaaccccagtgacaagtgggtccaggactatatcaaggacatgaaggagaactgagtgacccagaaggggtggcgaaggcacagctcagagacataaagagaagatgccaaggccccctcctccacccaccgctaactctcagccccagtcaccctcttggagcttccctgctttgaattaaagaccactcatgctcttc

SEQ ID NO: 5546 - DNA, 1487 bp, Homo sapiens
  source 1..1487: mol_type = unassigned DNA
cctgctctaaatcttgtctcggtctctcactctgccttatacccctcagttgaattatttcttctgaggaggcaagaactgaggctgctgcagactgatatggattcaccactgctaacacctcctggttggaactacaggaatagaactggaaagggaaaaaaggcagcattcaccacatcccaatcctgaatccaagagtctaagatagtcccccactcctatctcaggcttagaggattagattaatctcctggagggaagactcttccttgaaacatttttttttatctgcctgtagctattgggataattcgggaaatccacagggacagttcaagtcatctttgtcctctactttctgttgcactctcagccttgttctctttttagaaactgcatggtaactattatatagctaaagaagagcattctgacctctgccctctgccctgggacttcctggatcctcctcttcttataaatacaagggcagagctggtatcccggggagccaggaagcagtgagcccaggagtcctcggccagccctgcctgcccaccaggaggatgaaggtctccgtggctgccctctcctgcctcatgcttgttgctgtccttggatcccaggcccagttcataaatgatgcagagacagagttaatgatgtcaaagcttccactggaaaatccagtagttctgaacagctttcactttgctgctgactgctgcacctcctacatctcacaaagcatcccgtgttcactcatgaaaagttattttgaaacgagcagcgagtgctccaagccaggtgtcatattcctcaccaagaaggggcggcaagtctgtgccaaacccagtggtccgggagttcaggattgcatgaaaaagctgaagccctactcaatataataataaagagacaaaagaggccagccacccacctccaacacctcctgagcctctgaagctcccaccaggccagctctcctcccacaacagcttcccacagcatgaagatctccgtggctgccattcccttcttcctcctcatcaccatcgccctagggaccaagactgaatcctcctcacaaactggggggaaaccgaaggttgttaaaatacagctaaagttggtggggggaccttaccacccctcagagtgctgcttcacctacactacctacaagatcccgcgtcagcggattatggattactatgagaccaacagccagtgctccaagcccggaattgtcttcatcaccaaaaggggccattccgtctgtaccaaccccagtgacaagtgggtccaggactatatcaaggacatgaaggagaactgagtgacccagaaggggtggcgaaggcacagctcagagacataaagagaagatgccaaggccccctcctccacccaccgctaactctcagccccagtcaccctcttggagcttccctgctttgaattaaagaccactcatgctcttc

SEQ ID NO: 5547 - DNA, 542 bp, Homo sapiens
  source 1..542: mol_type = unassigned DNA
ggagccaggaagcagtgagcccaggagtcctcggccagccctgcctgcccaccaggaggatgaaggtctccgtggctgccctctcctgcctcatgcttgttgctgtccttggatcccaggcccagttcataaatgatgcagagacagagttaatgatgtcaaagcttccactggaaaatccagtagttctgaacagctttcactttgctgctgactgctgcacctcctacatctcacaaagcatcccgtgttcactcatgaaaagttattttgaaacgagcagcgagtgctccaagccaggtgtcatattcctcaccaagaaggggcggcaagtctgtgccaaacccagtggtccgggagttcaggattgcatgaaaaagctgaagccctactcaatataataataaagagacaaaagaggccagccacccacctccaacacctcctgtgagtttcttggtctgaaatacttaaaaaatatatatattgttgtgtctggtaatgaaagtaatgcatctaataaagagtattcaattttttaa

SEQ ID NO: 5548 - DNA, 718 bp, Homo sapiens
  source 1..718: mol_type = unassigned DNA
gctgcacctcctacatctcacaaagcatcccgtgttcactcatgaaaagttattttgaaacgagcagcgagtgctccaagccaggtgtcatattcctcaccaagaaggggcggcaagtctgtgccaaacccagtggtccgggagttcaggattgcatgaaaaagctgaagccctactcaatataataataaagagacaaaagaggccagccacccacctccaacacctcctagatctgagcctggaacaggtgttgcagagaagcagaaaaagagaggactcacaccagttgactcttgtggcatgattttggatgtggcattggagctggtctctctaggattctacctcggcctcccaggttcaagcaattctcctgcctcagcctccctactagctgggattacgtgcctgccaccagacctgactaatttctgtatttttagtagagacagggtttcgccttgttggtcaggctggtctcaaactcctaacctcagatgatccacccacctcggcctcccaaagtactggaattaacggcatgagccactgcactcagcctctacctacttttcaagccttcctgatactacctaaaatctttgcagtaaagtcctttttgcttaatcaaccagagtcagtttgtatagctttccaacaaaaaactccaactgatatgaacaataaactttctgggactttgaaggtctaaaaa

SEQ ID NO: 5549 - DNA, 929 bp, Homo sapiens
  source 1..929: mol_type = unassigned DNA
ggagccaggaagcagtgagcccaggagtcctcggccagccctgcctgcccaccaggaggatgaaggtctccgtggctgccctctcctgcctcatgcttgttgctgtccttggatcccaggcccagttcataaatgatgcagagacagagttaatgatgtcaaagcttccactggaaaatccagtagttctgaacagctttcactttgctgctgactgctgcacctcctacatctcacaaagcatcccgtgttcactcatgaaaagttattttgaaacgagcagcgagtgctccaagccaggtgtcatattcctcaccaagaaggggcggcaagtctgtgccaaacccagtggtccgggagttcaggattgcatgaaaaagctgaagccctactcaatataataataaagagacaaaagaggccagccacccacctccaacacctcctgagcctctgaagctcccaccaggccagctctcctcccacaacagcttcccacagcatgaagatctccgtggctgccattcccttcttcctcctcatcaccatcgccctagggaccaagactgaatcctcctcacggggaccttaccacccctcagagtgctgcttcacctacactacctacaagatcccgcgtcagcggattatggattactatgagaccaacagccagtgctccaagcccggaattgtcttcatcaccaaaaggggccattccgtctgtaccaaccccagtgacaagtgggtccaggactatatcaaggacatgaaggagaactgagtgacccagaaggggtggcgaaggcacagctcagagacataaagagaagatgccaaggccccctcctccacccaccgctaactctcagccccagtcaccctcttggagcttccctgctttgaattaaagaccactcatgctcttc

SEQ ID NO: 5550 - DNA, 977 bp, Homo sapiens
  source 1..977: mol_type = unassigned DNA
ggagccaggaagcagtgagcccaggagtcctcggccagccctgcctgcccaccaggaggatgaaggtctccgtggctgccctctcctgcctcatgcttgttgctgtccttggatcccaggcccagttcataaatgatgcagagacagagttaatgatgtcaaagcttccactggaaaatccagtagttctgaacagctttcactttgctgctgactgctgcacctcctacatctcacaaagcatcccgtgttcactcatgaaaagttattttgaaacgagcagcgagtgctccaagccaggtgtcatattcctcaccaagaaggggcggcaagtctgtgccaaacccagtggtccgggagttcaggattgcatgaaaaagctgaagccctactcaatataataataaagagacaaaagaggccagccacccacctccaacacctcctgagcctctgaagctcccaccaggccagctctcctcccacaacagcttcccacagcatgaagatctccgtggctgccattcccttcttcctcctcatcaccatcgccctagggaccaagactgaatcctcctcacaaactggggggaaaccgaaggttgttaaaatacagctaaagttggtggggggaccttaccacccctcagagtgctgcttcacctacactacctacaagatcccgcgtcagcggattatggattactatgagaccaacagccagtgctccaagcccggaattgtcttcatcaccaaaaggggccattccgtctgtaccaaccccagtgacaagtgggtccaggactatatcaaggacatgaaggagaactgagtgacccagaaggggtggcgaaggcacagctcagagacataaagagaagatgccaaggccccctcctccacccaccgctaactctcagccccagtcaccctcttggagcttccctgctttgaattaaagaccactcatgctcttc

SEQ ID NO: 5551 - DNA, 1506 bp, Homo sapiens
  source 1..1506: mol_type = unassigned DNA
gttggcaagcggaccaccagcaacagacaacatcttcattcggctctccctgaagctgtactgcctcgctgagaggatgaaggtctccgaggctgccctgtctctccttgtcctcatccttatcattacttcggcttctcgcagccagccaaaagttcctgagtgggtgaacaccccatccacctgctgcctgaagtattatgagaaagtgttgccaaggagactagtggtgggatacagaaaggccctcaactgtcacctgccagcaatcatcttcgtcaccaagaggaaccgagaagtctgcaccaaccccaatgacgactgggtccaagagtacatcaaggatcccaacctacctttgctgcctaccaggaacttgtccacggttaaaattattacagcaaagaatggtcaaccccagctcctcaactcccagtgatgaccaggctttagtggaagcccttgtttacagaagagaggggtaaacctatgaaaacaggggaagccttattaggctgaaactagccagtcacattgagagaagcagaacaatgatcaaaataaaggagaagtatttcgaatattttctcaatcttaggaggaaataccaaagttaagggacgtgggcagaggtacgctcttttatttttatatttatatttttatttttttgagatagggtcttactctgtcacccaggctggagtgcagtggtgtgatcttggctcacttgatcttggctcactgtaacctccacctcccaggctcaagtgatcctcccaccccagcctcctgagtagctgggactacaggcttgcgccaccacacctggctaatttttgtatttttggtagagacgggattctaccatgttgcccaggctggtctcaaactcgtgtgcccaagcaatccacctgcctcagccttccaaaagtgctgggattacaggcgtgagccaccacatccggccagtgcactcttaatacacagaaaaatatatttcacatccttctcctgctctctttcaattcctcacttcacaccagtacacaagccattctaaatacttagccagtttccagccttccagatgatctttgccctctgggtcttgacccattaagagccccatagaactcttgatttttcctgtccatctttatggatttttctggatctatattttcttcaattattctttcattttataatgcaactttttcataggaagtccggatgggaatattcacattaatcatttttgcagagactttgctagatcctctcatattttgtcttcctcagggtggcaggggtacagagagtgcctgattggaaaaaaaaaaaaaagagagagagagagaagaagaagaagaagagacacaaatctctacctcccatgttaagctttgcaggacagggaaagaaagggtatgagacacggctaggggtaaactcttagtccaaaacccaagcatgcaataaataaaactcccttatttgaca

SEQ ID NO: 5552 - DNA, 615 bp, Homo sapiens
  source 1..615: mol_type = unassigned DNA
gctcagagagaagtgactttgagctcacagtgtcaccgcctgctgatgggagagctgaattcaaaaccagggtgtctccctgagcagagggacctgcacacagagactccctcctgggctcctggcaccatggccccactgaagatgctggccctggtcaccctcctcctgggggcttctctgcagcacatccacgcagctcgagggaccaatgtgggccgggagtgctgcctggagtacttcaagggagccattccccttagaaagctgaagacgtggtaccagacatctgaggactgctccagggatgccatcgtttttgtaactgtgcagggcagggccatctgttcggaccccaacaacaagagagtgaagaatgcagttaaatacctgcaaagccttgagaggtcttgaagcctcctcaccccagactcctgactgtctcccgggactacctgggacctccaccgttggtgttcaccgcccccaccctgagcgcctgggtccaggggaggccttccagggacgaagaagagccacagtgagggagatcccatccccttgtctgaactggagccatgggcacaaagggcccagattaaagtctttatcctc

SEQ ID NO: 5553 - DNA, 1324 bp, Homo sapiens
  source 1..1324: mol_type = unassigned DNA
gccaggagttgtgagtttccaagccccagctcactctgaccacttctctgcctgcccagcatcatgaagggccttgcagctgccctccttgtcctcgtctgcaccatggccctctgctcctgtgcacaagttggtaccaacaaagagctctgctgcctcgtctatacctcctggcagattccacaaaagttcatagttgactattctgaaaccagcccccagtgccccaagccaggtgtcatcctcctaaccaagagaggccggcagatctgtgctgaccccaataagaagtgggtccagaaatacatcagcgacctgaagctgaatgcctgaggggcctggaagctgcgagggcccagtgaacttggtgggcccaggagggaacaggagcctgagccagggcaatggccctgccaccctggaggccacctcttctaagagtcccatctgctatgcccagccacattaactaactttaatcttagtttatgcatcatatttcattttgaaattgatttctattgttgagctgcattatgaaattagtattttctctgacatctcatgacattgtctttatcatcctttcccctttcccttcaactcttcgtacattcaatgcatggatcaatcagtgtgattagctttctcagcagacattgtgccatatgtatcaaatgacaaatctttattgaatggttttgctcagcaccaccttttaatatattggcagtacttattatataaaaggtaaaccagcattctcactgtgacgactctgttgattttgtttcactaatcggaatcacagactgagaggaattctgggggaggagtagggaaatatgaaaaggggcagaaacagcaagatagggaccaagtacttctacagtcataccagacatttccctggagatactttcctgaaaagttgaaacagacaccattagtttataaaccatattgtaactgaaatgtgatagaaaaattttctacttaaatgaatatcaagatgacgctgcaatgcatatttacgcacacaagctcattttcataaatgaagctttcctcagaatgatggctaacatctgttgaggtcttaccaagtgctgggttttgggctaagtacttatattagtaaaagtctagcaaatactgcccatagtctagcaaggactccttacctggaagttgctgaaagccttggtaatgttatctttgttctccactctgcttttggggaggatgttttccatgactatacgagatgaggcttggggctgggtggccagagttagcaaataaaaatacagaatggatacta

SEQ ID NO: 5554 - DNA, 687 bp, Homo sapiens
  source 1..687: mol_type = unassigned DNA
cattcccagcctcacatcactcacaccttgcatttcacccctgcatcccagtcgccctgcagcctcacacagatcctgcacacacccagacagctggcgctcacacattcaccgttggcctgcctctgttcaccctccatggccctgctactggccctcagcctgctggttctctggacttccccagccccaactctgagtggcaccaatgatgctgaagactgctgcctgtctgtgacccagaaacccatccctgggtacatcgtgaggaacttccactaccttctcatcaaggatggctgcagggtgcctgctgtagtgttcaccacactgaggggccgccagctctgtgcacccccagaccagccctgggtagaacgcatcatccagagactgcagaggacctcagccaagatgaagcgccgcagcagttaacctatgaccgtgcagagggagcccggagtccgagtcaagcattgtgaattattacctaacctggggaaccgaggaccagaaggaaggaccaggcttccagctcctctgcaccagacctgaccagccaggacagggcctggggtgtgtgtgagtgtgagtgtgagcgagagggtgagtgtggtcagagtaaagctgctccacccccagattgcaatgctaccaataaagccgcctggtgtttacaactaattg

SEQ ID NO: 5555 - DNA, 414 bp, Homo sapiens
  source 1..414: mol_type = unassigned DNA
tcctgcacacacccagacagctggcgctcacacattcaccgttggcctgcctctgttcaccctccatggccctgctactggccctcagcctgctggttctctggacttccccagccccaactctgagtggcaccaatgatgctgaagactgctgcctgtctgtgacccagaaacccatccctgggtacatcgtgaggaacttccactaccttctcatcaaggatggctgcagggtgcctgctgtagtgttcaccacactgaggggccgccagctctgtgcacccccagaccagccctgggtagaacgcatcatccagagactgcagaggacctcagccaaggcaagcctggccctccctggccctgtctcctccctctgagctcctgtctaagattccagcccatgatccttcc

SEQ ID NO: 5556 - DNA, 800 bp, Homo sapiens
  source 1..800: mol_type = unassigned DNA
cactcccaaagaactgggtactcaacactgagcagatctgttctttgagctaaaaaccatgtgctgtaccaagagtttgctcctggctgctttgatgtcagtgctgctactccacctctgcggcgaatcagaagcagcaagcaactttgactgctgtcttggatacacagaccgtattcttcatcctaaatttattgtgggcttcacacggcagctggccaatgaaggctgtgacatcaatgctatcatctttcacacaaagaaaaagttgtctgtgtgcgcaaatccaaaacagacttgggtgaaatatattgtgcgtctcctcagtaaaaaagtcaagaacatgtaaaaactgtggcttttctggaatggaattggacatagcccaagaacagaaagaaccttgctggggttggaggtttcacttgcacatcatggagggtttagtgcttatctaatttgtgcctcactggacttgtccaattaatgaagttgattcatattgcatcatagtttgctttgtttaagcatcacattaaagttaaactgtattttatgttatttatagctgtaggttttctgtgtttagctatttaatactaattttccataagctattttggtttagtgcaaagtataaaattatatttgggggggaataagattatatggactttcttgcaagcaacaagctattttttaaaaaaaactatttaacattcttttgtttatattgttttgtctcctaaattgttgtaattgcattataaaataagaaaaatattaataagacaaatatt

SEQ ID NO: 5557 - DNA, 831 bp, Homo sapiens
  source 1..831: mol_type = unassigned DNA
agaatataacagcactcccaaagaactgggtactcaacactgagcagatctgttctttgagctaaaaaccatgtgctgtaccaagagtttgctcctggctgctttgatgtcagtgctgctactccacctctgcggcgaatcagaagcaagcaactttgactgctgtcttggatacacagaccgtattcttcatcctaaatttattgtgggcttcacacggcagctggccaatgaaggctgtgacatcaatgctatcatctttcacacaaagaaaaagttgtctgtgtgcgcaaatccaaaacagacttgggtgaaatatattgtgcgtctcctcagtaaaaaagtcaagaacatgtaaaaactgtggcttttctggaatggaattggacatagcccaagaacagaaagaaccttgctggggttggaggtttcacttgcacatcatggagggtttagtgcttatctaatttgtgcctcactggacttgtccaattaatgaagttgattcatattgcatcatagtttgctttgtttaagcatcacattaaagttaaactgtattttatgttatttatagctgtaggttttctgtgtttagctatttaatactaattttccataagctattttggtttagtgcaaagtataaaattatatttgggggggaataagattatatggactttcttgcaagcaacaagctattttttaaaaaaaactatttaacattcttttgtttatattgttttgtctcctaaattgttgtaattgcattataaaataagaaaaatattaataagacaaatattgaaaataaagaaacaaaaagtt

SEQ ID NO: 5558 - DNA, 852 bp, Homo sapiens
  source 1..852: mol_type = unassigned DNA
cttgcagctgcccacctcaccctcagctctggcctcttactcaccctctaccacagacatggctcagtcactggctctgagcctccttatcctggttctggcctttggcatccccaggacccaaggcagtgatggaggggctcaggactgttgcctcaagtacagccaaaggaagattcccgccaaggttgtccgcagctaccggaagcaggaaccaagcttaggctgctccatcccagctatcctgttcttgccccgcaagcgctctcaggcagagctatgtgcagacccaaaggagctctgggtgcagcagctgatgcagcatctggacaagacaccatccccacagaaaccagcccagggctgcaggaaggacaggggggcctccaagactggcaagaaaggaaagggctccaaaggctgcaagaggactgagcggtcacagacccctaaagggccatagcccagtgagcagcctggagccctggagaccccaccagcctcaccagcgcttgaagcctgaacccaagatgcaagaaggaggctatgctcaggggccctggagcagccaccccatgctggccttgccacactctttctcctgctttaaccaccccatctgcattcccagctctaccctgcatggctgagctgcccacagcaggccaggtccagagagaccgaggagggagagtctcccagggagcatgagaggaggcagcaggactgtccccttgaaggagaatcatcaggaccctggacctgatacggctccccagtacaccccacctcttccttgtaaatatgatttatacctaactgaataaaaagctgttctgtcttcccacccaa

SEQ ID NO: 5559 - DNA, 599 bp, Homo sapiens
  source 1..599: mol_type = unassigned DNA
gacatggctcagtcactggctctgagcctccttatcctggttctggcctttggcatccccaggacccaaggcagtgatggaggggctcaggactgttgcctcaagtacagccaaaggaagattcccgccaaggttgtccgcagctaccggaagcaggaaccaagcttaggctgctccatcccagctatcctgttcttgccccgcaagcgctctcaggcagagctatgtgcagacccaaaggagctctgggtgcagcagctgatgcagcatctggacaagacaccatccccacagaaaccagcccagggctgcaggaaggacaggggggcctccaagactggcaagaaaggaaagggctccaaaggctgcaagaggtgaggaatctgagggatgtgggtaaaggggagcctcagtcagcccctcacacccctcttctgccctcacaggactgagcggtcacagacccctaaagggccatagcccagtgagcagcctggagccctggagaccccaccagcctcaccagcgcttgaagcctgaacccaagatgcaagaaggaggctatgctcaggggccctggagcagccaccccatgctgg

SEQ ID NO: 5560 - DNA, 2929 bp, Homo sapiens
  source 1..2929: mol_type = unassigned DNA
tatgtccctttgcagacacctgggctgagacatacaggacagagcatggatcgcctacagactgcactcctggttgtcctcgtcctccttgctgtggcgcttcaagcaactgaggcaggcccctacggcgccaacatggaagacagcgtctgctgccgtgattacgtccgttaccgtctgcccctgcgcgtggtgaaacacttctactggacctcagactcctgcccgaggcctggcgtggtgttgctaaccttcagggataaggagatctgtgccgatcccagagtgccctgggtgaagatgattctcaataagctgagccaatgaagagcctactctgatgaccgtggccttggctcctccaggaaggctcaggagccctacctccctgccattatagctgctccccgccagaagcctgtgccaactctctgcattccctgatctccatccctgtggctgtcacccttggtcacctccgtgctgtcactgccatctcccccctgacccctctaacccatcctctgcctccctccctgcagtcagagggtcctgttcccatcagcgattcccctgcttaaacccttccatgactccccactgccctaagctgaggtcagtctcccaagcctggcatgtggccctctggatctgggttccatctctgtctccagcctgcccacttcccttcatgaatgttgggttctagctccctgttctccaaacccatactacacatcccacttctgggtctttgcctgggatgttgctgacacccagaaagtcccaccacctgcacatgtgtagccccaccagccctccaaggcattgctcgcccaagcagctggtaattccatttcatgtattagatgtcccctggccctctgtcccctcttaataaccctagtcacagtctccgcagattcttgggatttgggggttttctcccccacctctccactagttggaccaaggtttctagctaagttactctagtctccaagcctctagcatagagcactgcagacaggccctggctcagaatcagagcccagaaagtggctgcagacaaaatcaataaaactaatgtccctcccctctccctgccaaaaggcagttacatatcaatacagagactcaaggtcactagaaatgggccagctgggtcaatgtgaagccccaaatttgcccagattcacctttcttcccccactccctttttttttttttttttgagatggagtttcgctcttgtcacccacgctggagtgcaatggtgtggtcttggcttattgaagcctctgcctcctgggttcaagtgattctcttgcctcagcctcctgagtagctgggattacaggttcctgctaccacgcccagctaatttttgtatttttagtagagacgaggcttcaccatgttggccaggctggtctcgaactcctgtcctcaggtaatccgcccacctcagcctcccaaagtgctgggattacaggcgtgagccacagtgcctggcctcttccctctccccaccccccccccaacttttttttttttttatggcagggtctcactctgtcgcccaggctggagtgcagtggcgtgatctcggctcactacaacctcgacctcctgggttcaagcgattctcccaccccagcctcccaagtagctgggattacaggtgtgtgccactacggctggctaatttttgtatttttagtagagacaggtttcaccatattggccaggctggtcttgaactcctgacctcaagtgatccaccttccttgtgctcccaaagtgctgagattacaggcgtgagctatcacacccagcctccccctttttttcctaataggagactcctgtacctttcttcgttttacctatgtgtcgtgtctgcttacatttccttctcccctcaggctttttttgggtggtcctccaacctccaatacccaggcctggcctcttcagagtaccccccattccactttccctgcctccttccttaaatagctgacaatcaaattcatgctatggtgtgaaagactacctttgacttggtattataagctggagttatatatgtatttgaaaacagagtaaatacttaagaggccaaatagatgaatggaagaattttaggaactgtgagagggggacaaggtggagctttcctggccctgggaggaagctggctgtggtagcgtagcgctctctctctctgtctgtggcaggaggcaaagagtagggtgtaattgagtgaaggaatcctgggtagagaccattctcaggtggttgggccaggctaaagactgggatttgggtctatctatgcctttctggctgatttttgtagagacggggttttgccatgttacccaggctggtctcaaactcctgggctcaagcgatcctcctggctcagcctcccaaagtgctgggattacaggcgtgagtcactgcgcctggcttcctcttcctcttgagaaatattcttttcatacagcaagtatgggacagcagtgtcccaggtaaaggacataaatgttacaagtgtctggtcctttctgagggaggctggtgccgctctgcagggtatttgaacctgtggaattggaggaggccatttcactccctgaacccagcctgacaaatcacagtgagaatgttcaccttataggcttgctgtggggctcaggttgaaagtgtggggagtgacactgcctaggcatccagctcagtgtcatccagggcctgtgtccctcccgaacccagggtcaacctgcctaccacaggcactagaaggacgaatctgcctactgcccatgaacggggccctcaagcgtcctgggatctccttctccctcctgtcctgtccttgcccctcaggactgctggaaaataaatcctttaaaatagt

SEQ ID NO: 5561 - DNA, 625 bp, Homo sapiens
  source 1..625: mol_type = unassigned DNA
ctggcatcccgagaagccaggaagcagtgagcccaggagtcctcggccagccctgcctgcccaccaggaggatgaaggtctccgtggctgccctctcctgcctcatgcttgttactgcccttggatcccaggcccgggtcacaaaagatgcagagacagagttcatgatgtcaaagcttccattggaaaatccagtacttctggacatgctctggaggagaaagattggtcctcagatgaccctttctcatgctgcaggattccatgctactagtgctgactgctgcatctcctacaccccacgaagcatcccgtgttcactcctggagagttactttgaaacgaacagcgagtgctccaagccgggtgtcatcttcctcaccaagaaggggcgacgtttctgtgccaaccccagtgataagcaagttcaggtttgcgtgagaatgctgaagctggacacacggatcaagaccaggaagaattgaacttgtcaaggtgaagggacacaagttgccagccaccaactttcttgcctcaactaccttcctgaattattttttaaagaagcatttattcttgtgttctggatttagagcaattcatctaataaacagtttctcacttt

SEQ ID NO: 5562 - DNA, 569 bp, Homo sapiens
  source 1..569: mol_type = unassigned DNA
tcccgagaagccaggaagcagtgagcccaggagtcctcggccagccctgcctgcccaccaggaggatgaaggtctccgtggctgccctctcctgcctcatgcttgttactgcccttggatcccaggcccgggtcacaaaagatgcagagacagagttcatgatgtcaaagcttccattggaaaatccagtacttctggacagattccatgctactagtgctgactgctgcatctcctacaccccacgaagcatcccgtgttcactcctggagagttactttgaaacgaacagcgagtgctccaagccgggtgtcatcttcctcaccaagaaggggcgacgtttctgtgccaaccccagtgataagcaagttcaggtttgcgtgagaatgctgaagctggacacacggatcaagaccaggaagaattgaacttgtcaaggtgaagggacacaagttgccagccaccaactttcttgcctcaactaccttcctgaattattttttaaagaagcatttattcttgtgttctggatttagagcaattcatctaataaacagtttctcactttt

SEQ ID NO: 5563 - DNA, 582 bp, Homo sapiens
  source 1..582: mol_type = unassigned DNA
actctgcaaggacccgagctatttatccctaggtcctttcctcctgcacgtcagctttgagccccgagctggtgcttctgctctctgagacatggcaggcctgatgaccatagtaaccagccttctgttccttggtgtctgtgcccaccacatcatccctacgggctctgtggtcatcccctctccctgctgcatgttctttgtttccaagagaattcctgagaaccgagtggtcagctaccagctgtccagcaggagcacatgcctcaaggcaggagtgatcttcaccaccaagaagggccagcagttctgtggcgaccccaagcaggagtgggtccagaggtacatgaagaacctggacgccaagcagaagaaggcttcccctagggccagggcagtggctgtcaagggccctgtccagagatatcctggcaaccaaaccacctgctaatccccgcccagccctccagccctgagtttgggcctgagctgcttggcgggctactcggggcctggagaagccacagtgatggggggaagagctaattttcctgtttcttagcaacactctccagggatgtg

SEQ ID NO: 5564 - DNA, 585 bp, Homo sapiens
  source 1..585: mol_type = unassigned DNA
acttggcaccaaggctgtcaccctgttacctccgggtcctttcctcctgcacgtcagctttgagccccgagctggtgcttctgctctctgagacatggcaggcctgatgaccatagtaaccagccttctgttccttggtgtctgtgcccaccacatcatccctacgggctctgtggtcatcccctctccctgctgcatgttctttgtttccaagagaattcctgagaaccgagtggtcagctaccagctgtccagcaggagcacatgcctcaaggcaggagtgatcttcaccaccaagaagggccagcagttctgtggcgaccccaagcaggagtgggtccagaggtacatgaagaacctggacgccaagcagaagaaggcttcccctagggccagggcagtggctgtcaagggccctgtccagagatatcctggcaaccaaaccacctgctaatccccgcccagccctccagccctgagtttgggcctgagctgcttggcgggctactcggggcctggagaagccacagtgatggggggaagagctaattttcctgtttcttagcaacactctccagggatgtg

SEQ ID NO: 5565 - DNA, 953 bp, Homo sapiens
  source 1..953: mol_type = unassigned DNA
ggacagcttggcctacagcccggcgggcatcagctcccttgacccagtggatatcggtggccccgttattcgtccaggtgcccagggaggaggacccgcctgcagcatgaacctgtggctcctggcctgcctggtggccggcttcctgggagcctgggcccccgctgtccacacccaaggtgtctttgaggactgctgcctggcctaccactaccccattgggtgggctgtgctccggcgcgcctggacttaccggatccaggaggtgagcgggagctgcaatctgcctgctgcgatattctacctccccaagagacacaggaaggtgtgtgggaaccccaaaagcagggaggtgcagagagccatgaagctcctggatgctcgaaataaggtttttgcaaagctccaccacaacacgcagaccttccaaggccctcatgctgtaaagaagttgagttctggaaactccaagttatcatcgtccaagtttagcaatcccatcagcagcagtaagaggaatgtctccctcctgatatcagctaattcaggactgtgagccggctcatttctgggctccatcggcacaggaggggccggatctttctccgataaaaccgtcgccctacagacccagctgtccccacgcctctgtcttttgggtcaagtcttaatccctgcacctgagttggtcctccctctgcacccccaccacctcctgcccgtctggcaactggaaagagggagttggcctgattttaagccttttgccgctccggggaccagcagcaatcctgggcagccagtggctcttgtagagaagacttaggatacctctctcactttctgtttcttgccgtccaccccgggccatgccagtgtgtccctctgggtccctccaaaactctggtcagttcaaggatgcccctcccaggctatgcttttctataactttt

SEQ ID NO: 5566 - DNA, 361 bp, Homo sapiens
  source 1..361: mol_type = unassigned DNA
ggacagcttggcctacagcccggcgggcatcagctcccttgacccagtggatatcggtggccccgttattcgtccaggtgcccagggaggaggacccgcctgcagcatgaacctgtggctcctggcctgcctggtggccggcttcctgggagcctgggcccccgctgtccacacccaaggtgtctttgaggactgctgcctggcctaccactaccccattgggtgggctgtgctccggcgcgcctggacttaccggatccaggaggtgagcgggagctgcaatctgcctgctgcgatcaggccctcatgctgtaaagaagttgagttctggaaactccaagttatcatcgtccaagtttag

SEQ ID NO: 5567 - DNA, 924 bp, Homo sapiens
  source 1..924: mol_type = unassigned DNA
gtggccccgttattcgtccaggtgcccagggaggaggacccgcctgcagcatgaacctgtggctcctggcctgcctggtggccggcttcctgggagcctgggcccccgctgtccacacccaaggtgtctttgaggactgctgcctggcctaccactaccccattgggtgggctgtgctccggcgcgcctggacttaccggatccaggaggtgagcgggagctgcaatctgcctgctgcgatattctacctccccaagagacacaggaaggtgtgtgggaaccccaaaagcagggaggtgcagagagccatgaagctcctggatgctcgaaataaggtttttgcaaagctccaccacaacacgcagaccttccaagcaggccctcatgctgtaaagaagttgagttctggaaactccaagttatcatcgtccaagtttagcaatcccatcagcagcagtaagaggaatgtctccctcctgatatcagctaattcaggactgtgagccggctcatttctgggctccatcggcacaggaggggccggatctttctccgataaaaccgtcgccctacagacccagctgtccccacgcctctgtcttttgggtcaagtcttaatccctgcacctgagttggtcctccctctgcacccccaccacctcctgcccgtctggcaactggaaagagggagttggcctgattttaagccttttgccgctccggggaccagcagcaatcctgggcagccagtggctcttgtagagaagacttaggatacctctctcactttctgtttcttgccgtccaccccgggccatgccagtgtgtccctctgggtccctccaaaactctggtcagttcaaggatgcccctcccaggctatgcttttctataacttttaaataaaccttggggggtgatgga

SEQ ID NO: 5568 - DNA, 526 bp, Homo sapiens
  source 1..526: mol_type = unassigned DNA
cagggccgtctcagtctcataaaaggggatcaggcaggaggagtttgggagaaacctgagaagggcctgatttgcagcatcatgatgggcctctccttggcctctgctgtgctcctggcctccctcctgagtctccaccttggaactgccacacgtgggagtgacatatccaagacctgctgcttccaatacagccacaagccccttccctggacctgggtgcgaagctatgaattcaccagtaacagctgctcccagcgggctgtgatattcactaccaaaagaggcaagaaagtctgtacccatccaaggaaaaaatgggtgcaaaaatacatttctttactgaaaactccgaaacaattgtgactcagctgaattttcatccgaggacgcttggaccccgctcttggctctgcagccctctggggagcctgcggaatcttttctgaaggctacatggacccgctggggaggagagggtgtttcctcccagagttactttaataaaggttgttcatagagttga

SEQ ID NO: 5569 - DNA, 703 bp, Homo sapiens
  source 1..703: mol_type = unassigned DNA
agaacctcagaaatgtgagttatttgggaatggctgtttgtaaatgtccttacgtaagccaagaggaggtcttgacttggggtcccaggggtaccgcagatcccagggactggagcagcactagcaagctctggaggatgagccaggagtctggaattgaggctgagccaaagaccccagggccgtctcagtctcataaaaggggatcaggcaggaggagtttgggagaaacctgagaagggcctgatttgcagcatcatgatgggcctctccttggcctctgctgtgctcctggcctccctcctgagtctccaccttggaactgccacacgtgggagtgacatatccaagacctgctgcttccaatacagccacaagccccttccctggacctgggtgcgaagctatgaattcaccagtaacagctgctcccagcgggctgtgatattcactaccaaaagaggcaagaaagtctgtacccatccaaggaaaaaatgggtgcaaaaatacatttctttactgaaaactccgaaacaattgtgactcagctgaattttcatccgaggacgcttggaccccgctcttggctctgcagccctctggggagcctgcggaatcttttctgaaggctacatggacccgctggggaggagagggtgtttcctcccagagttactttaataaaggttgttcatagagttga

SEQ ID NO: 5570 - DNA, 446 bp, Homo sapiens
  source 1..446: mol_type = unassigned DNA
cccagataaaaggtaggggaggaggagagagagagaaggaagagtctaggctgagcaacatgaaggggcccccaaccttctgcagcctcctgctgctgtcattgctcctgagcccagaccctacagcagcattcctactgccacccagcactgcctgctgtactcagctctaccgaaagccactctcagacaagctactgaggaaggtcatccaggtggaactgcaggaggctgacggggactgtcacctccaggctttcgtgcttcacctggctcaacgcagcatctgcatccacccccagaaccccagcctgtcacagtggtttgagcaccaagagagaaagctccatgggactctgcccaagctgaattttgggatgctaaggaaaatgggctgaagcccccaatagccaaataataaagcagcattggataataatttctga

SEQ ID NO: 5571 - DNA, 3126 bp, Homo sapiens
  source 1..3126: mol_type = unassigned DNA
aggacacctttagcctcatttcctgatcgaacagcctcacttgtgttgctgtcagtgccagtagggcaggcaggaatgcagcagagaggactcgccatcgtggccttggctgtctgtgcggccctacatgcctcagaagccatacttcccattgcctccagctgttgcacggaggtttcacatcatatttccagaaggctcctggaaagagtgaatatgtgtcgcatccagagagctgatggggattgtgacttggctgctgtcatccttcatgtcaagcgcagaagaatctgtgtcagcccgcacaaccatactgttaagcagtggatgaaagtgcaagctgccaagaaaaatggtaaaggaaatgtttgccacaggaagaaacaccatggcaagaggaacagtaacagggcacatcaggggaaacacgaaacatacggccataaaactccttattagagagtctacagataaatctacagagacaattcctcaagtggacttggccatgattggttgtaagtttatcatctgaattctccttattgtagacaacagaacaaaacaaaatattggtttttaaaaaatgaacaattgtgcggtatgcaaatgtagccaataatatactcaactggaaaatgaaatgaaaagataatactggctgggtatggtggttcacaccttttatcccagcacttcgggaggctgaggcaggaggatcacttgagaccaggagtttgagaccagcctgggcaacatagcaagacctcatttctacaaacaaaaaaaaaattggcccggcatggtagtacttgcctataatcccagccacatgggaggctgaggtgggaggatcacttgagtctgggagagtttgaggttgcagtgagcagcctgggtgacagaatgagaccctgtctctaaaaataataataataatgatagtgtatatcttcatataatattttaagaggagcatatagatataacttctcccaactttttaattatagttttccaaacttacagagaagttaaaagaatggtacaatgaacatctatatatctttcaccacaatattaatcattgttaatattgtgtcacatttgctttctctctcctctctttgtatgtgtttctatataaaatattataacttttaaaatatatcttgttttgctaaaccatttgaaaataagttgcaaaaatcatgacacttcacccctagtttctttttggtgttataacttgacataccctaaaataaagacatttttctacataatcaccttatcagttttatacctaaaaaattaataatttcatctaatatattccatattcaaattttcccaactatttagagagcattttatgtagtttttttttcactccagtaatcaatcaaggttgacatacatattgcaaataattgttatttttctttaatatctttcaatctaagaaagttcctctgtcttttttttttaatttttaaaattattttgttgagggagggtcttgctgtgtcttccaggctggagtgcagtggcacaattttgattttggctcactgaagcctcaacttctagggctcaagcaatcctcccacctcagcctcccgagtatctgggatcaaggtgcatacccaccacacctggctaattttgtttattttttgtagagacagggtctcactatgttgcccaggttgatctcaaactcctgggctcaagcgatcctcccaccttagcctcccaaagtactgggattataggtgtgagccacagtgcctggcctaattattttcttgtgatcaaattcaggtttaatgtttttggttaagaatttcctacgtgaattcgtgtacttattttgtcatttagagttcataaatattagggtttattttctaaatagaatagtttaaactaaatataacttcaaaacgtctagtttgagtagctaccgttgtttggattgaaattttctgatactgaaaagaacaaaaagcctgcctttctgcccagaaccttttgcctcccccagtcagttcttggagcagcactagttaggggcccagagttcggccttctgtgtggtgattttacgctctgcctaaacaaggagcctacatcttttagctcctattccacccttctcacacgtttttgttgttgtttggttgtttttttttgagacagagtctcactctgttgcccaggctggagtgcagtggcacaatctcggctcattgcaacctccgcctcccgcgttcaagtgattctcttgcctcagcctcccaagtaactgatattacaggcgcccagccaccacaccccgctgatttttgtatttttagtagagacggggttttcccacgttggccgggctggtctcaaactcttgacctcaagtgaaccacccgcctgtgcctcccaaagtgctggaattaccagcgtgagccaccatgccgggctcacacgtttgagttgataccattgtgccattcctcttttggcctcttttttgtccatagaggcttcaagatagataggtaagagcccagtagtgttcataagaagccaatagagagcaggagccactttatcaggtggcaggtgtcctgggcctccctgctggctagtcccaagcggtggtgttgccaggatgtcttggaggtgataatgggacacacagaggcactgagtctccataggttaaaatgccaccaaaactggcctttgcctaatatccctcattgactatttagcatttaatttatttattttcctgacatttctgcaagctttgtatttatatttccactttatagatgaggaaatttgaggctcttagaggtaaaatgacttgcccaggtcacacaggaagtggcagagacaagctttttaaataagaaaaaattaataaaatataatatgagagtaacttaaaatattaataaaccacaattttaaattaattaaccgtgataaccaacattaataaaagttaagataccaaaacactggtgtctaattctttcaactaacaacttgaattattttccattttaaattaattaaccgtgataaccaacattaataaaagttaagataccaaaa

SEQ ID NO: 5572 - DNA, 1342 bp, Homo sapiens
  source 1..1342: mol_type = unassigned DNA
catttcctgatcgaacagcctcacttgtgttgctgtcagtgccagtagggcaggcaggaatgcagcagagaggactcgccatcgtggccttggctgtctgtgcggccctacatgcctcagaagccatacttcccattgcctccagctgttgcacggaggtttcacatcatatttccagaaggctcctggaaagagtgaatatgtgtcgcatccagagagctgatggggattgtgacttggctgctgtcatccttcatgtcaagcgcagaagaatctgtgtcagcccgcacaaccatactgttaagcagtggatgaaagtgcaagctgccaagaaaaatggtaaaggaaatgtttgccacaggaagaaacaccatggcaagaggaacagtaacagggcacatcaggggaaacacgaaacatacggccataaaactccttattagagagtctacagataaatctacagagacaattcctcaagtggacttggccatgattggttagtctcactctatcacacaggctggagggcagtggcaggatctcagttcaccccaacctttgcctcacgggttcaagggattctcgtgcctcagccttccaagtagctgggattacaggtgtgcgccagtacgcctggctagttttagtattttttgttacagacggggtttcaccatgttggctgggctggtctcaaacttctgatctcaagtgatccatctgccttggcctcccaaagtgctgggattacaggcatgagccactgcacctggcctacgtattaggctttatgtaagatgtacatagtactccatactcctttccttttcctcctattgaaactgttcctataaactttataaaattaatcagagaagaagagagggtgagaaacataaataatccaagcttgcaccacattcagcattaatcactaggtcactttgcttgctgaccccttcctcatagttgtttggctattgcttcagaattatgtggagtctgttacaagattatagttccccttaactgctctatagataacagcttgaacattatgaaatgctaagttttcccttcgagacattctttcaggtcctgcatactgatgaaactactgatgtcagctggtctgaaggaccctaccagaagctaaatcatcaaagaatgcaatttccatatcctaatgattcaatctcccttaccctgaccaatcagtggcccaaattttccagccccttgcctcccagaaccccagcccagaactcttcagagatttaagaatctcctcctacctcctgactcagcaccatgtaatcattaaactctctgctgcaaa

SEQ ID NO: 5573 - DNA, 1518 bp, Homo sapiens
  source 1..1518: mol_type = unassigned DNA
cccgcggtaggctaggcctggtcctgggcgccccagccggctcccccgggtccaggcgtgcgcctgcgggcgacgtgcgcgtctgggcatccggccgtcacgcgctgcctgggactccaccctacctacccttcgcgtagtacttgttatactttggcagcttcttcacgtcggtcctctccgcgcgcgggtaggaaccgtccacggccttaaagaagcctcctcaccagccatacttcccattgcctccagctgttgcacggaggtttcacatcatatttccagaaggctcctggaaagagtgaatatgtgtcgcatccagagagctgatggggattgtgacttggctgctgtcatccttcatgtcaagcgcagaagaatctgtgtcagcccgcacaaccatactgttaagcagtggatgaaagtgcaagctgccaagaaaaatggtaaaggaaatgtttgccacaggaagaaacaccatggcaagaggaacagtaacagggcacatcaggggaaacacgaaacatacggccataaaactccttattagagagtctacagataaatctacagagacaattcctcaagtggacttggccatgattggttgtaagtttatcatctgaattctccttattgtagacaacagaacaaaacaaaatattggtttttaaaaaatgaacaattgtgcggtatgcaaatgtagccaataatatactcaactggaaaatgaaatgaaaagataatactggctgggtatggtggttcacaccttttatcccagcacttcgggaggctgaggcaggaggatcacttgagaccaggagtttgagaccagcctgggcaacatagcaagacctcatttctacaaacaaaaaaaaaattggcccggcatggtagtacttgcctataatcccagccacatgggaggctgaggtgggaggatcacttgagtctgggagagtttgaggttgcagtgagcagcctgggtgacagaatgagaccctgtctctaaaaataataataataatgatagtgtatatcttcatataatattttaagaggagcatatagatataacttctcccaactttttaattatagttttccaaacttacagagaagttaaaagaatggtacaatgaacatctatatatctttcaccacaatattaatcattgttaatattgtgtcacatttgctttctctctcctctctttgtatgtgtttctatataaaatattataacttttaaaatatatcttgttttgctaaaccatttgaaaataagttgcaaaaatcatgacacttcacccctagtttctttttggtgttataacttgacataccctaaaataaagacatttttctacataatcaccttatcagttttatacctaaaaaattaataatttcatctaatatattccatattcaaattttcccaactatttagagagcattttatgtagtttttttttcactccagtaatcaatcaaggttgacatacatattgc

SEQ ID NO: 5574 - DNA, 354 bp, Homo sapiens
  source 1..354: mol_type = unassigned DNA
atgcagcagagaggactcgccatcgtggccttggctgtctgtgcggccctacatgcctcagaagccatacttcccattgcctccagctgttgcacggaggtttcacatcatatttccagaaggctcctggaaagagtgaatatgtgtcgcatccagagagctgatggggattgtgacttggctgctgtcatgctggagtgcagtgacatgatctcagctcactacaacctccacctacctggttcaaacgattctcctacctcagccttccaagtagctgggattacagccttcatgtcaagcgcagaagaatctgtgtcagcccgcacaaccatactgttaagcagtggatga

SEQ ID NO: 5575 - DNA, 772 bp, Homo sapiens
  source 1..772: mol_type = unassigned DNA
gcagcaaagagtagtcagtcccttcttggctctgctgacactcgagcccacattccatcacctgctcccaatcatgcaggtctccactgctgcccttgccgtcctcctctgcaccatggctctctgcaaccaggtcctctctgcaccacttgctgctgacacgccgaccgcctgctgcttcagctacacctcccgacagattccacagaatttcatagctgactactttgagacgagcagccagtgctccaagcccagtgtcatcttcctaaccaagagaggccggcaggtctgtgctgaccccagtgaggagtgggtccagaaatacgtcagtgacctggagctgagtgcctgaggggtccagaagcttcgaggcccagcgacctcagtgggcccagtggggaggagcaggagcctgagccttgggaacatgcgtgtgacctctacagctacctcttctatggactggttattgccaaacagccacactgtgggactcttcttaacttaaattttaatttatttatactatttagtttttataatttatttttgatttcacagtgtgtttgtgattgtttgctctgagagttccccctgtcccctccaccttccctcacagtgtgtctggtgacaaccgagtggctgtcatcggcctgtgtaggcagtcatggcaccaaagccaccagactgacaaatgtgtatcagatgcttttgttcagggctgtgatcggcctggggaaataataaagatgttcttttaaacggtaaa

SEQ ID NO: 5576 - DNA, 244 bp, Homo sapiens
  source 1..244: mol_type = unassigned DNA
agaaggacgcaggcagcaaagagtagtcagtcccttcttggctctgctgacactcgagcccacattccatcacctgctcccaatcatgcaggtctccactgctgcccttgccgtcctcctctgcaccatggctctctgcaaccaggtcctctctgcaccactctccagaccaagagaggccggcaggtctgtgctgaccccagtgaggagtgggtccagaaatacgtcagtgacctggagctga

SEQ ID NO: 5577 - DNA, 229 bp, Homo sapiens
  source 1..229: mol_type = unassigned DNA
agaaggacgcaggcagcaaagagtagtcagtcccttcttggctctgctgacactcgagcccacattccatcacctgctcccaatcatgcaggtctccactgctgcccttgccgtcctcctctgcaccatggctctctgcaaccaggtcctctctgcaccacaggccggcaggtctgtgctgaccccagtgaggagtgggtccagaaatacgtcagtgacctggagctga

SEQ ID NO: 5578 - DNA, 664 bp, Homo sapiens
  source 1..664: mol_type = unassigned DNA
agcacaggacacagctgggttctgaagcttctgagttctgcagcctcacctctgagaaaacctctttgccaccaataccatgaagctctgcgtgactgtcctgtctctcctcatgctagtagctgccttctgctctccagcgctctcagcaccaatgggctcagaccctcccaccgcctgctgcttttcttacactgcgaggaagcttcctcgcaactttgtggtagattactatgagaccagcagcctctgctcccagccagctgtggtattccaaaccaaaagaagcaagcaagtctgtgctgatcccagtgaatcctgggtccaggagtacgtgtatgacctggaactgaactgagctgctcagagacaggaagtcttcagggaaggtcacctgagcccggatgcttctccatgagacacatctcctccatactcaggactcctctccgcagttcctgtcccttctcttaatttaatcttttttatgtgccgtgttattgtattaggtgtcatttccattatttatattagtttagccaaaggataagtgtcccctatggggatggtccactgtcactgtttctctgctgttgcaaatacatggataacacatttgattctgtgtgttttcataataaaactttaaaataaaatgcagaca

SEQ ID NO: 5579 - DNA, 552 bp, Homo sapiens
  source 1..552: mol_type = unassigned DNA
agcacaggacacagctgggttctgaagcttctgagttctgcagcctcacctctgagaaaacctctttgccaccaataccatgaagctctgcgtgactgtcctgtctctcctcatgctagtagctgccttctgctctccagcgctctcagcaccaaattccaaaccaaaagaagcaagcaagtctgtgctgatcccagtgaatcctgggtccaggagtacgtgtatgacctggaactgaactgagctgctcagagacaggaagtcttcagggaaggtcacctgagcccggatgcttctccatgagacacatctcctccatactcaggactcctctccgcagttcctgtcccttctcttaatttaatcttttttatgtgccgtgttattgtattaggtgtcatttccattatttatattagtttagccaaaggataagtgtcccctatggggatggtccactgtcactgtttctctgctgttgcaaatacatggataacacatttgattctgtgtgttttcataataaaactttaaaataaaatgcagacagtt

SEQ ID NO: 5580 - DNA, 547 bp, Homo sapiens
  source 1..547: mol_type = unassigned DNA
agcacaggacacagctaggttctgaagcttctgagttctgcagcctcacctctgagaaaacctctttgccaccaataccatgaagctctgcgtgactgtcctgtctctcctcgtgctagtagctgccttctgctctctagcactctcagcaccaaattccaaaccaaaagaggcaagcaagtctgcgctgaccccagtgagtcctgggtccaggagtacgtgtatgacctggaactgaactgagctgctcagagacaggaagtcttcagggaaggtcacctgagcctggatgcttctccatgagccgcatctcctccatactcaggactcctctccgcagttcctgtctcttctcttaatgtaatctcttttatgtgctgtattattgtattaggtgttatttccattatttatattagtttagccaaaggataagtgtcccctatggggatggtccactctcactctttctctgctgttgcaaatacatggataacaccgttaattccatgtgttttcataataaaactttaaaataaaatgcaaa

SEQ ID NO: 5581 - DNA, 441 bp, Homo sapiens
  source 1..441: mol_type = unassigned DNA
ccctggggaagagaagctgagaggaactcctcactcagctagcttcaggagccatgacatcatctctaccatggaaattccactcactctcctgtgcccccacatttgtcctaggcctcagagtccctataaagagagattcccaactcagtatcagcacaggacacagctaggttctgaagcttctgagttctgcagcctcacctctgagaaaacctctttgccaccaataccatgaagctctgcgtgactgtcctgtctctcctcgtgctagtagctgccttctgctctctagcactctcagcaccaactaaatccagtgagtggaagttacagggagtctgcttccagtgctgctcgaggaaggatcccatccaccagagctgccccacatggaccatggtcaggcagaggaagatgcctaccacaggcaagggataa

SEQ ID NO: 5582 - DNA, 495 bp, Homo sapiens
  source 1..495: mol_type = unassigned DNA
ccctggggaagagaagctgagaggaactcctcactcagctagcttcaggagccatgacatcatctctaccatggaaattccactcactctcctgtgcccccacatttgtcctaggcctcagagtccctataaagagagattcccaactcagtatcagcacaggacacagctaggttctgaagcttctgagttctgcagcctcacctctgagaaaacctctttgccaccaataccatgaagctctgcgtgactgtcctgtctctcctcgtgctagtagctgccttctgctctctagcactctcagcaccaatgggctcagaccctcccaccgcctgctgcttttcttacaccgcgaggaagcttcctcgcaactttgtggtagattactatgagaccagcagcctctgctcccagccagctgtggtagctgccccacatggaccatggtcaggcagaggaagatgcctaccacaggcaagggataaagccagatga

SEQ ID NO: 5583 - DNA, 905 bp, Homo sapiens
  source 1..905: mol_type = unassigned DNA
agtctcggtcactgcttttggctgtaccacttcccttttcttctcgcctgcacctccctcatctttcctctatgatgacatcgccctggggaagagaagctgagaggaactcctcactcagctagcttcaggagccatgacatcatctctaccatggaaattccactcactctcctgtgcccccacatttgtcctaggcctcagagtccctataaagagagattcccaactcagtatcagcacaggacacagctaggttctgaagcttctgagttctgcagcctcacctctgagaaaacctctttgccaccaataccatgaagctctgcgtgactgtcctgtctctcctcgtgctagtagctgccttctgctctctagcactctcagcaccaatgggctcagaccctcccaccgcctgctgcttttcttacaccgcgaggaagcttcctcgcaactttgtggtagattactatgagaccagcagcctctgctcccagccagctgtggtattccaaaccaaaagaggcaagcaagtctgcgctgaccccagtgagtcctgggtccaggagtacgtgtatgacctggaactgaactgagctgctcagagacaggaagtcttcagggaaggtcacctgagcctggatgcttctccatgagccgcatctcctccatactcaggactcctctccgcagttcctgtctcttctcttaatgtaatctcttttatgtgctgtattattgtattaggtgttatttccattatttatattagtttagccaaaggataagtgtcccctatggggatggtccactctcactctttctctgctgttgcaaatacatggataacaccgttaattccatgtgttttcataataaaactttaaaataaaatgcaaacagtt

SEQ ID NO: 5584 - DNA, 1249 bp, Homo sapiens
  source 1..1249: mol_type = unassigned DNA
gtgatggagagcaccagcaaagccttagggcccatccctggcctcctgttacccacagaggggtaggcccttggctctcttccactatgacgtcagcttccattcttcctttcttatagacaattttccatttcaaggaaatcagagcccttaatagttcagtgaggtcactttgctgagcacaatcccatacccttcagcctctgctccacagagcctaagcaaaagatagaaactcacaacttccttgttttgttatctggaaattatcccaggatctggtgcttactcagcatattcaaggaaggtcttacttcattcttccttgattgtgaccatgcccaggctctctgctccctataaaaggcaggcagagccaccgaggagcagagaggttgagaacaacccagaaaccttcacctctcatgctgaagctcacacccttgccctccaagatgaaggtttctgcagcgcttctgtgcctgctgctcatggcagccactttcagccctcagggacttgctcagccagattcagtttccattccaatcacctgctgctttaacgtgatcaataggaaaattcctatccagaggctggagagctacacaagaatcaccaacatccaatgtcccaaggaagctgtgatcttcaagaccaaacggggcaaggaggtctgtgctgaccccaaggagagatgggtcagggattccatgaagcatctggaccaaatatttcaaaatctgaagccatgagccttcatacatggactgagagtcagagcttgaagaaaagcttatttattttccccaacctcccccaggtgcagtgtgacattattttattataacatccacaaagagattatttttaaataatttaaagcataatatttcttaaaaagtatttaattatatttaagttgttgatgttttaactctatctgtcatacatcctagtgaatgtaaaatgcaaaatcctggtgatgtgttttttgtttttgttttcctgtgagctcaactaagttcacggcaaaatgtcattgttctccctcctacctgtctgtagtgttgtggggtcctcccatggatcatcaaggtgaaacactttggtattctttggcaatcagtgctcctgtaagtcaaatgtgtgctttgtactgctgttgttgaaattgatgttactgtatataactatggaattttgaaaaaaaatttcaaaaagaaaaaaatatatataatttaaaact

SEQ ID NO: 5585 - DNA, 1261 bp, Homo sapiens
  source 1..1261: mol_type = unassigned DNA
gtgactctagtgtgatggagagcaccagcaaagccttagggcccatccctggcctcctgttacccacagaggggtaggcccttggctctcttccactatgacgtcagcttccattcttcctttcttatagacaattttccatttcaaggaaatcagagcccttaatagttcagtgaggtcactttgctgagcacaatcccatacccttcagcctctgctccacagagcctaagcaaaagatagaaactcacaacttccttgttttgttatctggaaattatcccaggatctggtgcttactcagcatattcaaggaaggtcttacttcattcttccttgattgtgaccatgcccaggctctctgctccctataaaaggcaggcagagccaccgaggagcagagaggttgagaacaacccagaaaccttcacctctcatgctgaagctcacacccttgccctccaagatgaaggtttctgcagcgcttctgtgcctgctgctcatggcagccactttcagccctcagggacttgctcagccagattcagtttccattccaatcacctgctgctttaacgtgatcaataggaaaattcctatccagaggctggagagctacacaagaatcaccaacatccaatgtcccaaggaagctgtgatcttcaagaccaaacggggcaaggaggtctgtgctgaccccaaggagagatgggtcagggattccatgaagcatctggaccaaatatttcaaaatctgaagccatgagccttcatacatggactgagagtcagagcttgaagaaaagcttatttattttccccaacctcccccaggtgcagtgtgacattattttattataacatccacaaagagattatttttaaataatttaaagcataatatttcttaaaaagtatttaattatatttaagttgttgatgttttaactctatctgtcatacatcctagtgaatgtaaaatgcaaaatcctggtgatgtgttttttgtttttgttttcctgtgagctcaactaagttcacggcaaaatgtcattgttctccctcctacctgtctgtagtgttgtggggtcctcccatggatcatcaaggtgaaacactttggtattctttggcaatcagtgctcctgtaagtcaaatgtgtgctttgtactgctgttgttgaaattgatgttactgtatataactatggaattttgaaaaaaaatttcaaaaagaaaaaaatatatataatttaaaacta

SEQ ID NO: 5586 - DNA, 2731 bp, Homo sapiens
  source 1..2731: mol_type = unassigned DNA
atcacacaggaagctgagtacttcctacttggtcaggatcttgaaacttgaattcataaaaacccagaaagccccagaaacaaagacttcacggacaaagtcccttggaaccagagagaagccgggatggaaactccaaacaccacagaggactatgacacgaccacagagtttgactatggggatgcaactccgtgccagaaggtgaacgagagggcctttggggcccaactgctgccccctctgtactccttggtatttgtcattggcctggttggaaacatcctggtggtcctggtccttgtgcaatacaagaggctaaaaaacatgaccagcatctacctcctgaacctggccatttctgacctgctcttcctgttcacgcttcccttctggatcgactacaagttgaaggatgactgggtttttggtgatgccatgtgtaagatcctctctgggttttattacacaggcttgtacagcgagatctttttcatcatcctgctgacgattgacaggtacctggccatcgtccacgccgtgtttgccttgcgggcacggaccgtcacttttggtgtcatcaccagcatcatcatttgggccctggccatcttggcttccatgccaggcttatacttttccaagacccaatgggaattcactcaccacacctgcagccttcactttcctcacgaaagcctacgagagtggaagctgtttcaggctctgaaactgaacctctttgggctggtattgcctttgttggtcatgatcatctgctacacagggattataaagattctgctaagacgaccaaatgagaagaaatccaaagctgtccgtttgatttttgtcatcatgatcatcttttttctcttttggaccccctacaatttgactatacttatttctgttttccaagacttcctgttcacccatgagtgtgagcagagcagacatttggacctggctgtgcaagtgacggaggtgatcgcctacacgcactgctgtgtcaacccagtgatctacgccttcgttggtgagaggttccggaagtacctgcggcagttgttccacaggcgtgtggctgtgcacctggttaaatggctccccttcctctccgtggacaggctggagagggtcagctccacatctccctccacaggggagcatgaactctctgctgggttctgactcagaccataggaggccaacccaaaataagcaggcgtgacctgccaggcacactgagccagcagcctggctctcccagccaggttctgactcttggcacagcatggagtcacagccacttgggatagagagggaatgtaatggtggcctggggcttctgaggcttctggggcttcagtcttttccatgaacttctcccctggtagaaagaagatgaatgagcaaaaccaaatattccagagactgggactaagtgtaccagagaagggcttggactcaagcaagatttcagatttgtgaccattagcatttgtcaacaaagtcacccacttcccactattgcttgcacaaaccaattaaacccagtagtggtgactgtgggctccattcaaagtgagctcctaagccatgggagacactgatgtatgaggaatttctgttcttccatcacctccccccccccgccaccctcccactgccaaagaacttggaaatagtgatttccacagtgactccactctgagtcccagagccaatcagtagccagcatctgcctccccttcactcccaccgcaggatttgggctcttggaatcctggggaacatagaactcatgacggaagagttgagacctaacgagaaatagaaatggggaactactgctggcagtggaactaagaaagcccttaggaagaatttttatatccactaaaatcaaacaattcagggagtgggctaagcacgggccatatgaataacatggtgtgcttcttaaaatagccataaaggggagggactcatcatttccatttacccttcttttctgactatttttcagaatctctcttcttttcaagttgggtgatatgttggtagattctaatggctttattgcagcgattaataacaggcaaaaggaagcagggttggtttcccttctttttgttcttcatctaagccttctggttttatgggtcagagttccgactgccatcttggacttgtcagcaaaaaaaaaaaataataataataataaggcctgctgtgtaagctgacagtatttgtagctgatagggggttgggaggaaagtgtctactaggagggtggggtgagattctgtgttgatgtaggaggccgagaaggcccttaactcaaagtagcttatttatccaaaatgttctggatgcatcatctccaaccaaggaccccttatttatcatgcctttgttctcttttccctcagatgtatatttctttaaaaataattttcctaataacaaaacttatttctaaaacagcttaaaaattcaaagaaaaaccccaaacactgacattacctacacttccactacccaaagacaaaatgtgcccactgtgtgcttttgagtgtattttcttttagtttgttttttgttgggtgcatatttatgataataacaatgatggacttcaattgtactcactgttctattgttggttttaattagcagcaagttgtgatcactttcccaggtgaataaatcatttcaaagcatt

SEQ ID NO: 5587 - DNA, 1773 bp, Homo sapiens
  source 1..1773: mol_type = unassigned DNA
agaaacctgtgtagccagagatggggacggaggccacagagcaggtttcctggggccattactctggggatgaagaggacgcatactcggctgagccactgccggagctttgctacaaggccgatgtccaggccttcagccgggccttccaacccagtgtctccctgaccgtggctgcgctgggtctggccggcaatggcctggtcctggccacccacctggcagcccgacgcgcagcgcgctcgcccacctctgcccacctgctccagctggccctggccgacctcttgctggccctgactctgcccttcgcggcagcaggggctcttcagggctggagtctgggaagtgccacctgccgcaccatctctggcctctactcggcctccttccacgccggcttcctcttcctggcctgtatcagcgccgaccgctacgtggccatcgcgcgagcgctcccagccgggccgcggccctccactcccggccgcgcacacttggtctccgtcatcgtgtggctgctgtcactgctcctggcgctgcctgcgctgctcttcagccaggatgggcagcgggaaggccaacgacgctgtcgcctcatcttccccgagggcctcacgcagacggtgaagggggcgagcgccgtggcgcaggtggccctgggcttcgcgctgccgctgggcgtcatggtagcctgctacgcgcttctgggccgcacgctgctggccgccagggggcccgagcgccggcgtgcgctgcgcgtcgtggtggctctggtggcggccttcgtggtgctgcagctgccctacagcctcgccctgctgctggatactgccgatctactggctgcgcgcgagcggagctgccctgccagcaaacgcaaggatgtcgcactgctggtgaccagcggcttggccctcgcccgctgtggcctcaatcccgttctctacgccttcctgggcctgcgcttccgccaggacctgcggaggctgctacggggtgggagctgcccctcagggcctcaaccccgccgcggctgcccccgccggccccgcctttcttcctgctcagctcccacggagacccacagtctctcctgggacaactagggctgcgaatctagaggagggggcaggctgagggtcgtgggaaaggggagtaggtgggggaacactgagaaagaggcagggacctaaagggactacctctgtgccttgccacattaaattgataacatggaaatgagatgcaacccaacaactgttactatttttgagtcaccgacttggaagtgatttgtggcggggcagaaccggtgggttaacaccccgcccccgccccaccccccgccctgccccgcgcttggctctctgagtggaagacgctgagggcctgggtgggggtggggggctgctgagtctgctaaagctctagccactgacaccccctccaccgtcacctggcctcagccaacagaggtgaggtgggaaagctgccaggcaaggaggggcggtggttcctcttgcaatactgtaaggaagagctttctaacaaccagagcgctctccagtaatggctgccttagcaaatactgagttcccgctattggaatgttcagactgtcggggacgctgtgggcctttgcgtggtgtggggggagggggaggggcaggggattcccgtttttggtgggcgtttggatttcataaccactttacaatcccttcctagtgtctgtgatggaaagaaaaaatgaaaaaatgaattgtaaaa

SEQ ID NO: 5588 - DNA, 2671 bp, Homo sapiens
  source 1..2671: mol_type = unassigned DNA
tttattctctggaacatgaaacattctgttgtgctcatatcatgcaaattatcactagtaggagagcagagagtggaaatgttccaggtataaagacccacaagataaagaagctcagagtcgttagaaacaggagcagatgtacagggtttgcctgactcacactcaaggttgcataagcaagatttcaaaattaatcctattctggagacctcaacccaatgtacaatgttcctgactggaaaagaagaactatatttttctgattttttttttcaaatctttaccattagttgccctgtatctccgccttcactttctgcaggaaactttatttcctacttctgcatgccaagtttctacctctagatctgtttggttcagttgctgagaagcctgacataccaggactgcctgagacaagccacaagctgaacagagaaagtggattgaacaaggacgcatttccccagtacatccacaacatgctgtccacatctcgttctcggtttatcagaaataccaacgagagcggtgaagaagtcaccaccttttttgattatgattacggtgctccctgtcataaatttgacgtgaagcaaattggggcccaactcctgcctccgctctactcgctggtgttcatctttggttttgtgggcaacatgctggtcgtcctcatcttaataaactgcaaaaagctgaagtgcttgactgacatttacctgctcaacctggccatctctgatctgctttttcttattactctcccattgtgggctcactctgctgcaaatgagtgggtctttgggaatgcaatgtgcaaattattcacagggctgtatcacatcggttattttggcggaatcttcttcatcatcctcctgacaatcgatagatacctggctattgtccatgctgtgtttgctttaaaagccaggacggtcacctttggggtggtgacaagtgtgatcacctggttggtggctgtgtttgcttctgtcccaggaatcatctttactaaatgccagaaagaagattctgtttatgtctgtggcccttattttccacgaggatggaataatttccacacaataatgaggaacattttggggctggtcctgccgctgctcatcatggtcatctgctactcgggaatcctgaaaaccctgcttcggtgtcgaaacgagaagaagaggcatagggcagtgagagtcatcttcaccatcatgattgtttactttctcttctggactccctataatattgtcattctcctgaacaccttccaggaattcttcggcctgagtaactgtgaaagcaccagtcaactggaccaagccacgcaggtgacagagactcttgggatgactcactgctgcatcaatcccatcatctatgccttcgttggggagaagttcagaagcctttttcacatagctcttggctgtaggattgccccactccaaaaaccagtgtgtggaggtccaggagtgagaccaggaaagaatgtgaaagtgactacacaaggactcctcgatggtcgtggaaaaggaaagtcaattggcagagcccctgaagccagtcttcaggacaaagaaggagcctagagacagaaatgacagatctctgctttggaaatcacacgtctggcttcacagatgtgtgattcacagtgtgaatcttggtgtctacgttaccaggcaggaaggctgagaggagagagactccagctgggttggaaaacagtattttccaaactaccttccagttcctcatttttgaatacaggcatagagttcagactttttttaaatagtaaaaataaaattaaagctgaaaactgcaacttgtaaatgtggtaaagagttagtttgagttactatcatgtcaaacgtgaaaatgctgtattagtcacagagataattctagctttgagcttaagaattttgagcaggtggtatgtttgggagactgctgagtcaacccaatagttgttgattggcaggagttggaagtgtgtgatctgtgggcacattagcctatgtgcatgcagcatctaagtaatgatgtcgtttgaatcacagtatacgctccatcgctgtcatctcagctggatctccattctctcaggcttgctgccaaaagccttttgtgttttgttttgtatcattatgaagtcatgcgtttaatcacattcgagtgtttcagtgcttcgcagatgtccttgatgctcatattgttccctattttgccagtgggaactcctaaatcaagttggcttctaatcaaagcttttaaaccctattggtaaagaatggaaggtggagaagctccctgaagtaagcaaagactttcctcttagtcgagccaagttaagaatgttcttatgttgcccagtgtgtttctgatctgatgcaagcaagaaacactgggcttctagaaccaggcaacttgggaactagactcccaagctggactatggctctactttcaggccacatggctaaagaaggtttcagaaagaagtggggacagagcagaactttcaccttcatatatttgtatgatcctaatgaatgcataaaatgttaagttgatggtgatgaaatgtaaatactgtttttaacaactatgatttggaaaataaatcaatgctataactatgttg

SEQ ID NO: 5589 - DNA, 2232 bp, Homo sapiens
  source 1..2232: mol_type = unassigned DNA
ggattgaacaaggacgcatttccccagtacatccacaacatgctgtccacatctcgttctcggtttatcagaaataccaacgagagcggtgaagaagtcaccaccttttttgattatgattacggtgctccctgtcataaatttgacgtgaagcaaattggggcccaactcctgcctccgctctactcgctggtgttcatctttggttttgtgggcaacatgctggtcgtcctcatcttaataaactgcaaaaagctgaagtgcttgactgacatttacctgctcaacctggccatctctgatctgctttttcttattactctcccattgtgggctcactctgctgcaaatgagtgggtctttgggaatgcaatgtgcaaattattcacagggctgtatcacatcggttattttggcggaatcttcttcatcatcctcctgacaatcgatagatacctggctattgtccatgctgtgtttgctttaaaagccaggacggtcacctttggggtggtgacaagtgtgatcacctggttggtggctgtgtttgcttctgtcccaggaatcatctttactaaatgccagaaagaagattctgtttatgtctgtggcccttattttccacgaggatggaataatttccacacaataatgaggaacattttggggctggtcctgccgctgctcatcatggtcatctgctactcgggaatcctgaaaaccctgcttcggtgtcgaaacgagaagaagaggcatagggcagtgagagtcatcttcaccatcatgattgtttactttctcttctggactccctataatattgtcattctcctgaacaccttccaggaattcttcggcctgagtaactgtgaaagcaccagtcaactggaccaagccacgcaggtgacagagactcttgggatgactcactgctgcatcaatcccatcatctatgccttcgttggggagaagttcagaagcctttttcacatagctcttggctgtaggattgccccactccaaaaaccagtgtgtggaggtccaggagtgagaccaggaaagaatgtgaaagtgactacacaaggactcctcgatggtcgtggaaaaggaaagtcaattggcagagcccctgaagccagtcttcaggacaaagaaggagcctagagacagaaatgacagatctctgctttggaaatcacacgtctggcttcacagatgtgtgattcacagtgtgaatcttggtgtctacgttaccaggcaggaaggctgagaggagagagactccagctgggttggaaaacagtattttccaaactaccttccagttcctcatttttgaatacaggcatagagttcagactttttttaaatagtaaaaataaaattaaagctgaaaactgcaacttgtaaatgtggtaaagagttagtttgagttactatcatgtcaaacgtgaaaatgctgtattagtcacagagataattctagctttgagcttaagaattttgagcaggtggtatgtttgggagactgctgagtcaacccaatagttgttgattggcaggagttggaagtgtgtgatctgtgggcacattagcctatgtgcatgcagcatctaagtaatgatgtcgtttgaatcacagtatacgctccatcgctgtcatctcagctggatctccattctctcaggcttgctgccaaaagccttttgtgttttgttttgtatcattatgaagtcatgcgtttaatcacattcgagtgtttcagtgcttcgcagatgtccttgatgctcatattgttccctattttgccagtgggaactcctaaatcaagttggcttctaatcaaagcttttaaaccctattggtaaagaatggaaggtggagaagctccctgaagtaagcaaagactttcctcttagtcgagccaagttaagaatgttcttatgttgcccagtgtgtttctgatctgatgcaagcaagaaacactgggcttctagaaccaggcaacttgggaactagactcccaagctggactatggctctactttcaggccacatggctaaagaaggtttcagaaagaagtggggacagagcagaactttcaccttcatatatttgtatgatcctaatgaatgcataaaatgttaagttgatggtgatgaaatgtaaatactgtttttaacaactatgatttggaaaataaatcaatgctataactatgttgataaaag

SEQ ID NO: 5590 - DNA, 563 bp, Homo sapiens
  source 1..563: mol_type = unassigned DNA
agttgctgagaagcctgacataccaggactgcctgagacaagccacaagctgcttctccagatttcaagaatctggctcagtgatatgaaatacaagacttgtgaaaagtgtcaattgcaagagaaatggaaggataaagtatacagaacagagaaagtggattgaacaaggacgcatttccccagtacatccacaacatgctgtccacatctcgttctcggtttatcagaaataccaacgagagcggtgaagaagtcaccaccttttttgattatgattacggtgctccctgtcataaatttgacgtgaagcaaattggggcccaactcctgcctccgctctactcgctggtgttcatctttggttttgtgggcaacatgctggtcgtcctcatcttaataaactgcaaaaagctgaagtgcttgactgacatttacctgctcaacctggccatctctgatctgctttttcttattactctcccattgtgggctcactctgctgcaaatgagtgggtctttgggaatgcaatgtgcaaattattcacagggctgtatcacat

SEQ ID NO: 5591 - DNA, 2386 bp, Homo sapiens
  source 1..2386: mol_type = unassigned DNA
accaataccctttattctctggaacatgaaacattctgttgtgctcatatcatgcaaattatcactagtaggagagcagagagtggaaatgttccaggtataaagacccacaagataaagaagctcagagtcgttagaaacaggagcagatgtacagggtttgcctgactcacactcaaggttgcataagcaagatttcaaaattaatcctattctggagacctcaacccaatgtacaatgttcctgactggaaaagaagaactatatttttctgattttttttttcaaatctttaccattagttgccctgtatctccgccttcactttctgcaggaaactttatttcctacttctgcatgccaagtttctacctctagatctgtttggttcagttgctgagaagcctgacataccaggactgcctgagacaagccacaagctgaacagagaaagtggattgaacaaggacgcatttccccagtacatccacaacatgctgtccacatctcgttctcggtttatcagaaataccaacgagagcggtgaagaagtcaccaccttttttgattatgattacggtgctccctgtcataaatttgacgtgaagcaaattggggcccaactcctgcctccgctctactcgctggtgttcatctttggttttgtgggcaacatgctggtcgtcctcatcttaataaactgcaaaaagctgaagtgcttgactgacatttacctgctcaacctggccatctctgatctgctttttcttattactctcccattgtgggctcactctgctgcaaatgagtgggtctttgggaatgcaatgtgcaaattattcacagggctgtatcacatcggttattttggcggaatcttcttcatcatcctcctgacaatcgatagatacctggctattgtccatgctgtgtttgctttaaaagccaggacggtcacctttggggtggtgacaagtgtgatcacctggttggtggctgtgtttgcttctgtcccaggaatcatctttactaaatgccagaaagaagattctgtttatgtctgtggcccttattttccacgaggatggaataatttccacacaataatgaggaacattttggggctggtcctgccgctgctcatcatggtcatctgctactcgggaatcctgaaaaccctgcttcggtgtcgaaacgagaagaagaggcatagggcagtgagagtcatcttcaccatcatgattgtttactttctcttctggactccctataatattgtcattctcctgaacaccttccaggaattcttcggcctgagtaactgtgaaagcaccagtcaactggaccaagccacgcaggtgacagagactcttgggatgactcactgctgcatcaatcccatcatctatgccttcgttggggagaagttcagaaggtatctctcggtgttcttccgaaagcacatcaccaagcgcttctgcaaacaatgtccagttttctacagggagacagtggatggagtgacttcaacaaacacgccttccactggggagcaggaagtctcggctggtttataaaacgaggagcagtttgattgttgtttataaagggagataacaatctgtatataacaacaaacttcaagggtttgttgaacaatagaaacctgtaaagcaggtgcccaggaacctcagggctgtgtgtactaatacagactatgtcacccaatgcatatccaacatgtgctcagggaataatccagaaaaactgtgggtagagactttgactctccagaaagctcatctcagctcctgaaaaatgcctcattaccttgtgctaatcctctttttctagtcttcataatttcttcactcaatctctgattctgtcaatgtcttgaaatcaagggccagctggaggtgaagaagagaatgtgacaggcacagatgaatgggagtgagggatagtggggtcagggctgagaggagaaggagggagacatgagcatggctgagcctggacaaagacaaaggtgagcaaagggctcacgcattcagccaggagatgatactggtccttagccccatctgccacgtgtatttaaccttgaagggttcaccaggtcagggagagtttgggaactgcaataacctgggagttttggtggagtccgatgattctcttttgcataagtgcatgacatatttttgctttattacagtttatctatggcacccatgcaccttacatttgaaatctatgaaatatcatgctccattgttcagatgcttcttaggccacatccccctgtctaaaaattcagaaaatttttgtttataaaagatgcattatctatgatatgctaatatatgtatatgcaatata

SEQ ID NO: 5592 - DNA, 2000 bp, Homo sapiens
  source 1..2000: mol_type = unassigned DNA
tgctgggcgaatccctttcttgtctggttcatttggaccctccaaagcccacaggctggaacggctgagtcatccaaacaaaaaaggtggcagcccatccctcccccaggagctctaccctgtctcaagtaggtgctaccctgttgctggtggctggctggaattccaagccagttgatcttatcctgtgaggtcccttggaagtggggcccacagactgacgctgctctgcttcctggattcagccctcttcctaaggagctcatggaccctggccgtcatcaggttcaacctcatattcaactgctgggccttgtcttctggccacacactctctccaaatcagcgatggtggggaactgaggagccagaggccattgtggaagaactccaagaaaacaatctccaggttatcacatctaaagcctgagcaagatttgaggctgggaagaggtggatcccagaattggaagaaggagtggtgacgcctaagctatcactggacatatcaaggacttcactaaattagcagggagaagtgaaatgacaacctcactagatacagttgagacctttggtaccacatcctactatgatgacgtgggcctgctctgtgaaaaagctgataccagagcactgatggcccagtttgtgcccccgctgtactccctggtgttcactgtgggcctcttgggcaatgtggtggtggtgatgatcctcataaaatacaggaggctccgaattatgaccaacatctacctgctcaacctggccatttcggacctgctcttcctcgtcacccttccattctggatccactatgtcagggggcataactgggtttttggccatggcatgtgtaagctcctctcagggttttatcacacaggcttgtacagcgagatctttttcataatcctgctgacaatcgacaggtacctggccattgtccatgctgtgtttgcccttcgagcccggactgtcacttttggtgtcatcaccagcatcgtcacctggggcctggcagtgctagcagctcttcctgaatttatcttctatgagactgaagagttgtttgaagagactctttgcagtgctctttacccagaggatacagtatatagctggaggcatttccacactctgagaatgaccatcttctgtctcgttctccctctgctcgttatggccatctgctacacaggaatcatcaaaacgctgctgaggtgccccagtaaaaaaaagtacaaggccatccggctcatttttgtcatcatggcggtgtttttcattttctggacaccctacaatgtggctatccttctctcttcctatcaatccatcttatttggaaatgactgtgagcggagcaagcatctggacctggtcatgctggtgacagaggtgatcgcctactcccactgctgcatgaacccggtgatctacgcctttgttggagagaggttccggaagtacctgcgccacttcttccacaggcacttgctcatgcacctgggcagatacatcccattccttcctagtgagaagctggaaagaaccagctctgtctctccatccacagcagagccggaactctctattgtgttttaggtcagatgcagaaaattgcctaaagaggaaggaccaaggagatgaagcaaacacattaagccttccacactcacctctaaaacagtccttcaaacttccagtgcaacactgaagctcttgaagacactgaaatatacacacagcagtagcagtagatgcatgtaccctaaggtcattaccacaggccaggggctgggcagcgtactcatcatcaaccctaaaaagcagagctttgcttctctctctaaaatgagttacctacattttaatgcacctgaatgttagatagttactatatgccgctacaaaaaggtaaaactttttatattttatacattaacttcagccagctattgatataaataaaacattttcacacaatacaataa

SEQ ID NO: 5593 - DNA, 1581 bp, Homo sapiens
  source 1..1581: mol_type = unassigned DNA
atatcaaggacttcactaaattagcaggtaccactggtcttcttgtgcttatccgggcaagaacttatcgaaatacaatagaagtttttacttagaagagattttcagggagaagtgaaatgacaacctcactagatacagttgagacctttggtaccacatcctactatgatgacgtgggcctgctctgtgaaaaagctgataccagagcactgatggcccagtttgtgcccccgctgtactccctggtgttcactgtgggcctcttgggcaatgtggtggtggtgatgatcctcataaaatacaggaggctccgaattatgaccaacatctacctgctcaacctggccatttcggacctgctcttcctcgtcacccttccattctggatccactatgtcagggggcataactgggtttttggccatggcatgtgtaagctcctctcagggttttatcacacaggcttgtacagcgagatctttttcataatcctgctgacaatcgacaggtacctggccattgtccatgctgtgtttgcccttcgagcccggactgtcacttttggtgtcatcaccagcatcgtcacctggggcctggcagtgctagcagctcttcctgaatttatcttctatgagactgaagagttgtttgaagagactctttgcagtgctctttacccagaggatacagtatatagctggaggcatttccacactctgagaatgaccatcttctgtctcgttctccctctgctcgttatggccatctgctacacaggaatcatcaaaacgctgctgaggtgccccagtaaaaaaaagtacaaggccatccggctcatttttgtcatcatggcggtgtttttcattttctggacaccctacaatgtggctatccttctctcttcctatcaatccatcttatttggaaatgactgtgagcggagcaagcatctggacctggtcatgctggtgacagaggtgatcgcctactcccactgctgcatgaacccggtgatctacgcctttgttggagagaggttccggaagtacctgcgccacttcttccacaggcacttgctcatgcacctgggcagatacatcccattccttcctagtgagaagctggaaagaaccagctctgtctctccatccacagcagagccggaactctctattgtgttttaggtcagatgcagaaaattgcctaaagaggaaggaccaaggagatgaagcaaacacattaagccttccacactcacctctaaaacagtccttcaaacttccagtgcaacactgaagctcttgaagacactgaaatatacacacagcagtagcagtagatgcatgtaccctaaggtcattaccacaggccaggggctgggcagcgtactcatcatcaaccctaaaaagcagagctttgcttctctctctaaaatgagttacctacattttaatgcacctgaatgttagatagttactatatgccgctacaaaaaggtaaaactttttatattttatacattaacttcagccagctattgatataaataaaacattttcacacaatacaataagttaa

SEQ ID NO: 5594 - DNA, 1201 bp, Homo sapiens
  source 1..1201: mol_type = unassigned DNA
tttttcttcttctatcacagggagaagtgaaatgacaacctcactagatacagttgagacctttggtaccacatcctactatgatgacgtgggcctgctctgtgaaaaagctgataccagagcactgatggcccagtttgtgcccccgctgtactccctggtgttcactgtgggcctcttgggcaatgtggtggtggtgatgatcctcataaaatacaggaggctccgaattatgaccaacatctacctgctcaacctggccatttcggacctgctcttcctcgtcacccttccattctggatccactatgtcagggggcataactgggtttttggccatggcatgtgtaagctcctctcagggttttatcacacaggcttgtacagcgagatctttttcataatcctgctgacaatcgacaggtacctggccattgtccatgctgtgtttgcccttcgagcccggactgtcacttttggtgtcatcaccagcatcgtcacctggggcctggcagtgctagcagctcttcctgaatttatcttctatgagactgaagagttgtttgaagagactctttgcagtgctctttacccagaggatacagtatatagctggaggcatttccacactctgagaatgaccatcttctgtctcgttctccctctgctcgttatggccatctgctacacaggaatcatcaaaacgctgctgaggtgccccagtaaaaaaaagtacaaggccatccggctcatttttgtcatcatggcggtgtttttcattttctggacaccctacaatgtggctatccttctctcttcctatcaatccatcttatttggaaatgactgtgagcggagcaagcatctggacctggtcatgctggtgacagaggtgatcgcctactcccactgctgcatgaacccggtgatctacgcctttgttggagagaggttccggaagtacctgcgccacttcttccacaggcacttgctcatgcacctgggcagatacatcccattccttcctagtgagaagctggaaagaaccagctctgtctctccatccacagcagagccggaactctctattgtgttttaggtcagatgcagaaaattgcctaaagaggaaggaccaaggagatgaagcaaacacattaagccttccacactcacctctaaaacagtccttcaaacttccagt

SEQ ID NO: 5595 - DNA, 400 bp, Homo sapiens
  source 1..400: mol_type = unassigned DNA
accactggtcttcttgtgcttatccgggcaagaacttatcgaaatacaatagaagtttttacttagaagagattttcagctgctgtggattggattatgccatttggaataagaatgctgttaagagcacacaagccaggttcctcaaggagaagtgaaatgacaacctcactagatacagttgagacctttggtaccacatcctactatgatgacgtgggcctgctctgtgaaaaagctgataccagagcactgatggcccagtttgtgcccccgctgtactccctggtgttcactgtgggcctcttgggcaatgtggtggtggtgatgatcctcataaaatacaggaggctccgaattatgaccaacatctacctgctcaacctggccatttcggacc

SEQ ID NO: 5596 - DNA, 212 bp, Homo sapiens
  source 1..212: mol_type = unassigned DNA
ccactggtcttcttgtgcttatccgggcaagaacttatcgaaatacaatagaagtttttacttagaagagattttcagctgctgtggattggattatgccatttggaataagaatgctgttaagagcacacaagccagggagaagtgaaatgacaacctcactagatacagttgagacctttggtaccacatcctactatgatgacgtgggc

SEQ ID NO: 5597 - DNA, 1796 bp, Homo sapiens
  source 1..1796: mol_type = unassigned DNA
ctgatggtatctctgtttcaggagtggtgacgcctaagctatcactggacatatcaaggacttcactaaattagcaggtaccactggtcttcttgtgcttatccgggcaagaacttatcgaaatacaatagaagtttttacttagaagagattttcagcagatgagaagctggtaacagagaccaaaatagtttggagactaaagaatcattgcacatttcactgctgagttgtattggagaagtgaaatgacaacctcactagatacagttgagacctttggtaccacatcctactatgatgacgtgggcctgctctgtgaaaaagctgataccagagcactgatggcccagtttgtgcccccgctgtactccctggtgttcactgtgggcctcttgggcaatgtggtggtggtgatgatcctcataaaatacaggaggctccgaattatgaccaacatctacctgctcaacctggccatttcggacctgctcttcctcgtcacccttccattctggatccactatgtcagggggcataactgggtttttggccatggcatgtgtaagctcctctcagggttttatcacacaggcttgtacagcgagatctttttcataatcctgctgacaatcgacaggtacctggccattgtccatgctgtgtttgcccttcgagcccggactgtcacttttggtgtcatcaccagcatcgtcacctggggcctggcagtgctagcagctcttcctgaatttatcttctatgagactgaagagttgtttgaagagactctttgcagtgctctttacccagaggatacagtatatagctggaggcatttccacactctgagaatgaccatcttctgtctcgttctccctctgctcgttatggccatctgctacacaggaatcatcaaaacgctgctgaggtgccccagtaaaaaaaagtacaaggccatccggctcatttttgtcatcatggcggtgtttttcattttctggacaccctacaatgtggctatccttctctcttcctatcaatccatcttatttggaaatgactgtgagcggagcaagcatctggacctggtcatgctggtgacagaggtgatcgcctactcccactgctgcatgaacccggtgatctacgcctttgttggagagaggttccggaagtacctgcgccacttcttccacaggcacttgctcatgcacctgggcagatacatcccattccttcctagtgagaagctggaaagaaccagctctgtctctccatccacagcagagccggaactctctattgtgttttaggtcagatgcagaaaattgcctaaagaggaaggaccaaggagatgaagcaaacacattaagccttccacactcacctctaaaacagtccttcaaacttccagtgcaacactgaagctcttgaagacactgaaatatacacacagcagtagcagtagatgcatgtaccctaaggtcattaccacaggccaggggctgggcagcgtactcatcatcaaccctaaaaagcagagctttgcttctctctctaaaatgagttacctacattttaatgcacctgaatgttagatagttactatatgccgctacaaaaaggtaaaactttttatattttatacattaacttcagccagctattgatataaataaaacattttcacacaatacaataagttaactattttattttctaatgtgcctagttctttccctgcttaatgaaaagcttgttttttcagtgtgaataaataatcgtaagcaaca

SEQ ID NO: 5598 - DNA, 1786 bp, Homo sapiens
  source 1..1786: mol_type = unassigned DNA
ctgatggtatctctgtttcaggagtggtgacgcctaagctatcactggacatatcaaggacttcactaaattagcaggtaccactggtcttcttgtgcttatccgggcaagaacttatcgaaatacaatagaagtttttacttagaagagattttcagctgctgtggattggattatgccatttggaataagaatgctgttaagagcacacaagccaggttcctcaaggagaagtgaaatgacaacctcactagatacagttgagacctttggtaccacatcctactatgatgacgtgggcctgctctgtgaaaaagctgataccagagcactgatggcccagtttgtgcccccgctgtactccctggtgttcactgtgggcctcttgggcaatgtggtggtggtgatgatcctcataaaatacaggaggctccgaattatgaccaacatctacctgctcaacctggccatttcggacctgctcttcctcgtcacccttccattctggatccactatgtcagggggcataactgggtttttggccatggcatgtgtaagctcctctcagggttttatcacacaggcttgtacagcgagatctttttcataatcctgctgacaatcgacaggtacctggccattgtccatgctgtgtttgcccttcgagcccggactgtcacttttggtgtcatcaccagcatcgtcacctggggcctggcagtgctagcagctcttcctgaatttatcttctatgagactgaagagttgtttgaagagactctttgcagtgctctttacccagaggatacagtatatagctggaggcatttccacactctgagaatgaccatcttctgtctcgttctccctctgctcgttatggccatctgctacacaggaatcatcaaaacgctgctgaggtgccccagtaaaaaaaagtacaaggccatccggctcatttttgtcatcatggcggtgtttttcattttctggacaccctacaatgtggctatccttctctcttcctatcaatccatcttatttggaaatgactgtgagcggagcaagcatctggacctggtcatgctggtgacagaggtgatcgcctactcccactgctgcatgaacccggtgatctacgcctttgttggagagaggttccggaagtacctgcgccacttcttccacaggcacttgctcatgcacctgggcagatacatcccattccttcctagtgagaagctggaaagaaccagctctgtctctccatccacagcagagccggaactctctattgtgttttaggtcagatgcagaaaattgcctaaagaggaaggaccaaggagatgaagcaaacacattaagccttccacactcacctctaaaacagtccttcaaacttccagtgcaacactgaagctcttgaagacactgaaatatacacacagcagtagcagtagatgcatgtaccctaaggtcattaccacaggccaggggctgggcagcgtactcatcatcaaccctaaaaagcagagctttgcttctctctctaaaatgagttacctacattttaatgcacctgaatgttagatagttactatatgccgctacaaaaaggtaaaactttttatattttatacattaacttcagccagctattgatataaataaaacattttcacacaatacaataagttaactattttattttctaatgtgcctagttctttccctgcttaatgaaaagcttgttttttcagtgtgaataaataatcgtaagcaaca

SEQ ID NO: 5599 - DNA, 3095 bp, Homo sapiens
  source 1..3095: mol_type = unassigned DNA
gctcacaggaagccacgcacccttgaaaggcaccgggtccttcttagcatcgtgcttcctgagcaagcctggcattgcctcacagaccttcctcagagccgctttcagaaaagcaagctgcttctggttgggcccagacctgccttgaggagcctgtagagttaaaaaatgaaccccacggatatagcagacaccaccctcgatgaaagcatatacagcaattactatctgtatgaaagtatccccaagccttgcaccaaagaaggcatcaaggcatttggggagctcttcctgcccccactgtattccttggtttttgtatttggtctgcttggaaattctgtggtggttctggtcctgttcaaatacaagcggctcaggtccatgactgatgtgtacctgctcaaccttgccatctcggatctgctcttcgtgttttccctccctttttggggctactatgcagcagaccagtgggtttttgggctaggtctgtgcaagatgatttcctggatgtacttggtgggcttttacagtggcatattctttgtcatgctcatgagcattgatagatacctggcaattgtgcacgcggtgttttccttgagggcaaggaccttgacttatggggtcatcaccagtttggctacatggtcagtggctgtgttcgcctcccttcctggctttctgttcagcacttgttatactgagcgcaaccatacctactgcaaaaccaagtactctctcaactccacgacgtggaaggttctcagctccctggaaatcaacattctcggattggtgatccccttagggatcatgctgttttgctactccatgatcatcaggaccttgcagcattgtaaaaatgagaagaagaacaaggcggtgaagatgatctttgccgtggtggtcctcttccttgggttctggacaccttacaacatagtgctcttcctagagaccctggtggagctagaagtccttcaggactgcacctttgaaagatacttggactatgccatccaggccacagaaactctggcttttgttcactgctgccttaatcccatcatctacttttttctgggggagaaatttcgcaagtacatcctacagctcttcaaaacctgcaggggcctttttgtgctctgccaatactgtgggctcctccaaatttactctgctgacacccccagctcatcttacacgcagtccaccatggatcatgatctccatgatgctctgtagaaaaatgaaatggtgaaatgcagagtcaatgaactttccacattcagagcttacttaaaattgtattttagtaagagattcctgagccagtgtcaggaggaaggcttacacccacagtggaaagacagcttctcatcctgcaggcagctttttctctcccactagacaagtccagcctggcaagggttcacctgggctgaggcatccttcctcacaccaggcttgcctgcaggcatgagtcagtctgatgagaactctgagcagtgcttgaatgaagttgtaggtaatattgcaaggcaaagactattcccttctaacctgaactgatgggtttctccagagggaattgcagagtactggctgatggagtaaatcgctaccttttgctgtggcaaatgggccctctaattaatttcttgcttttgcggaacaatatagataactgtttttctaataacatatctcaggcaaagtatattccattgagccagatgtatgaagaaacaattagcgaagtgatgaaaccagatctcaattatttattgtaaaggattatctgttaattgaaaccaaactttttatactgatataagggtaaggatatgaagacattagccaaggtctgctttccaaacgtgaactacaaggcattcaaaatccaaacatatttatgaaaattcaaacacagtttctcacttgtttgtggacatgttttgttctaattttaacagaggaatattaaaaaattttaaataggctgggcacggtggcctgtaatcccagcactgtgggaggccaaggtgggcggatcacctgaggtcaggagttcgagaccagcctggccaacatggagaaaccctgtctctactaaaaaatacaaaattagccaggtgtggtggcgcatgcctgtaatcccagctactcaggaggctgaggctggagaataacttgaatccgggaggtggaggttgcggtgagccgagatcgcgccattgtactccaacctgggcaaaaagagcgaaactctgtctcaaaaaaaaaaaaaaaaaattaaataatacataggccaagaatacatttatttgaggtcatttacttgtttttttttttttttttttttttgagatggaatcttgctctgtcacccagtctggagtgcagtggcgcgatctcggctcactgcaagctctgcctcacgggttcgcaccattctcctgcctcagcctcccaagtaggtgggactacaggcacctgcccccatgcctggctaattttttgtattttcagtagagatggggtttcaccatgttagcaaggatggttttaatctcctgacctcgtgatccacccgcctcggcctcccaaagtgctgggattacaggtgtgagccatcacgcccggccacttgtttattttttattttattttattttatttttgagatggagtctcactctgtcacccaagctggagtgcagtggcactcggttcactgcaaagtctgcctcccaggttcaagcgattctcctgcctcagcttctcaagcagctgggattagaggtgtgcaccactacgccaggctaatttttgtatttttagtagagatggggtttcaccatattggccaggctagtcttgaactcctgacctcaggtgatctgcctgcttcagcctcccaaagtgctgggattacaggcgtgagccacctcgcccagccaaggtcttttacttgtttataaacagtctcttcataattaaaattaaggattaataaagtatgacaatacctccttaatcattttgaagtgcctgctatcaattgaaataaaaacaatcaactaaaa

SEQ ID NO: 5600 - DNA, 3450 bp, Homo sapiens
  source 1..3450: mol_type = unassigned DNA
acttaatgatttaactccaccctccttcaaaagaaacagcatttcctacttttatactgtctatatgattgatttgcacagctcatctggccagaagagctgagacatccgttcccctacaagaaactctccccgggtggaacaagatggattatcaagtgtcaagtccaatctatgacatcaattattatacatcggagccctgccaaaaaatcaatgtgaagcaaatcgcagcccgcctcctgcctccgctctactcactggtgttcatctttggttttgtgggcaacatgctggtcatcctcatcctgataaactgcaaaaggctgaagagcatgactgacatctacctgctcaacctggccatctctgacctgtttttccttcttactgtccccttctgggctcactatgctgccgcccagtgggactttggaaatacaatgtgtcaactcttgacagggctctattttataggcttcttctctggaatcttcttcatcatcctcctgacaatcgataggtacctggctgtcgtccatgctgtgtttgctttaaaagccaggacggtcacctttggggtggtgacaagtgtgatcacttgggtggtggctgtgtttgcgtctctcccaggaatcatctttaccagatctcaaaaagaaggtcttcattacacctgcagctctcattttccatacagtcagtatcaattctggaagaatttccagacattaaagatagtcatcttggggctggtcctgccgctgcttgtcatggtcatctgctactcgggaatcctaaaaactctgcttcggtgtcgaaatgagaagaagaggcacagggctgtgaggcttatcttcaccatcatgattgtttattttctcttctgggctccctacaacattgtccttctcctgaacaccttccaggaattctttggcctgaataattgcagtagctctaacaggttggaccaagctatgcaggtgacagagactcttgggatgacgcactgctgcatcaaccccatcatctatgcctttgtcggggagaagttcagaaactacctcttagtcttcttccaaaagcacattgccaaacgcttctgcaaatgctgttctattttccagcaagaggctcccgagcgagcaagctcagtttacacccgatccactggggagcaggaaatatctgtgggcttgtgacacggactcaagtgggctggtgacccagtcagagttgtgcacatggcttagttttcatacacagcctgggctgggggtggggtgggagaggtcttttttaaaaggaagttactgttatagagggtctaagattcatccatttatttggcatctgtttaaagtagattagatcttttaagcccatcaattatagaaagccaaatcaaaatatgttgatgaaaaatagcaacctttttatctccccttcacatgcatcaagttattgacaaactctcccttcactccgaaagttccttatgtatatttaaaagaaagcctcagagaattgctgattcttgagtttagtgatctgaacagaaataccaaaattatttcagaaatgtacaactttttacctagtacaaggcaacatataggttgtaaatgtgtttaaaacaggtctttgtcttgctatggggagaaaagacatgaatatgattagtaaagaaatgacacttttcatgtgtgatttcccctccaaggtatggttaataagtttcactgacttagaaccaggcgagagacttgtggcctgggagagctggggaagcttcttaaatgagaaggaatttgagttggatcatctattgctggcaaagacagaagcctcactgcaagcactgcatgggcaagcttggctgtagaaggagacagagctggttgggaagacatggggaggaaggacaaggctagatcatgaagaaccttgacggcattgctccgtctaagtcatgagctgagcagggagatcctggttggtgttgcagaaggtttactctgtggccaaaggagggtcaggaaggatgagcatttagggcaaggagaccaccaacagccctcaggtcagggtgaggatggcctctgctaagctcaaggcgtgaggatgggaaggagggaggtattcgtaaggatgggaaggagggaggtattcgtgcagcatatgaggatgcagagtcagcagaactggggtggatttgggttggaagtgagggtcagagaggagtcagagagaatccctagtcttcaagcagattggagaaacccttgaaaagacatcaagcacagaaggaggaggaggaggtttaggtcaagaagaagatggattggtgtaaaaggatgggtctggtttgcagagcttgaacacagtctcacccagactccaggctgtctttcactgaatgcttctgacttcatagatttccttcccatcccagctgaaatactgaggggtctccaggaggagactagatttatgaatacacgaggtatgaggtctaggaacatacttcagctcacacatgagatctaggtgaggattgattacctagtagtcatttcatgggttgttgggaggattctatgaggcaaccacaggcagcatttagcacatactacacattcaataagcatcaaactcttagttactcattcagggatagcactgagcaaagcattgagcaaaggggtcccatagaggtgagggaagcctgaaaaactaagatgctgcctgcccagtgcacacaagtgtaggtatcattttctgcatttaaccgtcaataggcaaaggggggaagggacatattcatttggaaataagctgccttgagccttaaaacccacaaaagtacaatttaccagcctccgtatttcagactgaatgggggtggggggggcgccttaggtacttattccagatgccttctccagacaaaccagaagcaacagaaaaaatcgtctctccctccctttgaaatgaatataccccttagtgtttgggtatattcatttcaaagggagagagagaggtttttttctgttctgtctcatatgattgtgcacatacttgagactgttttgaatttgggggatggctaaaaccatcatagtacaggtaaggtgagggaatagtaagtggtgagaactactcagggaatgaaggtgtcagaataataagaggtgctactgactttctcagcctctgaatatgaacggtgagcattgtggctgtcagcaggaagcaacgaagggaaatgtctttccttttgctcttaagttgtggagagtgcaacagtagcataggaccctaccctctgggccaagtcaaagacattctgacatcttagtatttgcatattcttatgtatgtgaaagttacaaattgcttgaaagaaaatatgcatctaataaaaaacaccttctaaaataa

SEQ ID NO: 5601 - DNA, 3637 bp, Homo sapiens
  source 1..3637: mol_type = unassigned DNA
cttcagatagattatatctggagtgaagaatcctgccacctatgtatctggcatagtattctgtgtagtgggatgagcagagaacaaaaacaaaataatccagtgagaaaagcccgtaaataaaccttcagaccagagatctattctctagcttattttaagctcaacttaaaaagaagaactgttctctgattcttttcgccttcaatacacttaatgatttaactccaccctccttcaaaagaaacagcatttcctacttttatactgtctatatgattgatttgcacagctcatctggccagaagagctgagacatccgttcccctacaagaaactctccccgggtggaacaagatggattatcaagtgtcaagtccaatctatgacatcaattattatacatcggagccctgccaaaaaatcaatgtgaagcaaatcgcagcccgcctcctgcctccgctctactcactggtgttcatctttggttttgtgggcaacatgctggtcatcctcatcctgataaactgcaaaaggctgaagagcatgactgacatctacctgctcaacctggccatctctgacctgtttttccttcttactgtccccttctgggctcactatgctgccgcccagtgggactttggaaatacaatgtgtcaactcttgacagggctctattttataggcttcttctctggaatcttcttcatcatcctcctgacaatcgataggtacctggctgtcgtccatgctgtgtttgctttaaaagccaggacggtcacctttggggtggtgacaagtgtgatcacttgggtggtggctgtgtttgcgtctctcccaggaatcatctttaccagatctcaaaaagaaggtcttcattacacctgcagctctcattttccatacagtcagtatcaattctggaagaatttccagacattaaagatagtcatcttggggctggtcctgccgctgcttgtcatggtcatctgctactcgggaatcctaaaaactctgcttcggtgtcgaaatgagaagaagaggcacagggctgtgaggcttatcttcaccatcatgattgtttattttctcttctgggctccctacaacattgtccttctcctgaacaccttccaggaattctttggcctgaataattgcagtagctctaacaggttggaccaagctatgcaggtgacagagactcttgggatgacgcactgctgcatcaaccccatcatctatgcctttgtcggggagaagttcagaaactacctcttagtcttcttccaaaagcacattgccaaacgcttctgcaaatgctgttctattttccagcaagaggctcccgagcgagcaagctcagtttacacccgatccactggggagcaggaaatatctgtgggcttgtgacacggactcaagtgggctggtgacccagtcagagttgtgcacatggcttagttttcatacacagcctgggctgggggtggggtgggagaggtcttttttaaaaggaagttactgttatagagggtctaagattcatccatttatttggcatctgtttaaagtagattagatcttttaagcccatcaattatagaaagccaaatcaaaatatgttgatgaaaaatagcaacctttttatctccccttcacatgcatcaagttattgacaaactctcccttcactccgaaagttccttatgtatatttaaaagaaagcctcagagaattgctgattcttgagtttagtgatctgaacagaaataccaaaattatttcagaaatgtacaactttttacctagtacaaggcaacatataggttgtaaatgtgtttaaaacaggtctttgtcttgctatggggagaaaagacatgaatatgattagtaaagaaatgacacttttcatgtgtgatttcccctccaaggtatggttaataagtttcactgacttagaaccaggcgagagacttgtggcctgggagagctggggaagcttcttaaatgagaaggaatttgagttggatcatctattgctggcaaagacagaagcctcactgcaagcactgcatgggcaagcttggctgtagaaggagacagagctggttgggaagacatggggaggaaggacaaggctagatcatgaagaaccttgacggcattgctccgtctaagtcatgagctgagcagggagatcctggttggtgttgcagaaggtttactctgtggccaaaggagggtcaggaaggatgagcatttagggcaaggagaccaccaacagccctcaggtcagggtgaggatggcctctgctaagctcaaggcgtgaggatgggaaggagggaggtattcgtaaggatgggaaggagggaggtattcgtgcagcatatgaggatgcagagtcagcagaactggggtggatttgggttggaagtgagggtcagagaggagtcagagagaatccctagtcttcaagcagattggagaaacccttgaaaagacatcaagcacagaaggaggaggaggaggtttaggtcaagaagaagatggattggtgtaaaaggatgggtctggtttgcagagcttgaacacagtctcacccagactccaggctgtctttcactgaatgcttctgacttcatagatttccttcccatcccagctgaaatactgaggggtctccaggaggagactagatttatgaatacacgaggtatgaggtctaggaacatacttcagctcacacatgagatctaggtgaggattgattacctagtagtcatttcatgggttgttgggaggattctatgaggcaaccacaggcagcatttagcacatactacacattcaataagcatcaaactcttagttactcattcagggatagcactgagcaaagcattgagcaaaggggtcccatagaggtgagggaagcctgaaaaactaagatgctgcctgcccagtgcacacaagtgtaggtatcattttctgcatttaaccgtcaataggcaaaggggggaagggacatattcatttggaaataagctgccttgagccttaaaacccacaaaagtacaatttaccagcctccgtatttcagactgaatgggggtggggggggcgccttaggtacttattccagatgccttctccagacaaaccagaagcaacagaaaaaatcgtctctccctccctttgaaatgaatataccccttagtgtttgggtatattcatttcaaagggagagagagaggtttttttctgttctgtctcatatgattgtgcacatacttgagactgttttgaatttgggggatggctaaaaccatcatagtacaggtaaggtgagggaatagtaagtggtgagaactactcagggaatgaaggtgtcagaataataagaggtgctactgactttctcagcctctgaatatgaacggtgagcattgtggctgtcagcaggaagcaacgaagggaaatgtctttccttttgctcttaagttgtggagagtgcaacagtagcataggaccctaccctctgggccaagtcaaagacattctgacatcttagtatttgcatattcttatgtatgtgaaagttacaaattgcttgaaagaaaatatgcatct

SEQ ID NO: 5602 - DNA, 3633 bp, Homo sapiens
  source 1..3633: mol_type = unassigned DNA
cttcagatagattatatctggagtgaagaatcctgccacctatgtatctggcatagtattctgtgtagtgggatgagcagagaacaaaaacaaaataatccagtgagaaaagcccgtaaataaaccttcagaccagagatctattctctagcttattttaagctcaacttaaaaagaagaactgttctctgattcttttcgccttcaatacacttaatgatttaactccaccctccttcaaaagaaacagcatttcctacttttatactgtctatatgattgatttgcacagctcatctggccagaagagctgagacatccgttcccctacaagaaactctccccgggtggaacaagatggattatcaagtgtcaagtccaatctatgacatcaattattatacatcggagccctgccaaaaaatcaatgtgaagcaaatcgcagcccgcctcctgcctccgctctactcactggtgttcatctttggttttgtaacatgctggtcatcctcatcctgataaactgcaaaaggctgaagagcatgactgacatctacctgctcaacctggccatctctgacctgtttttccttcttactgtccccttctgggctcactatgctgccgcccagtgggactttggaaatacaatgtgtcaactcttgacagggctctattttataggcttcttctctggaatcttcttcatcatcctcctgacaatcgataggtacctggctgtcgtccatgctgtgtttgctttaaaagccaggacggtcacctttggggtggtgacaagtgtgatcacttgggtggtggctgtgtttgcgtctctcccaggaatcatctttaccagatctcaaaaagaaggtcttcattacacctgcagctctcattttccatacagtcagtatcaattctggaagaatttccagacattaaagatagtcatcttggggctggtcctgccgctgcttgtcatggtcatctgctactcgggaatcctaaaaactctgcttcggtgtcgaaatgagaagaagaggcacagggctgtgaggcttatcttcaccatcatgattgtttattttctcttctgggctccctacaacattgtccttctcctgaacaccttccaggaattctttggcctgaataattgcagtagctctaacaggttggaccaagctatgcaggtgacagagactcttgggatgacgcactgctgcatcaaccccatcatctatgcctttgtcggggagaagttcagaaactacctcttagtcttcttccaaaagcacattgccaaacgcttctgcaaatgctgttctattttccagcaagaggctcccgagcgagcaagctcagtttacacccgatccactggggagcaggaaatatctgtgggcttgtgacacggactcaagtgggctggtgacccagtcagagttgtgcacatggcttagttttcatacacagcctgggctgggggtggggtgggagaggtcttttttaaaaggaagttactgttatagagggtctaagattcatccatttatttggcatctgtttaaagtagattagatcttttaagcccatcaattatagaaagccaaatcaaaatatgttgatgaaaaatagcaacctttttatctccccttcacatgcatcaagttattgacaaactctcccttcactccgaaagttccttatgtatatttaaaagaaagcctcagagaattgctgattcttgagtttagtgatctgaacagaaataccaaaattatttcagaaatgtacaactttttacctagtacaaggcaacatataggttgtaaatgtgtttaaaacaggtctttgtcttgctatggggagaaaagacatgaatatgattagtaaagaaatgacacttttcatgtgtgatttcccctccaaggtatggttaataagtttcactgacttagaaccaggcgagagacttgtggcctgggagagctggggaagcttcttaaatgagaaggaatttgagttggatcatctattgctggcaaagacagaagcctcactgcaagcactgcatgggcaagcttggctgtagaaggagacagagctggttgggaagacatggggaggaaggacaaggctagatcatgaagaaccttgacggcattgctccgtctaagtcatgagctgagcagggagatcctggttggtgttgcagaaggtttactctgtggccaaaggagggtcaggaaggatgagcatttagggcaaggagaccaccaacagccctcaggtcagggtgaggatggcctctgctaagctcaaggcgtgaggatgggaaggagggaggtattcgtaaggatgggaaggagggaggtattcgtgcagcatatgaggatgcagagtcagcagaactggggtggatttgggttggaagtgagggtcagagaggagtcagagagaatccctagtcttcaagcagattggagaaacccttgaaaagacatcaagcacagaaggaggaggaggaggtttaggtcaagaagaagatggattggtgtaaaaggatgggtctggtttgcagagcttgaacacagtctcacccagactccaggctgtctttcactgaatgcttctgacttcatagatttccttcccatcccagctgaaatactgaggggtctccaggaggagactagatttatgaatacacgaggtatgaggtctaggaacatacttcagctcacacatgagatctaggtgaggattgattacctagtagtcatttcatgggttgttgggaggattctatgaggcaaccacaggcagcatttagcacatactacacattcaataagcatcaaactcttagttactcattcagggatagcactgagcaaagcattgagcaaaggggtcccatagaggtgagggaagcctgaaaaactaagatgctgcctgcccagtgcacacaagtgtaggtatcattttctgcatttaaccgtcaataggcaaaggggggaagggacatattcatttggaaataagctgccttgagccttaaaacccacaaaagtacaatttaccagcctccgtatttcagactgaatgggggtggggggggcgccttaggtacttattccagatgccttctccagacaaaccagaagcaacagaaaaaatcgtctctccctccctttgaaatgaatataccccttagtgtttgggtatattcatttcaaagggagagagagaggtttttttctgttctgtctcatatgattgtgcacatacttgagactgttttgaatttgggggatggctaaaaccatcatagtacaggtaaggtgagggaatagtaagtggtgagaactactcagggaatgaaggtgtcagaataataagaggtgctactgactttctcagcctctgaatatgaacggtgagcattgtggctgtcagcaggaagcaacgaagggaaatgtctttccttttgctcttaagttgtggagagtgcaacagtagcataggaccctaccctctgggccaagtcaaagacattctgacatcttagtatttgcatattcttatgtatgtgaaagttacaaattgcttgaaagaaaatatgcatct

SEQ ID NO: 5603 - DNA, 1292 bp, Homo sapiens
  source 1..1292: mol_type = unassigned DNA
ccccaacagagccaagctctccatctagtggacagggaagctagcagcaaaccttcccttcactacaaaacttcattgcttggccaaaaagagagttaattcaatgtagacatctatgtaggcaattaaaaacctattgatgtataaaacagtttgcattcatggagggcaactaaatacattctaggactttataaaagatcactttttatttatgcacagggtggaacaagatggattatcaagtgtcaagtccaatctatgacatcaattattatacatcggagccctgccaaaaaatcaatgtgaagcaaatcgcagcccgcctcctgcctccgctctactcactggtgttcatctttggttttgtgggcaacatgctggtcatcctcatcctgataaactgcaaaaggctgaagagcatgactgacatctacctgctcaacctggccatctctgacctgtttttccttcttactgtccccttctgggctcactatgctgccgcccagtgggactttggaaatacaatgtgtcaactcttgacagggctctattttataggcttcttctctggaatcttcttcatcatcctcctgacaatcgataggtacctggctgtcgtccatgctgtgtttgctttaaaagccaggacggtcacctttggggtggtgacaagtgtgatcacttgggtggtggctgtgtttgcgtctctcccaggaatcatctttaccagatctcaaaaagaaggtcttcattacacctgcagctctcattttccatacagtcagtatcaattctggaagaatttccagacattaaagatagtcatcttggggctggtcctgccgctgcttgtcatggtcatctgctactcgggaatcctaaaaactctgcttcggtgtcgaaatgagaagaagaggcacagggctgtgaggcttatcttcaccatcatgattgtttattttctcttctgggctccctacaacattgtccttctcctgaacaccttccaggaattctttggcctgaataattgcagtagctctaacaggttggaccaagctatgcaggtgacagagactcttgggatgacgcactgctgcatcaaccccatcatctatgcctttgtcggggagaagttcagaaactacctcttagtcttcttccaaaagcacattgccaaacgcttctgcaaatgctgttctattttccagcaagaggctcccgagcgagcaagctcagtttacacccgatccactggggagcaggaaatatctgtgggcttgtga

SEQ ID NO: 5604 - DNA, 4018 bp, Homo sapiens
  source 1..4018: mol_type = unassigned DNA
tgcaaacgttcccaaatcttcccagtcggcttgcagagactccttgctcccaggagataaccaggtaaaggagtatgaaagtttgggtacaaactcattgctgcaaattgaaaaccatgcaaaggctgtcttcctctggggagttcaatgcctctctttttcttatcactttaccattggttggactttgattccagggatcctacgattactcaataccctacaggatatacatggttaaccatttgcatttgggcaaataggcgttacttttcaataggaagtggcaatccagaacttgcttttgggcaattctagtagctcaccgcttttttcttaatgactgctagaagctgcatcttattgacagatggtcatcacattggtgagctggagtcatcagattgtggggcccggagtgaggctgaagggagtggatcagagcactgcctgagagtcacctctactttcctgctaccgctgcctgtgagctgaaggggctgaaccatacactcctttttctacaaccagcttgcattttttctgcccacaatgagcggggaatcaatgaatttcagcgatgttttcgactccagtgaagattattttgtgtcagtcaatacttcatattactcagttgattctgagatgttactgtgctccttgcaggaggtcaggcagttctccaggctatttgtaccgattgcctactccttgatctgtgtctttggcctcctggggaatattctggtggtgatcacctttgctttttataagaaggccaggtctatgacagacgtctatctcttgaacatggccattgcagacatcctctttgttcttactctcccattctgggcagtgagtcatgccaccggtgcgtgggttttcagcaatgccacgtgcaagttgctaaaaggcatctatgccatcaactttaactgcgggatgctgctcctgacttgcattagcatggaccggtacatcgccattgtacaggcgactaagtcattccggctccgatccagaacactaccgcgcagcaaaatcatctgccttgttgtgtgggggctgtcagtcatcatctccagctcaacttttgtcttcaaccaaaaatacaacacccaaggcagcgatgtctgtgaacccaagtaccagactgtctcggagcccatcaggtggaagctgctgatgttggggcttgagctactctttggtttctttatccctttgatgttcatgatattttgttacacgttcattgtcaaaaccttggtgcaagctcagaattctaaaaggcacaaagccatccgtgtaatcatagctgtggtgcttgtgtttctggcttgtcagattcctcataacatggtcctgcttgtgacggctgcaaatttgggtaaaatgaaccgatcctgccagagcgaaaagctaattggctatacgaaaactgtcacagaagtcctggctttcctgcactgctgcctgaaccctgtgctctacgcttttattgggcagaagttcagaaactactttctgaagatcttgaaggacctgtggtgtgtgagaaggaagtacaagtcctcaggcttctcctgtgccgggaggtactcagaaaacatttctcggcagaccagtgagaccgcagataacgacaatgcgtcgtccttcactatgtgatagaaagctgagtctccctaaggcatgtgtgaaacatactcatagatgttatgcaaaaaaaagtctatggccaggtatgcatggaaaatgtgggaattaagcaaaatcaagcaagcctctctcctgcgggacttaacgtgctcatgggctgtgtgatctcttcagggtggggtggtctctgataggtagcattttccagcactttgcaaggaatgttttgtagctctagggtatatatccgcctggcatttcacaaaacagcctttgggaaatgctgaattaaagtgaattgttgacaaatgtaaacattttcagaaatattcatgaagcggtcacagatcacagtgtcttttggttacagcacaaaatgatggcagtggtttgaaaaactaaaacagaaaaaaaaatggaagccaacacatcactcattttaggcaaatgtttaaacatttttatctatcagaatgtttattgttgctggttataagcagcaggattggccggctagtgtttcctctcatttccctttgatacagtcaacaagcctgaccctgtaaaatggaggtggaaagacaagctcaagtgttcacaacctggaagtgcttcgggaagaaggggacaatggcagaacaggtgttggtgacaattgtcaccaattggataaagcagctcaggttgtagtgggccattaggaaactgtcggtttgctttgatttccctgggagctgttctctgtcgtgagtgtctcttgtctaaacgtccattaagctgagagtgctatgaagacaggatctagaataatcttgctcacagctgtgctctgagtgcctagcggagttccagcaaacaaaatggactcaagagagatttgattaatgaatcgtaatgaagttggggtttattgtacagtttaaaatgttagatgtttttaattttttaaataaatggaatactttttttttttttttaaagaaagcaactttactgagacaatgtagaaagaagttttgttccgtttctttaatgtggttgaagagcaatgtgtggctgaagacttttgttatgaggagctgcagattagctaggggacagctggaattatgctggcttctgataattattttaaaggggtctgaaatttgtgatggaatcagattttaacagctctcttcaatgacatagaaagttcatggaactcatgtttttaaagggctatgtaaatatatgaacattagaaaaatagcaacttgtgttacaaaaatacaaacacatgttaggaaggtactgtcatgggctaggcatggtggctcacacctgtaatcccagcattttgggaagctaagatgggtggatcacttgaggtcaggagtttgagaccagcctggccaacatggcgaaacccctctctactaaaaatacaaaaatttgccaggcgtggtggcgggtgcctgtaatcccagctacttgggaggctgaggcaagagaatcgcttgaacccaggaggcagaggttgcagtgagccgagatcgtgccattgcactccagcctgggtgacaaagcgagactccatctcaaaaaaaaaaaaaaaaaaaaaggaaagaactgtcatgtaaacataccaacatgtttaaacctgacaatggtgttatttgaaactttatattgttcttgtaagctttaactatatctctctttaaaatgcaaaataatgtcttaagattcaaagtctgtatttttaaagcatggctttggctttgcaaaataaaaaatgtgttttgtacatgaagtaggaatcgtatttcagcttcaaggttcagattgaggggcccactgtttggagaggatggtattcaggctttctcatgtccttcaaatctgttagcgtttgactctagaaatcaaagcaaaggagtggttacccagacacttcttttggtgtgatcaatgcgctgatgtgatctatgaagatgattcatgcttgaaaactagcacagaaacatcttgcttatttgccaaagctgggagatgagcttctctgcataatttaaatgttcagataaatgaagctgacttatttaagcaataaccttttaaacattttagctaagatgtataaaaatgtttccaaaatataccacatactttatttcttcttaaatgtagtacattaggttacatcatttttcttgctgtcttgggcatcaaaacaggtgccatggtaacctgacactctcaggagacattaagatagaaggggctgttcttcagtggttcccattgattctccccatatctttttgctctcaggctctggccgtctcttcctgagccttaactgtgt

SEQ ID NO: 5605 - DNA, 2980 bp, Homo sapiens
  source 1..2980: mol_type = unassigned DNA
caaacgttcccaaatcttcccagtcggcttgcagagactccttgctcccaggagataaccagaagctgcatcttattgacagatggtcatcacattggtgagctggagtcatcagattgtggggcccggagtgaggctgaagggagtggatcagagcactgcctgagagtcacctctactttcctgctaccgctgcctgtgagctgaaggggctgaaccatacactcctttttctacaaccagcttgcattttttctgcccacaatgagcggggaatcaatgaatttcagcgatgttttcgactccagtgaagattattttgtgtcagtcaatacttcatattactcagttgattctgagatgttactgtgctccttgcaggaggtcaggcagttctccaggctatttgtaccgattgcctactccttgatctgtgtctttggcctcctggggaatattctggtggtgatcacctttgctttttataagaaggccaggtctatgacagacgtctatctcttgaacatggccattgcagacatcctctttgttcttactctcccattctgggcagtgagtcatgccaccggtgcgtgggttttcagcaatgccacgtgcaagttgctaaaaggcatctatgccatcaactttaactgcgggatgctgctcctgacttgcattagcatggaccggtacatcgccattgtacaggcgactaagtcattccggctccgatccagaacactaccgcgcagcaaaatcatctgccttgttgtgtgggggctgtcagtcatcatctccagctcaacttttgtcttcaaccaaaaatacaacacccaaggcagcgatgtctgtgaacccaagtaccagactgtctcggagcccatcaggtggaagctgctgatgttggggcttgagctactctttggtttctttatccctttgatgttcatgatattttgttacacgttcattgtcaaaaccttggtgcaagctcagaattctaaaaggcacaaagccatccgtgtaatcatagctgtggtgcttgtgtttctggcttgtcagattcctcataacatggtcctgcttgtgacggctgcaaatttgggtaaaatgaaccgatcctgccagagcgaaaagctaattggctatacgaaaactgtcacagaagtcctggctttcctgcactgctgcctgaaccctgtgctctacgcttttattgggcagaagttcagaaactactttctgaagatcttgaaggacctgtggtgtgtgagaaggaagtacaagtcctcaggcttctcctgtgccgggaggtactcagaaaacatttctcggcagaccagtgagaccgcagataacgacaatgcgtcgtccttcactatgtgatagaaagctgagtctccctaaggcatgtgtgaaacatactcatagatgttatgcaaaaaaaagtctatggccaggtatgcatggaaaatgtgggaattaagcaaaatcaagcaagcctctctcctgcgggacttaacgtgctcatgggctgtgtgatctcttcagggtggggtggtctctgataggtagcattttccagcactttgcaaggaatgttttgtagctctagggtatatatccgcctggcatttcacaaaacagcctttgggaaatgctgaattaaagtgaattgttgacaaatgtaaacattttcagaaatattcatgaagcggtcacagatcacagtgtcttttggttacagcacaaaatgatggcagtggtttgaaaaactaaaacagaaaaaaaaatggaagccaacacatcactcattttaggcaaatgtttaaacatttttatctatcagaatgtttattgttgctggttataagcagcaggattggccggctagtgtttcctctcatttccctttgatacagtcaacaagcctgaccctgtaaaatggaggtggaaagacaagctcaagtgttcacaacctggaagtgcttcgggaagaaggggacaatggcagaacaggtgttggtgacaattgtcaccaattggataaagcagctcaggttgtagtgggccattaggaaactgtcggtttgctttgatttccctgggagctgttctctgtcgtgagtgtctcttgtctaaacgtccattaagctgagagtgctatgaagacaggatctagaataatcttgctcacagctgtgctctgagtgcctagcggagttccagcaaacaaaatggactcaagagagatttgattaatgaatcgtaatgaagttggggtttattgtacagtttaaaatgttagatgtttttaattttttaaataaatggaatactttttttttttttttaaagaaagcaactttactgagacaatgtagaaagaagttttgttccgtttctttaatgtggttgaagagcaatgtgtggctgaagacttttgttatgaggagctgcagattagctaggggacagctggaattatgctggcttctgataattattttaaaggggtctgaaatttgtgatggaatcagattttaacagctctcttcaatgacatagaaagttcatggaactcatgtttttaaagggctatgtaaatatatgaacattagaaaaatagcaacttgtgttacaaaaatacaaacacatgttaggaaggtactgtcatgggctaggcatggtggctcacacctgtaatcccagcattttgggaagctaagatgggtggatcacttgaggtcaggagtttgagaccagcctggccaacatggcgaaacccctctctactaaaaatacaaaaatttgccaggcgtggtggcgggtgcctgtaatcccagctacttgggaggctgaggcaagagaatcgcttgaacccaggaggcagaggttgcagtgagccgagatcgtgccattgcactccagcctgggtgacaaagcgagactccatctcaaaaaaaaaaaaaaaaaa

SEQ ID NO: 5606 - DNA, 3216 bp, Homo sapiens
  source 1..3216: mol_type = unassigned DNA
agtgtatgggtgaaggaggcagcagtgtggccggagaggagagctgggctgggagcacaggaaggtccccaggactctgtggtcatcagtaagagagggcccacgtgtatatgctggtgaacagaaatgtcaaccttttcaaagtctgacatttaagagaaaaaactgtggctgttggtttgtggaacagacagctccttctttattgagtcacctctactttcctgctaccgctgcctgtgagctgaaggggctgaaccatacactcctttttctacaaccagcttgcattttttctgcccacaatgagcggggaatcaatgaatttcagcgatgttttcgactccagtgaagattattttgtgtcagtcaatacttcatattactcagttgattctgagatgttactgtgctccttgcaggaggtcaggcagttctccaggctatttgtaccgattgcctactccttgatctgtgtctttggcctcctggggaatattctggtggtgatcacctttgctttttataagaaggccaggtctatgacagacgtctatctcttgaacatggccattgcagacatcctctttgttcttactctcccattctgggcagtgagtcatgccaccggtgcgtgggttttcagcaatgccacgtgcaagttgctaaaaggcatctatgccatcaactttaactgcgggatgctgctcctgacttgcattagcatggaccggtacatcgccattgtacaggcgactaagtcattccggctccgatccagaacactaccgcgcagcaaaatcatctgccttgttgtgtgggggctgtcagtcatcatctccagctcaacttttgtcttcaaccaaaaatacaacacccaaggcagcgatgtctgtgaacccaagtaccagactgtctcggagcccatcaggtggaagctgctgatgttggggcttgagctactctttggtttctttatccctttgatgttcatgatattttgttacacgttcattgtcaaaaccttggtgcaagctcagaattctaaaaggcacaaagccatccgtgtaatcatagctgtggtgcttgtgtttctggcttgtcagattcctcataacatggtcctgcttgtgacggctgcaaatttgggtaaaatgaaccgatcctgccagagcgaaaagctaattggctatacgaaaactgtcacagaagtcctggctttcctgcactgctgcctgaaccctgtgctctacgcttttattgggcagaagttcagaaactactttctgaagatcttgaaggacctgtggtgtgtgagaaggaagtacaagtcctcaggcttctcctgtgccgggaggtactcagaaaacatttctcggcagaccagtgagaccgcagataacgacaatgcgtcgtccttcactatgtgatagaaagctgagtctccctaaggcatgtgtgaaacatactcatagatgttatgcaaaaaaaagtctatggccaggtatgcatggaaaatgtgggaattaagcaaaatcaagcaagcctctctcctgcgggacttaacgtgctcatgggctgtgtgatctcttcagggtggggtggtctctgataggtagcattttccagcactttgcaaggaatgttttgtagctctagggtatatatccgcctggcatttcacaaaacagcctttgggaaatgctgaattaaagtgaattgttgacaaatgtaaacattttcagaaatattcatgaagcggtcacagatcacagtgtcttttggttacagcacaaaatgatggcagtggtttgaaaaactaaaacagaaaaaaaaatggaagccaacacatcactcattttaggcaaatgtttaaacatttttatctatcagaatgtttattgttgctggttataagcagcaggattggccggctagtgtttcctctcatttccctttgatacagtcaacaagcctgaccctgtaaaatggaggtggaaagacaagctcaagtgttcacaacctggaagtgcttcgggaagaaggggacaatggcagaacaggtgttggtgacaattgtcaccaattggataaagcagctcaggttgtagtgggccattaggaaactgtcggtttgctttgatttccctgggagctgttctctgtcgtgagtgtctcttgtctaaacgtccattaagctgagagtgctatgaagacaggatctagaataatcttgctcacagctgtgctctgagtgcctagcggagttccagcaaacaaaatggactcaagagagatttgattaatgaatcgtaatgaagttggggtttattgtacagtttaaaatgttagatgtttttaattttttaaataaatggaatactttttttttttttttaaagaaagcaactttactgagacaatgtagaaagaagttttgttccgtttctttaatgtggttgaagagcaatgtgtggctgaagacttttgttatgaggagctgcagattagctaggggacagctggaattatgctggcttctgataattattttaaaggggtctgaaatttgtgatggaatcagattttaacagctctcttcaatgacatagaaagttcatggaactcatgtttttaaagggctatgtaaatatatgaacattagaaaaatagcaacttgtgttacaaaaatacaaacacatgttaggaaggtactgtcatgggctaggcatggtggctcacacctgtaatcccagcattttgggaagctaagatgggtggatcacttgaggtcaggagtttgagaccagcctggccaacatggcgaaacccctctctactaaaaatacaaaaatttgccaggcgtggtggcgggtgcctgtaatcccagctacttgggaggctgaggcaagagaatcgcttgaacccaggaggcagaggttgcagtgagccgagatcgtgccattgcactccagcctgggtgacaaagcgagactccatctcaaaaaaaaaaaaaaaaaaaaaggaaagaactgtcatgtaaacataccaacatgtttaaacctgacaatggtgttatttgaaactttatattgttcttgtaagctttaactatatctctctttaaaatgcaaaataatgtcttaagattcaaagtctgtatttttaaagcatggctttggctttgcaaaataaaaaatgtgttttgtacatgaa

SEQ ID NO: 5607 - DNA, 2173 bp, Homo sapiens
  source 1..2173: mol_type = unassigned DNA
agacaggggtagtgcgaggccgggcacagccttcctgtgtggttttaccgcccagagagcgtcatggacctggggaaaccaatgaaaagcgtgctggtggtggctctccttgtcattttccaggtatgcctgtgtcaagatgaggtcacggacgattacatcggagacaacaccacagtggactacactttgttcgagtctttgtgctccaagaaggacgtgcggaactttaaagcctggttcctccctatcatgtactccatcatttgtttcgtgggcctactgggcaatgggctggtcgtgttgacctatatctatttcaagaggctcaagaccatgaccgatacctacctgctcaacctggcggtggcagacatcctcttcctcctgacccttcccttctgggcctacagcgcggccaagtcctgggtcttcggtgtccacttttgcaagctcatctttgccatctacaagatgagcttcttcagtggcatgctcctacttctttgcatcagcattgaccgctacgtggccatcgtccaggctgtctcagctcaccgccaccgtgcccgcgtccttctcatcagcaagctgtcctgtgtgggcatctggatactagccacagtgctctccatcccagagctcctgtacagtgacctccagaggagcagcagtgagcaagcgatgcgatgctctctcatcacagagcatgtggaggcctttatcaccatccaggtggcccagatggtgatcggctttctggtccccctgctggccatgagcttctgttaccttgtcatcatccgcaccctgctccaggcacgcaactttgagcgcaacaaggccatcaaggtgatcatcgctgtggtcgtggtcttcatagtcttccagctgccctacaatggggtggtcctggcccagacggtggccaacttcaacatcaccagtagcacctgtgagctcagtaagcaactcaacatcgcctacgacgtcacctacagcctggcctgcgtccgctgctgcgtcaaccctttcttgtacgccttcatcggcgtcaagttccgcaacgatctcttcaagctcttcaaggacctgggctgcctcagccaggagcagctccggcagtggtcttcctgtcggcacatccggcgctcctccatgagtgtggaggccgagaccaccaccaccttctccccataggcgactcttctgcctggactagagggacctctcccagggtccctggggtggggatagggagcagatgcaatgactcaggacatccccccgccaaaagctgctcagggaaaagcagctctcccctcagagtgcaagcccctgctccagaagatagcttcaccccaatcccagctacctcaaccaatgccaaaaaaagacagggctgataagctaacaccagacagacaacactgggaaacagaggctattgtcccctaaaccaaaaactgaaagtgaaagtccagaaactgttcccacctgctggagtgaaggggccaaggagggtgagtgcaaggggcgtgggagtggcctgaagagtcctctgaatgaaccttctggcctcccacagactcaaatgctcagaccagctcttccgaaaaccaggccttatctccaagaccagagatagtggggagacttcttggcttggtgaggaaaagcggacatcagctggtcaaacaaactctctgaacccctccctccatcgttttcttcactgtcctccaagccagcgggaatggcagctgccacgccgccctaaaagcacactcatcccctcacttgccgcgtcgccctcccaggctctcaacaggggagagtgtggtgtttcctgcaggccaggccagctgcctccgcgtgatcaaagccacactctgggctccagagtggggatgacatgcactcagctcttggctccactgggatgggaggagaggacaagggaaatgtcaggggcggggagggtgacagtggccgcccaaggcccacgagcttgttctttgttctttgtcacagggactgaaaacctctcctcatgttctgctttcgattcgttaagagagcaacattttacccacacacagataaagttttcccttgaggaaacaacagctttaaaagaaaaagaaaaaaaaagtctttggtaaatggcaaa

SEQ ID NO: 5608 - DNA, 1253 bp, Homo sapiens
  source 1..1253: mol_type = unassigned DNA
tttgtagtgggaggatacctccagagaggctgctgctcattgagctgcactcacatgaggatacagactttgtgaagaaggaattggcaacactgaaacctccagaacaaaggctgtcactaaggtcccgctgccttgatggattatacacttgacctcagtgtgacaacagtgaccgactactactaccctgatatcttctcaagcccctgtgatgcggaacttattcagacaaatggcaagttgctccttgctgtcttttattgcctcctgtttgtattcagtcttctgggaaacagcctggtcatcctggtccttgtggtctgcaagaagctgaggagcatcacagatgtatacctcttgaacctggccctgtctgacctgctttttgtcttctccttcccctttcagacctactatctgctggaccagtgggtgtttgggactgtaatgtgcaaagtggtgtctggcttttattacattggcttctacagcagcatgtttttcatcaccctcatgagtgtggacaggtacctggctgttgtccatgccgtgtatgccctaaaggtgaggacgatcaggatgggcacaacgctgtgcctggcagtatggctaaccgccattatggctaccatcccattgctagtgttttaccaagtggcctctgaagatggtgttctacagtgttattcattttacaatcaacagactttgaagtggaagatcttcaccaacttcaaaatgaacattttaggcttgttgatcccattcaccatctttatgttctgctacattaaaatcctgcaccagctgaagaggtgtcaaaaccacaacaagaccaaggccatcaggttggtgctcattgtggtcattgcatctttacttttctgggtcccattcaacgtggttcttttcctcacttccttgcacagtatgcacatcttggatggatgtagcataagccaacagctgacttatgccacccatgtcacagaaatcatttcctttactcactgctgtgtgaaccctgttatctatgcttttgttggggagaagttcaagaaacacctctcagaaatatttcagaaaagttgcagccaaatcttcaactacctaggaagacaaatgcctagggagagctgtgaaaagtcatcatcctgccagcagcactcctcccgttcctccagcgtagactacattttgtgaggatcaatgaagactaaatataaaaaacattttcttgaatggcatgc

SEQ ID NO: 5609 - DNA, 1247 bp, Homo sapiens
  source 1..1247: mol_type = unassigned DNA
ctttgtgaagaaggaattggcaacactgaaacctccagaacaaaggctgtcactaaggtcccgctgccttgatggattatacacttgacctcagtgtgacaacagtgaccgactactactaccctgatatcttctcaagcccctgtgatgcggaacttattcagacaaatgacctactatctgctggaccagtgggtgtttgggactgtaatgtgcaaagtggtgtctggcttttattacattggcttctacagcagcatgtttttcatcaccctcatgagtgtggacaggtacctggctgttgtccatgccgtgtatgccctaaaggtgaggacgatcaggatgggcacaacgctgtgcctggcagtatggctaaccgccattatggctaccatcccattgctagtgttttaccaagtggcctctgaagatggtgttctacagtgttattcattttacaatcaacagactttgaagtggaagatcttcaccaacttcaaaatgaacattttaggcttgttgatcccattcaccatctttatgttctgctacattaaaatcctgcaccagctgaagaggtgtcaaaaccacaacaagaccaaggccatcaggttggtgctcattgtggtcattgcatctttacttttctgggtcccattcaacgtggttcttttcctcacttccttgcacagtatgcacatcttggatggatgtagcataagccaacagctgacttatgccacccatgtcacagaaatcatttcctttactcactgctgtgtgaaccctgttatctatgcttttgttggggagaagttcaagaaacacctctcagaaatatttcagaaaagttgcagccaaatcttcaactacctaggaagacaaatgcctagggagagctgtgaaaagtcatcatcctgccagcagcactcctcccgttcctccagcgtagactacattttgtgaggatcaatgaagactaaatataaaaaacattttcttgaatggcatgctagtagcagtgagcaaaggtgtgggtgtgaaaggtttccaaaaaaagttcagcatgaaggatgccatatatgttgttgccaacacttggaacacaatgactaaagacatagttgtgcatgcctggcacaacatcaagcctgtgattgtgtttattgatgatgttgaacaagtggtaactttaaaggattctgtatgccaagtgaaaaaaaaagatgtctgacctccttacatat

SEQ ID NO: 5610 - DNA, 1331 bp, Homo sapiens
  source 1..1331: mol_type = unassigned DNA
cacaaagcctgcccctcatcccaggcagagagcaacccagctctttccccagacactgagagctggtggtgcctgctgtcccagggagagttgcatcgccctccacagagcaggcttgcatctgactgacccaccatgacacccacagacttcacatctcctccaggccccgctccagatcaccttccctcgctggcccaggaatccatctccttccaggaccttagcccaggactaacacaagccctattcctaacatggctgatgactatggctctgaatccacatcttccatggaagactacgttaacttcaacttcactgacttctactgtgagaaaaacaatgtcaggcagtttgcgagccatttcctcccacccttgtactggctcgtgttcatcgtgggtgccttgggcaacagtcttgttatccttgtctactggtactgcacaagagtgaagaccatgaccgacatgttccttttgaatttggcaattgctgacctcctctttcttgtcactcttcccttctgggccattgctgctgctgaccagtggaagttccagaccttcatgtgcaaggtggtcaacagcatgtacaagatgaacttctacagctgtgtgttgctgatcatgtgcatcagcgtggacaggtacattgccattgcccaggccatgagagcacatacttggagggagaaaaggcttttgtacagcaaaatggtttgctttaccatctgggtattggcagctgctctctgcatcccagaaatcttatacagccaaatcaaggaggaatccggcattgctatctgcaccatggtttaccctagcgatgagagcaccaaactgaagtcagctgtcttgaccctgaaggtcattctggggttcttccttcccttcgtggtcatggcttgctgctataccatcatcattcacaccctgatacaagccaagaagtcttccaagcacaaagccctaaaagtgaccatcactgtcctgaccgtctttgtcttgtctcagtttccctacaactgcattttgttggtgcagaccattgacgcctatgccatgttcatctccaactgtgccgtttccaccaacattgacatctgcttccaggtcacccagaccatcgccttcttccacagttgcctgaaccctgttctctatgtttttgtgggtgagagattccgccgggatctcgtgaaaaccctgaagaacttgggttgcatcagccaggcccagtgggtttcatttacaaggagagagggaagcttgaagctgtcgtctatgttgctggagacaacctcaggagcactctccctctga

SEQ ID NO: 5611 - DNA, 2567 bp, Homo sapiens
  source 1..2567: mol_type = unassigned DNA
gcttcctttctcgtgttgttatcgggtagctgcctgctcagaacccacaaagcctgcccctcatcccaggcagagagcaacccagctctttccccagacactgagagctggtggtgcctgctgtcccagggagagttgcatcgccctccacagagcaggcttgcatctgactgacccaccatgacacccacagacttcacaagccctattcctaacatggctgatgactatggctctgaatccacatcttccatggaagactacgttaacttcaacttcactgacttctactgtgagaaaaacaatgtcaggcagtttgcgagccatttcctcccacccttgtactggctcgtgttcatcgtgggtgccttgggcaacagtcttgttatccttgtctactggtactgcacaagagtgaagaccatgaccgacatgttccttttgaatttggcaattgctgacctcctctttcttgtcactcttcccttctgggccattgctgctgctgaccagtggaagttccagaccttcatgtgcaaggtggtcaacagcatgtacaagatgaacttctacagctgtgtgttgctgatcatgtgcatcagcgtggacaggtacattgccattgcccaggccatgagagcacatacttggagggagaaaaggcttttgtacagcaaaatggtttgctttaccatctgggtattggcagctgctctctgcatcccagaaatcttatacagccaaatcaaggaggaatccggcattgctatctgcaccatggtttaccctagcgatgagagcaccaaactgaagtcagctgtcttgaccctgaaggtcattctggggttcttccttcccttcgtggtcatggcttgctgctataccatcatcattcacaccctgatacaagccaagaagtcttccaagcacaaagccctaaaagtgaccatcactgtcctgaccgtctttgtcttgtctcagtttccctacaactgcattttgttggtgcagaccattgacgcctatgccatgttcatctccaactgtgccgtttccaccaacattgacatctgcttccaggtcacccagaccatcgccttcttccacagttgcctgaaccctgttctctatgtttttgtgggtgagagattccgccgggatctcgtgaaaaccctgaagaacttgggttgcatcagccaggcccagtgggtttcatttacaaggagagagggaagcttgaagctgtcgtctatgttgctggagacaacctcaggagcactctccctctgaggggtcttctctgaggtgcatggttcttttggaagaaatgagaaatacagaaacagtttccccactgatgggaccagagagagtgaaagagaaaagaaaactcagaaagggatgaatctgaactatatgattacttgtagtcagaatttgccaaagcaaatatttcaaaatcaactgactagtgcaggaggctgttgattggctcttgactgtgatgcccgcaattctcaaaggaggactaaggaccggcactgtggagcaccctggctttgccactcgccggagcatcaatgccgctgcctctggaggagcccttggattttctccatgcactgtgaacttctgtggcttcagttctcatgctgcctcttccaaaaggggacacagaagcactggctgctgctacagaccgcaaaagcagaaagtttcgtgaaaatgtccatctttgggaaattttctaccctgctcttgagcctgataacccatgccaggtcttatagattcctgatctagaacctttccaggcaatctcagacctaatttccttctgttctccttgttctgttctgggccagtgaaggtccttgttctgattttgaaacgatctgcaggtcttgccagtgaacccctggacaactgaccacacccacaaggcatccaaagtctgttggcttccaatccatttctgtgtcctgctggaggttttaacctagacaaggattccgcttattccttggtatggtgacagtgtctctccatggcctgagcagggagattataacagctgggttcgcaggagccagccttggccctgttgtaggcttgttctgttgagtggcacttgctttgggtccaccgtctgtctgctccctagaaaatgggctggttcttttggccctcttctttctgaggcccactttattctgaggaatacagtgagcagatatgggcagcagccaggtagggcaaaggggtgaagcgcaggccttgctggaaggctatttacttccatgcttctccttttcttactctatagtggcaacattttaaaagcttttaacttagagattaggctgaaaaaaataagtaatggaattcacctttgcatcttttgtgtctttcttatcatgatttggcaaaatgcatcacctttgaaaatatttcacatattggaaaagtgctttttaatgtgtatatgaagcattaattacttgtcactttctttaccctgtctcaatattttaagtgtgtgcaattaaagatcaaatagatacatt

SEQ ID NO: 5612 - DNA, 2512 bp, Homo sapiens
  source 1..2512: mol_type = unassigned DNA
ctttctcgtgttgttatcgggtagctgcctgctcagaacccacaaagcctgcccctcatcccaggcagagagcaacccagctctttccccagacactgagagctggtggtgcctgctgtcccagggagagttgcatcgccctccacaagccctattcctaacatggctgatgactatggctctgaatccacatcttccatggaagactacgttaacttcaacttcactgacttctactgtgagaaaaacaatgtcaggcagtttgcgagccatttcctcccacccttgtactggctcgtgttcatcgtgggtgccttgggcaacagtcttgttatccttgtctactggtactgcacaagagtgaagaccatgaccgacatgttccttttgaatttggcaattgctgacctcctctttcttgtcactcttcccttctgggccattgctgctgctgaccagtggaagttccagaccttcatgtgcaaggtggtcaacagcatgtacaagatgaacttctacagctgtgtgttgctgatcatgtgcatcagcgtggacaggtacattgccattgcccaggccatgagagcacatacttggagggagaaaaggcttttgtacagcaaaatggtttgctttaccatctgggtattggcagctgctctctgcatcccagaaatcttatacagccaaatcaaggaggaatccggcattgctatctgcaccatggtttaccctagcgatgagagcaccaaactgaagtcagctgtcttgaccctgaaggtcattctggggttcttccttcccttcgtggtcatggcttgctgctataccatcatcattcacaccctgatacaagccaagaagtcttccaagcacaaagccctaaaagtgaccatcactgtcctgaccgtctttgtcttgtctcagtttccctacaactgcattttgttggtgcagaccattgacgcctatgccatgttcatctccaactgtgccgtttccaccaacattgacatctgcttccaggtcacccagaccatcgccttcttccacagttgcctgaaccctgttctctatgtttttgtgggtgagagattccgccgggatctcgtgaaaaccctgaagaacttgggttgcatcagccaggcccagtgggtttcatttacaaggagagagggaagcttgaagctgtcgtctatgttgctggagacaacctcaggagcactctccctctgaggggtcttctctgaggtgcatggttcttttggaagaaatgagaaatacagaaacagtttccccactgatgggaccagagagagtgaaagagaaaagaaaactcagaaagggatgaatctgaactatatgattacttgtagtcagaatttgccaaagcaaatatttcaaaatcaactgactagtgcaggaggctgttgattggctcttgactgtgatgcccgcaattctcaaaggaggactaaggaccggcactgtggagcaccctggctttgccactcgccggagcatcaatgccgctgcctctggaggagcccttggattttctccatgcactgtgaacttctgtggcttcagttctcatgctgcctcttccaaaaggggacacagaagcactggctgctgctacagaccgcaaaagcagaaagtttcgtgaaaatgtccatctttgggaaattttctaccctgctcttgagcctgataacccatgccaggtcttatagattcctgatctagaacctttccaggcaatctcagacctaatttccttctgttctccttgttctgttctgggccagtgaaggtccttgttctgattttgaaacgatctgcaggtcttgccagtgaacccctggacaactgaccacacccacaaggcatccaaagtctgttggcttccaatccatttctgtgtcctgctggaggttttaacctagacaaggattccgcttattccttggtatggtgacagtgtctctccatggcctgagcagggagattataacagctgggttcgcaggagccagccttggccctgttgtaggcttgttctgttgagtggcacttgctttgggtccaccgtctgtctgctccctagaaaatgggctggttcttttggccctcttctttctgaggcccactttattctgaggaatacagtgagcagatatgggcagcagccaggtagggcaaaggggtgaagcgcaggccttgctggaaggctatttacttccatgcttctccttttcttactctatagtggcaacattttaaaagcttttaacttagagattaggctgaaaaaaataagtaatggaattcacctttgcatcttttgtgtctttcttatcatgatttggcaaaatgcatcacctttgaaaatatttcacatattggaaaagtgctttttaatgtgtatatgaagcattaattacttgtcactttctttaccctgtctcaatattttaagtgtgtgcaattaaagatcaaatagatacat

SEQ ID NO: 5613 - DNA, 1914 bp, Homo sapiens
  source 1..1914: mol_type = unassigned DNA
gtaaagtgaaaacaaaagtagctggagttaggtcatttgattttatactctgtactcaagactgctcctctctgccgactacaacagattggagccatggctttggaacagaaccagtcaacagattattattatgaggaaaatgaaatgaatggcacttatgactacagtcaatatgaactgatctgtatcaaagaagatgtcagagaatttgcaaaagttttcctccctgtattcctcacaatagttttcgtcattggacttgcaggcaattccatggtagtggcaatttatgcctattacaagaaacagagaaccaaaacagatgtgtacatcctgaatttggctgtagcagatttactccttctattcactctgcctttttgggctgttaatgcagttcatgggtgggttttagggaaaataatgtgcaaaataacttcagccttgtacacactaaactttgtctctggaatgcagtttctggcttgtatcagcatagacagatatgtggcagtaactaaagtccccagccaatcaggagtgggaaaaccatgctggatcatctgtttctgtgtctggatggctgccatcttgctgagcataccccagctggttttttatacagtaaatgacaatgctaggtgcattcccattttcccccgctacctaggaacatcaatgaaagcattgattcaaatgctagagatctgcattggatttgtagtaccctttcttattatgggggtgtgctactttatcacagcaaggacactcatgaagatgccaaacattaaaatatctcgacccctaaaagttctgctcacagtcgttatagttttcattgtcactcaactgccttataacattgtcaagttctgccgagccatagacatcatctactccctgatcaccagctgcaacatgagcaaacgcatggacatcgccatccaagtcacagaaagcatcgcactctttcacagctgcctcaacccaatcctttatgtttttatgggagcatctttcaaaaactacgttatgaaagtggccaagaaatatgggtcctggagaagacagagacaaagtgtggaggagtttccttttgattctgagggtcctacagagccaaccagtacttttagcatttaaaggtaaaactgctctgccttttgcttggatacatatgaatgatgctttcccctcaaataaaacatctgcattattctgaaactcaaatctcagacgccgtggttgcaacttataataaagaatgggttgggggaagggggagaaataaaagccaagaagaggaaacaagataataaatgtacaaaacatgaaaattaaaatgaacaatataggaaaataattgtaacaggcataagtgaataacactctgctgtaacgaagaagagctttgtggtgataattttgtatcttggttgcagtggtgcttatacaaatctacacaagtgataaaatgacacagaactatatacacacattgtaccaatttcaatttcctggttttgacattatagtataattatgtaagatggaaccattggggaaaactgggtgaagggtacccaggaccactctgtaccatctttgtaacttcctgtgaatttataataatttcaaaataaaacaagttaaaaaaaaacccactatgctataagttaggccatctaaaacagattattaaagaggttcatgttaaaaggcatttataattatttttaattatctaagttttaatacaagaacgatttccctgcataattttagtacttgaataagtatgcagcagaactccaactatcttttttcctgttttttttaaatttgtaagtaattttataaaatccacctcctccaaaaaagcaataaaaaaaaaacaaactataataa

SEQ ID NO: 5614 - DNA, 1004 bp, Homo sapiens
  source 1..1004: mol_type = unassigned DNA
gtaaagtgaaaacaaaagtagctggagttaggtcatttgattttatactctgtactcaagactgctcctctctgccgactacaacagattggagccatggctttggaacagaaccagtcaacagattattattatgaggaaaatgaaatgaatggcacttatgactacagtcaatatgaactgatctgtatcaaagaagatgtcagagaatttgcaaaagttttcctccctgtattcctcacaatagttttcgtcattggacttgcaggcaattccatggtagtggcaatttatgcctattacaagaaacagagaaccaaaacagatgtgtacatcctgaatttggctgtagcagatttactccttctattcactctgcctttttgggctgttaatgcagttcatgggtgggttttagggaaaataatgtgcaaaataacttcagccttgtacacactaaactttgtctctggaatgcagtttctggcttgtatcagcatagacagatatgtggcagtaactaaagtccccagccaatcaggagtgggaaaaccatgctggatcatctgtttctgtgtctggatggctgccatcttgctgagcataccccagctggttttttatacagtaaatgacaatgctaggtgcattcccattttcccccgctacctaggaacatcaatgaaagcattgattcaaatgctagagatctgcattggatttgtagtaccctttcttattatgggggtgtgctactttatcacagcaaggacactcatgaagatgccaaacattaaaatatctcgacccctaaaagttctgctcacagtcgttatagttttcattgtcactcaactgccttttgcttggatacatatgaatgatgctttcccctcaaataaaacatctgcattattctgaaactcaaatctcagacgccgtggttgcaacttataataaagaatgggttgggggaagggggagaaataaaagccaagaagagg

SEQ ID NO: 5615 - DNA, 1593 bp, Homo sapiens
  source 1..1593: mol_type = unassigned DNA
gagcatggtttcacttttgcaaacatttatttatacccttcgagagaaaaacgtctcagctgtcacaggaagctgcttcggggggtgagcaaactttttaaaatgcagaaattatgatctacacccgtttcttaaaaggcagtctgaagatggccaattacacgctggcaccagaggatgaatatgatgtcctcatagaaggtgaactggagagcgatgaggcagagcaatgtgacaagtatgacgcccaggcactctcagcccagctggtgccatcactctgctctgctgtgtttgtgatcggtgtcctggacaatctcctggttgtgcttatcctggtaaaatataaaggactcaaacgcgtggaaaatatctatcttctaaacttggcagtttctaacttgtgtttcttgcttaccctgcccttctgggctcatgctgggggcgatcccatgtgtaaaattctcattggactgtacttcgtgggcctgtacagtgagacatttttcaattgccttctgactgtgcaaaggtacctagtgtttttgcacaagggaaactttttctcagccaggaggagggtgccctgtggcatcattacaagtgtcctggcatgggtaacagccattctggccactttgcctgaattcgtggtttataaacctcagatggaagaccagaaatacaagtgtgcatttagcagaactcccttcctgccagctgatgagacattctggaagcattttctgactttaaaaatgaacatttcggttcttgtcctccccctatttatttttacatttctctatgtgcaaatgagaaaaacactaaggttcagggagcagaggtatagccttttcaagcttgtttttgccataatggtagtcttccttctgatgtgggcgccctacaatattgcatttttcctgtccactttcaaagaacacttctccctgagtgactgcaagagcagctacaatctggacaaaagtgttcacatcactaaactcatcgccaccacccactgctgcatcaaccctctcctgtatgcgtttcttgatgggacatttagcaaatacctctgccgctgtttccatctgcgtagtaacaccccacttcaacccagggggcagtctgcacaaggcacatcgagggaagaacctgaccattccaccgaagtgtaaactagcatccaccaaatgcaagaagaataaacatggattttcatctttctgcattatttcatgtaaattttctacacatttgtatacaaaatcggatacaggaagaaaagggagaggtgagctaacatttgctaagcactgaatttgtctcaggcaccgtgcaaggctctttacaaacgtgagctccttcgcctcctaccacttgtccatagtgtggataggactagtctcatttctctgagaagaaaactaaggcgcggaaatttgtctaagatcacataactaggaagtggcagaactgattctccagccctggtagcatttgctcagagcctacgcttggtccagaacatcaaactccaaaccctggggacaaacgacatgaaataaatgtattttaaaacatcta

SEQ ID NO: 5616 - DNA, 1796 bp, Homo sapiens
  source 1..1796: mol_type = unassigned DNA
ctcagaaggccagaagacggctgtcaaaggtcacagggaaatcaaaggcggggtacagggccagagggaggaggaaacaacttcccggttgctttcagacgcttcagagatcctctggaggcctgggggagcttttgagtactttatttcagttggtccctgagctcggtgagtggggcgggtagagccaccaggggaatcaacagtggtttctcgtgcccctcagggtcaggagcagtctgatcaaaaggagggcatccactgtccggggccattcccacagctcccggatgctgggtctggaggctgcgcccttcccctgcaggagctcagcccagtgggcagtctgaagatggccaattacacgctggcaccagaggatgaatatgatgtcctcatagaaggtgaactggagagcgatgaggcagagcaatgtgacaagtatgacgcccaggcactctcagcccagctggtgccatcactctgctctgctgtgtttgtgatcggtgtcctggacaatctcctggttgtgcttatcctggtaaaatataaaggactcaaacgcgtggaaaatatctatcttctaaacttggcagtttctaacttgtgtttcttgcttaccctgcccttctgggctcatgctgggggcgatcccatgtgtaaaattctcattggactgtacttcgtgggcctgtacagtgagacatttttcaattgccttctgactgtgcaaaggtacctagtgtttttgcacaagggaaactttttctcagccaggaggagggtgccctgtggcatcattacaagtgtcctggcatgggtaacagccattctggccactttgcctgaattcgtggtttataaacctcagatggaagaccagaaatacaagtgtgcatttagcagaactcccttcctgccagctgatgagacattctggaagcattttctgactttaaaaatgaacatttcggttcttgtcctccccctatttatttttacatttctctatgtgcaaatgagaaaaacactaaggttcagggagcagaggtatagccttttcaagcttgtttttgccataatggtagtcttccttctgatgtgggcgccctacaatattgcatttttcctgtccactttcaaagaacacttctccctgagtgactgcaagagcagctacaatctggacaaaagtgttcacatcactaaactcatcgccaccacccactgctgcatcaaccctctcctgtatgcgtttcttgatgggacatttagcaaatacctctgccgctgtttccatctgcgtagtaacaccccacttcaacccagggggcagtctgcacaaggcacatcgagggaagaacctgaccattccaccgaagtgtaaactagcatccaccaaatgcaagaagaataaacatggattttcatctttctgcattatttcatgtaaattttctacacatttgtatacaaaatcggatacaggaagaaaagggagaggtgagctaacatttgctaagcactgaatttgtctcaggcaccgtgcaaggctctttacaaacgtgagctccttcgcctcctaccacttgtccatagtgtggataggactagtctcatttctctgagaagaaaactaaggcgcggaaatttgtctaagatcacataactaggaagtggcagaactgattctccagccctggtagcatttgctcagagcctacgcttggtccagaacatcaaactccaaaccctggggacaaacgacatgaaataaatgtattttaaaacatcta

SEQ ID NO: 5617 - DNA, 1106 bp, Homo sapiens
  source 1..1106: mol_type = unassigned DNA
tttatttatacccttcgagagaaaaacgtctcagctgtcacaggaagctgcttcgggggggcagtctgaagatggccaattacacgctggcaccagaggatgaatatgatgtcctcatagaaggtgaactggagagcgatgaggcagagcaatgtgacaagtatgacgcccaggcactctcagcccagctggtgccatcactctgctctgctgtgtttgtgatcggtgtcctggacaatctcctggttgtgcttatcctggtaaaatataaaggactcaaacgcgtggaaaatatctatcttctaaacttggcagtttctaacttgtgtttcttgcttaccctgcccttctgggctcatgctgggggcgatcccatgtgtaaaattctcattggactgtacttcgtgggcctgtacagtgagacatttttcaattgccttctgactgtgcaaaggtacctagtgtttttgcacaagggaaactttttctcagccaggaggagggtgccctgtggcatcattacaagtgtcctggcatgggtaacagccattctggccactttgcctgaattcgtggtttataaacctcagatggaagaccagaaatacaagtgtgcatttagcagaactcccttcctgccagctgatgagacattctggaagcattttctgactttaaaaatgaacatttcggttcttgtcctccccctatttatttttacatttctctatgtgcaaatgagaaaaacactaaggttcagggagcagaggtatagccttttcaagcttgtttttgccataatggtagtcttccttctgatgtgggcgccctacaatattgcatttttcctgtccactttcaaagaacacttctccctgagtgactgcaagagcagctacaatctggacaaaagtgttcacatcactaaactcatcgccaccacccactgctgcatcaaccctctcctgtatgcgtttcttgatgggacatttagcaaatacctctgccgctgtttccatctgcgtagtaacaccccacttcaacccagggggcagtctgcacaaggcacatcgagggaagaacctgaccattccaccgaagtgtaa

SEQ ID NO: 5618 - DNA, 1642 bp, Homo sapiens
  source 1..1642: mol_type = unassigned DNA
ctgctctggggaagtgggcacacgttaaagaaatgtttatttcagtcttctgaaatagggaattactctggctaaaatgtagctccagaaagggaaagtggggctgtatgaatccaggtccagtttgttgtttcctccaggataaggcagctgtcggaggggaaaatcatctcccatttctccacagggcagtctgaagatggccaattacacgctggcaccagaggatgaatatgatgtcctcatagaaggtgaactggagagcgatgaggcagagcaatgtgacaagtatgacgcccaggcactctcagcccagctggtgccatcactctgctctgctgtgtttgtgatcggtgtcctggacaatctcctggttgtgcttatcctggtaaaatataaaggactcaaacgcgtggaaaatatctatcttctaaacttggcagtttctaacttgtgtttcttgcttaccctgcccttctgggctcatgctgggggcgatcccatgtgtaaaattctcattggactgtacttcgtgggcctgtacagtgagacatttttcaattgccttctgactgtgcaaaggtacctagtgtttttgcacaagggaaactttttctcagccaggaggagggtgccctgtggcatcattacaagtgtcctggcatgggtaacagccattctggccactttgcctgaattcgtggtttataaacctcagatggaagaccagaaatacaagtgtgcatttagcagaactcccttcctgccagctgatgagacattctggaagcattttctgactttaaaaatgaacatttcggttcttgtcctccccctatttatttttacatttctctatgtgcaaatgagaaaaacactaaggttcagggagcagaggtatagccttttcaagcttgtttttgccataatggtagtcttccttctgatgtgggcgccctacaatattgcatttttcctgtccactttcaaagaacacttctccctgagtgactgcaagagcagctacaatctggacaaaagtgttcacatcactaaactcatcgccaccacccactgctgcatcaaccctctcctgtatgcgtttcttgatgggacatttagcaaatacctctgccgctgtttccatctgcgtagtaacaccccacttcaacccagggggcagtctgcacaaggcacatcgagggaagaacctgaccattccaccgaagtgtaaactagcatccaccaaatgcaagaagaataaacatggattttcatctttctgcattatttcatgtaaattttctacacatttgtatacaaaatcggatacaggaagaaaagggagaggtgagctaacatttgctaagcactgaatttgtctcaggcaccgtgcaaggctctttacaaacgtgagctccttcgcctcctaccacttgtccatagtgtggataggactagtctcatttctctgagaagaaaactaaggcgcggaaatttgtctaagatcacataactaggaagtggcagaactgattctccagccctggtagcatttgctcagagcctacgcttggtccagaacatcaaactccaaaccctggggacaaacgacatgaaataaatgtattttaaaacatct

SEQ ID NO: 5619 - DNA, 713 bp, Homo sapiens
  source 1..713: mol_type = unassigned DNA
gtcacaggaagctgcttcggggggcaagtcctgtttctgctaaaagaagggcagtctgaagatggccaattacacgctggcaccagaggatgaatatgatgtcctcatagaaggtgaactggagagcgatgaggcagagcaatgtgacaagtatgacgcccaggcactctcagcccagctggtgccatcactctgctctgctgtgtttgtgatcggtgtcctggacaatctcctggttgtgcttatcctggtaaaatataaaggactcaaacgcgtggaaaatatctatcttctaaacttggcagtttctaacttgtgtttcttgcttaccctgcccttctgggctcatgctgggggcgatcccatgtgtaaaattctcattggactgtacttcgtgggcctgtacagtgagacatttttcaattgccttctgactgtgcaaaggtacctagtgtttttgcacaagggaaactttttctcagccaggaggagggtgccctgtggcatcattacaagtgtcctggcatgggtaacagccattctggccactttgcctgaattcgtggtttataaacctcagatggaagaccagaaatacaagtgtgcatttagcagaactcccttcctgccagctgatgagacattctggaagcattttctgactttaaaaatgaacatttcggttcttgtcctccccctatttatttttacat

SEQ ID NO: 5620 - DNA, 3316 bp, Homo sapiens
  source 1..3316: mol_type = unassigned DNA
aaaaagccacagatctctggcggcggcaaggggacagcactgagctctgccgcctggctctagccgcctgcctggcccccgccgggactcttgcccaccctcagccatggctccgatatctctgtcgtggctgctccgcttggccaccttctgccatctgactgtcctgctggctggacagcaccacggtgtgacgaaatgcaacatcacgtgcagcaagatgacatcaaagatacctgtagctttgctcatccactatcaacagaaccaggcatcatgcggcaaacgcgcaatcatcttggagacgagacagcacaggctgttctgtgccgacccgaaggagcaatgggtcaaggacgcgatgcagcatctggaccgccaggctgctgccctaactcgaaatggcggcaccttcgagaagcagatcggcgaggtgaagcccaggaccacccctgccgccgggggaatggacgagtctgtggtcctggagcccgaagccacaggcgaaagcagtagcctggagccgactccttcttcccaggaagcacagagggccctggggacctccccagagctgccgacgggcgtgactggttcctcagggaccaggctccccccgacgccaaaggctcaggatggagggcctgtgggcacggagcttttccgagtgcctcccgtctccactgccgccacgtggcagagttctgctccccaccaacctgggcccagcctctgggctgaggcaaagacctctgaggccccgtccacccaggacccctccacccaggcctccactgcgtcctccccagccccagaggagaatgctccgtctgaaggccagcgtgtgtggggtcagggacagagccccaggccagagaactctctggagcgggaggagatgggtcccgtgccagcgcacacggatgccttccaggactgggggcctggcagcatggcccacgtctctgtggtccctgtctcctcagaagggacccccagcagggagccagtggcttcaggcagctggacccctaaggctgaggaacccatccatgccaccatggacccccagaggctgggcgtccttatcactcctgtccctgacgcccaggctgccacccggaggcaggcggtggggctgctggccttccttggcctcctcttctgcctgggggtggccatgttcacctaccagagcctccagggctgccctcgaaagatggcaggagagatggcggagggccttcgctacatcccccggagctgtggtagtaattcatatgtcctggtgcccgtgtgaactcctctggcctgtgtctagttgtttgattcagacagctgcctgggatccctcatcctcatacccacccccacccaagggcctggcctgagctgggatgattggaggggggaggtgggatcctccaggtgcacaagctccaagctcccaggcattccccaggaggccagccttgaccattctccacctgccagggacagagggggtggcctcccaactcaccccagccccaaaactctcctctgctgctggctggttagaggttccctttgacgccatcccagccccaatgaacaattatttattaaatgcccagccccttctgacccatgctgccctgtgagtactacagtcctcccatctcacacatgagcatcaggccaggccctctgcccactccctgcaacctgattgtgtctcttggtcctgctgcagttgccagtcaccccggccacctgcggtgctatctcccccagccccatcctctgtacagagcccacgcccccactggtgacatgtcttttcttgcatgaggctagtgtggtgtttcctggcactgcttccagtgaggctctgcccttggttaggcattgtgggaaggggagataagggtatctggtgactttcctctttggtctacactgtgctgagtctgaaggctgggttctgatcctagttccaccatcaagccaccaacatactcccatctgtgaaaggaaagagggaggtaaggaatacctgtccccctgacaacactcattgacctgaggcccttctctccagcccctggatgcagcctcacagtccttaccagcagagcaccttagacagtccctgccaatggactaacttgtctttggaccctgaggcccagagggcctgcaagggagtgagttgatagcacagaccctgccctgtgggcccccaaatggaaatgggcagagcagagaccatccctgaaggccccgcccaggcttagtcactgagacagcccgggctctgcctcccatcacccgctaagagggagggagggctccagacacatgtccaagaagcccaggaaaggctccaggagcagccacattcctgatgcttcttcagagactcctgcaggcagccaggccacaagacccttgtggtcccaccccacacacgccagattctttcctgaggctgggctcccttcccacctctctcactccttgaaaacactgttctctgccctccaagaccttctccttcacctttgtccccaccgcagacaggaccagggatttccatgatgttttccatgagtcccctgtttgtttctgaaagggacgctacccgggaagggggctgggacatgggaaaggggaagttgtaggcataaagtcaggggttcccttttttggctgctgaaggctcgagcatgcctggatggggctgcaccggctggcctggcccctcagggtccctggtggcagctcacctctcccttggattgtccccgacccttgccgtctacctgaggggcctcttatgggctgggttctacccaggtgctaggaacactccttcacagatgggtgcttggaggaaggaaacccagctctggtccatagagagcaagacgctgtgctgccctgcccacctggcctctgcactcccctgctgggtgtggcgcagcatattcaggaagctcagggcctggctcaggtggggtcactctggcagctcagagagggtgggagtgggcccaatgcactttgttctggctcttccaggctgggagagccttccaggggtgggacaccctgtgatggggccctgcctcctttgtgaggaagccgctggggccagttggtcccccttccatggactttgttagtttctccaagcaggacatggacaaggatgatctaggaagactttggaaagagtaggaagactttggaaagacttttccaaccctcatcaccaacgtctgtgccattttgtattttactaataaaatttaaaagtcttgtgaatcaa

SEQ ID NO: 5621 - DNA, 3151 bp, Homo sapiens
  source 1..3151: mol_type = unassigned DNA
ggggcgggccgtgcttaccaggccgtggacttaaaccaggatgagagaacccctggaggcgtttaagttggcagacttggatttcaggaagagctctctggcttctgggtggagaatggccagtggggccttcaccatggatcagttccctgaatcagtgacagaaaactttgagtacgatgatttggctgaggcctgttatattggggacatcgtggtctttgggactgtgttcctgtccatattctactccgtcatctttgccattggcctggtgggaaatttgttggtagtgtttgccctcaccaacagcaagaagcccaagagtgtcaccgacatttacctcctgaacctggccttgtctgatctgctgtttgtagccactttgcccttctggactcactatttgataaatgaaaagggcctccacaatgccatgtgcaaattcactaccgccttcttcttcatcggcttttttggaagcatattcttcatcaccgtcatcagcattgataggtacctggccatcgtcctggccgccaactccatgaacaaccggaccgtgcagcatggcgtcaccatcagcctaggcgtctgggcagcagccattttggtggcagcaccccagttcatgttcacaaagcagaaagaaaatgaatgccttggtgactaccccgaggtcctccaggaaatctggcccgtgctccgcaatgtggaaacaaattttcttggcttcctactccccctgctcattatgagttattgctacttcagaatcatccagacgctgttttcctgcaagaaccacaagaaagccaaagccattaaactgatccttctggtggtcatcgtgtttttcctcttctggacaccctacaacgttatgattttcctggagacgcttaagctctatgacttctttcccagttgtgacatgaggaaggatctgaggctggccctcagtgtgactgagacggttgcatttagccattgttgcctgaatcctctcatctatgcatttgctggggagaagttcagaagatacctttaccacctgtatgggaaatgcctggctgtcctgtgtgggcgctcagtccacgttgatttctcctcatctgaatcacaaaggagcaggcatggaagtgttctgagcagcaattttacttaccacacgagtgatggagatgcattgctccttctctgaagggaatcccaaagccttgtgtctacagagaacctggagttcctgaacctgatgctgactagtgaggaaagatttttgttgttatttcttacaggcacaaaatgatggacccaatgcacacaaaacaaccctagagtgttgttgagaattgtgctcaaaatttgaagaatgaacaaattgaactctttgaatgacaaagagtagacatttctcttactgcaaatgtcatcagaactttttggtttgcagatgacaaaaattcaactcagactagtttagttaaatgagggtggtgaatattgttcatattgtggcacaagcaaaagggtgtctgagccctcaaagtgaggggaaaccagggcctgagccaagctagaattccctctctctgactctcaaatcttttagtcattatagatcccccagactttacatgacacagctttatcaccagagagggactgacacccatgtttctctggccccaagggcaaaattcccagggaagtgctctgataggccaagtttgtatcaggtgcccatccctggaaggtgctgttatccatggggaagggatatataagatggaagcttccagtccaatctcatggagaagcagaaatacatatttccaagaagttggatgggtgggtactattctgattacacaaaacaaatgccacacatcacccttaccatgtgcctgatccagcctctcccctgattacaccagcctcgtcttcattaagccctcttccatcatgtccccaaacctgcaagggctccccactgcctactgcatcgagtcaaaactcaaatgcttggcttctcatacgtccaccatggggtcctaccaatagattccccattgcctcctccttcccaaaggactccacccatcctatcagcctgtctcttccatatgacctcatgcatctccacctgctcccaggccagtaagggaaatagaaaaaccctgcccccaaataagaagggatggattccaaccccaactccagtagcttgggacaaatcaagcttcagtttcctggtctgtagaagagggataaggtacctttcacatagagatcatcctttccagcatgaggaactagccaccaactcttgcaggtctcaacccttttgtctgcctcttagacttctgctttccacacctggcactgctgtgctgtgcccaagttgtggtgctgacaaagcttggaagagcctgcaggtgctgctgcgtggcatagcccagacacagaagaggctggttcttacgatggcacccagtgagcactcccaagtctacagagtgatagccttccgtaacccaactctcctggactgccttgaatatcccctcccagtcaccttgtggcaagcccctgcccatctgggaaaataccccatcattcatgctactgccaacctggggagccagggctatgggagcagcttttttttcccccctagaaacgtttggaacaatctaaaagtttaaagctcgaaaacaattgtaataatgctaaagaaaaagtcatccaatctaaccacatcaatattgtcattcctgtattcacccgtccagaccttgttcacactctcacatgtttagagttgcaatcgtaatgtacagatggttttataatctgatttgttttcctcttaacgttagaccacaaatagtgctcgctttctatgtagtttggtaattatcattttagaagactctaccagactgtgtattcattgaagtcagatgtggtaactgttaaattgctgtgtatctgatagctctttggcagtctatatgtttgtataatgaatgagagaataagtcatgttccttcaagatcatgtaccccaatttacttgccattactcaattgataaacatttaacttgtttccaatgtttagcaaatacatattttatagaacttcc

SEQ ID NO: 5622 - DNA, 3106 bp, Homo sapiens
  source 1..3106: mol_type = unassigned DNA
aatactcgtctctggtaaagtctgagcaggacagggtggctgactggcagatccagaggttcccttggcagtccacgccaggccttcaccatggatcagttccctgaatcagtgacagaaaactttgagtacgatgatttggctgaggcctgttatattggggacatcgtggtctttgggactgtgttcctgtccatattctactccgtcatctttgccattggcctggtgggaaatttgttggtagtgtttgccctcaccaacagcaagaagcccaagagtgtcaccgacatttacctcctgaacctggccttgtctgatctgctgtttgtagccactttgcccttctggactcactatttgataaatgaaaagggcctccacaatgccatgtgcaaattcactaccgccttcttcttcatcggcttttttggaagcatattcttcatcaccgtcatcagcattgataggtacctggccatcgtcctggccgccaactccatgaacaaccggaccgtgcagcatggcgtcaccatcagcctaggcgtctgggcagcagccattttggtggcagcaccccagttcatgttcacaaagcagaaagaaaatgaatgccttggtgactaccccgaggtcctccaggaaatctggcccgtgctccgcaatgtggaaacaaattttcttggcttcctactccccctgctcattatgagttattgctacttcagaatcatccagacgctgttttcctgcaagaaccacaagaaagccaaagccattaaactgatccttctggtggtcatcgtgtttttcctcttctggacaccctacaacgttatgattttcctggagacgcttaagctctatgacttctttcccagttgtgacatgaggaaggatctgaggctggccctcagtgtgactgagacggttgcatttagccattgttgcctgaatcctctcatctatgcatttgctggggagaagttcagaagatacctttaccacctgtatgggaaatgcctggctgtcctgtgtgggcgctcagtccacgttgatttctcctcatctgaatcacaaaggagcaggcatggaagtgttctgagcagcaattttacttaccacacgagtgatggagatgcattgctccttctctgaagggaatcccaaagccttgtgtctacagagaacctggagttcctgaacctgatgctgactagtgaggaaagatttttgttgttatttcttacaggcacaaaatgatggacccaatgcacacaaaacaaccctagagtgttgttgagaattgtgctcaaaatttgaagaatgaacaaattgaactctttgaatgacaaagagtagacatttctcttactgcaaatgtcatcagaactttttggtttgcagatgacaaaaattcaactcagactagtttagttaaatgagggtggtgaatattgttcatattgtggcacaagcaaaagggtgtctgagccctcaaagtgaggggaaaccagggcctgagccaagctagaattccctctctctgactctcaaatcttttagtcattatagatcccccagactttacatgacacagctttatcaccagagagggactgacacccatgtttctctggccccaagggcaaaattcccagggaagtgctctgataggccaagtttgtatcaggtgcccatccctggaaggtgctgttatccatggggaagggatatataagatggaagcttccagtccaatctcatggagaagcagaaatacatatttccaagaagttggatgggtgggtactattctgattacacaaaacaaatgccacacatcacccttaccatgtgcctgatccagcctctcccctgattacaccagcctcgtcttcattaagccctcttccatcatgtccccaaacctgcaagggctccccactgcctactgcatcgagtcaaaactcaaatgcttggcttctcatacgtccaccatggggtcctaccaatagattccccattgcctcctccttcccaaaggactccacccatcctatcagcctgtctcttccatatgacctcatgcatctccacctgctcccaggccagtaagggaaatagaaaaaccctgcccccaaataagaagggatggattccaaccccaactccagtagcttgggacaaatcaagcttcagtttcctggtctgtagaagagggataaggtacctttcacatagagatcatcctttccagcatgaggaactagccaccaactcttgcaggtctcaacccttttgtctgcctcttagacttctgctttccacacctggcactgctgtgctgtgcccaagttgtggtgctgacaaagcttggaagagcctgcaggtgctgctgcgtggcatagcccagacacagaagaggctggttcttacgatggcacccagtgagcactcccaagtctacagagtgatagccttccgtaacccaactctcctggactgccttgaatatcccctcccagtcaccttgtggcaagcccctgcccatctgggaaaataccccatcattcatgctactgccaacctggggagccagggctatgggagcagcttttttttcccccctagaaacgtttggaacaatctaaaagtttaaagctcgaaaacaattgtaataatgctaaagaaaaagtcatccaatctaaccacatcaatattgtcattcctgtattcacccgtccagaccttgttcacactctcacatgtttagagttgcaatcgtaatgtacagatggttttataatctgatttgttttcctcttaacgttagaccacaaatagtgctcgctttctatgtagtttggtaattatcattttagaagactctaccagactgtgtattcattgaagtcagatgtggtaactgttaaattgctgtgtatctgatagctctttggcagtctatatgtttgtataatgaatgagagaataagtcatgttccttcaagatcatgtaccccaatttacttgccattactcaattgataaacatttaacttgtttccaatgtttagcaaatacatattttatagaacttcca

SEQ ID NO: 5623 - DNA, 559 bp, Homo sapiens
  source 1..559: mol_type = unassigned DNA
gcttttgtcctgtggccttctggccaaaggcagggaaaggtggccaaacactgagaccaagaacaaagaaagaaaactgctggtggacttcttccaccatgagcaggccaccaagcccgcagcactgcactgcagcccccagctctgtcctggggttgggggaggtgaggaggggcaaggtggggagcacacagagcacccgctgtcctcggaacaccacagcgactagaggccttcaccatggatcagttccctgaatcagtgacagaaaactttgagtacgatgatttggctgaggcctgttatattggggacatcgtggtctttgggactgtgttcctgtccatattctactccgtcatctttgccattggcctggtgggaaatttgttggtagtgtttgccctcaccaacagcaagaagcccaagagtgtcaccgacatttacctcctgaacctggccttgtctgatctgctgtttgtagccactttgcccttctggactcactatttgataaatgaaaagggcctccacaatgccatgtgcaaattcactaccg

SEQ ID NO: 5624 - DNA, 699 bp, Homo sapiens
  source 1..699: mol_type = unassigned DNA
actttgaggagaagagctgtgtgtgccccagtgtggtccagtgagtactctgggctccctctcgtgggcagggaagctgagggccccatgagctctcccagcttcctgaaggctccccattaatgagagctgactgtgctgtgctttgctgactgcagggcctgctccctgccccccacctccaggttggggccttcaccatggatcagttccctgaatcagtgacagaaaactttgagtacgatgatttggctgaggcctgttatattggggacatcgtggtctttgggactgtgttcctgtccatattctactccgtcatctttgccattggcctggtgggaaatttgttggtagtgtttgccctcaccaacagcaagaagcccaagagtgtcaccgacatttacctcctgaacctggccttgtctgatctgctgtttgtagccactttgcccttctggactcactatttgataaatgaaaagggcctccacaatgccatgtgcaaattcactaccgccttcttcttcatcggcttttttggaagcatattcttcatcaccgtcatcagcattgataggtacctggccatcgtcctggccgccaactccatgaacaaccggaccgtgcagcatggcgtcaccatcagcctaggcgtctgggcagcagccattttggtggcagcaccccagttcatgt

SEQ ID NO: 5625 - DNA, 3040 bp, Homo sapiens
  source 1..3040: mol_type = unassigned DNA
atggcaagtgggaaggccttcaccatggatcagttccctgaatcagtgacagaaaactttgagtacgatgatttggctgaggcctgttatattggggacatcgtggtctttgggactgtgttcctgtccatattctactccgtcatctttgccattggcctggtgggaaatttgttggtagtgtttgccctcaccaacagcaagaagcccaagagtgtcaccgacatttacctcctgaacctggccttgtctgatctgctgtttgtagccactttgcccttctggactcactatttgataaatgaaaagggcctccacaatgccatgtgcaaattcactaccgccttcttcttcatcggcttttttggaagcatattcttcatcaccgtcatcagcattgataggtacctggccatcgtcctggccgccaactccatgaacaaccggaccgtgcagcatggcgtcaccatcagcctaggcgtctgggcagcagccattttggtggcagcaccccagttcatgttcacaaagcagaaagaaaatgaatgccttggtgactaccccgaggtcctccaggaaatctggcccgtgctccgcaatgtggaaacaaattttcttggcttcctactccccctgctcattatgagttattgctacttcagaatcatccagacgctgttttcctgcaagaaccacaagaaagccaaagccattaaactgatccttctggtggtcatcgtgtttttcctcttctggacaccctacaacgttatgattttcctggagacgcttaagctctatgacttctttcccagttgtgacatgaggaaggatctgaggctggccctcagtgtgactgagacggttgcatttagccattgttgcctgaatcctctcatctatgcatttgctggggagaagttcagaagatacctttaccacctgtatgggaaatgcctggctgtcctgtgtgggcgctcagtccacgttgatttctcctcatctgaatcacaaaggagcaggcatggaagtgttctgagcagcaattttacttaccacacgagtgatggagatgcattgctccttctctgaagggaatcccaaagccttgtgtctacagagaacctggagttcctgaacctgatgctgactagtgaggaaagatttttgttgttatttcttacaggcacaaaatgatggacccaatgcacacaaaacaaccctagagtgttgttgagaattgtgctcaaaatttgaagaatgaacaaattgaactctttgaatgacaaagagtagacatttctcttactgcaaatgtcatcagaactttttggtttgcagatgacaaaaattcaactcagactagtttagttaaatgagggtggtgaatattgttcatattgtggcacaagcaaaagggtgtctgagccctcaaagtgaggggaaaccagggcctgagccaagctagaattccctctctctgactctcaaatcttttagtcattatagatcccccagactttacatgacacagctttatcaccagagagggactgacacccatgtttctctggccccaagggcaaaattcccagggaagtgctctgataggccaagtttgtatcaggtgcccatccctggaaggtgctgttatccatggggaagggatatataagatggaagcttccagtccaatctcatggagaagcagaaatacatatttccaagaagttggatgggtgggtactattctgattacacaaaacaaatgccacacatcacccttaccatgtgcctgatccagcctctcccctgattacaccagcctcgtcttcattaagccctcttccatcatgtccccaaacctgcaagggctccccactgcctactgcatcgagtcaaaactcaaatgcttggcttctcatacgtccaccatggggtcctaccaatagattccccattgcctcctccttcccaaaggactccacccatcctatcagcctgtctcttccatatgacctcatgcatctccacctgctcccaggccagtaagggaaatagaaaaaccctgcccccaaataagaagggatggattccaaccccaactccagtagcttgggacaaatcaagcttcagtttcctggtctgtagaagagggataaggtacctttcacatagagatcatcctttccagcatgaggaactagccaccaactcttgcaggtctcaacccttttgtctgcctcttagacttctgctttccacacctggcactgctgtgctgtgcccaagttgtggtgctgacaaagcttggaagagcctgcaggtgctgctgcgtggcatagcccagacacagaagaggctggttcttacgatggcacccagtgagcactcccaagtctacagagtgatagccttccgtaacccaactctcctggactgccttgaatatcccctcccagtcaccttgtggcaagcccctgcccatctgggaaaataccccatcattcatgctactgccaacctggggagccagggctatgggagcagcttttttttcccccctagaaacgtttggaacaatctaaaagtttaaagctcgaaaacaattgtaataatgctaaagaaaaagtcatccaatctaaccacatcaatattgtcattcctgtattcacccgtccagaccttgttcacactctcacatgtttagagttgcaatcgtaatgtacagatggttttataatctgatttgttttcctcttaacgttagaccacaaatagtgctcgctttctatgtagtttggtaattatcattttagaagactctaccagactgtgtattcattgaagtcagatgtggtaactgttaaattgctgtgtatctgatagctctttggcagtctatatgtttgtataatgaatgagagaataagtcatgttccttcaagatcatgtaccccaatttacttgccattactcaattgataaacatttaacttgtttccaatgtttagcaaatacatattttatagaacttcca

SEQ ID NO: 5626 - DNA, 3255 bp, Homo sapiens
  source 1..3255: mol_type = unassigned DNA
gcttttgtcctgtggccttctggccaaaggcagggaaaggtggccaaacactgagaccaagaacaaagaaagaaaactgctggtggacttcttccaccatgagcaggccaccaagcccgcagcactgcactgcagcccccagctctgtcctggggttgggggaggtgaggaggggcaaggtggggagcacacagagcacccgctgtcctcggaacaccacagcgactagaggccttcaccatggatcagttccctgaatcagtgacagaaaactttgagtacgatgatttggctgaggcctgttatattggggacatcgtggtctttgggactgtgttcctgtccatattctactccgtcatctttgccattggcctggtgggaaatttgttggtagtgtttgccctcaccaacagcaagaagcccaagagtgtcaccgacatttacctcctgaacctggccttgtctgatctgctgtttgtagccactttgcccttctggactcactatttgataaatgaaaagggcctccacaatgccatgtgcaaattcactaccgccttcttcttcatcggcttttttggaagcatattcttcatcaccgtcatcagcattgataggtacctggccatcgtcctggccgccaactccatgaacaaccggaccgtgcagcatggcgtcaccatcagcctaggcgtctgggcagcagccattttggtggcagcaccccagttcatgttcacaaagcagaaagaaaatgaatgccttggtgactaccccgaggtcctccaggaaatctggcccgtgctccgcaatgtggaaacaaattttcttggcttcctactccccctgctcattatgagttattgctacttcagaatcatccagacgctgttttcctgcaagaaccacaagaaagccaaagccattaaactgatccttctggtggtcatcgtgtttttcctcttctggacaccctacaacgttatgattttcctggagacgcttaagctctatgacttctttcccagttgtgacatgaggaaggatctgaggctggccctcagtgtgactgagacggttgcatttagccattgttgcctgaatcctctcatctatgcatttgctggggagaagttcagaagatacctttaccacctgtatgggaaatgcctggctgtcctgtgtgggcgctcagtccacgttgatttctcctcatctgaatcacaaaggagcaggcatggaagtgttctgagcagcaattttacttaccacacgagtgatggagatgcattgctccttctctgaagggaatcccaaagccttgtgtctacagagaacctggagttcctgaacctgatgctgactagtgaggaaagatttttgttgttatttcttacaggcacaaaatgatggacccaatgcacacaaaacaaccctagagtgttgttgagaattgtgctcaaaatttgaagaatgaacaaattgaactctttgaatgacaaagagtagacatttctcttactgcaaatgtcatcagaactttttggtttgcagatgacaaaaattcaactcagactagtttagttaaatgagggtggtgaatattgttcatattgtggcacaagcaaaagggtgtctgagccctcaaagtgaggggaaaccagggcctgagccaagctagaattccctctctctgactctcaaatcttttagtcattatagatcccccagactttacatgacacagctttatcaccagagagggactgacacccatgtttctctggccccaagggcaaaattcccagggaagtgctctgataggccaagtttgtatcaggtgcccatccctggaaggtgctgttatccatggggaagggatatataagatggaagcttccagtccaatctcatggagaagcagaaatacatatttccaagaagttggatgggtgggtactattctgattacacaaaacaaatgccacacatcacccttaccatgtgcctgatccagcctctcccctgattacaccagcctcgtcttcattaagccctcttccatcatgtccccaaacctgcaagggctccccactgcctactgcatcgagtcaaaactcaaatgcttggcttctcatacgtccaccatggggtcctaccaatagattccccattgcctcctccttcccaaaggactccacccatcctatcagcctgtctcttccatatgacctcatgcatctccacctgctcccaggccagtaagggaaatagaaaaaccctgcccccaaataagaagggatggattccaaccccaactccagtagcttgggacaaatcaagcttcagtttcctggtctgtagaagagggataaggtacctttcacatagagatcatcctttccagcatgaggaactagccaccaactcttgcaggtctcaacccttttgtctgcctcttagacttctgctttccacacctggcactgctgtgctgtgcccaagttgtggtgctgacaaagcttggaagagcctgcaggtgctgctgcgtggcatagcccagacacagaagaggctggttcttacgatggcacccagtgagcactcccaagtctacagagtgatagccttccgtaacccaactctcctggactgccttgaatatcccctcccagtcaccttgtggcaagcccctgcccatctgggaaaataccccatcattcatgctactgccaacctggggagccagggctatgggagcagcttttttttcccccctagaaacgtttggaacaatctaaaagtttaaagctcgaaaacaattgtaataatgctaaagaaaaagtcatccaatctaaccacatcaatattgtcattcctgtattcacccgtccagaccttgttcacactctcacatgtttagagttgcaatcgtaatgtacagatggttttataatctgatttgttttcctcttaacgttagaccacaaatagtgctcgctttctatgtagtttggtaattatcattttagaagactctaccagactgtgtattcattgaagtcagatgtggtaactgttaaattgctgtgtatctgatagctctttggcagtctatatgtttgtataatgaatgagagaataagtcatgttccttcaagatcatgtaccccaatttacttgccattactcaattgataaacatttaacttgtttccaatgtttagcaaatacatattttatagaacttcc

SEQ ID NO: 5627 - DNA, 3215 bp, Homo sapiens
  source 1..3215: mol_type = unassigned DNA
actttgaggagaagagctgtgtgtgccccagtgtggtccagtgagtactctgggctccctctcgtgggcagggaagctgagggccccatgagctctcccagcttcctgaaggctccccattaatgagagctgactgtgctgtgctttgctgactgcagggcctgctccctgccccccacctccaggttggggccttcaccatggatcagttccctgaatcagtgacagaaaactttgagtacgatgatttggctgaggcctgttatattggggacatcgtggtctttgggactgtgttcctgtccatattctactccgtcatctttgccattggcctggtgggaaatttgttggtagtgtttgccctcaccaacagcaagaagcccaagagtgtcaccgacatttacctcctgaacctggccttgtctgatctgctgtttgtagccactttgcccttctggactcactatttgataaatgaaaagggcctccacaatgccatgtgcaaattcactaccgccttcttcttcatcggcttttttggaagcatattcttcatcaccgtcatcagcattgataggtacctggccatcgtcctggccgccaactccatgaacaaccggaccgtgcagcatggcgtcaccatcagcctaggcgtctgggcagcagccattttggtggcagcaccccagttcatgttcacaaagcagaaagaaaatgaatgccttggtgactaccccgaggtcctccaggaaatctggcccgtgctccgcaatgtggaaacaaattttcttggcttcctactccccctgctcattatgagttattgctacttcagaatcatccagacgctgttttcctgcaagaaccacaagaaagccaaagccattaaactgatccttctggtggtcatcgtgtttttcctcttctggacaccctacaacgttatgattttcctggagacgcttaagctctatgacttctttcccagttgtgacatgaggaaggatctgaggctggccctcagtgtgactgagacggttgcatttagccattgttgcctgaatcctctcatctatgcatttgctggggagaagttcagaagatacctttaccacctgtatgggaaatgcctggctgtcctgtgtgggcgctcagtccacgttgatttctcctcatctgaatcacaaaggagcaggcatggaagtgttctgagcagcaattttacttaccacacgagtgatggagatgcattgctccttctctgaagggaatcccaaagccttgtgtctacagagaacctggagttcctgaacctgatgctgactagtgaggaaagatttttgttgttatttcttacaggcacaaaatgatggacccaatgcacacaaaacaaccctagagtgttgttgagaattgtgctcaaaatttgaagaatgaacaaattgaactctttgaatgacaaagagtagacatttctcttactgcaaatgtcatcagaactttttggtttgcagatgacaaaaattcaactcagactagtttagttaaatgagggtggtgaatattgttcatattgtggcacaagcaaaagggtgtctgagccctcaaagtgaggggaaaccagggcctgagccaagctagaattccctctctctgactctcaaatcttttagtcattatagatcccccagactttacatgacacagctttatcaccagagagggactgacacccatgtttctctggccccaagggcaaaattcccagggaagtgctctgataggccaagtttgtatcaggtgcccatccctggaaggtgctgttatccatggggaagggatatataagatggaagcttccagtccaatctcatggagaagcagaaatacatatttccaagaagttggatgggtgggtactattctgattacacaaaacaaatgccacacatcacccttaccatgtgcctgatccagcctctcccctgattacaccagcctcgtcttcattaagccctcttccatcatgtccccaaacctgcaagggctccccactgcctactgcatcgagtcaaaactcaaatgcttggcttctcatacgtccaccatggggtcctaccaatagattccccattgcctcctccttcccaaaggactccacccatcctatcagcctgtctcttccatatgacctcatgcatctccacctgctcccaggccagtaagggaaatagaaaaaccctgcccccaaataagaagggatggattccaaccccaactccagtagcttgggacaaatcaagcttcagtttcctggtctgtagaagagggataaggtacctttcacatagagatcatcctttccagcatgaggaactagccaccaactcttgcaggtctcaacccttttgtctgcctcttagacttctgctttccacacctggcactgctgtgctgtgcccaagttgtggtgctgacaaagcttggaagagcctgcaggtgctgctgcgtggcatagcccagacacagaagaggctggttcttacgatggcacccagtgagcactcccaagtctacagagtgatagccttccgtaacccaactctcctggactgccttgaatatcccctcccagtcaccttgtggcaagcccctgcccatctgggaaaataccccatcattcatgctactgccaacctggggagccagggctatgggagcagcttttttttcccccctagaaacgtttggaacaatctaaaagtttaaagctcgaaaacaattgtaataatgctaaagaaaaagtcatccaatctaaccacatcaatattgtcattcctgtattcacccgtccagaccttgttcacactctcacatgtttagagttgcaatcgtaatgtacagatggttttataatctgatttgttttcctcttaacgttagaccacaaatagtgctcgctttctatgtagtttggtaattatcattttagaagactctaccagactgtgtattcattgaagtcagatgtggtaactgttaaattgctgtgtatctgatagctctttggcagtctatatgtttgtataatgaatgagagaataagtcatgttccttcaagatcatgtaccccaatttacttgccattactcaattgataaacatttaacttgtttccaatgtttagcaaatacatattttatagaacttcc

SEQ ID NO: 5628 - DNA, 1097 bp, Homo sapiens
  source 1..1097: mol_type = unassigned DNA
gccgcaggcacctcctcgccagctcttccgctcctctcacagccgccagacccgcctgctgagccccatggcccgcgctgctctctccgccgcccccagcaatccccggctcctgcgagtggcactgctgctcctgctcctggtagccgctggccggcgcgcagcaggagcgtccgtggccactgaactgcgctgccagtgcttgcagaccctgcagggaattcaccccaagaacatccaaagtgtgaacgtgaagtcccccggaccccactgcgcccaaaccgaagtcatagccacactcaagaatgggcggaaagcttgcctcaatcctgcatcccccatagttaagaaaatcatcgaaaagatgctgaacagtgacaaatccaactgaccagaagggaggaggaagctcactggtggctgttcctgaaggaggccctgcccttataggaacagaagaggaaagagagacacagctgcagaggccacctggattgtgcctaatgtgtttgagcatcgcttaggagaagtcttctatttatttatttattcattagttttgaagattctatgttaatattttaggtgtaaaataattaagggtatgattaactctacctgcacactgtcctattatattcattctttttgaaatgtcaaccccaagttagttcaatctggattcatatttaatttgaaggtagaatgttttcaaatgttctccagtcattatgttaatatttctgaggagcctgcaacatgccagccactgtgatagaggctggcggatccaagcaaatggccaatgagatcattgtgaaggcaggggaatgtatgtgcacatctgttttgtaactgtttagatgaatgtcagttgttatttattgaaatgatttcacagtgtgtggtcaacatttctcatgttgaaactttaagaactaaaatgttctaaatatcccttggacattttatgtctttcttgtaaggcatactgccttgtttaatggtagttttacagtgtttctggcttagaacaaaggggcttaattattgatgttttcatagagaatataaaaataaagcacttatagaaaaaa

SEQ ID NO: 5629 - DNA, 1606 bp, Homo sapiens
  source 1..1606: mol_type = unassigned DNA
agagaacaaaacagaaactcttggaagcaggaaaggtgcatgactcaaagagggaaattcctgtgccataaaaggattgctggtgtataaaatgctctatatatgccaattatcaatttcctttcatgttcagcatttctactccttccaagaagagcagcaaagctgaagtagcagcagcagcaccagcagcaacagcaaaaaacaaacatgagtgtgaagggcatggctatagccttggctgtgatattgtgtgctacagttgttcaaggcttccccatgttcaaaagaggacgctgtctttgcataggccctggggtaaaagcagtgaaagtggcagatattgagaaagcctccataatgtacccaagtaacaactgtgacaaaatagaagtgattattaccctgaaagaaaataaaggacaacgatgcctaaatcccaaatcgaagcaagcaaggcttataatcaaaaaagttgaaagaaagaatttttaaaaatatcaaaacatatgaagtcctggaaaagagcatctgaaaaacctagaacaagtttaactgtgactactgaaatgacaagaattctacagtaggaaactgagacttttctatggttttgtgactttcaacttttgtacagttatgtgaaggatgaaaggtgggtgaaaggaccaaaaacagaaatacagtcttcctgaatgaatgacaatcagaattccactgcccaaaggagtccaacaattaaatggatttctaggaaaagctaccttaagaaaggctggttaccatcggagtttacaaagtgctttcacgttcttacttgttgcattatacattcatgcatttctaggctagagaaccttctagatttgatgcttacaactattctgttgtgactatgagaacatttctgtctctagaagtcatctgtctgtattgatctttatgctatattactatctgtggttacggtggagacattgacattattactggagtcaagcccttataagtcaaaagcatctatgtgtcgtaaaacattcctcaaacattttttcatgcaaatacacacttctttccccaaacatcatgtagcacatcaatatgtagggagacattcttatgcatcatttggtttgttttataaccaattcattaaatgtaattcataaaatgtactatgaaaaaaattatacgctatgggatactggcaaaagtgcacatatttcataaccaaattagtagcaccagtcttaatttgatgtttttcaacttttattcattgagatgttttgaagcaattaggatatgtgtgtttactgtactttttgttttgatccgtttgtataaatgatagcaatatcttggacacatctgaaatacaaaatgtttttgtctaccaaagaaaaatgttgaaaaataagcaaatgtatacctagcaatcacttttactttttgtaattctgtctcttagaaaaatacataatctaatcaatttctttgttcatgcctatatactgtaaaatttaggtatactcaagactagtttaaagaatcaaagtcatttttttctctaataaactaccacaacctttcttttttaaaaaaa

SEQ ID NO: 5630 - DNA, 767 bp, Homo sapiens
  source 1..767: mol_type = unassigned DNA
aagacatcaagacttaaacgaaggaaaggattcaaaagaggagaggaaagtgcattttcatgctagaaaaaccatattatacaaatataaaaaatagggatctctcaggctcaccagatgaggggatgctgtgaaagaaggtaatcttcctcatgtgatgtcagagagtatagagccagaacaagtcacaatcctgaagacacgtctgaccccacacatctacaaagccagcagaaatcaggcagactaacttctacaataaggcagaaagtttgaaatttggaacacacggaaaggacttgcatttctactccttccaagaagagcagcaaagctgaagtagcagcagcagcaccagcagcaacagcaaaaaacaaacatgagtgtgaagggcatggctatagccttggctgtgatattgtgtgctacagttgttcaaggcttccccatgttcaaaagaggacgctgtctttgcataggccctggggtaaaagcagtgaaagtggcagatattgagaaagcctccataatgtacccaagtaacaactgtgacaaaatagaagtgattattaccctgaaagaaaataaaggacaacgatgcctaaatcccaaatcgaagcaagcaaggcttataatcaaaaaagttgaaagaaagaatttttaaaaatatcaaaacatatgaagtcctggaaaagagcatctgaaaaacctagaacaagtttaactgtgactactgaaatgacaagaattctacagtaggaaactga

SEQ ID NO: 5631 - DNA, 1971 bp, Homo sapiens
  source 1..1971: mol_type = unassigned DNA
aatgtgtgcgcgctgtggtatgggtgtgcaagtgtgcgaaggcggcgtgttgtgtgagcgagagggtagcggatgtgtgtgtgcgtgtgcgcgcgtggctccgggtgtgcgccgctgcgatagcgggtcctttcccggggcgggcgacgggcgggctgggaaggtctcctcccctcaccacattgagaaatctcagtgagtcaccgagtggttctgcatattaatgagctcgctcgctgcgagggcaggagcggatttaaaagaggccagggcgggcggagggaggctgtggagagagcgcggagacaagcgcagagcgcagcgcacggccacagacagccctgggcatccaccgacggcgcagccggagccagcagagccggaaggcgcgccccgggcagagaaagccgagcagagctgggtggcgtctccgggccgccgctccgacgggccagcgccctccccatgtccctgctcccacgccgcgcccctccggtcagcatgaggctcctggcggccgcgctgctcctgctgctgctggcgctgtacaccgcgcgtgtggacgggtccaaatgcaagtgctcccggaagggacccaagatccgctacagcgacgtgaagaagctggaaatgaagccaaagtacccgcactgcgaggagaagatggttatcatcaccaccaagagcgtgtccaggtaccgaggtcaggagcactgcctgcaccccaagctgcagagcaccaagcgcttcatcaagtggtacaacgcctggaacgagaagcgcagggtctacgaagaatagggtgaaaaacctcagaagggaaaactccaaaccagttgggagacttgtgcaaaggactttgcagattaaaaaaaaaaaaaaaaaaaaaaaaaaaaaaaaaaaaaaaaaaagcctttctttctcacaggcataagacacaaattatatattgttatgaagcactttttaccaacggtcagtttttacattttatagctgcgtgcgaaaggcttccagatgggagacccatctctcttgtgctccagacttcatcacaggctgctttttatcaaaaaggggaaaactcatgcctttcctttttaaaaaatgcttttttgtatttgtccatacgtcactatacatctgagctttataagcgcccgggaggaacaatgagcttggtggacacatttcattgcagtgttgctccattcctagcttgggaagcttccgcttagaggtcctggcgcctcggcacagctgccacgggctctcctgggcttatggccggtcacagcctcagtgtgactccacagtggcccctgtagccgggcaagcaggagcaggtctctctgcatctgttctctgaggaactcaagtttggttgccagaaaaatgtgcttcattcccccctggttaatttttacacaccctaggaaacatttccaagatcctgtgatggcgagacaaatgatccttaaagaaggtgtggggtctttcccaacctgaggatttctgaaaggttcacaggttcaatatttaatgcttcagaagcatgtgaggttcccaacactgtcagcaaaaaccttaggagaaaacttaaaaatatatgaatacatgcgcaatacacagctacagacacacattctgttgacaagggaaaaccttcaaagcatgtttctttccctcaccacaacagaacatgcagtactaaagcaatatatttgtgattccccatgtaattcttcaatgttaaacagtgcagtcctctttcgaaagctaagatgaccatgcgccctttcctctgtacatatacccttaagaacgccccctccacacactgccccccagtatatgccgcattgtactgctgtgttatatgctatgtacatgtcagaaaccattagcattgcatgcaggtttcatattctttctaagatggaaagtaataaaatatatttgaaatgtacc

SEQ ID NO: 5632 - DNA, 1753 bp, Homo sapiens
  source 1..1753: mol_type = unassigned DNA
gcatattaatgagctcgctcgctgcgagggcaggagcggatttaaaagaggccagggcgggcggagggaggctgtggagagagcgcggagacaagcgcagagcgcagcgcacggccacagacagccctgggcatccaccgacggcgcagccggagccagcagagccggaaggcgcgccccgggcagagaaagccgagcagagctgggtggcgtctccgggccgccgctccgacgggccagcgccctccccatgtccctgctcccacgccgcgcccctccggtcagcatgaggctcctggcggccgcgctgctcctgctgctgctggcgctgtacaccgcgcgtgtggacgggtccaaatgcaagtgctcccggaagggacccaagatccgctacagcgacgtgaagaagctggaaatgaagccaaagtacccgcactgcgaggagaagatggttatcatcaccaccaagagcgtgtccaggtaccgaggtcaggagcactgcctgcaccccaagctgcagagcaccaagcgcttcatcaagtggtacaacgcctggaacgagaagcgcagggtctacgaagaatagggtgaaaaacctcagaagggaaaactccaaaccagttgggagacttgtgcaaaggactttgcagattaaaaaaaaaaaaaaaaaaaaaaaaaaaaaaaaaaaaaaaaaaagcctttctttctcacaggcataagacacaaattatatattgttatgaagcactttttaccaacggtcagtttttacattttatagctgcgtgcgaaaggcttccagatgggagacccatctctcttgtgctccagacttcatcacaggctgctttttatcaaaaaggggaaaactcatgcctttcctttttaaaaaatgcttttttgtatttgtccatacgtcactatacatctgagctttataagcgcccgggaggaacaatgagcttggtggacacatttcattgcagtgttgctccattcctagcttgggaagcttccgcttagaggtcctggcgcctcggcacagctgccacgggctctcctgggcttatggccggtcacagcctcagtgtgactccacagtggcccctgtagccgggcaagcaggagcaggtctctctgcatctgttctctgaggaactcaagtttggttgccagaaaaatgtgcttcattcccccctggttaatttttacacaccctaggaaacatttccaagatcctgtgatggcgagacaaatgatccttaaagaaggtgtggggtctttcccaacctgaggatttctgaaaggttcacaggttcaatatttaatgcttcagaagcatgtgaggttcccaacactgtcagcaaaaaccttaggagaaaacttaaaaatatatgaatacatgcgcaatacacagctacagacacacattctgttgacaagggaaaaccttcaaagcatgtttctttccctcaccacaacagaacatgcagtactaaagcaatatatttgtgattccccatgtaattcttcaatgttaaacagtgcagtcctctttcgaaagctaagatgaccatgcgccctttcctctgtacatatacccttaagaacgccccctccacacactgccccccagtatatgccgcattgtactgctgtgttatatgctatgtacatgtcagaaaccattagcattgcatgcaggtttcatattctttctaagatggaaagtaataaaatatatttgaaatgt

SEQ ID NO: 5633 - DNA, 2324 bp, Homo sapiens
  source 1..2324: mol_type = unassigned DNA
ggtgcgtccgcgggtggctgccccgcaggtgcgcgcggccggggctggcggcgactctctccaccgggccgcccgggaggctcatgcagcgcggctgggtcccgcggcgcccggatcggggaagtgaaagtgcctcggaggaggagggccggtccggcagtgcagccgcctcacaggtcggcggacgggccaggcgggcggcctcctgaaccgaaccgaatcggctcctcgggccgtcgtcctcccgcccctcctcgcccgccgccggagttttctttcggtttcttccaagattcctggccttccctcgacggagccgggcccagtgcgggggcgcagggcgcgggagctccacctcctcggctttccctgcgtccagaggctggcatggcgcgggccgagtactgagcgcacggtcggggcacagcagggccggggggtgcagctggctcgcgcctcctctccggccgccgtctcctccggtccccggcgaaagccattgagacaccagctggacgtcacgcgccggagcatgtctgggagtcagagcgaggtggctccatccccgcagagtccgcggagccccgagatgggacgggacttgcggcccgggtcccgcgtgctcctgctcctgcttctgctcctgctggtgtacctgactcagccaggcaatggcaacgagggcagcgtcactggaagttgttattgtggtaaaagaatttcttccgactccccgccatcggttcagttcatgaatcgtctccggaaacacctgagagcttaccatcggtgtctatactacacgaggttccagctcctttcctggagcgtgtgtgggggcaacaaggacccatgggttcaggaattgatgagctgtcttgatctcaaagaatgtggacatgcttactcggggattgtggcccaccagaagcatttacttcctaccagccccccaatttctcaggcctcagagggggcatcttcagatatccacacccctgcccagatgctcctgtccaccttgcagtccactcagcgccccaccctcccagtaggatcactgtcctcggacaaagagctcactcgtcccaatgaaaccaccattcacactgcgggccacagtctggcagctgggcctgaggctggggagaaccagaagcagccggaaaaaaatgctggtcccacagccaggacatcagccacagtgccagtcctgtgcctcctggccatcatcttcatcctcaccgcagccctttcctatgtgctgtgcaagaggaggagggggcagtcaccgcagtcctctccagatctgccggttcattatatacctgtggcacctgactctaatacctgagccaagaatggaagcttgtgaggagacggactctatgttgcccaggctgttatggaactcctgagtcaagtgatcctcccaccttggcctctgaaggtgcgaggattataggcgtcacctaccacatccagcctacacgtatttgttaatatctaacataggactaaccagccactgccctctcttaggcccctcatttaaaaacggttatactataaaatctgcttttcacactgggtgataataacttggacaaattctatgtgtattttgttttgttttgctttgctttgttttgagacggagtctcgctctgtcatccaggctggagtgcagtggcatgatctcggctcactgcaacccccatctcccaggttcaagcgattctcctgcctcctcctgagtagctgggactacaggtgctcaccaccacacccggctaattttttgtatttttagtagagacggggtttcaccatgttgaccaggctggtctcgaactcctgacctggtgatctgcccacccaggcctcccaaagtgctgggattaaaggtgtgagccaccatgcctggccctatgtgtgttttttaactactaaaaattatttttgtaatgattgagtcttctttatggaaacaactggcctcagcccttgcgcccttactgtgattcctggcttcattttttgctgatggttccccctcgtcccaaatctctctcccagtacaccagttgttcctcccccacctcagccctctcctgcatcctcctgtacccgcagcgaaggcctgggctttcccaccctccctccttagcaggtgccgtgctgggacaccatacgggttggtttcacctcctcagtcccttgcctaccccagtgagagtctgatcttgtttttattgttattgcttttattattattgcttttattatcattaaaactctagttcttgttttgtctctccgaa

SEQ ID NO: 5634 - DNA, 1668 bp, Homo sapiens
  source 1..1668: mol_type = unassigned DNA
tccgcgggtggctgccccgcaggtgcgcgcggccggggctggcggcgactctctccaccgggccgcccgggaggctcatgcagcgcggctgggtcccgcggcgcccggatcggggaagtgaaagtgcctcggaggaggagggccggtccggcagtgcagccgcctcacaggtcggcggacgggccaggcgggcggcctcctgaaccgaaccgaatcggctcctcgggccgtcgtcctcccgcccctcctcgcccgccgccggagttttctttcggtttcttccaagattcctggccttccctcgacggagccgggcccagtgcgggggcgcagggcgcgggagctccacctcctcggctttccctgcgtccagaggctggcatggcgcgggccgagtactgagcgcacggtcggggcacagcagggccggggggtgcagctggctcgcgcctcctctccggccgccgtctcctccggtccccggcgaaagccattgagacaccagctggacgtcacgcgccggagcatgtctgggagtcagagcgaggtggctccatccccgcagagtccgcggagccccgagatgggacgggacttgcggcccgggtcccgcgtgctcctgctcctgcttctgctcctgctggtgtacctgactcagccaggcaatggcaacgagggcagcgtcactggaagttgttattgtggtaaaagaatttcttccgactccccgccatcggttcagttcatgaatcgtctccggaaacacctgagagcttaccatcggtgtctatactacacgaggttccagctcctttcctggagcgtgtgtgggggcaacaaggacccatgggttcaggaattgatgagctgtcttgatctcaaagaatgtggacatgcttactcggggattgtggcccaccagaagcatttacttcctaccagccccccaatttctcaggcctcagagggggcatcttcagatatccacacccctgcccagatgctcctgtccaccttgcagtccactcagcgccccaccctcccagtaggatcactgtcctcggacaaagagctcactcgtcccaatgaaaccaccattcacactgcgggccacagtctggcagctgggcctgaggctggggagaaccagaagcagccggaaaaaaatgctggtcccacagccaggacatcagccacagtgccagtcctgtgcctcctggccatcatcttcatcctcaccgcagccctttcctatgtgctgtgcaagaggaggagggggcagtcaccgcagtcctctccagatctgccggttcattatatacctgtggcacctgactctaatacctgagccaagaatggaagcttgtgagggtaaactgtggcttattcttacaaaaagtgtaataaaggagactgacccctgacaacatggtaggcactgtatacatacttgtttttgttttttgttttttagagacggactctatgttgcccaggctgttatggaactcctgagtcaagtgatcctcccaccttggcctctgaaggtgcgaggattataggcgtcacctaccacatccagcctacacgtatttgttaatatctaacataggactaaccagccactgccctctcttaggcccctcatttaaaaacggttatactata
